United States Patent Application Publication US 2021/0107993 A1 - sequence listing, part 2

SEQ ID NO: 4381 - protein, 208 aa, Homo Sapiens
MHYPTALLFLILANGAQAFRICAFNAQRLTLAKVAREQVMDTLVRILARCDIMVLQEVVDSSGSAIPLLLRELNRFDGSGPYSTLSSPQLGRSTYMETYVYFYRSHKTQVLSSYVYNDEDDVFAREPFVAQFSLPSNVLPSLVLVPLHTTPKAVEKELNALYDVFLEVSQHWQSKDVILLGDFNADCASLTKKRLDKLELRTEPGFHW

SEQ ID NO: 4382 - protein, 302 aa, Homo Sapiens
MHYPTALLFLILANGAQAFRICAFNAQRLTLAKVAREQVMDTLVRILARCDIMVLQEVVDSSGSAIPLLLRELNRFDGSGPYSTLSSPQLGRSTYMETYVYFYRSHKTQVLSSYVYNDEDDVFAREPFVAQFSLPSNVLPSLVLVPLHTTPKAVEKELNALYDVFLEVSQHWQSKDVILLGDFNADCASLTKKRLDKLELRTEPGFHWVIADGEDTTVRASTHCTYDRVVLHGERCRSLLHTAAAFDFPTSFQLTEEEALNISDHYPVEVELKLSQAHSVQPLSLTVLLLLSLLSPQLCPAA

SEQ ID NO: 4383 - protein, 302 aa, Homo Sapiens; identical to SEQ ID NO: 4382

SEQ ID NO: 4384 - protein, 302 aa, Homo Sapiens; identical to SEQ ID NO: 4382

SEQ ID NO: 4385 - protein, 302 aa, Homo Sapiens; identical to SEQ ID NO: 4382

SEQ ID NO: 4386 - protein, 302 aa, Homo Sapiens; identical to SEQ ID NO: 4382

SEQ ID NO: 4387 - protein, 302 aa, Homo Sapiens; identical to SEQ ID NO: 4382

SEQ ID NO: 4388 - protein, 278 aa, Homo Sapiens
MGGPRALLAALWALEAAGTAALRIGAFNIQSFGDSKVSDPACGSIIAKILAGYDLALVQEVRDPDLSAVSALMEQINSVSEHEYSFVSSQPLGRDQYKEMYLFVYRKDAVSVVDTYLYPDPEDVFSREPFVVKFSAPGTAQNLVLIPLHAAPHQAVAEIDALYDVYLDVIDKWGTDDMLFLGDFNADCSYVRAQDWAAIRLRSSEVFKWLIPDSADTTVGNSDCAYDRIVACGARLRRSLKPQSATVHDFQEEFGLDQTQALAISDHFPVEVTLKFHR

SEQ ID NO: 4389 - protein, 278 aa, Homo Sapiens; identical to SEQ ID NO: 4388

SEQ ID NO: 4390 - protein, 299 aa, Homo Sapiens
MGGPRALLAALWALEAAGTAALRIGAFNIQSFGDSKVSDPACGSIIAKILAGYDLALVQEVRDPDLSAVSALMEQINSVSEHEYSFVSSQPLGRDQYKEMYLFVYRKDAVSVVDTYLYPDPEDVFSREPFVVKFSAPGTGERAPPLPSRRALTPPPLPAAAQNLVLIPLHAAPHQAVAEIDALYDVYLDVIDKWGTDDMLFLGDFNADCSYVRAQDWAAIRLRSSEVFKWLIPDSADTTVGNSDCAYDRIVACGARLRRSLKPQSATVHDFQEEFGLDQTQALAISDHFPVEVTLKFHR

SEQ ID NO: 4391 - protein, 299 aa, Homo Sapiens; identical to SEQ ID NO: 4390

SEQ ID NO: 4392 - protein, 299 aa, Homo Sapiens; identical to SEQ ID NO: 4390

SEQ ID NO: 4393 - protein, 254 aa, Homo Sapiens
PRALLAALWALEAAGTAALRIGAFNIQSFGDSKVSDPACGSIIAKILAGYDLALVQEVRDPDLSAVSALMEQINSVSEHEYSFVSSQPLGRDQYKEMYLFVYRKDAVSVVDTYLYPDPEDVFSREPFVVKFSAPGTGERAPPLPSRRALTPPPLPAAAQNLVLIPLHAAPHQAVAEIDALYDVYLDVIDKWGTDDWAAIRLRSSEVFKWLIPDSADTTVGNSDCAYDRIVACGARLRRSLKPQSATVHDFQEEF

SEQ ID NO: 4394 - protein, 137 aa, Homo Sapiens
ADVFSREPFVVWFQSPHTAVKDFVIIPLHTTPETSVKEIDELVEVYTDVKHRWKAENFIFMGDFNAGCSYVPKKAWKNIRLRTDPRFVWLIGDQEDTTVKKSTNCAYDRPWMSATTFQLNLNYSLQGPSPTAKNLSL

SEQ ID NO: 4395 - protein, 275 aa, Homo Sapiens
MSRELAPLLLLLLSIHSALAMRICSFNVRSFGESKQEDKNAMDVIVKVIKRCDIILVMEIKDSNNRICPILMEKLNREKLVSVKRSYHYHDYQDGDADVFSREPFVVWFQSPHTAVKDFVIIPLHTTPETSVKEIDELVEVYTDVKHRWKAENFIFMGDFNAGCSYVPKKAWKNIRLRTDPRFVWLIGDQEDTTVKKSTNCAYDRIVLRGQEIVSSVVPKSNSVFDFQKAYKLTEEEALDVSDHFPVEFKLQSSRAFTNSKKSVTLRKKTKSKRS

SEQ ID NO: 4396 - protein, 100 aa, Homo Sapiens
MSRELAPLLLLLLSIHSALAMRICSFNVRSFGESKQEDKNAMDVIVKVIKRCDIILVMEIKDSNNRICPILMEKLNRNSRRGITYNYVISSRLGRNTYKE

SEQ ID NO: 4397 - protein, 158 aa, Homo Sapiens
MSRELAPLLLLLLSIHSALAMRICSFNVRSFGESKQEDKNAMDVIVKVIKRCDIILVMEIKDSNNRICPILMEKLNRNSRRGITYNYVISSRLGRNTYKEQYAFLYKEKLVSVKRSYHYHDYQDGDADVFSREPFVVWFQSPHTAVKDFVIIPLHTTP

SEQ ID NO: 4398 - protein, 305 aa, Homo Sapiens
MSRELAPLLLLLLSIHSALAMRICSFNVRSFGESKQEDKNAMDVIVKVIKRCDIILVMEIKDSNNRICPILMEKLNRNSRRGITYNYVISSRLGRNTYKEQYAFLYKEKLVSVKRSYHYHDYQDGDADVFSREPFVVWFQSPHTAVKDFVIIPLHTTPETSVKEIDELVEVYTDVKHRWKAENFIFMGDFNAGCSYVPKKAWKNIRLRTDPRFVWLIGDQEDTTVKKSTNCAYDRIVLRGQEIVSSVVPKSNSVFDFQKAYKLTEEEALDVSDHFPVEFKLQSSRAFTNSKKSVTLRKKTKSKRS

SEQ ID NO: 4399 - protein, 288 aa, Homo Sapiens
MSRELAPLLLLLLSIHSALAMRICSFNVRSFGESKQEDKNAMDVIVKVIKRCDIILVMEIKDSNNRICPILMEKLNRNSRRGITYNYVISSRLGRNTYKEQYAFLYKEKLVSVKRSYHYHDYQDGDADVFSREPFVVWFQSPHTAVKDFVIIPLHTTPETSVKEIDELVEVYTDVKHRWKAENFIFMGDFNAGCSYVPKKAWKNIRLRTDPRFVWLIGDQEDTTVKKSTNCAYDRIVLRGQEIVSSVVPKSNSVFDFQKAYKLTEEEVRLPSCLSMPLSWKDELAWAT

SEQ ID NO: 4400 - protein, 218 aa, Homo Sapiens
MIPLLLAALLCVPAGALTCYGDSGQPVDWFVVYKLPALRGSGEAAQRGLQYKYLDESSGGWRDGRALINSPEGAVGRSLQPLYRSNTSQLAFLLYNDQPPQPSKAQDSSMRGHTKGKQLTYTYPWVYNYQLEGIFAQEFPDLENVVKGHHVSQEPWNSSITLTSQAGAVFQSFAKFSKFGDDLYSGWLAAALGTNLQVQFWHKTVGILPSNCSDIWQV

SEQ ID NO: 4401 - protein, 360 aa, Homo Sapiens
MIPLLLAALLCVPAGALTCYGDSGQPVDWFVVYKLPALRGSGEAAQRGLQYKYLDESSGGWRDGRALINSPEGAVGRSLQPLYRSNTSQLAFLLYNDQPPQPSKAQDSSMRGHTKGVLLLDHDGGFWLVHSVPNFPPPASSAAYSWPHSACTYGQTLLCVSFPFAQFSKMGKQLTYTYPWVYNYQLEGIFAQEFPDLENVVKGHHVSQEPWNSSITLTSQAGAVFQSFAKFSKFGDDLYSGWLAAALGTNLQVQFWHKTVGILPSNCSDIWQVLNVNQIAFPGPAGPSFNSTEDHSKWCVSPKGPWTCVGDMNRNQGEEQRGGGTLCAQLPALWKAFQPLVKNYQPCNGMARKPSRAYKI

SEQ ID NO: 4402 - protein, 361 aa, Homo Sapiens
MKQKMMARLLRTSFALLFLGLFGVLGAATISCRNEEGKAVDWFTFYKLPKRQNKESGETGLEYLYLDSTTRSWRKSEQLMNDTKSVLGRTLQQLYEAYASKSNNTAYLIYNDGVPKPVNYSRKYGHTKGLLLWNRVQGFWLIHSIPQFPPIPEEGYDYPPTGRRNGQSGICITFKYNQYEAIDSQLLVCNPNVYSCSIPATFHQELIHMPQLCTRASSSEIPGRLLTTLQSAQGQKFLHFAKSDSFLDDIFAAWMAQRLKTHLLTETWQRKRQELPSNCSLPYHVYNIKAIKLSRHSYFSSYQDHAKWCISQKGTKNRWTCIGDLNRSPHQAFRSGGFICTQNWQIYQAFQGLVLYYESCK

SEQ ID NO: 4403 - protein, 153 aa, Homo Sapiens
MPQLCTRASSSEIPGRLLTTLQSAQGQKFLHFAKSDSFLDDIFAAWMAQRLKTHLLTETWQRKRQELPSNCSLPYHVYNIKAIKLSRHSYFSSYQDHAKWCISQKGTKNRWTCIGDLNRSPHQAFRSGGFICTQNWQIYQAFQGLVLYYESCK

SEQ ID NO: 4404 - protein, 107 aa, Homo Sapiens
MWSGWWLWPLVAVCTADFFRDEAERIMRDSPVIDGHNDLPWQLLDMFNNRLQDERANLTTLAGTHTNIPKLRAGFVGGQFWSVYTPCDTQNKDAVRRTLEQMDVVHR

SEQ ID NO: 4405 - protein, 111 aa, Homo Sapiens
MWSGWWLWPLVAVCTADFFRDEAERIMRDSPVIDGHNDLPWQLLDMFNNRLQDERANLTTLAGTHTNIPKLRAGFVGGQFWSVYTPCDTQNKDAVRRTLEQMDVVHRMCRM

SEQ ID NO: 4406 - protein, 411 aa, Homo Sapiens
MWSGWWLWPLVAVCTADFFRDEAERIMRDSPVIDGHNDLPWQLLDMFNNRLQDERANLTTLAGTHTNIPKLRAGFVGGQFWSVYTPCDTQNKDAVRRTLEQMDVVHRMCRMYPETFLYVTSSAGIRQAFREGKVASLIGVEGGHSIDSSLGVLRALYQLGMRYLTLTHSCNTPWADNWLVDTGDSEPQSQGLSPFGQRVVKELNRLGVLIDLAHVSVATMKATLQLSRAPVIFSHSSAYSVCASRRNVPDDVLRLVKQTDSLVMVNFYNNYISCTNKANLSQVADHLDHIKEVAGARAVGFGGDFDGVPRVPEGLEDVSKYPDLIAELLRRNWTEAEVKGALADNLLRVFEAVEQASNLTQAPEEEPIPLDQLGGSCRTHYGYSSGASSLHRHWGLLLASLAPLVLCLSLL

SEQ ID NO: 4407 - protein, 411 aa, Homo Sapiens; identical to SEQ ID NO: 4406

SEQ ID NO: 4408 - protein, 411 aa, Homo Sapiens; identical to SEQ ID NO: 4406

SEQ ID NO: 4409 - protein, 161 aa, Homo Sapiens
MKLQTLAVSVTALKFWSAYVPCQTQDRDALRLTLEQIDLIRRMCASYSELELVTSAKALNDTQKLACLIGVEGGHSLDNSLSILRTFYMLGVRYLTLTHTCNTPWAESSAKGVHSFYNNISGLTDFGEKVVAEMNRLGMMVDLSHVSDAVARRALEVSQAP

SEQ ID NO: 4410 - protein, 123 aa, Homo Sapiens
MQMIIIWALLDTEAESSAKGVHSFYNNISGLTDFGEKVVAEMNRLGMMVDLSHVSDAVARRALEVSQAPVIFSHSAARGVCNSARNVPDDILQLLKKNGGVVMVSLSMGVIQCNPSANVSTVA

SEQ ID NO: 4411 - protein, 114 aa, Homo Sapiens
MQPSGLEGPGTFGRWPLLSLLLLLLLLQPVTCAYTTPGPPRALTTLGAPRAHTMPGTYAPSTTLSSPSTQGLQEQARALMRDFPLVDGHNDLPLVLRQVYQKGLQDVNLRNFSY

SEQ ID NO: 4412 - protein, 137 aa, Homo Sapiens
MQPSGLEGPGTFGRWPLLSLLLLLLLLQPVTCAYTTPGPPRALTTLGAPRAHTMPGTYAPSTTLSSPSTQGLQEQARALMRDFPLVDGHNDLPLVLRQVYQKGLQDVNLRNFSYGQTSLDRLRDGLVGAQFWSAYVP

SEQ ID NO: 4413 - protein, 486 aa, Homo Sapiens
MQPSGLEGPGTFGRWPLLSLLLLLLLLQPVTCAYTTPGPPRALTTLGAPRAHTMPGTYAPSTTLSSPSTQGLQEQARALMRDFPLVDGHNDLPLVLRQVYQKGLQDVNLRNFSYGQTSLDRLRDGLVGAQFWSAYVPCQTQDRDALRLTLEQIDLIRRMCASYSELELVTSAKALNDTQKLACLIGVEGGHSLDNSLSILRTFYMLGVRYLTLTHTCNTPWAESSAKGVHSFYNNISGLTDFGEKVVAEMNRLGMMVDLSHVSDAVARRALEVSQAPVIFSHSAARGVCNSARNVPDDILQLLKKNGGVVMVSLSMGVIQCNPSANVSTVADHFDHIKAVIGSKFIGIGGDYDGAGKFPQGLEDVSTYPVLIEELLSRGWSEEELQGVLRGNLLRVFRQVEKVQEENKWQSPLEDKFPDEQLSSSCHSDLSRLRQRQSLTSGQELTEIPIHWTAKLPAKWSVSESSPHMAPVLAVVATFPVLILWL

SEQ ID NO: 4414 - protein, 486 aa, Homo Sapiens; identical to SEQ ID NO: 4413

SEQ ID NO: 4415 - protein, 258 aa, Homo Sapiens
MQPSGLEGPGTFGRWPLLSLLLLLLLLQPVTCAYTTPGPPRALTTLGAPRAHTMPGTYAPSTTLSSPSTQGLQEQARALMRDFPLVDGHNDLPLVLRQVYQKGLQDVNLRNFSYGQTSLDRLRDGLVGAQFWSAYVPCQTQDRDALRLTLEQIDLIRRMCASYSELELVTSAKALNDTQKLACLIGVEGGHSLDNSLSILRTFYMLGVRYLTLTHTCNTPWAESSAKGVHSFYNNISGLTDFGEMLWHGGPWKCHRHL

SEQ ID NO: 4416 - protein, 513 aa, Homo Sapiens
MIRTPLSASAHRLLLPGSRGRPPRNMQPTGREGSRALSRRYLRRLLLLLLLLLLRQPVTRAETTPGAPRALSTLGSPSLFTTPGVPSALTTPGLTTPGTPKTLDLRGRAQALMRSFPLVDGHNDLPQVLRQRYKNVLQDVNLRNFSHGQTSLDRLRDGLVGAQFWSASVSCQSQDQTAVRLALEQIDLIHRMCASYSELELVTSAEGLNSSQKLACLIGVEGGHSLDSSLSVLRSFYVLGVRYLTLTFTCSTPWAESSTKFRHHMYTNVSGLTSFGEKVVEELNRLGMMIDLSYASDTLIRRVLEVSQAPVIFSHSAARAVCDNLLNVPDDILQLLKKNGGIVMVTLSMGVLQCNLLANVSTVADHFDHIRAVIGSEFIGIGGNYDGTGRFPQGLEDVSTYPVLIEELLSRSWSEEELQGVLRGNLLRVFRQVEKVREESRAQSPVEAEFPYGQLSTSCHSHLVPQNGHQATHLEVTKQPTNRVPWRSSNASPYLVPGLVAAATIPTFTQWLC

SEQ ID NO: 4417 - protein, 357 aa, Homo Sapiens
MATVIHNPLKALGDQFYKEAIEHCRSYNSRLCAERSVRLPFLDSQTGVAQNNCYIWMEKRHRGPGLAPGQLYTYPARCWRKKRRLHPPEDPKLRLLEIKPEVELPLKKDGFTSESTTLEALLRGEGVEKKVDAREEESIQEIQRVLENDENVEEGNEEEDLEEDIPKRKNRTRGRARGSAGGRRRHDAASQEDHDKPYVCDICGKRYKNRPGLSYHYAHTHLASEEGDEAQDQETRSPPNHRNENHRPQKGPDGTVIPNNYCDFCLGGSNMNKKSGRPEELVSCADCGRSAHLGGEGRKEKEAAAAARTTEDLFGSTSESDTSTFHGFDEDDLEEPRSCRGRRSGRGSPTADKKGSC

SEQ ID NO: 4418 - protein, 357 aa, Homo Sapiens; identical to SEQ ID NO: 4417

SEQ ID NO: 4419 - protein, 378 aa, Homo Sapiens
MATVIHNPLKALGDQFYKEAIEHCRSYNSRLCAERSVRLPFLDSQTGVAQNNCYIWMEKRHRGPGLAPGQLYTYPARCWRKKRRLHPPEDPKLRLLEIKPEVELPLKKDGFTSESTTLEALLRGEGVEKKVDAREEESIQEIQRVLENDENVEEGNEEEDLEEDIPKRKNRTRGRARGSAGGRRRHDAASQEDHDKPYVCDICGKRYKNRPGLSYHYAHTHLASEEGDEAQDQETRSPPNHRNENHRPQKGPDGTVIPNNYCDFCLGGSNMNKKSGRPEELVSCADCGRSGHPTCLQFTLNMTEAVKTYKWQCIECKSCILCGTSENDDQLLFCDDCDRGYHMYCLNPPVAEPPEGSWSCHLCWELLKEKASAFGCQA

SEQ ID NO: 4420 - protein, 412 aa, Homo Sapiens
MFYGRINGRNFAASSLPVAFAATPLMLFLPNPQLIFSFPISSRNHITGLMPPGKLKLENLFHMCTRLGDQFYKEAIEHCRSYNSRLCAERSVRLPFLDSQTGVAQNNCYIWMEKRHRGPGLAPGQLYTYPARCWRKKRRLHPPEDPKLRLLEIKPEVELPLKKDGFTSESTTLEALLRGEGVEKKVDAREEESIQEIQRVLENDENVEEGNEEEDLEEDIPKRKNRTRGRARGSAGGRRRHDAASQEDHDKPYVCDICGKRYKNRPGLSYHYAHTHLASEEGDEAQDQETRSPPNHRNENHRPQKGPDGTVIPNNYCDFCLGGSNMNKKSGRPEELVSCADCGRSAHLGGEGRKEKEAAAAARTTEDLFGSTSESDTSTFHGFDEDDLEEPRSCRGRRSGRGSPTADKKGSC

SEQ ID NO: 4421 - protein, 412 aa, Homo Sapiens; identical to SEQ ID NO: 4420

SEQ ID NO: 4422 - protein, 367 aa, Homo Sapiens
MGFTDLEEPISGCPGGPWALGLGDQFYKEAIEHCRSYNSRLCAERSVRLPFLDSQTGVAQNNCYIWMEKRHRGPGLAPGQLYTYPARCWRKKRRLHPPEDPKLRLLEIKPEVELPLKKDGFTSESTTLEALLRGEGVEKKVDAREEESIQEIQRVLENDENVEEGNEEEDLEEDIPKRKNRTRGRARGSAGGRRRHDAASQEDHDKPYVCDICGKRYKNRPGLSYHYAHTHLASEEGDEAQDQETRSPPNHRNENHRPQKGPDGTVIPNNYCDFCLGGSNMNKKSGRPEELVSCADCGRSAHLGGEGRKEKEAAAAARTTEDLFGSTSESDTSTFHGFDEDDLEEPRSCRGRRSGRGSPTADKKGSC

SEQ ID NO: 4423 - protein, 367 aa, Homo Sapiens; identical to SEQ ID NO: 4422

SEQ ID NO: 4424 - protein, 170 aa, Homo Sapiens
MKTPWKVLLGLLGAAALVTIITVPVVLLNKGNDATADSRKTYTLTDYLKNTYRLKLYSLRWISDHEYLYKQENNILVFNAEYGNSSVFLENSTFDEFGHSINDYSISPDGQFILLEYNYVKQWRHSYTASYDIYDLNKRQLITEERIPNNTQWVTWSPVGHKLVSICLEQ

SEQ ID NO: 4425 - protein, 766 aa, Homo Sapiens
MKTPWKVLLGLLGAAALVTIITVPVVLLNKGTDDATADSRKTYTLTDYLKNTYRLKLYSLRWISDHEYLYKQENNILVFNAEYGNSSVFLENSTFDEFGHSINDYSISPDGQFILLEYNYVKQWRHSYTASYDIYDLNKRQLITEERIPNNTQWVTWSPVGHKLAYVWNNDIYVKIEPNLPSYRITWTGKEDIIYNGITDWVYEEEVFSAYSALWWSPNGTFLAYAQFNDTEVPLIEYSFYSDESLQYPKTVRVPYPKAGAVNPTVKFFVVNTDSLSSVTNATSIQITAPASMLIGDHYLCDVTWATQERISLQWLRRIQNYSVMDICDYDESSGRWNCLVARQHIEMSTTGWVGRFRPSEPHFTLDGNSFYKIISNEEGYRHICYFQIDKKDCTFITKGTWEVIGIEALTSDYLYYISNEYKGMPGGRNLYKIQLSDYTKVTCLSCELNPERCQYYSVSFSKEAKYYQLRCSGPGLPLYTLHSSVNDKGLRVLEDNSALDKMLQNVQMPSKKLDFIILNETKFWYQMILPPHFDKSKKYPLLLDVYAGPCSQKADTVFRLNWATYLASTENIIVASFDGRGSGYQGDKIMHAINRRLGTFEVEDQIEAARQFSKMGFVDNKRIAIWGWSYGGYVTSMVLGSGSGVFKCGIAVAPVSRWEYYDSVYTERYMGLPTPEDNLDHYRNSTVMSRAENFKQVEYLLIHGTADDNVHFQQSAQISKALVDVGVDFQAMWYTDEDHGIASSTAHQHIYTHMSHFIKQCFSLP

SEQ ID NO: 4426 - protein, 118 aa, Homo Sapiens
MKTPWKVLLGLLGAAALVTIITVPVVLLNKGTDDATADSRKTYTLTDYLKNTYRLKLYSLRWISDHEYLYKQENNILVFNAEYGNSSVFLENSTFHMAKWIFLSFLKCSLPWLLFSLL

SEQ ID NO: 4427 - protein, 118 aa, Homo Sapiens; identical to SEQ ID NO: 4426

SEQ ID NO: 4428 - protein, 86 aa, Homo Sapiens
  misc_feature (1)..(1): Xaa can be any naturally occurring amino acid
XDATADSRKTYTLTDYLKNTYRLKLYSLRWISDHEYLYKQENNILVFNAEYGNSSVFLENSTFHMAKWIFLSFLKCSLPWLLFSLL

SEQ ID NO: 4429 - protein, 272 aa, Homo Sapiens
APWAPVLLLALGLRGLQAGARRAPDPGFQERFFQQRLDHFNFERFGNKTFPQRFLVSDRFWVRGEGPIFFYTGNEGDVWAFANNSAFVAELAAERGALLVFAEHRYYGKSLPFGAQSTQRGHTELLTVEQALADFAELLRALRRDLGAQDAPAIAFGGRKPSHLSSQPPAQLGCAATLAAFPSESCTRTWPRVGICGSQKCRPPCGTCGPLRRKRGNGVLGAAALTLCPSPSYGGMLSAYLRMKYPHLVAGALAASAPVLAVAGLGDSNQFF

SEQ ID NO: 4430 - protein, 492 aa, Homo Sapiens [sequence omitted]

SEQ ID NO: 4431 - protein, 61 aa, Homo Sapiens
  misc_feature (1)..(1): Xaa can be any naturally occurring amino acid
XSGSEHCYDIYRLYHSCADPTGCGTGPDARAWDYQISEPPATSSSPTGTWTPGQGAGFGGT

SEQ ID NO: 4432 - protein, 155 aa, Homo Sapiens
  misc_feature (1)..(1): Xaa can be any naturally occurring amino acid
XTFPQRFLVSDRFWVRGEGPIFFYTGNEGDVWAFANNSAFVAELAAERGALLVFAEHRYYGKSLPFGAQSTQRGHTELLTVEQALADFAELLRALRRDLGAQDAPAIAFGGSLRHGPLGVRHLPAAVRREGPDPALHVRPECLHRAGHDGLPLPH

SEQ ID NO: 4433 - protein, 244 aa, Homo Sapiens
  misc_feature (1)..(1): Xaa can be any naturally occurring amino acid
XTVRWEFGTCQPLSDEKDLTQLFMFARNAFTVLAMMDYPYPTDFLGPLPANPVKVGCDRLLSEAQRITGLRALAGALPPAPDGCADPTGCGTGPDARAWDYQACTEINLTFASNNVTDMFPDLPFTDELRQRYCLDTWGVWPRPDWLLTSFWGGDLRAASNIIFSNGNLDPWAGGGIRRNLSASVIAVTIQGGAHHLDLRASHPEDPASVVEARKLEATIIGEWVKAARREQQPALRGGPRLSL

SEQ ID NO: 4434 - protein, 120 aa, Homo Sapiens
  misc_feature (1)..(1): Xaa can be any naturally occurring amino acid
XVLLLALGLRGLQAGARRAPDPGFQERFFQQRLDHFNFERFGNKTFPQRFLVSGSGSGARGPSSSTLGTRATCGPSPTTRPSSRSWRPSGGLYWSSRSTATTGSRCRSVRSPRSAGTRSC

SEQ ID NO: 4435 - protein, 201 aa, Homo Sapiens
MDLSLLWVLLPLVTMAWGQYGDYGYPYQQYHDYSDDGWVNLNRQGFSYQCPQGQVIVAVRSIFSKKEGSDRQWNYACMPTPQSLGEPTECWWEEINRAGMEWYQTCSNNGLVAGFQSRYFESVLDREWQFYCCRYSKRCPYSCWLTTEYPGHYGEEMDMISYNYDYYIRGATTTFSAVERDRQWKFIMCRMTEYDCEFANV

SEQ ID NO: 4436 - protein, 349 aa, Homo Sapiens
MAGPAIHTAPMLFLVLLLPLELSLAGALAPGTPARNLPENHIDLPGPALWTPQASHHRRRGPGKKEWGPGLPSQAQDGAVVTATRQASRLPEAEGLLPEQSPAGLLQDKDLLLGLALPYPEKENRPPGWERTRKRSREHKRRRDRLRLHQGRALVRGPSSLMKKAELSEAQVLDAAMEESSTSLAPTMFFLTTFEAAPATEESLILPVTSLRPQQAQPRSDGEVMPTLDMALFDWTDYEDLKPDGWPSAKKKEKHRGKLSSDGNETSPAEGEPCDHHQDCLPGTCCDLREHLCTPHNRGLNNKCFDDCMCVEGLRCYAKFHRNRRVTRRKGRCVEPETANGDQGSFINV

SEQ ID NO: 4437 - protein, 136 aa, Homo Sapiens
MRTHTRGAPSVFFIYLLCFVSAYITDENPEVMIPFTNANYDSHPMLYFSRAEVAELQLRAASSHEHIAARLTEAVHTMLSSPLEYLPPWDPKDYSARWNEIFGNNLGALAMFCVLYPENIEARDMAKDYMERMAAQ

SEQ ID NO: 4438 - protein, 139 aa, Homo Sapiens
MRTHTRGAPSVFFIYLLCFVSAYITDENPEVMIPFTNANYDSHPMLYFSRAEVAELQLRAASSHEHIAARLTEAVHTMLSSPLEYLPPWDPKDYSARWNEIFGNNLGALAMFCVLYPENIEARDMAKDYMERMAAQPSW

SEQ ID NO: 4439 - protein, 144 aa, Homo Sapiens
MRTHTRGAPSVFFIYLLCFVSAYITDENPEVMIPFTNANYDSHPMLYFSRAEVAELQLRAASSHEHIAARLTEAVHTMLSSPLEYLPPWDPKDYSARWNEIFGNNLGALAMFCVLYPENIEARDMAKDYMERMAAQPSWLVKDA

SEQ ID NO: 4440 - protein, 228 aa, Homo Sapiens
MRTHTRGAPSVFFIYLLCFVSAYITDENPEVMIPFTNANYDSHPMLYFSRAEVAELQLRAASSHEHIAARLTEAVHTMLSSPLEYLPPWDPKDYSARWNEIFGNNLGALAMFCVLYPENIEARDMAKDYMERMAAQPSWLVKDAPWDEVPLAHSLVGFATAYDFLYNYLSKTQQEKFLEVIANASGYMYETSYRRGWGFQYLHNHQPTNCMALLTGSLVLMNQGMMAA

SEQ ID NO: 4441 - protein, 228 aa, Homo Sapiens; identical to SEQ ID NO: 4440

SEQ ID NO: 4442 - protein, 958 aa, Homo Sapiens [sequence omitted]

SEQ ID NO: 4443 - protein, 308 aa, Homo Sapiens
MRTHTRGAPSVFFIYLLCFVSAYITDENPEVMIPFTNANYDSHPMLYFSRAEVAELQLRAASSHEHIAARLTEAVHTMLSSPLEYLPPWDPKDYSARWNEIFGNNLGALAMFCVLYPENIEARDMAKDYMERMAAQPSWLVKDAPWDEVPLAHSLVGFATAYDFLYNYLSKTQQEKFLEVIANASGYMYETSYRRGWGFQYLHNHQPTNCMALLTGSLVLMNQGYLQEAYLWTKQVLTIMEKSLVLLREVTDGSLYEGVAYGSYTTRSLFQYMFLVQRHFNINHFGHPWLKQHFAFMYRTILPGMMAA

SEQ ID NO: 4444 - protein, 958 aa, Homo Sapiens [sequence omitted]

SEQ ID NO: 4445 - protein, 958 aa, Homo Sapiens [sequence omitted]

SEQ ID NO: 4446 - protein, 1118 aa, Homo Sapiens
MARSPGRAYALLLLLICFNVGSGLHLQVLSTRNENKLLPKHPHLVRQKRAWITAPVALREGEDLSKKNPIAKIHSDLAEERGLKITYKYTGKGITEPPFGIFVFNKDTGELNVTSILDREETPFFLLTGYALDARGNNVEKPLELRIKVLDINDNEPVFTQDVFVGSVEELSAAHTLVMKINATDADEPNTLNSKISYRIVSLEPAYPPVFYLNKDTGEIYTTSVTLDREEHSSYTLTVEARDGNGEVTDKPVKQAQVQIRILDVNDNIPVVENKVLEGMVEENQVNVEVTRIKVFDADEIGSDNWLANFTFASGNEGGYFHIETDAQTNEGIVTLIKEVDYEEMKNLDFSVIVANKAAFHKSIRSKYKPTPIPIKVKVKNVKEGIHFKSSVISIYVSESMDRSSKGQIIGNFQAFDEDTGLPAHARYVKLEDRDNWISVDSVTSEIKLAKLPDFESRYVQNGTYTVKIVAISEDYPRKTITGTVLINVEDINDNCPTLIEPVQTICHDAEYVNVTAEDLDGHPNSGPFSFSVIDKPPGMAEKWKIARQESTSVLLQQSEKKLGRSEIQFLISDNQGFSCPEKQVLTLTVCECLHGSGCREAQHDSYVGLGPAAIALMILAFLLLLLVPLLLLMCHCGKGAKGFTPIPGTIEMLHPWNNEGAPPEDKVVPSFLPVDQGGSLVGRNGVGGMAKEATMKGSSSASIVKGQHEMSEMDGRWEEHRSLLSGRATQFTGATGAIMTTETTKTARATGASRDMAGAQAAAVALNEEFLRNYFTDKAASYTEEDENHTAKDCLLVYSQEETESLNASIGCCSFIEGELDDRFLDDLGLKFKTLAEVCLGQKIDINKEIEQRQKPATETSMNTASHSLCEQTMVNSENTYSSGSSFPVPKSLQEANAEKVTQEIVTERSVSSRQAQKVATPLPDPMASRNVIATETSYVTGSTMPPTTVILGPSQPQSLIVTERVYAPASTLVDQPYANEGTVVVTERVIQPHGGGSNPLEGTQHLQDVPYVMVRERESFLAPSSGVQPTLAMPNIAVGQNVTVTERVLAPASTLQSSYQIPTENSMTARNTTVSGAGVPGPLPDFGLEESGHSNSTITTSSTRVTKHSTVQHSYS

SEQ ID NO: 4447 - protein, 232 aa, Homo Sapiens
MARSPGRAYALLLLLICFNVGSGLHLQVLSTRNENKLLPKHPHLVRQKRAWITAPVALREGEDLSKKNPIAKIHSDLAEERGLKITYKYTGKGITEPPFGIFVFNKDTGELNVTSILDREETPFFLLTGYALDARGNNVEKPLELRIKVLDINDNEPVFTQDVFVGSVEELSAAHTLVMKINATDADEPNTLNSKISYRIVSLEPAYPPVFYLNKDTGEIYTTSVTLDREVS

SEQ ID NO: 4448 - protein, 1301 aa, Homo Sapiens
MKIITYFCIWAVAWAIPVPQSKPLERHVEKSMNLHLLARSNVSVQDELNASGTIKESGVLVHEGDRGRQENTQDGHKGEGNGSKWAEVGGKSFSTYSTLANEEGNIEGWNGDTGKAETYGHDGIHGKEENITANGIQGQVSIIDNAGATNRSNTNGNTDKNTQNGDVGDAGHNEDVAVVQEDGPQVAGSNNSTDNEDEIIENSCRNEGNTSEITPQINSKRNGTKEAEVTPGTGEDAGLDNSDGSPSGNGADEDEDEGSGDDEDEEAGNGKDSSNNSKGQEGQDHGKEDDHDSSIGQNSDSKEYYDPEGKEDPHNEVDGDKTSKSEENSAGIPEDNGSQRIEDTQKLNHRESKRVENRITKESETHAVGKSQDKGIEIKGPSSGNRNITKEVGKGNEGKEDKGQHGMILGKGNVKTQGEVVNIEGPGQKSEPGNKVGHSNTGSDSNSDGYDSYDFDDKSMQGDDPNSSDESNGNDDANSESDNNSSSRGDASYNSDESKDNGNGSDSKGAEDDDSDSTSDTNNSDSNGNGNNGNDDNDKSDSGKGKSDSSDSDSSDSSNSSDSSDSSDSDSSDSNSSSDSDSSDSDSSDSSDSDSSDSSNSSDSSDSSDSSDSSDSSDSSDSKSDSSKSESDSSDSDSKSDSSDSNSSDSSDNSDSSDSSNSSNSSDSSDSSDSSDSSSSSDSSNSSDSSDSSDSSNSSESSDSSDSSDSDSSDSSDSSNSNSSDSDSSNSSDSSDSSNSSDSSDSSDSSNSSDSSDSSDSSNSSDSSDSSDSSDSSDSSNSSDSNDSSNSSDSSDSSNSSDSSNSSDSSDSSDSSDSDSSNSSDSSNSSDSSDSSNSSDSSDSSDSSDGSDSDSSNRSDSSNSSDSSDSSDSSNSSDSSDSSDSNESSNSSDSSDSSNSSDSDSSDSSNSSDSSDSSNSSDSSESSNSSDNSNSSDSSNSSDSSDSSDSSNSSDSSNSSDSSNSSDSSDSNSSDSSDSSNSSDSSDSSDSSDSSDSSDSSNSSDSSDSSDSSDSSNSSDSSNSSDSSNSSDSSDSSDSSDSSDSSDSSDSSDSSNSSDSSDSSDSSDSSDSSDSSDSSDSSESSDSSDSSNSSDSSDSSDSSDSSDSSDSSDSSDSSDSSNSSDSSDSSDSSDSSDSSNSSDSSDSSESSDSSDSSDSSDSSDSSDSSDSSDSSDSSNSSDSSDSSDSSDSSDSSDSSDSSDSSDSSDSSDSSDSSDSSDSSDSSDSSDSNESSDSSDSSDSSDSSNSSDSSDSSDSSDSTSDSNDESDSQSKSGNGNNNGSDSDSDSEGSDSNHSTSDD

SEQ ID NO: 4449 - protein, 1301 aa, Homo Sapiens; identical to SEQ ID NO: 4448

SEQ ID NO: 4450 - protein, 123 aa, Homo Sapiens
EMTRKQPDVDKVTKTYKRRAADPSSLQSHIPVLDKGRAGRKRFPASSLYPSGSQTQIETKNPRVNLLVSKWQQVWLLALERRRKLNDALDRLEEVWKFIPSTPHCHLPSFLITHCHCQNLGIF

SEQ ID NO: 4451 - protein, 7461 aa, Homo Sapiens
MAGYLSPAAYLYVEEQEYLQAYEDVLERYKDERDKVQKKTFTKWINQHLMKVRKHVNDLYEDLRDGHNLISLLEVLSGDTLPREKGRMRFHRLQNVQIALDYLKRRQVKLVNIRNDDITDGNPKLTLGLIWTIILHFQISDIHVTGESEDMSAKERLLLWTQQATEGYAGIRCENFTTCWRDGKLFNAIIHKYRPDLIDMNTVAVQSNLANLEHAFYVAEKIGVIRLLDPEDVDVSSPDEKSVITYVSSLYDAFPKVPEGGEGIGANDVEVKWIEYQNMVNYLIQWIRHHVTTMSERTFPNNPVELKALYNQYLQFKETEIPPKETEKSKIKRLYKLLEIWIEFGRIKLLQGYHPNDIEKEWGKLIIAMLEREKALRPEVERLEMLQQIANRVQRDSVICEDKLILAGNALQSDSKRLESGVQFQNEAEIAGYILECENLLRQHVIDVQILIDGKYYQADQLVQRVAKLRDEIMALRNECSSVYSKGRILTTEQTKLMISGITQSLNSGFAQTLHPSLTSGLTQSLTPSLTSSSMTSGLSSGMTSRLTPSVTPAYTPGFPSGLVPNFSSGVEPNSLQTLKLMQIRKPLLKSSLLDQNLTEEEINMKFVQDLLNWVDEMQVQLDRTEWGSDLPSVESHLENHKNVHRAIEEFESSLKEAKISEIQMTAPLKLTYAEKLHRLESQYAKLLNTSRNQERHLDTLHNFVSRATNELIWLNEKEEEEVAYDWSERNTNIARKKDYHAELMRELDQKEENIKSVQEIAEQLLLENHPARLTIEAYRAAMQTQWSWILQLCQCVEQHIKENTAYFEFFNDAKEATDYLRNLKDAIQRKYSCDRSSSIHKLEDLVQESMEEKEELLQYKSTIANLMGKAKTIIQLKPRNSDCPLKTSIPIKAICDYRQIEITIYKDDECVLANNSHRAKWKVISPTGNEAMVPSVCFTVPPPNKEAVDLANRIEQQYQNVLTLWHESHINMKSVVSWHYLINEIDRIRASNVASIKTMLPGEHQQVLSNLQSRFEDFLEDSQESQVFSGSDITQLEKEVNVCKQYYQELLKSAEREEQEESVYNLYISEVRNIRLRLENCEDRLIRQIRTPLERDDLHESVFRITEQEKLKKELERLKDDLGTITNKCEEFFSQAAASSSVPTLRSELNVVLQNMNQVYSMSSTYIDKLKTVNLVLKNTQAAEALVKLYETKLCEEEAVIADKNNIENLISTLKQWRSEVDEKRQVFHALEDELQKAKAISDEMFKTYKERDLDFDWHKEKADQLVERWQNVHVQIDNRLRDLEGIGKSLKYYRDTYHPLDDWIQQVETTQRKIQENQPENSKTLATQLNQQKMLVSEIEMKQSKMDECQKYAEQYSATVKDYELQTMTYRAMVDSQQKSPVKRRRMQSSADLIIQEFMDLRTRYTALVTLMTQYIKFAGDSLKRLEEEEKSLEEEKKEHVEKAKELQKWVSNISKTLKDAEKAGKPPFSKQKISSEEISTKKEQLSEALQTIQLFLAKHGDKMTDEERNELEKQVKTLQESYNLLFSESLKQLQESQTSGDVKVEEKLDKVIAGTIDQTTGEVLSVFQAVLRGLIDYDTGIRLLETQLMISGLISPELRKCFDLKDAKSHGLIDEQILCQLKELSKAKEIISAASPTTIPVLDALAQSMITESMAIKVLEILLSTGSLVIPATGEQLTLQKAFQQNLVSSALFSKVLERQNMCKDLIDPCTSEKVSLIDMVQRSTLQENTGMWLLPVRPQEGGRITLKCGRNISILRAAHEGLIDRETMFRLLSAQLLSGGLINSNSGQRMTVEEAVREGVIDRDTASSILTYQVQTGGIIQSNPAKRLTVDEAVQCDLITSSSALLVLEAQRGYVGLIWPHSGEIFPTSSSLQQELITNELAYKILNGRQKIAALYIPESSQVIGLDAAKQLGIIDNNTASILKNITLPDKMPDLGDLEACKNARRWLSFCKFQPSTVHDYRQEEDVFDGEEPVTTQTSEETKKLFLSYLMINSYMDANTGQRLLLYDGDLDEAVGMLLEGCHAEFDGNTAIKECLDVLSSSGVFLNNASGREKDECTATPSSFNKCHCGEPEHEETPENRKCAIDEEFNEMRNTVINSEFSQSGKLASTISIDPKVNSSPSVCVPSLISYLTQTELADISMLRSDSENILTNYENQSRVETNERANECSHSKNIQNFPSDLIENPIMKSKMSKFCGVNETENEDNTNRDSPIFDYSPRLSALLSHDKLMHSQGSFNDTHTPESNGNKCEAPALSFSDKTMLSGQRIGEKFQDQFLGIAAINISLPGEQYGQKSLNMISSNPQVQYHNDKYISNTSGEDEKTHPGFQQMPEDKEDESEIEEYSCAVTPGGDTDNAIVSLTCATPLLDETISASDYETSLLNDQQNNTGTDTDSDDDFYDTPLFEDDDHDSLLLDGDDRDCLHPEDYDTLQEENDETASPADVFYDVSKENENSMVPQGAPVGSLSVKNKAHCLQDFLMDVEKDELDSGEKIHLNPVGSDKVNGQSLETGSERECTNILEGDESDSLTDYDIVGGKESFTASLKFDDSGSWRGRKEEYVTGQEFHSDTDHLDSMQSEESYGDYIYDSNDQDDDDDDGIDEEGGGIRDENGKPRCQNVAEDMDIQLCASILNENSDENENINTMILLDKMHSCSSLEKQQRVNVVQLASPSENNLVTEKSNLPEYTTEIAGKSKENLLNHEMVLKDVLPPIIKDTESEKTFGPASISHDNNNISSTSELGTDLANTKVKLIQGSELPELTDSVKGKDEYFKNMTPKVDSSLDHIICTEPDLIGKPAEESHLSLIASVTDKDPQGNGSDLIKGRDGKSDILIEDETSIQKMYLGEGEVLVEGLVEEENRHLKLLPGKNTRDSFKLINSQFPFPQITNNEELNQKGSLKKATVTLKDEPNNLQIIVSKSPVQFENLEEIFDTSVSKEISDDITSDITSWEGNTHFEESFTDGPEKELDLFTYLKHCAKNIKAKDVAKPNEDVPSHVLITAPPMKEHLQLGVNNTKEKSTSTQKDSPLNDMIQSNDLCSKESISGGGTEISQFTPESIEATLSILSRKHVEDVGKNDFLQSERCANGLGNDNSSNTLNTDYSFLEINNKKERIEQQLPKEQALSPRSQEKEVQIPELSQVFVEDVKDILKSRLKEGHMNPQEVEEPSACADTKILIQNLIKRITTSQLVNEASTVPSDSQMSDSSGVSPMTNSSELKPESRDDPFCIGNLKSELLLNILKQDQHSQKITGVFELMRELTHMEYDLEKRGITSKVLPLQLENIFYKLLADGYSEKIEHVGDFNQKACSTSEMMEEKPHILGDIKSKEGNYYSPNLETVKEIGLESSTVWASTLPRDEKLKDLCNDFPSHLECTSGSKEMASGDSSTEQFSSELQQCLQHTEKMHEYLTLLQDMKPPLDNQESLDNNLEALKNQLRQLETFELGLAPIAVILRKDMKLAEEFLKSLPSDFPRGHVEELSISHQSLKTAFSSLSNVSSERTKQIMLAIDSEMSKLAVSHEEFLHKLKSFSDWVSEKSKSVKDIEIVNVQDSEYVKKRLEFLKNVLKDLGHTKMQLETTAFDVQFFISEYAQDLSPNQSKQLLRLLNTTQKCFLDVQESVTTQVERLETQLHLEQDLDDQKIVAERQQEYKEKLQGICDLLTQTENRLIGHQEAFMIGDGTVELKKYQSKQEELQKDMQGSAQALAEVVKNTENFLKENGEKLSQEDKALIEQKLNEAKIKCEQLNLKAEQSKKELDKVVTTAIKEETEKVAAVKQLEESKTKIENLLDWLSNVDKDSERAGTKHKQVIEQNGTHFQEGDGKSAIGEEDEVNGNLLETDVDGQVGTTQENLNQQYQKVKAQHEKIISQHQAVIIATQSAQVLLEKQGQYLSPEEKEKLQKNMKELKVHYETALAESEKKMKLTHSLQEELEKFDADYTEFEHWLQQSEQELENLEAGADDINGLMTKLKRQKSFSEDVISHKGDLRYITISGNRVLEAAKSCSKRDGGKVDTSATHREVQRKLDHATDRFRSLYSKCNVLGNNLKDLVDKYQHYEDASCGLLAGLQACEATASKHLSEPIAVDPKNLQRQLEETKALQGQISSQQVAVEKLKKTAEVLLDARGSLLPAKNDIQKTLDDIVGRYEDLSKSVNERNEKLQITLTRSLSVQDGLDEMLDWMGNVESSLKEQGQVPLNSTALQDIISKNIMLEQDIAGRQSSINAMNEKVKKFMETTDPSTASSLQAKMKDLSARFSEASHKHKETLAKMEELKTKVELFENLSEKLQTFLETKTQALTEVDVPGKDVTELSQYMQESTSEFLEHKKHLEVLHSLLKEISSHGLPSDKALVLEKTNNLSKKFKEMEDTIKEKKEAVTSCQEQLDAFQVLVKSLKSWIKETTKKVPIVQPSFGAEDLGKSLEDTKKLQEKWSLKTPEIQKVNNSGISLCNLISAVTTPAKAIAAVKSGGAVLNGEGTATNTEEFWANKGLTSIKKDMTDISHGYEDLGLLLKDKIAELNTKLSKLQKAQEESSAMMQWLQKMNKTATKWQQTPAPTDTEAVKTQVEQNKSFEAELKQNVNKVQELKDKLTELLEENPDTPEAPRWKQMLTEIDSKWQELNQLTIDRQQKLEESSNNLTQFQTVEAQLKQWLVEKELMVSVLGPLSIDPNMLNTQRQQVQILLQEFATRKPQYEQLTAAGQGILSRPGEDPSLRGIVKEQLAAVTQKWDSLTGQLSDRCDWIDQAIVKSTQYQSLLRSLSDKLSDLDNKLSSSLAVSTHPDAMNQQLETAQKMKQEIQQEKKQIKVAQALCEDLSALVKEEYLKAELSRQLEGILKSFKDVEQKAENHVQHLQSACASSHQFQQMSRDFQAWLDTKKEEQNKSHPISAKLDVLESLIKDHKDFSKTLTAQSHMYEKTIAEGENLLLKTQGSEKAALQLQLNTIKTNWDTFNKQVKERENKLKESLEKALKYKEQVETLWPWIDKCQNNLEEIKFCLDPAEGENSIAKLKSLQKEMDQHFGMVELLNNTANSLLSVCEIDKEVVTDENKSLIQKVDMVTEQLHSKKFCLENMTQKFKEFQEVSKESKRQLQCAKEQLDIHDSLGSQAYSNKYLTMLQTQQKSLQALKHQVDLAKRLAQDLVVEASDSKGTSDVLLQVETIAQEHSTLSQQVDEKCSFLETKLQGIGHFQNTIREMFSQFAEFDDELDSMAPVGRDAETLQKQKETIKAFLKKLEALMASNDNANKTCKMMLATEETSPDLVGIKRDLEALSKQCNKLLDRAQAREEQVEGTIKRLEEFYSKLKEFSILLQKAEEHEESQGPVGMETETINQQLNMFKVFQKEEIEPLQGKQQDVNWLGQGLIQSAAKSTSTQGLEHDLDDVNARWKTLNKKVAQRAAQLQEALLHCGRFQDALESLLSWMVDTEELVANQKPPSAEFKVVKAQIQEQKLLQRLLDDRKSTVEVIKREGEKIATTAEPADKVKILKQLSLLDSRWEALLNKAETRNRQLEGISVVAQQFHETLEPLNEWLTTIEKRLVNCEPIGTQASKLEEQIAQHKVLQEDILLRKQNVDQALLNGLELLKQTTGDEVLIIQDKLEAIKARYKDITKLSTDVAKTLEQALQLARRLHSTHEELCTWLDKVEVELLSYETQVLKGEEASQAQMRPKELKKEAKNNKALLDSLNEVSSALLELVPWRAREGLEKMVAEDNERYRLVSDTITQKVEEIDAAILRSQQFDQAADAELSWITETEKKLMSLGDIRLEQDQTSAQLQVQKTFTMEILRHKDIIDDLVKSGHKIMTACSEEEKQSMKKKLDKVLKNYDTICQINSERYLQLERAQSLVNQFWETYEELWPWLTETQSIISQLPAPALEYETLRQQQEEHRQLRELIAEHKPHIDKMNKTGPQLLELSPGEGFSIQEKYVAADTLYSQIKEDVKKRAVALDEAISQSTQFHDKIDQILESLERIVERLRQPPSISAEVEKIKEQISENKNVSVDMEKLQPLYETLKQRGEEMIARSGGTDKDISAKAVQDKLDQMVFIWENIHTLVEEREAKLLDVMELAEKFWCDHMSLIVTIKDTQDFIRDLEDPGIDPSVVKQQQEAAETIREEIDGLQEELDIVINLGSELIAACGEPDKPIVKKSIDELNSAWDSLNKAWKDRIDKLEEAMQAAVQYQDGLQAVFDWVDIAGGKLASMSPIGTDLETVKQQIEELKQFKSEAYQQQIEMERLNHQAELLLKKVTEESDKHTVQDPLMELKLIWDSLEERIINRQHKLEGALLALGQFQHALDELLAWLTHTEGLLSEQKPVGGDPKAIEIELAKHHVLQNDVLAHQSTVEAVNKAGNDLIESSAGEEASNLQNKLEVLNQRWQNVLEKTEQRKQQLDGALRQAKGFHGEIEDLQQWLTDTERHLLASKPLGGLPETAKEQLNVHMEVCAAFEAKEETYKSLMQKGQQMLARCPKSAETNIDQDINNLKEKWESVETKLNERKTKLEEALNLAMEFHNSLQDFINWLTQAEQTLNVASRPSLILDTVLFQIDEHKVFANEVNSHREQIIELDKTGTHLKYFSQKQDVVLIKNLLISVQSRWEKVVQRLVERGRSLDDARKRAKQFHEAWSKLMEWLEESEKSLDSELEIANDPDKIKTQLAQHKEFQKSLGAKHSVYDTTNRTGRSLKEKTSLADDNLKLDDMLSELRDKWDTICGKSVERQNKLEEALLFSGQFTDALQALIDWLYRVEPQLAEDQPVHGDIDLVMNLIDNHKAFQKELGKRTSSVQALKRSARELIEGSRDDSSWVKVQMQELSTRWETVCALSISKQTRLEAALRQAEEFHSVVHALLEWLAEAEQTLRFHGVLPDDEDALRTLIDQHKEFMKKLEEKRAELNKATTMGDTVLAICHPDSITTIKHWITIIRARFEEVLAWAKQHQQRLASALAGLIAKQELLEALLAWLQWAETTLTDKDKEVIPQEIEEVKALIAEHQTFMEEMTRKQPDVDKVTKTYKRRAADPSSLQSHIPVLDKGRAGRKRFPASSLYPSGSQTQIETKNPRVNLLVSKWQQVWLLALERRRKLNDALDRLEELREFANFDFDIWRKKYMRWMNHKKSRVMDFFRRIDKDQDGKITRQEFIDGILSSKFPTSRLEMSAVADIFDRDGDGYIDYYEFVAALHPNKDAYKPITDADKIEDEVTRQVAKCKCAKRFQVEQIGDNKYRFFLGNQFGDSQQLRLVRILRSTVMVRVGGGWMALDEFLVKNDPCRVHHHGSKMLRSESNSSITTTQPTIAKGRTNMELREKFILADGASQGMAAFRPRGRRSRPSSRGASPNRSTSVSSQAAQAASPQVPATTTPKGTPIQGSKLRLPGYLSGKGFHSGEDSGLITTAAARVRTQFADSKKTPSRPGSRAGSKAGSRASSRRGSDASDFDISEIQSVCSDVETVPQTHRPTPRAGSRPSTAKPSKIPTPQRKSPASKLDKSSKR

SEQ ID NO: 4452 - protein, 5375 aa, Homo Sapiens
MAGYLSPAAYLYVEEQEYLQAYEDVLERYKDERDKVQKKTFTKWINQHLMKVRKHVNDLYEDLRDGHNLISLLEVLSGDTLPREKGRMRFHRLQNVQIALDYLKRRQVKLVNIRNDDITDGNPKLTLGLIWTIILHFQISDIHVTGESEDMSAKERLLLWTQQATEGYAGIRCENFTTCWRDGKLFNAIIHKYRPDLIDMNTVAVQSNLANLEHAFYVAEKIGVIRLLDPEDVDVSSPDEKSVITYVSSLYDAFPKVPEGGEGIGANDVEVKWIEYQNMVNYLIQWIRHHVTTMSERTFPNNPVELKALYNQYLQFKETEIPPKETEKSKIKRLYKLLEIWIEFGRIKLLQGYHPNDIEKEWGKLIIAMLEREKALRPEVERLEMLQQIANRVQRDSVICEDKLILAGNALQSDSKRLESGVQFQNEAEIAGYILECENLLRQHVIDVQILIDGKYYQADQLVQRVAKLRDEIMALRNECSSVYSKGRILTTEQTKLMISGITQSLNSGFAQTLHPSLTSGLTQSLTPSLTSSSMTSGLSSGMTSRLTPSVTPAYTPGFPSGLVPNFSSGVEPNSLQTLKLMQIRKPLLKSSLLDQNLTEEEINMKFVQDLLNWVDEMQVQLDRTEWGSDLPSVESHLENHKNVHRAIEEFESSLKEAKISEIQMTAPLKLTYAEKLHRLESQYAKLLNTSRNQERHLDTLHNFVSRATNELIWLNEKEEEEVAYDWSERNTNIARKKDYHAELMRELDQKEENIKSVQEIAEQLLLENHPARLTIEAYRAAMQTQWSWILQLCQCVEQHIKENTAYFEFFNDAKEATDYLRNLKDAIQRKYSCDRSSSIHKLEDLVQESMEEKEELLQYKSTIANLMGKAKTIIQLKPRNSDCPLKTSIPIKAICDYRQIEITIYKDDECVLANNSHRAKWKVISPTGNEAMVPSVCFTVPPPNKEAVDLANRIEQQYQNVLTLWHESHINMKSVVSWHYLINEIDRIRASNVASIKTMLPGEHQQVLSNLQSRFEDFLEDSQESQVFSGSDITQLEKEVNVCKQYYQELLKSAEREEQEESVYNLYISEVRNIRLRLENCEDRLIRQIRTPLERDDLHESVFRITEQEKLKKELERLKDDLGTITNKCEEFFSQAAASSSVPTLRSELNVVLQNMNQVYSMSSTYIDKLKTVNLVLKNTQAAEALVKLYETKLCEEEAVIADKNNIENLISTLKQWRSEVDEKRQVFHALEDELQKAKAISDEMFKTYKERDLDFDWHKEKADQLVERWQNVHVQIDNRLRDLEGIGKSLKYYRDTYHPLDDWIQQVETTQRKIQENQPENSKTLATQLNQQKMLVSEIEMKQSKMDECQKYAEQYSATVKDYELQTMTYRAMVDSQQKSPVKRRRMQSSADLIIQEFMDLRTRYTALVTLMTQYIKFAGDSLKRLEEEEKSLEEEKKEHVEKAKELQKWVSNISKTLKDAEKAGKPPFSKQKISSEEISTKKEQLSEALQTIQLFLAKHGDKMTDEERNELEKQVKTLQESYNLLFSESLKQLQESQTSGDVKVEEKIVAERQQEYKEKLQGICDLLTQTENRLIGHQEAFMIGDGTVELKKYQSKQEELQKDMQGSAQALAEVVKNTENFLKENGEKLSQEDKALIEQKLNEAKIKCEQLNLKAEQSKKELDKVVTTAIKEETEKVAAVKQLEESKTKIENLLDWLSNVDKDSERAGTKHKQVIEQNGTHFQEGDGKSAIGEEDEVNGNLLETDVDGQVGTTQENLNQQYQKVKAQHEKIISQHQAVIIATQSAQVLLEKQGQYLSPEEKEKLQKNMKELKVHYETALAESEKKMKLTHSLQEELEKFDADYTEFEHWLQQSEQELENLEAGADDINGLMTKLKRQKSFSEDVISHKGDLRYITISGNRVLEAAKSCSKRDGGKVDTSATHREVQRKLDHATDRFRSLYSKCNVLGNNLKDLVDKYQHYEDASCGLLAGLQACEATASKHLSEPIAVDPKNLQRQLEETKALQGQISSQQVAVEKLKKTAEVLLDARGSLLPAKNDIQKTLDDIVGRYEDLSKSVNERNEKLQITLTRSLSVQDGLDEMLDWMGNVESSLKEQGQVPLNSTALQDIISKNIMLEQDIAGRQSSINAMNEKVKKFMETTDPSTASSLQAKMKDLSARFSEASHKHKETLAKMEELKTKVELFENLSEKLQTFLETKTQALTEVDVPGKDVTELSQYMQESTSEFLEHKKHLEVLHSLLKEISSHGLPSDKALVLEKTNNLSKKFKEMEDTIKEKKEAVTSCQEQLDAFQVLVKSLKSWIKETTKKVPIVQPSFGAEDLGKSLEDTKKLQEKWSLKTPEIQKVNNSGISLCNLISAVTTPAKAIAAVKSGGAVLNGEGTATNTEEFWANKGLTSIKKDMTDISHGYEDLGLLLKDKIAELNTKLSKLQKAQEESSAMMQWLQKMNKTATKWQQTPAPTDTEAVKTQVEQNKSFEAELKQNVNKVQELKDKLTELLEENPDTPEAPRWKQMLTEIDSKWQELNQLTIDRQQKLEESSNNLTQFQTVEAQLKQWLVEKELMVSVLGPLSIDPNMLNTQRQQVQILLQEFATRKPQYEQLTAAGQGILSRPGEDPSLRGIVKEQLAAVTQKWDSLTGQLSDRCDWIDQAIVKSTQYQSLLRSLSDKLSDLDNKLSSSLAVSTHPDAMNQQLETAQKMKQEIQQEKKQIKVAQALCEDLSALVKEEYLKAELSRQLEGILKSFKDVEQKAENHVQHLQSACASSHQFQQMSRDFQAWLDTKKEEQNKSHPISAKLDVLESLIKDHKDFSKTLTAQSHMYEKTIAEGENLLLKTQGSEKAALQLQLNTIKTNWDTFNKQVKERENKLKESLEKALKYKEQVETLWPWIDKCQNNLEEIKFCLDPAEGENSIAKLKSLQKEMDQHFGMVELLNNTANSLLSVCEIDKEVVTDENKSLIQKVDMVTEQLHSKKFCLENMTQKFKEFQEVSKESKRQLQCAKEQLDIHDSLGSQAYSNKYLTMLQTQQKSLQALKHQVDLAKRLAQDLVVEASDSKGTSDVLLQVETIAQEHSTLSQQVDEKCSFLETKLQGIGHFQNTIREMFSQFAEFDDELDSMAPVGRDAETLQKQKETIKAFLKKLEALMASNDNANKTCKMMLATEETSPDLVGIKRDLEALSKQCNKLLDRAQAREEQVEGTIKRLEEFYSKLKEFSILLQKAEEHEESQGPVGMETETINQQLNMFKVFQKEEIEPLQGKQQDVNWLGQGLIQSAAKSTSTQGLEHDLDDVNARWKTLNKKVAQRAAQLQEALLHCGRFQDALESLLSWMVDTEELVANQKPPSAEFKVVKAQIQEQKLLQRLLDDRKSTVEVIKREGEKIATTAEPADKVKILKQLSLLDSRWEALLNKAETRNRQLEGISVVAQQFHETLEPLNEWLTTIEKRLVNCEPIGTQASKLEEQIAQHKVLQEDILLRKQNVDQALLNGLELLKQTTGDEVLIIQDKLEAIKARYKDITKLSTDVAKTLEQALQLARRLHSTHEELCTWLDKVEVELLSYETQVLKGEEASQAQMRPKELKKEAKNNKALLDSLNEVSSALLELVPWRAREGLEKMVAEDNERYRLVSDTITQKVEEIDAAILRSQQFDQAADAELSWITETEKKLMSLGDIRLEQDQTSAQLQVQKTFTMEILRHKDIIDDLVKSGHKIMTACSEEEKQSMKKKLDKVLKNYDTICQINSERYLQLERAQSLVNQFWETYEELWPWLTETQSIISQLPAPALEYETLRQQQEEHRQLRELIAEHKPHIDKMNKTGPQLLELSPGEGFSIQEKYVAADTLYSQIKEDVKKRAVALDEAISQSTQFHDKIDQILESLERIVERLRQPPSISAEVEKIKEQISENKNVSVDMEKLQPLYETLKQRGEEMIARSGGTDKDISAKAVQDKLDQMVFIWENIHTLVEEREAKLLDVMELAEKFWCDHMSLIVTIKDTQDFIRDLEDPGIDPSVVKQQQEAAETIREEIDGLQEELDIVINLGSELIAACGEPDKPIVKKSIDELNSAWDSLNKAWKDRIDKLEEAMQAAVQYQDGLQAVFDWVDIAGGKLASMSPIGTDLETVKQQIEELKQFKSEAYQQQIEMERLNHQAELLLKKVTEESDKHTVQDPLMELKLIWDSLEERIINRQHKLEGALLALGQFQHALDELLAWLTHTEGLLSEQKPVGGDPKAIEIELAKHHVLQNDVLAHQSTVEAVNKAGNDLIESSAGEEASNLQNKLEVLNQRWQNVLEKTEQRKQQLDGALRQAKGFHGEIEDLQQWLTDTERHLLASKPLGGLPETAKEQLNVHMEVCAAFEAKEETYKSLMQKGQQMLARCPKSAETNIDQDINNLKEKWESVETKLNERKTKLEEALNLAMEFHNSLQDFINWLTQAEQTLNVASRPSLILDTVLFQIDEHKVFANEVNSHREQIIELDKTGTHLKYFSQKQDVVLIKNLLISVQSRWEKVVQRLVERGRSLDDARKRAKQFHEAWSKLMEWLEESEKSLDSELEIANDPDKIKTQLAQHKEFQKSLGAKHSVYDTTNRTGRSLKEKTSLADDNLKLDDMLSELRDKWDTICGKSVERQNKLEEALLFSGQFTDALQALIDWLYRVEPQLAEDQPVHGDIDLVMNLIDNHKAFQKELGKRTSSVQALKRSARELIEGSRDDSSWVKVQMQELSTRWETVCALSISKQTRLEAALRQAEEFHSVVHALLEWLAEAEQTLRFHGVLPDDEDALRTLIDQHKEFMKKLEEKRAELNKATTMGDTVLAICHPDSITTIKHWITIIRARFEEVLAWAKQHQQRLASALAGLIAKQELLEALLAWLQWAETTLTDKDKEVIPQEIEEVKALIAEHQTFMEEMTRKQPDVDKVTKTYKRRAADPSSLQSHIPVLDKGRAGRKRFPASSLYPSGSQTQIETKNPRVNLLVSKWQQVWLLALERRRKLNDALDRLEELREFANFDFDIWRKKYMRWMNHKKSRVMDFFRRIDKDQDGKITRQEFIDGILSSKFPTSRLEMSAVADIFDRDGDGYIDYYEFVAALHPNKDAYKPITDADKIEDEVTRQVAKCKCAKRFQVEQIGDNKYRFFLGNQFGDSQQLRLVRILRSTVMVRVGGGWMALDEFLVKNDPCRVHHHGSKMLRSESNSSITTTQPTIAKGRTNMELREKFILADGASQGMAAFRPRGRRSRPSSRGASPNRSTSVSSQAAQAASPQVPATTTPKGTPIQGSKLRLPGYLSGKGFHSGEDSGLITTAAARVRTQFADSKKTPSRPGSRAGSKAGSRASSRRGSDASDFDISEIQSVCSDVETVPQTHRPTPRAGSRPSTAKPSKIPTPQRKSPASKLDKSSKR

SEQ ID NO: 4453 - protein, 5497 aa, Homo Sapiens
MAGYLSPAAYLYVEEQEYLQAYEDVLERYKDERDKVQKKTFTKWINQHLMKVRKHVNDLYEDLRDGHNLISLLEVLSGDTLPREKGRMRFHRLQNVQIALDYLKRRQVKLVNIRNDDITDGNPKLTLGLIWTIILHFQISDIHVTGESEDMSAKERLLLWTQQATEGYAGIRCENFTTCWRDGKLFNAIIHKYRPDLIDMNTVAVQSNLANLEHAFYVAEKIGVIRLLDPEDVDVSSPDEKSVITYVSSLYDAFPKVPEGGEGIGANDVEVKWIEYQNMVNYLIQWIRHHVTTMSERTFPNNPVELKALYNQYLQFKETEIPPKETEKSKIKRLYKLLEIWIEFGRIKLLQGYHPNDIEKEWGKLIIAMLEREKALRPEVERLEMLQQIANRVQRDSVICEDKLILAGNALQSDSKRLESGVQFQNEAEIAGYILECENLLRQHVIDVQILIDGKYYQADQLVQRVAKLRDEIMALRNECSSVYSKGRILTTEQTKLMISGITQSLNSGFAQTLHPSLTSGLTQSLTPSLTSSSMTSGLSSGMTSRLTPSVTPAYTPGFPSGLVPNFSSGVEPNSLQTLKLMQIRKPLLKSSLLDQNLTEEEINMKFVQDLLNWVDEMQVQLDRTEWGSDLPSVESHLENHKNVHRAIEEFESSLKEAKISEIQMTAPLKLTYAEKLHRLESQYAKLLNTSRNQERHLDTLHNFVSRATNELIWLNEKEEEEVAYDWSERNTNIARKKDYHAELMRELDQKEENIKSVQEIAEQLLLENHPARLTIEAYRAAMQTQWSWILQLCQCVEQHIKENTAYFEFFNDAKEATDYLRNLKDAIQRKYSCDRSSSIHKLEDLVQESMEEKEELLQYKSTIANLMGKAKTIIQLKPRNSDCPLKTSIPIKAICDYRQIEITIYKDDECVLANNSHRAKWKVISPTGNEAMVPSVCFTVPPPNKEAVDLANRIEQQYQNVLTLWHESHINMKSVVSWHYLINEIDRIRASNVASIKTMLPGEHQQVLSNLQSRFEDFLEDSQESQVFSGSDITQLEKEVNVCKQYYQELLKSAEREEQEESVYNLYISEVRNIRLRLENCEDRLIRQIRTPLERDDLHESVFRITEQEKLKKELERLKDDLGTITNKCEEFFSQAAASSSVPTLRSELNVVLQNMNQVYSMSSTYIDKLKTVNLVLKNTQAAEALVKLYETKLCEEEAVIADKNNIENLISTLKQWRSEVDEKRQVFHALEDELQKAKAISDEMFKTYKERDLDFDWHKEKADQLVERWQNVHVQIDNRLRDLEGIGKSLKYYRDTYHPLDDWIQQVETTQRKIQENQPENSKTLATQLNQQKMLVSEIEMKQSKMDECQKYAEQYSATVKDYELQTMTYRAMVDSQQKSPVKRRRMQSSADLIIQEFMDLRTRYTALVTLMTQYIKFAGDSLKRLEEEEKSLEEEKKEHVEKAKELQKWVSNISKTLKDAEKAGKPPFSKQKISSEEISTKKEQLSEALQTIQLFLAKHGDKMTDEERNELEKQVKTLQESYNLLFSESLKQLQESQTSGDVKVEEKIVAERQQEYKEKLQGICDLLTQTENRLIGHQEAFMIGDGTVELKKYQSKQEELQKDMQGSAQALAEVVKNTENFLKENGEKLSQEDKALIEQKLNEAKIKCEQLNLKAEQSKKELDKVVTTAIKEETEKVAAVKQLEESKTKIENLLDWLSNVDKDSERAGTKHKQVIEQNGTHFQEGDGKSAIGEEDEVNGNLLETDVDGQVGTTQENLNQQYQKVKAQHEKIISQHQAVIIATQSAQVLLEKQGQYLSPEEKEKLQKNMKELKVHYETALAESEKKMKLTHSLQEELEKFDADYTEFEHWLQQSEQELENLEAGADDINGLMTKLKRQKSFSEDVISHKGDLRYITISGNRVLEAAKSCSKRDGGKVDTSATHREVQRKLDHATDRFRSLYSKCNVLGNNLKDLVDKYQHYEDASCGLLAGLQACEATASKHLSEPIAVDPKNLQRQLEETKALQGQISSQQVAVEKLKKTAEVLLDARGSLLPAKNDIQKTLDDIVGRYEDLSKSVNERNEKLQITLTRSLSVQDGLDEMLDWMGNVESSLKEQGQVPLNSTALQDIISKNIMLEQDIAGRQSSINAMNEKVKKFMETTDPSTASSLQAKMKDLSARFSEASHKHKETLAKMEELKTKVELFENLSEKLQTFLETKTQALTEVDVPGKDVTELSQYMQESTSEFLEHKKHLEVLHSLLKEISSHGLPSDKALVLEKTNNLSKKFKEMEDTIKEKKEAVTSCQEQLDAFQVLVKSLKSWIKETTKKVPIVQPSFGAEDLGKSLEDTKKLQEKWSLKTPEIQKVNNSGISLCNLISAVTTPAKAIAAVKSGGAVLNGEGTATNTEEFWANKGLTSIKKDMTDISHGYEDLGLLLKDKIAELNTKLSKLQKAQEESSAMMQWLQKMNKTATKWQQTPAPTDTEAVKTQVEQNKSFEAELKQNVNKVQELKDKLTELLEENPDTPEAPRWKQMLTEIDSKWQELNQLTIDRQQKLEESSNNLTQFQTVEAQLKQWLVEKELMVSVLGPLSIDPNMLNTQRQQVQILLQEFATRKPQYEQLTAAGQGILSRPGEDPSLRGIVKEQLAAVTQKWDSLTGQLSDRCDWIDQAIVKSTQYQSLLRSLSDKLSDLDNKLSSSLAVSTHPDAMNQQLETAQKMKQEIQQEKKQIKVAQALCEDLSALVKEEYLKAELSRQLEGILKSFKDVEQKAENHVQHLQSACASSHQFQQMSRDFQAWLDTKKEEQNKSHPISAKLDVLESLIKDHKDFSKTLTAQSHMYEKTIAEGENLLLKTQGSEKAALQLQLNTIKTNWDTFNKQVKERENKLKESLEKALKYKEQVETLWPWIDKCQNNLEEIKFCLDPAEGENSIAKLKSLQKEMDQHFGMVELLNNTANSLLSVCEIDKEVVTDENKSLIQKVDMVTEQLHSKKFCLENMTQKFKEFQEVSKESKRQLQCAKEQLDIHDSLGSQAYSNKYLTMLQTQQKSLQALKHQVDLAKRLAQDLVVEASDSKGTSDVLLQVETIAQEHSTLSQQVDEKCSFLETKLQGIGHFQNTIREMFSQFAEFDDELDSMAPVGRDAETLQKQKETIKAFLKKLEALMASNDNANKTCKMMLATEETSPDLVGIKRDLEALSKQCNKLLDRAQAREEQVEGTIKRLEEFYSKLKEFSILLQKAEEHEESQGPVGMETETINQQLNMFKVFQKEEIEPLQGKQQDVNWLGQGLIQSAAKSTSTQGLEHDLDDVNARWKTLNKKVAQRAAQLQEALLHCGRFQDALESLLSWMVDTEELVANQKPPSAEFKVVKAQIQEQKLLQRLLDDRKSTVEVIKREGEKIATTAEPADKVKILKQLSLLDSRWEALLNKAETRNRQLEGISVVAQQFHETLEPLNEWLTTIEKRLVNCEPIGTQASKLEEQIAQHKALEDDIINHNKHLHQAVSIGQSLKVLSSREDKDMVQSKLDFSQVWYIEIQEKSHSRSELLQQALCNAKIFGEDEVELMNWLNEVHDKLSKLSVQDYSTEGLWKQQSELRVLQEDILLRKQNVDQALLNGLELLKQTTGDEVLIIQDKLEAIKARYKDITKLSTDVAKTLEQALQLARRLHSTHEELCTWLDKVEVELLSYETQVLKGEEASQAQMRPKELKKEAKNNKALLDSLNEVSSALLELVPWRAREGLEKMVAEDNERYRLVSDTITQKVEEIDAAILRSQQFDQAADAELSWITETEKKLMSLGDIRLEQDQTSAQLQVQKTFTMEILRHKDIIDDLVKSGHKIMTACSEEEKQSMKKKLDKVLKNYDTICQINSERYLQLERAQSLVNQFWETYEELWPWLTETQSIISQLPAPALEYETLRQQQEEHRQLRELIAEHKPHIDKMNKTGPQLLELSPGEGFSIQEKYVAADTLYSQIKEDVKKRAVALDEAISQSTQFHDKIDQILESLERIVERLRQPPSISAEVEKIKEQISENKNVSVDMEKLQPLYETLKQRGEEMIARSGGTDKDISAKAVQDKLDQMVFIWENIHTLVEEREAKLLDVMELAEKFWCDHMSLIVTIKDTQDFIRDLEDPGIDPSVVKQQQEAAETIREEIDGLQEELDIVINLGSELIAACGEPDKPIVKKSIDELNSAWDSLNKAWKDRIDKLEEAMQAAVQYQDGLQAVFDWVDIAGGKLASMSPIGTDLETVKQQIEELKQFKSEAYQQQIEMERLNHQAELLLKKVTEESDKHTVQDPLMELKLIWDSLEERIINRQHKLEGALLALGQFQHALDELLAWLTHTEGLLSEQKPVGGDPKAIEIELAKHHVLQNDVLAHQSTVEAVNKAGNDLIESSAGEEASNLQNKLEVLNQRWQNVLEKTEQRKQQLDGALRQAKGFHGEIEDLQQWLTDTERHLLASKPLGGLPETAKEQLNVHMEVCAAFEAKEETYKSLMQKGQQMLARCPKSAETNIDQDINNLKEKWESVETKLNERKTKLEEALNLAMEFHNSLQDFINWLTQAEQTLNVASRPSLILDTVLFQIDEHKVFANEVNSHREQIIELDKTGTHLKYFSQKQDVVLIKNLLISVQSRWEKVVQRLVERGRSLDDARKRAKQFHEAWSKLMEWLEESEKSLDSELEIANDPDKIKTQLAQHKEFQKSLGAKHSVYDTTNRTGRSLKEKTSLADDNLKLDDMLSELRDKWDTICGKSVERQNKLEEALLFSGQFTDALQALIDWLYRVEPQLAEDQPVHGDIDLVMNLIDNHKAFQKELGKRTSSVQALKRSARELIEGSRDDSSWVKVQMQELSTRWETVCALSISKQTRLEAALRQAEEFHSVVHALLEWLAEAEQTLRFHGVLPDDEDALRTLIDQHKEFMKKLEEKRAELNKATTMGDTVLAICHPDSITTIKHWITIIRARFEEVLAWAKQHQQRLASALAGLIAKQELLEALLAWLQWAETTLTDKDKEVIPQEIEEVKALIAEHQTFMEEMTRKQPDVDKVTKTYKRRAADPSSLQSHIPVLDKGRAGRKRFPASSLYPSGSQTQIETKNPRVNLLVSKWQQVWLLALERRRKLNDALDRLEELREFANFDFDIWRKKYMRWMNHKKSRVMDFFRRIDKDQDGKITRQEFIDGILSSKFPTSRLEMSAVADIFDRDGDGYIDYYEFVAALHPNKDAYKPITDADKIEDEVTRQVAKCKCAKRFQVEQIGDNKYRFFLGNQFGDSQQLRLVRILRSTVMVRVGGGWMALDEFLVKNDPCRAKGRTNMELREKFILADGASQGMAAFRPRGRRSRPSSRGASPNRSTSVSSQAAQAASPQVPATTTPKILHPLTRNYGKPWLTNSKMSTPCKAAECSDFPVPSAEGTPIQGSKLRLPGYLSGKGFHSGEDSGLITTAAARVRTQFADSKKTPSRPGSRAGSKAGSRASSRRGSDASDFDISEIQSVCSDVETVPQTHRPTPRAGSRPSTAKPSKIPTPQRKSPASKLDKSSKR

SEQ ID NO: 4454 - protein, 1674 aa, Homo Sapiens
MGKPLSRPDCLRQNPPCVGKGEEEEDLNIEDCYVPQRSIYDTVRLNEQIDSGSKGSLSSRHFTDRTLPYSHRTLDVSSLCSNGALTSSSVFELRGREANKLDEKMIFDALKLNSDIIRTTGLPKAKSHAEKKEHRRSWRMFVPANFMDYANKSESSFVEPADMSDAVTKASKCRWGTNSLTSEEDDSGLCSPPAEREEKQGILTGDQSRIKSLSSTEDILVTDQYRPFFSVNSISEQKIPLLSCQSAHPDENFKMILHDVSPLEEAKHVNGQREIHDENCCLQNNLKESPVKCDPLIMPRNRENEHIFNLGEEDETYGPGESQITAQSRELLKDSPQDLDLSHTDLGESDVDCGSTSLVENVTLLTQYDSGECNIASKEEVEAPLSAQESEMLYKKFSLKFVSARKKAAPRKTGAQAGILDTVCNGFQLVQVFQKEEIEPLQGKQQDVNWLGQGLIQSAAKSTSTQGLEHDLDDVNARWKTLNKKVAQRAAQLQEALLHCGRFQDALESLLSWMVDTEELVANQKPPSAEFKVVKAQIQEQKLLQRLLDDRKSTVEVIKREGEKIATTAEPADKVKILKQLSLLDSRWEALLNKAETRNRQLEGISVVAQQFHETLEPLNEWLTTIEKRLVNCEPIGTQASKLEEQIAQHKALEDDIINHNKHLHQAVSIGQSLKVLSSREDKDMVQSKLDFSQVWYIEIQEKSHSRSELLQQALCNAKIFGEDEVELMNWLNEVHDKLSKLSVQDYSTEGLWKQQSELRVLQEDILLRKQNVDQALLNGLELLKQTTGDEVLIIQDKLEAIKARYKDITKLSTDVAKTLEQALQLARRLHSTHEELCTWLDKVEVELLSYETQVLKGEEASQAQMRPKELKKEAKNNKALLDSLNEVSSALLELVPWRAREGLEKMVAEDNERYRLVSDTITQKVEEIDAAILRSQQFDQAADAELSWITETEKKLMSLGDIRLEQDQTSAQLQVQKTFTMEILRHKDIIDDLVKSGHKIMTACSEEEKQSMKKKLDKVLKNYDTICQINSERYLQLERAQSLVNQFWETYEELWPWLTETQSIISQLPAPALEYETLRQQQEEHRQLRELIAEHKPHIDKMNKTGPQLLELSPGEGFSIQEKYVAADTLYSQIKEDVKKRAVALDEAISQSTQFHDKIDQILESLERIVERLRQPPSISAEVEKIKEQISENKNVSVDMEKLQPLYETLKQRGEEMIARSGGTDKDISAKAVQDKLDQMVFIWENIHTLVEEREAKLLDVMELAEKFWCDHMSLIVTIKDTQDFIRDLEDPGIDPSVVKQQQEAAETIREEIDGLQEELDIVINLGSELIAACGEPDKPIVKKSIDELNSAWDSLNKAWKDRIDKLEEAMQAAVQYQDGLQAVFDWVDIAGGKLASMSPIGTDLETVKQQIEELKQFKSEAYQQQIEMERLNHQAELLLKKVTEESDKHTVQDPLMELKLIWDSLEERIINRQHKLEGALLALGQFQHALDELLAWLTHTEGLLSEQKPVGGDPKAIEIELAKHHVLQNDVLAHQSTVEAVNKAGNDLIESSAGEEASNLQNKLEVLNQRWQNVLEKTEQRKQQLDGALRQAKGFHGEIEDLQQWLTDTERHLLASKPLGGLPETAKEQLNVHMEVCAAFEAKEETYKSLMQKGQQMLARCPKSAETNIDQD

SEQ ID NO: 4455 - protein, 304 aa, Homo Sapiens
MGNVCGCVRAEKEEQYVDPAKTPLNPEKYSPGRKYFRRKPIKKTGGDKESVGANNENEGKKKSSSQPSKEQPAPLSRGLVQQESVTLNSALGDGIQQKKTEVVADSVKQKLLPSAVSSWSDCVNTSPAKDSETEVKVSELDERISEKDSTPYCAKRKKHLDDVNTSEITFQEKTDVFSFRKAASLSSIPSGIERSLEKSGFPEDPPKSYSSIQEKQNTERFCPHATQHFQFKKKRCHSLYTSMSSVSKDTDGNEISDIHVTGESEDMSAKERLLLWTQQATEGYAGIRCENFTTCWRDGKLFNA

SEQ ID NO: 4456 - protein, 5171 aa, Homo Sapiens
MHSSSYSYRSSDSVFSNTTSTRTSLDSNENLLLVHCGPTLINSCISFGSESFDGHRLEMLQQIANRVQRDSVICEDKLILAGNALQSDSKRLESGVQFQNEAEIAGYILECENLLRQHVIDVQILIDGKYYQADQLVQRVAKLRDEIMALRNECSSVYSKGRILTTEQTKLMISGITQSLNSGFAQTLHPSLTSGLTQSLTPSLTSSSMTSGLSSGMTSRLTPSVTPAYTPGFPSGLVPNFSSGVEPNSLQTLKLMQIRKPLLKSSLLDQNLTEEEINMKFVQDLLNWVDEMQVQLDRTEWGSDLPSVESHLENHKNVHRAIEEFESSLKEAKISEIQMTAPLKLTYAEKLHRLESQYAKLLNTSRNQERHLDTLHNFVSRATNELIWLNEKEEEEVAYDWSERNTNIARKKDYHAELMRELDQKEENIKSVQEIAEQLLLENHPARLTIEAYRAAMQTQWSWILQLCQCVEQHIKENTAYFEFFNDAKEATDYLRNLKDAIQRKYSCDRSSSIHKLEDLVQESMEEKEELLQYKSTIANLMGKAKTIIQLKPRNSDCPLKTSIPIKAICDYRQIEITIYKDDECVLANNSHRAKWKVISPTGNEAMVPSVCFTVPPPNKEAVDLANRIEQQYQNVLTLWHESHINMKSVVSWHYLINEIDRIRASNVASIKTMLPGEHQQVLSNLQSRFEDFLEDSQESQVFSGSDITQLEKEVNVCKQYYQELLKSAEREEQEESVYNLYISEVRNIRLRLENCEDRLIRQIRTPLERDDLHESVFRITEQEKLKKELERLKDDLGTITNKCEEFFSQAAASSSVPTLRSELNVVLQNMNQVYSMSSTYIDKLKTVNLVLKNTQAAEALVKLYETKLCEEEAVIADKNNIENLISTLKQWRSEVDEKRQVFHALEDELQKAKAISDEMFKTYKERDLDFDWHKEKADQLVERWQNVHVQIDNRLRDLEGIGKSLKYYRDTYHPLDDWIQQVETTQRKIQENQPENSKTLATQLNQQKMLVSEIEMKQSKMDECQKYAEQYSATVKDYELQTMTYRAMVDSQQKSPVKRRRMQSSADLIIQEFMDLRTRYTALVTLMTQYIKFAGDSLKRLEEEEKSLEEEKKEHVEKAKELQKWVSNISKTLKDAEKAGKPPFSKQKISSEEISTKKEQLSEALQTIQLFLAKHGDKMTDEERNELEKQVKTLQESYNLLFSESLKQLQESQTSGDVKVEEKIVAERQQEYKEKLQGICDLLTQTENRLIGHQEAFMIGDGTVELKKYQSKQEELQKDMQGSAQALAEVVKNTENFLKENGEKLSQEDKALIEQKLNEAKIKCEQLNLKAEQSKKELDKVVTTAIKEETEKVAAVKQLEESKTKIENLLDWLSNVDKDSERAGTKHKQVIEQNGTHFQEGDGKSAIGEEDEVNGNLLETDVDGQVGTTQENLNQQYQKVKAQHEKIISQHQAVIIATQSAQVLLEKQGQYLSPEEKEKLQKNMKELKVHYETALAESEKKMKLTHSLQEELEKFDADYTEFEHWLQQSEQELENLEAGADDINGLMTKLKRQKSFSEDVISHKGDLRYITISGNRVLEAAKSCSKRDGGKVDTSATHREVQRKLDHATDRFRSLYSKCNVLGNNLKDLVDKYQHYEDASCGLLAGLQACEATASKHLSEPIAVDPKNLQRQLEETKALQGQISSQQVAVEKLKKTAEVLLDARGSLLPAKNDIQKTLDDIVGRYEDLSKSVNERNEKLQITLTRSLSVQDGLDEMLDWMGNVESSLKEQGQVPLNSTALQDIISKNIMLEQDIAGRQSSINAMNEKVKKFMETTDPSTASSLQAKMKDLSARFSEASHKHKETLAKMEELKTKVELFENLSEKLQTFLETKTQALTEVDVPGKDVTELSQYMQESTSEFLEHKKHLEVLHSLLKEISSHGLPSDKALVLEKTNNLSKKFKEMEDTIKEKKEAVTSCQEQLDAFQVLVKSLKSWIKETTKKVPIVQPSFGAEDLGKSLEDTKKLQEKWSLKTPEIQKVNNSGISLCNLISAVTTPAKAIAAVKSGGAVLNGEGTATNTEEFWANKGLTSIKKDMTDISHGYEDLGLLLKDKIAELNTKLSKLQKAQEESSAMMQWLQKMNKTATKWQQTPAPTDTEAVKTQVEQNKSFEAELKQNVNKVQELKDKLTELLEENPDTPEAPRWKQMLTEIDSKWQELNQLTIDRQQKLEESSNNLTQFQTVEAQLKQWLVEKELMVSVLGPLSIDPNMLNTQRQQVQILLQEFATRKPQYEQLTAAGQGILSRPGEDPSLRGIVKEQLAAVTQKWDSLTGQLSDRCDWIDQAIVKSTQYQSLLRSLSDKLSDLDNKLSSSLAVSTHPDAMNQQLETAQKMKQEIQQEKKQIKVAQALCEDLSALVKEEYLKAELSRQLEGILKSFKDVEQKAENHVQHLQSACASSHQFQQMSRDFQAWLDTKKEEQNKSHPISAKLDVLESLIKDHKDFSKTLTAQSHMYEKTIAEGENLLLKTQGSEKAALQLQLNTIKTNWDTFNKQVKERENKLKESLEKALKYKEQVETLWPWIDKCQNNLEEIKFCLDPAEGENSIAKLKSLQKEMDQHFGMVELLNNTANSLLSVCEIDKEVVTDENKSLIQKVDMVTEQLHSKKFCLENMTQKFKEFQEVSKESKRQLQCAKEQLDIHDSLGSQAYSNKYLTMLQTQQKSLQALKHQVDLAKRLAQDLVVEASDSKGTSDVLLQVETIAQEHSTLSQQVDEKCSFLETKLQGIGHFQNTIREMFSQFAEFDDELDSMAPVGRDAETLQKQKETIKAFLKKLEALMASNDNANKTCKMMLATEETSPDLVGIKRDLEALSKQCNKLLDRAQAREEQVEGTIKRLEEFYSKLKEFSILLQKAEEHEESQGPVGMETETINQQLNMFKVFQKEEIEPLQGKQQDVNWLGQGLIQSAAKSTSTQGLEHDLDDVNARWKTLNKKVAQRAAQLQEALLHCGRFQDALESLLSWMVDTEELVANQKPPSAEFKVVKAQIQEQKLLQRLLDDRKSTVEVIKREGEKIATTAEPADKVKILKQLSLLDSRWEALLNKAETRNRQLEGISVVAQQFHETLEPLNEWLTTIEKRLVNCEPIGTQASKLEEQIAQHKALEDDIINHNKHLHQAVSIGQSLKVLSSREDKDMVQSKLDFSQVWYIEIQEKSHSRSELLQQALCNAKIFGEDEVELMNWLNEVHDKLSKLSVQDYSTEGLWKQQSELRVLQEDILLRKQNVDQALLNGLELLKQTTGDEVLIIQDKLEAIKARYKDITKLSTDVAKTLEQALQLARRLHSTHEELCTWLDKVEVELLSYETQVLKGEEASQAQMRPKELKKEAKNNKALLDSLNEVSSALLELVPWRAREGLEKMVAEDNERYRLVSDTITQKVEEIDAAILRSQQFDQAADAELSWITETEKKLMSLGDIRLEQDQTSAQLQVQKTFTMEILRHKDIIDDLVKSGHKIMTACSEEEKQSMKKKLDKVLKNYDTICQINSERYLQLERAQSLVNQFWETYEELWPWLTETQSIISQLPAPALEYETLRQQQEEHRQLRELIAEHKPHIDKMNKTGPQLLELSPGEGFSIQEKYVAADTLYSQIKEDVKKRAVALDEAISQSTQFHDKIDQILESLERIVERLRQPPSISAEVEKIKEQISENKNVSVDMEKLQPLYETLKQRGEEMIARSGGTDKDISAKAVQDKLDQMVFIWENIHTLVEEREAKLLDVMELAEKFWCDHMSLIVTIKDTQDFIRDLEDPGIDPSVVKQQQEAAETIREEIDGLQEELDIVINLGSELIAACGEPDKPIVKKSIDELNSAWDSLNKAWKDRIDKLEEAMQAAVQYQDGLQAVFDWVDIAGGKLASMSPIGTDLETVKQQIEELKQFKSEAYQQQIEMERLNHQAELLLKKVTEESDKHTVQDPLMELKLIWDSLEERIINRQHKLEGALLALGQFQHALDELLAWLTHTEGLLSEQKPVGGDPKAIEIELAKHHVLQNDVLAHQSTVEAVNKAGNDLIESSAGEEASNLQNKLEVLNQRWQNVLEKTEQRKQQLDGALRQAKGFHGEIEDLQQWLTDTERHLLASKPLGGLPETAKEQLNVHMEVCAAFEAKEETYKSLMQKGQQMLARCPKSAETNIDQDINNLKEKWESVETKLNERKTKLEEALNLAMEFHNSLQDFINWLTQAEQTLNVASRPSLILDTVLFQIDEHKVFANEVNSHREQIIELDKTGTHLKYFSQKQDVVLIKNLLISVQSRWEKVVQRLVERGRSLDDARKRAKQFHEAWSKLMEWLEESEKSLDSELEIANDPDKIKTQLAQHKEFQKSLGAKHSVYDTTNRTGRSLKEKTSLADDNLKLDDMLSELRDKWDTICGKSVERQNKLEEALLFSGQFTDALQALIDWLYRVEPQLAEDQPVHGDIDLVMNLIDNHKAFQKELGKRTSSVQALKRSARELIEGSRDDSSWVKVQMQELSTRWETVCALSISKQTRLEAALRQAEEFHSVVHALLEWLAEAEQTLRFHGVLPDDEDALRTLIDQHKEFMKKLEEKRAELNKATTMGDTVLAICHPDSITTIKHWITIIRARFEEVLAWAKQHQQRLASALAGLIAKQELLEALLAWLQWAETTLTDKDKEVIPQEIEEVKALIAEHQTFMEEMTRKQPDVDKVTKTYKRRAADPSSLQSHIPVLDKGRAGRKRFPASSLYPSGSQTQIETKNPRVNLLVSKWQQVWLLALERRRKLNDALDRLEELREFANFDFDIWRKKYMRWMNHKKSRVMDFFRRIDKDQDGKITRQEFIDGILSSKFPTSRLEMSAVADIFDRDGDGYIDYYEFVAALHPNKDAYKPITDADKIEDEVTRQVAKCKCAKRFQVEQIGDNKYRFFLGNQFGDSQQLRLVRILRSTVMVRVGGGWMALDEFLVKNDPCRAKGRTNMELREKFILADGASQGMAAFRPRGRRSRPSSRGASPNRSTSVSSQAAQAASPQVPATTTPKILHPLTRNYGKPWLTNSKMSTPCKAAECSDFPVPSAEGTPIQGSKLRLPGYLSGKGFHSGEDSGLITTAAARVRTQFADSKKTPSRPGSRAGSKAGSRASSRRGSDASDFDISEIQSVCSDVETVPQTHRPTPRAGSRPSTAKPSKIPTPQRKSPASKLDKSSKR

SEQ ID NO: 4457 - protein, 2649 aa, Homo Sapiens
MHSSSYSYRSSDSVFSNTTSTRTSLDSNENLLLVHCGPTLINSCISFGSESFDGHRLEMLQQIANRVQRDSVICEDKLILAGNALQSDSKRLESGVQFQNEAEIAGYILECENLLRQHVIDVQILIDGKYYQADQLVQRVAKLRDEIMALRNECSSVYSKGRILTTEQTKLMISGITQSLNSGFAQTLHPSLTSGLTQSLTPSLTSSSMTSGLSSGMTSRLTPSVTPAYTPGFPSGLVPNFSSGVEPNSLQTLKLMQIRKPLLKSSLLDQNLTEEEINMKFVQDLLNWVDEMQVQLDRTEWGSDLPSVESHLENHKNVHRAIEEFESSLKEAKISEIQMTAPLKLTYAEKLHRLESQYAKLLNTSRNQERHLDTLHNFVSRATNELIWLNEKEEEEVAYDWSERNTNIARKKDYHAELMRELDQKEENIKSVQEIAEQLLLENHPARLTIEAYRAAMQTQWSWILQLCQCVEQHIKENTAYFEFFNDAKEATDYLRNLKDAIQRKYSCDRSSSIHKLEDLVQESMEEKEELLQYKSTIANLMGKAKTIIQLKPRNSDCPLKTSIPIKAICDYRQIEITIYKDDECVLANNSHRAKWKVISPTGNEAMVPSVCFTVPPPNKEAVDLANRIEQQYQNVLTLWHESHINMKSVVSWHYLINEIDRIRASNVASIKTMLPGEHQQVLSNLQSRFEDFLEDSQESQVFSGSDITQLEKEVNVCKQYYQELLKSAEREEQEESVYNLYISEVRNIRLRLENCEDRLIRQIRTPLERDDLHESVFRITEQEKLKKELERLKDDLGTITNKCEEFFSQAAASSSVPTLRSELNVVLQNMNQVYSMSSTYIDKLKTVNLVLKNTQAAEALVKLYETKLCEEEAVIADKNNIENLISTLKQWRSEVDEKRQVFHALEDELQKAKAISDEMFKTYKERDLDFDWHKEKADQLVERWQNVHVQIDNRLRDLEGIGKSLKYYRDTYHPLDDWIQQVETTQRKIQENQPENSKTLATQLNQQKMLVSEIEMKQSKMDECQKYAEQYSATVKDYELQTMTYRAMVDSQQKSPVKRRRMQSSADLIIQEFMDLRTRYTALVTLMTQYIKFAGDSLKRLEEEEIKRCKETSEHGAYSDLLQRQKATVLENSKLTGKISELERMVAELKKQKSRVEEELPKVREAAENELRKQQRNVEDISLQKIRAESEAKQYRRELETIVREKEAAERELERVRQLTIEAEAKRAAVEENLLNFRNQLEENTFTRRTLEDHLKRKDLSLNDLEQQKNKLMEELRRKRDNEEELLKLIKQMEKDLAFQKQVAEKQLKEKQKIELEARRKITEIQYTCRENALPVCPITQATSCRAVTGLQQEHDKQKAEELKQQVDELTAANRKAEQDMRELTYELNALQLEKTSSEEKARLLKDKLDETNNTLRCLKLELERKDQAEKGYSQQLRELGRQLNQTTGKAEEAMQEASDLKKIKRNYQLELESLNHEKGKLQREVDRITRAHAVAEKNIQHLNSQIHSFRDEKELERLQICQRKSDHLKEQFEKSHEQLLQNIKAEKENNDKIQRLNEELEKSNECAEMLKQKVEELTRQNNETKLMMQRIQAESENIVLEKQTIQQRCEALKIQADGFKDQLRSTNEHLHKQTKTEQDFQRKIKCLEEDLAKSQNLVSEFKQKCDQQNIIIQNTKKEVRNLNAELNASKEEKRRGEQKVQLQQAQVQELNNRLKKVQDELHLKTIEEQMTHRKMVLFQEESGKFKQSAEEFRKKMEKLMESKVITENDISGIRLDFVSLQQENSRAQENAKLCETNIKELERQLQQYREQMQQGQHMEANHYQKCQKLEDELIAQKREVENLKQKMDQQIKEHEHQLVLLQCEIQKKSTAKDCTFKPDFEMTVKECQHSGELSSRNTGHLHPTPRSPLLRWTQEPQPLEEKWQHRVVEQIPKEVQFQPPGAPLEKEKSQQCYSEYFSQTSTELQITFDETNPITRLSEIEKIRDQALNNSRPPVRYQDNACEMELVKVLTPLEIAKNKQYDMHTEVTTLKQEKNPVPSAEEWMLEGCRASGGLKKGDFLKKGLEPETFQNFDGDHACSVRDDEFKFQGLRHTVTARQLVEAKLLDMRTIEQLRLGLKTVEEVQKTLNKFLTKATSIAGLYLESTKEKISFASAAERIIIDKMVALAFLEAQAATGFIIDPISGQTYSVEDAVLKGVVDPEFRIRLLEAEKAAVGYSYSSKTLSVFQAMENRMLDRQKGKHILEAQIASGGVIDPVRGIRVPPEIALQQGLLNNAILQFLHEPSSNTRVFPNPNNKQALYYSELLRMCVFDVESQCFLFPFGERNISNLNVKKTHRISVVDTKTGSELTVYEAFQRNLIEKSIYLELSGQQYQWKEAMFFESYGHSSHMLTDTKTGLHFNINEAIEQGTIDKALVKKYQEGLITLTELADSLLSRLVPKKDLHSPVAGYWLTASGERISVLKASRRNLVDRITALRCLEAQVSTGGIIDPLTGKKYRVAEALHRGLVDEGFAQQLRQCELVITGIGHPITNKMMSVVEAVNANIINKEMGIRCLEFQYLTGGLIEPQVHSRLSIEEALQVGIIDVLIATKLKDQKSYVRNIICPQTKRKLTYKEALEKADFDFHTGLKLLEVSEPLMTGISSLYYSS

SEQ ID NO: 4458 - protein, 3060 aa, Homo Sapiens
MHSSSYSYRSSDSVFSNTTSTRTSLDSNENLLLVHCGPTLINSCISFGSESFDGHRLEMLQQIANRVQRDSVICEDKLILAGNALQSDSKRLESGVQFQNEAEIAGYILECENLLRQHVIDVQILIDGKYYQADQLVQRVAKLRDEIMALRNECSSVYSKGRILTTEQTKLMISGITQSLNSGFAQTLHPSLTSGLTQSLTPSLTSSSMTSGLSSGMTSRLTPSVTPAYTPGFPSGLVPNFSSGVEPNSLQTLKLMQIRKPLLKSSLLDQNLTEEEINMKFVQDLLNWVDEMQVQLDRTEWGSDLPSVESHLENHKNVHRAIEEFESSLKEAKISEIQMTAPLKLTYAEKLHRLESQYAKLLNTSRNQERHLDTLHNFVSRATNELIWLNEKEEEEVAYDWSERNTNIARKKDYHAELMRELDQKEENIKSVQEIAEQLLLENHPARLTIEAYRAAMQTQWSWILQLCQCVEQHIKENTAYFEFFNDAKEATDYLRNLKDAIQRKYSCDRSSSIHKLEDLVQESMEEKEELLQYKSTIANLMGKAKTIIQLKPRNSDCPLKTSIPIKAICDYRQIEITIYKDDECVLANNSHRAKWKVISPTGNEAMVPSVCFTVPPPNKEAVDLANRIEQQYQNVLTLWHESHINMKSVVSWHYLINEIDRIRASNVASIKTMLPGEHQQVLSNLQSRFEDFLEDSQESQVFSGSDITQLEKEVNVCKQYYQELLKSAEREEQEESVYNLYISEVRNIRLRLENCEDRLIRQIRTPLERDDLHESVFRITEQEKLKKELERLKDDLGTITNKCEEFFSQAAASSSVPTLRSELNVVLQNMNQVYSMSSTYIDKLKTVNLVLKNTQAAEALVKLYETKLCEEEAVIADKNNIENLISTLKQWRSEVDEKRQVFHALEDELQKAKAISDEMFKTYKERDLDFDWHKEKADQLVERWQNVHVQIDNRLRDLEGIGKSLKYYRDTYHPLDDWIQQVETTQRKIQENQPENSKTLATQLNQQKMLVSEIEMKQSKMDECQKYAEQYSATVKDYELQTMTYRAMVDSQQKSPVKRRRMQSSADLIIQEFMDLRTRYTALVTLMTQYIKFAGDSLKRLEEEEKSLEEEKKEHVEKAKELQKWVSNISKTLKDAEKAGKPPFSKQKISSEEISTKKEQLSEALQTIQLFLAKHGDKMTDEERNELEKQVKTLQESYNLLFSESLKQLQESQTSGDVKVEEKLDKVIAGTIDQTTGEVLSVFQAVLRGLIDYDTGIRLLETQLMISGLISPELRKCFDLKDAKSHGLIDEQILCQLKELSKAKEIISAASPTTIPVLDALAQSMITESMAIKVLEILLSTGSLVIPATGEQLTLQKAFQQNLVSSALFSKVLERQNMCKDLIDPCTSEKVSLIDMVQRSTLQENTGMWLLPVRPQEGGRITLKCGRNISILRAAHEGLIDRETMFRLLSAQLLSGGLINSNSGQRMTVEEAVREGVIDRDTASSILTYQVQTGGIIQSNPAKRLTVDEAVQCDLITSSSALLVLEAQRGYVGLIWPHSGEIFPTSSSLQQELITNELAYKILNGRQKIAALYIPESSQVIGLDAAKQLGIIDNNTASILKNITLPDKMPDLGDLEACKNARRWLSFCKFQPSTVHDYRQEEDVFDGEEPVTTQTSEETKKLFLSYLMINSYMDANTGQRLLLYDGDLDEAVGMLLEGCHAEFDGNTAIKECLDVLSSSGVFLNNASGREKDECTATPSSFNKCHCGEPEHEETPENRKCAIDEEFNEMRNTVINSEFSQSGKLASTISIDPKVNSSPSVCVPSLISYLTQTELADISMLRSDSENILTNYENQSRVETNERANECSHSKNIQNFPSDLIENPIMKSKMSKFCGVNETENEDNTNRDSPIFDYSPRLSALLSHDKLMHSQGSFNDTHTPESNGNKCEAPALSFSDKTMLSGQRIGEKFQDQFLGIAAINISLPGEQYGQKSLNMISSNPQVQYHNDKYISNTSGEDEKTHPGFQQMPEDKEDESEIEEYSCAVTPGGDTDNAIVSLTCATPLLDETISASDYETSLLNDQQNNTGTDTDSDDDFYDTPLFEDDDHDSLLLDGDDRDCLHPEDYDTLQEENDETASPADVFYDVSKENENSMVPQGAPVGSLSVKNKAHCLQDFLMDVEKDELDSGEKIHLNPVGSDKVNGQSLETGSERECTNILEGDESDSLTDYDIVGGKESFTASLKFDDSGSWRGRKEEYVTGQEFHSDTDHLDSMQSEESYGDYIYDSNDQDDDDDDGIDEEGGGIRDENGKPRCQNVAEDMDIQLCASILNENSDENENINTMILLDKMHSCSSLEKQQRVNVVQLASPSENNLVTEKSNLPEYTTEIAGKSKENLLNHEMVLKDVLPPIIKDTESEKTFGPASISHDNNNISSTSELGTDLANTKVKLIQGSELPELTDSVKGKDEYFKNMTPKVDSSLDHIICTEPDLIGKPAEESHLSLIASVTDKDPQGNGSDLIKGRDGKSDILIEDETSIQKMYLGEGEVLVEGLVEEENRHLKLLPGKNTRDSFKLINSQFPFPQITNNEELNQKGSLKKATVTLKDEPNNLQIIVSKSPVQFENLEEIFDTSVSKEISDDITSDITSWEGNTHFEESFTDGPEKELDLFTYLKHCAKNIKAKDVAKPNEDVPSHVLITAPPMKEHLQLGVNNTKEKSTSTQKDSPLNDMIQSNDLCSKESISGGGTEISQFTPESIEATLSILSRKHVEDVGKNDFLQSERCANGLGNDNSSNTLNTDYSFLEINNKKERIEQQLPKEQALSPRSQEKEVQIPELSQVFVEDVKDILKSRLKEGHMNPQEVEEPSACADTKILIQNLIKRITTSQLVNEASTVPSDSQMSDSSGVSPMTNSSELKPESRDDPFCIGNLKSELLLNILKQDQHSQKITGVFELMRELTHMEYDLEKRGITSKVLPLQLENIFYKLLADGYSEKIEHVGDFNQKACSTSEMMEEKPHILGDIKSKEGNYYSPNLETVKEIGLESSTVWASTLPRDEKLKDLCNDFPSHLECTSGSKEMASGDSSTEQ

SEQ ID NO: 4459 - protein, 1143 aa, Homo Sapiens
MHSSSYSYRSSDSVFSNTTSTRTSLDSNENLLLVHCGPTLINSCISFGSESFDGHRLEMLQQIANRVQRDSVICEDKLILAGNALQSDSKRLESGVQFQNEAEIAGYILECENLLRQHVIDVQILIDGKYYQADQLVQRVAKLRDEIMALRNECSSVYSKGRILTTEQTKLMISGITQSLNSGFAQTLHPSLTSGLTQSLTPSLTSSSMTSGLSSGMTSRLTPSVTPAYTPGFPSGLVPNFSSGVEPNSLQTLKLMQIRKPLLKSSLLDQNLTEEEINMKFVQDLLNWVDEMQVQLDRTEWGSDLPSVESHLENHKNVHRAIEEFESSLKEAKISEIQMTAPLKLTYAEKLHRLESQYAKLLNTSRNQERHLDTLHNFVSRATNELIWLNEKEEEEVAYDWSERNTNIARKKDYHAELMRELDQKEENIKSVQEIAEQLLLENHPARLTIEAYRAAMQTQWSWILQLCQCVEQHIKENTAYFEFFNDAKEATDYLRNLKDAIQRKYSCDRSSSIHKLEDLVQESMEEKEELLQYKSTIANLMGKAKTIIQLKPRNSDCPLKTSIPIKAICDYRQIEITIYKDDECVLANNSHRAKWKVISPTGNEAMVPSVCFTVPPPNKEAVDLANRIEQQYQNVLTLWHESHINMKSVVSWHYLINEIDRIRASNVASIKTMLPGEHQQVLSNLQSRFEDFLEDSQESQVFSGSDITQLEKEVNVCKQYYQELLKSAEREEQEESVYNLYISEVRNIRLRLENCEDRLIRQIRTPLERDDLHESVFRITEQEKLKKELERLKDDLGTITNKCEEFFSQAAASSSVPTLRSELNVVLQNMNQVYSMSSTYIDKLKTVNLVLKNTQAAEALVKLYETKLCEEEAVIADKNNIENLISTLKQWRSEVDEKRQVFHALEDELQKAKAISDEMFKTYKERDLDFDWHKEKADQLVERWQNVHVQIDNRLRDLEGIGKSLKYYRDTYHPLDDWIQQVETTQRKIQENQPENSKTLATQLNQQKMLVSEIEMKQSKMDECQKYAEQYSATVKDYELQTMTYRAMVDSQQKSPVKRRRMQSSADLIIQEFMDLRTRYTALVTLMTQYIKFAGDSLKRLEEEEVIINSEHPVNIKELEMSSNYSVVWESKTCFMINLCGR

SEQ ID NO: 4460 - protein, 689 aa, Homo Sapiens
MIAAAFLVLLRPYSIQCALFLLLLLLGTIATIVFFCCWHRKLQKGRHPMKSVFSGRSRSRDAVLRSHHFRSEGFRASPRHLRRRVAAAAAARLEEVKPVVEVHHQSEQETSVRKRRIKKSSRVQPEFYHSVQGASIRRPSSGNASYRCSMSSSADFSDEDDFSQKSGSASPAPGDTLPWNLPKHERSKRKIQGGSVLDPAERAVLRIADERDKVQKKTFTKWINQHLMKVRKHVNDLYEDLRDGHNLISLLEVLSGDTLPREKGRMRFHRLQNVQIALDYLKRRQVKLVNIRNDDITDGNPKLTLGLIWTIILHFQISDIHVTGESEDMSAKERLLLWTQQATEGYAGIRCENFTTCWRDGKLFNAIIHKYRPDLIDMNTVAVQSNLANLEHAFYVAEKIGVIRLLDPEDVDVSSPDEKSVITYVSSLYDAFPKVPEGGEGIGANDVEVKWIEYQNMVNYLIQWIRHHVTTMSERTFPNNPVELKALYNQYLQFKETEIPPKETEKSKIKRLYKLLEIWIEFGRIKLLQGYHPNDIEKEWGKLIIAMLEREKALRPEVERLEMLQQIANRVQRDSVICEDKLILAGNALQSDSKRLESGVQFQNEAEIAGYILECENLLRQHVIDVQILIDGKYYQADQLVQRVAKLRDEIMALRNECSSVYSKGRILTTEQTKLMISGITQSLNSGFA

SEQ ID NO: 4461 - protein, 133 aa, Homo Sapiens
MKVRKHVNDLYEDLRDGHNLISLLEVLSGDTLPREKGRMRFHRLQNVQIALDYLKRRQVKLVNIRNDDITDGNPKLTLGLIWTIILHFQISDIHVTGESEDMSAKERLLLWTQQATEGYAGIRCENFTTCWRD

SEQ ID NO: 4462 - protein, 154 aa, Homo Sapiens
MMGQLMKNDQDWNAKLVGLMCCMDERDKVQKKTFTKWINQHLMKVRKHVNDLYEDLRDGHNLISLLEVLSGDTLPREKGRMRFHRLQNVQIALDYLKRRQVKLVNIRNDDITDGNPKLTLGLIWTIILHFQISDIHVTGESEDMSAKERLLLWT

SEQ ID NO: 4463 - protein, 5537 aa, Homo Sapiens
MSSGNASYRCSMSSSADFSDEDDFSQKSGSASPAPGDTLPWNLPKHERSKRKIQGGSVLDPAERAVLRIADERDKVQKKTFTKWINQHLMKVRKHVNDLYEDLRDGHNLISLLEVLSGDTLPREKGRMRFHRLQNVQIALDYLKRRQVKLVNIRNDDITDGNPKLTLGLIWTIILHFQISDIHVTGESEDMSAKERLLLWTQQATEGYAGIRCENFTTCWRDGKLFNAIIHKYRPDLIDMNTVAVQSNLANLEHAFYVAEKIGVIRLLDPEDVDVSSPDEKSVITYVSSLYDAFPKVPEGGEGIGANDVEVKWIEYQNMVNYLIQWIRHHVTTMSERTFPNNPVELKALYNQYLQFKETEIPPKETEKSKIKRLYKLLEIWIEFGRIKLLQGYHPNDIEKEWGKLIIAMLEREKALRPEVERLEMLQQIANRVQRDSVICEDKLILAGNALQSDSKRLESGVQFQNEAEIAGYILECENLLRQHVIDVQILIDGKYYQADQLVQRVAKLRDEIMALRNECSSVYSKGRILTTEQTKLMISGITQSLNSGFAQTLHPSLTSGLTQSLTPSLTSSSMTSGLSSGMTSRLTPSVTPAYTPGFPSGLVPNFSSGVEPNSLQTLKLMQIRKPLLKSSLLDQNLTEEEINMKFVQDLLNWVDEMQVQLDRTEWGSDLPSVESHLENHKNVHRAIEEFESSLKEAKISEIQMTAPLKLTYAEKLHRLESQYAKLLNTSRNQERHLDTLHNFVSRATNELIWLNEKEEEEVAYDWSERNTNIARKKDYHAELMRELDQKEENIKSVQEIAEQLLLENHPARLTIEAYRAAMQTQWSWILQLCQCVEQHIKENTAYFEFFNDAKEATDYLRNLKDAIQRKYSCDRSSSIHKLEDLVQESMEEKEELLQYKSTIANLMGKAKTIIQLKPRNSDCPLKTSIPIKAICDYRQIEITIYKDDECVLANNSHRAKWKVISPTGNEAMVPSVCFTVPPPNKEAVDLANRIEQQYQNVLTLWHESHINMKSVVSWHYLINEIDRIRASNVASIKTMLPGEHQQVLSNLQSRFEDFLEDSQESQVFSGSDITQLEKEVNVCKQYYQELLKSAEREEQEESVYNLYISEVRNIRLRLENCEDRLIRQIRTPLERDDLHESVFRITEQEKLKKELERLKDDLGTITNKCEEFFSQAAASSSVPTLRSELNVVLQNMNQVYSMSSTYIDKLKTVNLVLKNTQAAEALVKLYETKLCEEEAVIADKNNIENLISTLKQWRSEVDEKRQVFHALEDELQKAKAISDEMFKTYKERDLDFDWHKEKADQLVERWQNVHVQIDNRLRDLEGIGKSLKYYRDTYHPLDDWIQQVETTQRKIQENQPENSKTLATQLNQQKMLVSEIEMKQSKMDECQKYAEQYSATVKDYELQTMTYRAMVDSQQKSPVKRRRMQSSADLIIQEFMDLRTRYTALVTLMTQYIKFAGDSLKRLEEEEKSLEEEKKEHVEKAKELQKWVSNISKTLKDAEKAGKPPFSKQKISSEEISTKKEQLSEALQTIQLFLAKHGDKMTDEERNELEKQVKTLQESYNLLFSESLKQLQESQTSGDVKVEEKIVAERQQEYKEKLQGICDLLTQTENRLIGHQEAFMIGDGTVELKKYQSKQEELQKDMQGSAQALAEVVKNTENFLKENGEKLSQEDKALIEQKLNEAKIKCEQLNLKAEQSKKELDKVVTTAIKEETEKVAAVKQLEESKTKIENLLDWLSNVDKDSERAGTKHKQVIEQNGTHFQEGDGKSAIGEEDEVNGNLLETDVDGQVGTTQENLNQQYQKVKAQHEKIISQHQAVIIATQSAQVLLEKQGQYLSPEEKEKLQKNMKELKVHYETALAESEKKMKLTHSLQEELEKFDADYTEFEHWLQQSEQELENLEAGADDINGLMTKLKRQKSFSEDVISHKGDLRYITISGNRVLEAAKSCSKRDGGKVDTSATHREVQRKLDHATDRFRSLYSKCNVLGNNLKDLVDKYQHYEDASCGLLAGLQACEATASKHLSEPIAVDPKNLQRQLEETKALQGQISSQQVAVEKLKKTAEVLLDARGSLLPAKNDIQKTLDDIVGRYEDLSKSVNERNEKLQITLTRSLSVQDGLDEMLDWMGNVESSLKEQGQVPLNSTALQDIISKNIMLEQDIAGRQSSINAMNEKVKKFMETTDPSTASSLQAKMKDLSARFSEASHKHKETLAKMEELKTKVELFENLSEKLQTFLETKTQALTEVDVPGKDVTELSQYMQESTSEFLEHKKHLEVLHSLLKEISSHGLPSDKALVLEKTNNLSKKFKEMEDTIKEKKEAVTSCQEQLDAFQVLVKSLKSWIKETTKKVPIVQPSFGAEDLGKSLEDTKKLQEKWSLKTPEIQKVNNSGISLCNLISAVTTPAKAIAAVKSGGAVLNGEGTATNTEEFWANKGLTSIKKDMTDISHGYEDLGLLLKDKIAELNTKLSKLQKAQEESSAMMQWLQKMNKTATKWQQTPAPTDTEAVKTQVEQNKSFEAELKQNVNKVQELKDKLTELLEENPDTPEAPRWKQMLTEIDSKWQELNQLTIDRQQKLEESSNNLTQFQTVEAQLKQWLVEKELMVSVLGPLSIDPNMLNTQRQQVQILLQEFATRKPQYEQLTAAGQGILSRPGEDPSLRGIVKEQLAAVTQKWDSLTGQLSDRCDWIDQAIVKSTQYQSLLRSLSDKLSDLDNKLSSSLAVSTHPDAMNQQLETAQKMKQEIQQEKKQIKVAQALCEDLSALVKEEYLKAELSRQLEGILKSFKDVEQKAENHVQHLQSACASSHQFQQMSRDFQAWLDTKKEEQNKSHPISAKLDVLESLIKDHKDFSKTLTAQSHMYEKTIAEGENLLLKTQGSEKAALQLQLNTIKTNWDTFNKQVKERENKLKESLEKALKYKEQVETLWPWIDKCQNNLEEIKFCLDPAEGENSIAKLKSLQKEMDQHFGMVELLNNTANSLLSVCEIDKEVVTDENKSLIQKVDMVTEQLHSKKFCLENMTQKFKEFQEVSKESKRQLQCAKEQLDIHDSLGSQAYSNKYLTMLQTQQKSLQALKHQVDLAKRLAQDLVVEASDSKGTSDVLLQVETIAQEHSTLSQQVDEKCSFLETKLQGIGHFQNTIREMFSQFAEFDDELDSMAPVGRDAETLQKQKETIKAFLKKLEALMASNDNANKTCKMMLATEETSPDLVGIKRDLEALSKQCNKLLDRAQAREEQVEGTIKRLEEFYSKLKEFSILLQKAEEHEESQGPVGMETETINQQLNMFKVFQKEEIEPLQGKQQDVNWLGQGLIQSAAKSTSTQGLEHDLDDVNARWKTLNKKVAQRAAQLQEALLHCGRFQDALESLLSWMVDTEELVANQKPPSAEFKVVKAQIQEQKLLQRLLDDRKSTVEVIKREGEKIATTAEPADKVKILKQLSLLDSRWEALLNKAETRNRQLEGISVVAQQFHETLEPLNEWLTTIEKRLVNCEPIGTQASKLEEQIAQHKALEDDIINHNKHLHQAVSIGQSLKVLSSREDKDMVQSKLDFSQVWYIEIQEKSHSRSELLQQALCNAKIFGEDEVELMNWLNEVHDKLSKLSVQDYSTEGLWKQQSELRVLQEDILLRKQNVDQALLNGLELLKQTTGDEVLIIQDKLEAIKARYKDITKLSTDVAKTLEQALQLARRLHSTHEELCTWLDKVEVELLSYETQVLKGEEASQAQMRPKELKKEAKNNKALLDSLNEVSSALLELVPWRAREGLEKMVAEDNERYRLVSDTITQKVEEIDAAILRSQQFDQAADAELSWITETEKKLMSLGDIRLEQDQTSAQLQVQKTFTMEILRHKDIIDDLVKSGHKIMTACSEEEKQSMKKKLDKVLKNYDTICQINSERYLQLERAQSLVNQFWETYEELWPWLTETQSIISQLPAPALEYETLRQQQEEHRQLRELIAEHKPHIDKMNKTGPQLLELSPGEGFSIQEKYVAADTLYSQIKEDVKKRAVALDEAISQSTQFHDKIDQILESLERIVERLRQPPSISAEVEKIKEQISENKNVSVDMEKLQPLYETLKQRGEEMIARSGGTDKDISAKAVQDKLDQMVFIWENIHTLVEEREAKLLDVMELAEKFWCDHMSLIVTIKDTQDFIRDLEDPGIDPSVVKQQQEAAETIREEIDGLQEELDIVINLGSELIAACGEPDKPIVKKSIDELNSAWDSLNKAWKDRIDKLEEAMQAAVQYQDGLQAVFDWVDIAGGKLASMSPIGTDLETVKQQIEELKQFKSEAYQQQIEMERLNHQAELLLKKVTEESDKHTVQDPLMELKLIWDSLEERIINRQHKLEGALLALGQFQHALDELLAWLTHTEGLLSEQKPVGGDPKAIEIELAKHHVLQNDVLAHQSTVEAVNKAGNDLIESSAGEEASNLQNKLEVLNQRWQNVLEKTEQRKQQLDGALRQAKGFHGEIEDLQQWLTDTERHLLASKPLGGLPETAKEQLNVHMEVCAAFEAKEETYKSLMQKGQQMLARCPKSAETNIDQDINNLKEKWESVETKLNERKTKLEEALNLAMEFHNSLQDFINWLTQAEQTLNVASRPSLILDTVLFQIDEHKVFANEVNSHREQIIELDKTGTHLKYFSQKQDVVLIKNLLISVQSRWEKVVQRLVERGRSLDDARKRAKQFHEAWSKLMEWLEESEKSLDSELEIANDPDKIKTQLAQHKEFQKSLGAKHSVYDTTNRTGRSLKEKTSLADDNLKLDDMLSELRDKWDTICGKSVERQNKLEEALLFSGQFTDALQALIDWLYRVEPQLAEDQPVHGDIDLVMNLIDNHKAFQKELGKRTSSVQALKRSARELIEGSRDDSSWVKVQMQELSTRWETVCALSISKQTRLEAALRQAEEFHSVVHALLEWLAEAEQTLRFHGVLPDDEDALRTLIDQHKEFMKKLEEKRAELNKATTMGDTVLAICHPDSITTIKHWITIIRARFEEVLAWAKQHQQRLASALAGLIAKQELLEALLAWLQWAETTLTDKDKEVIPQEIEEVKALIAEHQTFMEEMTRKQPDVDKVTKTYKRRAADPSSLQSHIPVLDKGRAGRKRFPASSLYPSGSQTQIETKNPRVNLLVSKWQQVWLLALERRRKLNDALDRLEELREFANFDFDIWRKKYMRWMNHKKSRVMDFFRRIDKDQDGKITRQEFIDGILSSKFPTSRLEMSAVADIFDRDGDGYIDYYEFVAALHPNKDAYKPITDADKIEDEVTRQVAKCKCAKRFQVEQIGDNKYRFFLGNQFGDSQQLRLVRILRSTVMVRVGGGWMALDEFLVKNDPCRAKGRTNMELREKFILADGASQGMAAFRPRGRRSRPSSRGASPNRSTSVSSQAAQAASPQVPATTTPKILHPLTRNYGKPWLTNSKMSTPCKAAECSDFPVPSAEGTPIQGSKLRLPGYLSGKGFHSGEDSGLITTAAARVRTQFADSKKTPSRPGSRAGSKAGSRASSRRGSDASDFDISEIQSVCSDVETVPQTHRPTPRAGSRPSTAKPSKIPTPQRKSPASKLDKSSKR

SEQ ID NO: 4464 - protein, 1479 aa, Homo Sapiens
MSSGNASYRCSMSSSADFSDEDDFSQKSGSASPAPGDTLPWNLPKHERSKRKIQGGSVLDPAERAVLRIADERDKVQKKTFTKWINQHLMKVRKHVNDLYEDLRDGHNLISLLEVLSGDTLPREKGRMRFHRLQNVQIALDYLKRRQVKLVNIRNDDITDGNPKLTLGLIWTIILHFQISDIHVTGESEDMSAKERLLLWTQQATEGYAGIRCENFTTCWRDGKLFNAIIHKYRPDLIDMNTVAVQSNLANLEHAFYVAEKIGVIRLLDPEDVDVSSPDEKSVITYVSSLYDAFPKVPEGGEGIGANDVEVKWIEYQNMVNYLIQWIRHHVTTMSERTFPNNPVELKALYNQYLQFKETEIPPKETEKSKIKRLYKLLEIWIEFGRIKLLQGYHPNDIEKEWGKLIIAMLEREKALRPEVERLEMLQQIANRVQRDSVICEDKLILAGNALQSDSKRLESGVQFQNEAEIAGYILECENLLRQHVIDVQILIDGKYYQADQLVQRVAKLRDEIMALRNECSSVYSKGRILTTEQTKLMISGITQSLNSGFAQTLHPSLTSGLTQSLTPSLTSSSMTSGLSSGMTSRLTPSVTPAYTPGFPSGLVPNFSSGVEPNSLQTLKLMQIRKPLLKSSLLDQNLTEEEINMKFVQDLLNWVDEMQVQLDRTEWGSDLPSVESHLENHKNVHRAIEEFESSLKEAKISEIQMTAPLKLTYAEKLHRLESQYAKLLNTSRNQERHLDTLHNFVSRATNELIWLNEKEEEEVAYDWSERNTNIARKKDYHAELMRELDQKEENIKSVQEIAEQLLLENHPARLTIEAYRAAMQTQWSWILQLCQCVEQHIKENTAYFEFFNDAKEATDYLRNLKDAIQRKYSCDRSSSIHKLEDLVQESMEEKEELLQYKSTIANLMGKAKTIIQLKPRNSDCPLKTSIPIKAICDYRQIEITIYKDDECVLANNSHRAKWKVISPTGNEAMVPSVCFTVPPPNKEAVDLANRIEQQYQNVLTLWHESHINMKSVVSWHYLINEIDRIRASNVASIKTMLPGEHQQVLSNLQSRFEDFLEDSQESQVFSGSDITQLEKEVNVCKQYYQELLKSAEREEQEESVYNLYISEVRNIRLRLENCEDRLIRQIRTPLERDDLHESVFRITEQEKLKKELERLKDDLGTITNKCEEFFSQAAASSSVPTLRSELNVVLQNMNQVYSMSSTYIDKLKTVNLVLKNTQAAEALVKLYETKLCEEEAVIADKNNIENLISTLKQWRSEVDEKRQVFHALEDELQKAKAISDEMFKTYKERDLDFDWHKEKADQLVERWQNVHVQIDNRLRDLEGIGKSLKYYRDTYHPLDDWIQQVETTQRKIQENQPENSKTLATQLNQQKMLVSEIEMKQSKMDECQKYAEQYSATVKDYELQTMTYRAMVDSQQKSPVKRRRMQSSADLIIQEFMDLRTRYTALVTLMTQYIKFAGDSLKRLEEEEKSLEEEK

SEQ ID NO: 4465 - protein, 7 aa, Homo Sapiens
MVDTEEL

SEQ ID NO: 4466 - protein, 177 aa, Homo Sapiens
  misc_feature (1)..(1): Xaa can be any naturally occurring amino acid
XQLNQQKMLVSEIEMKQSKMDECQKYAEQYSATVKDYELQTMTYRAMVDSQQKSPVKRRRMQSSADLIIQEFMDLRTRYTALVTLMTQYIKFAGDSLKRLEEEEIAKNKQYDMHTEVTTLKQEKNPVPSAEEWMLEGCRASGGLKKGDFLKKGLEPETFQNFDGDHACSVRDDEFKF

SEQ ID NO: 4467 - protein, 259 aa, Homo Sapiens
  misc_feature (1)..(1): Xaa can be any naturally occurring amino acid
XTRQVAKCKCAKRFQVEQIGDNKYRFGDSQQLRLVRILRSTVMVRVGGGWMALDEFLVKNDPCRAKGRTNMELREKFILADGASQGMAAFRPRGRRSRPSSRGASPNRSTSVSSQAAQAASPQVPATTTPKGTPIQGSKLRLPGYLSGKGFHSGEDSGLITTAAARVRTQFADSKKTPSRPGSRAGSKAGSRASSRRGSDASDFDISEIQSVCSDVETVPQTHRPTPRAGSRPSTAKPSKIPTPQRKSPASKLDKSSKR

SEQ ID NO: 4468 - protein, 448 aa, Homo Sapiens
  misc_feature (1)..(1): Xaa can be any naturally occurring amino acid
XVVTTAIKEETEKVAAVKQLEESKTKIENLLDWLSNVDKDSERAGTKHKQVIEQNGTHFQEGDGKSAIGEEDEVNGNLLETDVDGQVGTTQENLNQQYQKVKAQHEKIISQHQAVIIATQSAQVLLEKQGQYLSPEEKEKLQKNMKELKVHYETALAESEKKMKLTHSLQEELEKFDADYTEFEHWLQQSEQELENLEAGADDINGLMTKLKRQKSFSEDVISHKGDLRYITISGNRVLEAAKSCSKRDGGKVDTSATHREVQRKLDHATDRFRSLYSKCNVLGNNLKDLVDKYQHYEDASCGLLAGLQACEATASKHLSEPIAVDPKNLQRQLEETKALQGQISSQQVAVEKLKKTAEVLLDARGSLLPAKNDIQKTLDDIVGRYEDLSKSVNERNEKLQITLTRSLSVQDGLDEMLDWMGNVESSLKEQDVGTGYCRSSEQYKCHE

SEQ ID NO: 4469 - protein, 43 aa, Homo Sapiens
MGFCLALAWTLLVGAWTPLGAQNPISWEVQRFDGWYNNLMEHR

SEQ ID NO: 4470 - protein, 1551 aa, Homo Sapiens
MGFCLALAWTLLVGAWTPLGAQNPISWEVQRFDGWYNNLMEHRWGSKGSRLQRLVPASYADGVYQPLGEPHLPNPRDLSNTISRGPAGLASLRNRTVLGVFFGYHVLSDLVSVETPGCPAEFLNIRIPPGDPMFDPDQRGDVVLPFQRSRWDPETGRSPSNPRDPANQVTGWLDGSAIYGSSHSWSDALRSFSRGQLASGPDPAFPRDSQNPLLMWAAPDPATGQNGPRGLYAFGAERGNREPFLQALGLLWFRYHNLWAQRLARQHPDWEDEELFQHARKRVIATYQNIAVYEWLPSFLQKTLPEYTGYRPFLDPSISSEFVAASEQFLSTMVPPGVYMRNASCHFQGVINRNSSVSRALRVCNSYWSREHPSLQSAEDVDALLLGMASQIAEREDHVLVEDVRDFWPGPLKFSRTDHLASCLQRGRDLGLPSYTKARAALGLSPITRWQDINPALSRSNDTVLEATAALYNQDLSWLELLPGGLLESHRDPGPLFSTIVLEQFVRLRDGDRYWFENTRNGLFSKKEIEEIRNTTLQDVLVAVINIDPSALQPNVFVWHKGDPCPQPRQLSTEGLPACAPSVVRDYFEGSGFGFGVTIGTLCCFPLVSLLSAWIVARLRMRNFKRLQGQDRQSIVSEKLVGGMEALEWQGHKEPCRPVLVYLQPGQIRVVDGRLTVLRTIQLQPPQKVNFVLSSNRGRRTLLLKIPKEYDLVLLFNLEEERQALVENLRGALKESGLSIQEWELREQELMRAAVTREQRRHLLETFFRHLFSQVLDINQADAGTLPLDSSQKVREALTCELSRAEFAESLGLKPQDMFVESMFSLADKDGNGYLSFREFLDILVVFMKGSPEEKSRLMFRMYDFDGNGLISKDEFIRMLRSFIEISNNCLSKAQLAEVVESMFRESGFQDKEELTWEDFHFMLRDHNSELRFTQLCVKGVEVPEVIKDLCRRASYISQDMICPSPRVSARCSRSDIETELTPQRLQCPMDTDPPQEIRRRFGKKVTSFQPLLFTEAHREKFQRSCLHQTVQQFKRFIENYRRHIGCVAVFYAIAGGLFLERAYYYAFAAHHTGITDTTRVGIILSRGTAASISFMFSYILLTMCRNLITFLRETFLNRYVPFDAAVDFHRLIASTAIVLTVLHSVGHVVNVYLFSISPLSVLSCLFPGLFHDDGSELPQKYYWWFFQTVPGLTGVVLLLILAIMYVFASHHFRRRSFRGFWLTHHLYILLYVLLIIHGSFALIQLPRFHIFFLVPAIIYGGDKLVSLSRKKVEISVVKAELLPSGVTHLRFQRPQGFEYKSGQWVRIACLALGTTEYHPFTLTSAPHEDTLSLHIRAAGPWTTRLREIYSAPTGDRCARYPKLYLDGPFGEGHQEWHKFEVSVLVGGGIGVTPFASILKDLVFKSSVSCQVFCKKIYFIWVTRTQRQFEWLADIIREVEENDHQDLVSVHIYITQLAEKFDLRTTMLYICERHFQKVLNRSLFTGLRSITHFGRPPFEPFFNSLQEVHPQVRKIGVFSCGPPGMTKNVEKACQLINRQDRTHFSHHYENF

SEQ ID NO: 4471 - protein, 1551 aa, Homo Sapiens; identical to SEQ ID NO: 4470

SEQ ID NO: 4472 - protein, 444 aa, Homo Sapiens
MGFCLALAWTLLVGAWTPLGAQNPISWEVQRFDGWYNNLMEHRWGSKGSRLQRLVPASYADGVYQPLGEPHLPNPRDLSNTISRGPAGLASLRNRTVLGVFFGYHVLSDLVSVETPGCPAEFLNIRIPPGDPMFDPDQRGDVVLPFQRSRWDPETGRSPSNPRDPANQVTGWLDGSAIYGSSHSWSDALRSFSRGQLASGPDPAFPRDSQNPLLMWAAPDPATGQNGPRGLYAFGAERGNREPFLQALGLLWFRYHNLWAQRLARQHPDWEDEELFQHARKRVIATYQNIAVYEWLPSFLQKTLPEYTGYRPFLDPSISSEFVAASEQFLSTMVPPGVYMRNASCHFQGVINRNSSVSRALRVCNSYWSREHPSLQSAEDVDALLLGMASQIAEREDHVLVEDVRGTGGHSCPVQPGLILARAAPWGTPGEPPGPWTSVQHHRP

SEQ ID NO: 4473 - protein, 1197 aa, Homo Sapiens
MWMHCCWAWPPRSQSERTMCWLKMCGVSLRLSLQVVNSWPLGRGSAGLPEPDFWPGPLKFSRTDHLASCLQRGRDLGLPSYTKARAALGLSPITRWQDINPALSRSNDTVLEATAALYNQDLSWLELLPGGLLESHRDPGPLFSTIVLEQFVRLRDGDRYWFENTRNGLFSKKEIEEIRNTTLQDVLVAVINIDPSALQPNVFVWHKGDPCPQPRQLSTEGLPACAPSVVRDYFEGSGFGFGVTIGTLCCFPLVSLLSAWIVARLRMRNFKRLQGQDRQSIVSEKLVGGMEALEWQGHKEPCRPVLVYLQPGQIRVVDGRLTVLRTIQLQPPQKVNFVLSSNRGRRTLLLKIPKEYDLVLLFNLEEERQALVENLRGALKESGLSIQEWELREQELMRAAVTREQRRHLLETFFRHLFSQVLDINQADAGTLPLDSSQKVREALTCELSRAEFAESLGLKPQDMFVESMFSLADKDGNGYLSFREFLDILVVFMKGSPEEKSRLMFRMYDFDGNGLISKDEFIRMLRSFIEISNNCLSKAQLAEVVESMFRESGFQDKEELTWEDFHFMLRDHNSELRFTQLCVKGVEVPEVIKDLCRRASYISQDMICPSPRVSARCSRSDIETELTPQRLQCPMDTDPPQEIRRRFGKKVTSFQPLLFTEAHREKFQRSCLHQTVQQFKRFIENYRRHIGCVAVFYAIAGGLFLERAYYYAFAAHHTGITDTTRVGIILSRGTAASISFMFSYILLTMCRNLITFLRETFLNRYVPFDAAVDFHRLIASTAIVLTVLHSVGHVVNVYLFSISPLSVLSCLFPGLFHDDGSELPQKYYWWFFQTVPGLTGVVLLLILAIMYVFASHHFRRRSFRGFWLTHHLYILLYVLLIIHGSFALIQLPRFHIFFLVPAIIYGGDKLVSLSRKKVEISVVKAELLPSGVTHLRFQRPQGFEYKSGQWVRIACLALGTTEYHPFTLTSAPHEDTLSLHIRAAGPWTTRLREIYSAPTGDRCARYPKLYLDGPFGEGHQEWHKFEVSVLVGGGIGVTPFASILKDLVFKSSVSCQVFCKKIYFIWVTRTQRQFEWLADIIREVEENDHQDLVSVHIYITQLAEKFDLRTTMLYICERHFQKVLNRSLFTGLRSITHFGRPPFEPFFNSLQEVHPQVRKIGVFSCGPPGMTKNVEKACQLINRQDRTHFSHHYENF

SEQ ID NO: 4474 - protein, 122 aa, Homo Sapiens
MARSLGVLVALPFPLPVGFNAEEAHNIVKECVDGVLGGEDYNHNNINQWTASIVEQSLTHLVKLGKAYKYIVTCAVVQKSAYGFHTASSCFWDTTSDGTCTVRWENRTMNCIVNVFAIAIVL

SEQ ID NO: 4475 - protein, 152 aa, Homo Sapiens
MEEYHRHCDEVGFNAEEAHNIVKECVDGVLGGEDYNHNNINQWTASIVEQSLTHLVKLGKAYKYIVTCAVVQKSAYGFHTASSCFWDTTSDGTCTVRWENRTMNCGVLLCRPGWSAVMQFRLTATSASQVQVILLPQPPEYLELQAHAITPG

SEQ ID NO: 4476 - protein, 116 aa, Homo Sapiens
MEEYHRHCDEVGFNAEEAHNIVKECVDGVLGGEDYNHNNINQWTASIVEQSLTHLVKLGKAYKYIVTCAVVQKSAYGFHTASSCFWDTTSDGTCTVRWENRTMNCIVNVFAIAIVL

SEQ ID NO: 4477 - protein, 346 aa, Homo Sapiens
MAAAEPASSGQQAPAGQGQGQRPPPQPPQAQAPQPPPPPQLGGAGGGSSRHEKSLGLLTTKFVSLLQEAKDGVLDLKAAADTLAVRQKRRIYDITNVLEGIDLIEKKSKNSIQWKGVGAGCNTKEVIDRLRYLKAEIEDLELKERELDQQKLWLQQSIKNVMDDSINNRFSYVTHEDICNCFNGDTLLAIQAPSGTQLEVPIPEMGQNGQKKYQINLKSHSGPIHVLLINKESSSSKPVVFPVPPPDDLTQPSSQSLTPVTPQKSSMATQNLPEQHVSERSQALQQTSATDISSAGSISGDIIDELMSSDVFPLLRLSPTPADDYNFNLDDNEGVCDLFDVQILNY

SEQ ID NO: 4478 - protein, 345 aa, Homo Sapiens
MAAAEPASSGQQAPAGQGQGQRPPPQPPQAQAPQPPPPPQLGGAGGGSSRHEKSLGLLTTKFVSLLQEAKDGVLDLKAAADTLAVRQKRRIYDITNVLEGIDLIEKKSKNSIQWKGVGAGCNTKEVIDRLRYLKAEIEDLELKERELDQQKLWLQQSIKNVMDDSINNRFSYVTHEDICNCFNGDTLLAIQAPSGTQLEVPIPEMGQNGQKKYQINLKSHSGPIHVLLINKESSSSKPVVFPVPPPDDLTQPSSQSLTPVTPQKSSMATQNLPEQHVSERSQALQQTSATDISSGSISGDIIDELMSSDVFPLLRLSPTPADDYNFNLDDNEGVCDLFDVQILNY

SEQ ID NO: 4479 - protein, 185 aa, Homo Sapiens
MDDSINNRFSYVTHEDICNCFNGDTLLAIQAPSGTQLEVPIPEMGQNGQKKYQINLKSHSGPIHVLLINKESSSSKPVVFPVPPPDDLTQPSSQSLTPVTPQKSSMATQNLPEQHVSERSQALQQTSATDISSAGSISGDIIDELMSSDVFPLLRLSPTPADDYNFNLDDNEGVCDLFDVQILNY

SEQ ID NO: 4480 - protein, 173 aa, Homo Sapiens
MKTSVIALMVSDTLLAIQAPSGTQLEVPIPEMGQNGQKKYQINLKSHSGPIHVLLINKESSSSKPVVFPVPPPDDLTQPSSQSLTPVTPQKSSMATQNLPEQHVSERSQALQQTSATDISSAGSISGDIIDELMSSDVFPLLRLSPTPADDYNFNLDDNEGVCDLFDVQILNY

SEQ ID NO: 4481 - protein, 182 aa, Homo Sapiens
SYDSTFSYVTHEDICNCFNGDTLLAIQAPSGTQLEVPIPEMGQNGQKKYQINLKSHSGPIHVLLINKESSSSKPVVFPVPPPDDLTQPSSQSLTPVTPQKSSMATQNLPEQHVSERSQALQQTSATDISSAGSISGDIIDELMSSDVFPLLRLSPTPADDYNFNLDDNEGVCDLFDVQILNY

SEQ ID NO: 4482 - protein, 249 aa, Homo Sapiens
  misc_feature (1)..(1): Xaa can be any naturally occurring amino acid
XLLQEAKDGVLDLKAAADTLAVRQKRRIYDITNVLEGIDLIEKKSKNSIQWKGVGAGCNTKEVIDRLRYLKAEIEDLELKERELDQQKLWLQQSIKNVMDDSINNRFSYVTHEDICNCFNGDTLLAIQAPSGTQLEVPIPEMGQNGQKKYQINLKSHSGPIHVLLINKESSSSKPVVFPVPPPDDLTQPSSQSLTPVTPQKSSMATQNLPEQHVSERSQALQQTSATDISSAGSISGDIIDELMSSDGK

SEQ ID NO: 4483 - protein, 130 aa, Homo Sapiens
  misc_feature (1)..(1): Xaa can be any naturally occurring amino acid
XNKESSSSKPVVFPVPPPDDLTQPSSQSLTPVTPQKSSMATQNLPEQHVSERSQALQQTSATDISSAGSISGDIIDELMSSDGGKLKDTTGHQKQVGQGLITCLIFLLPLNCLYFCMSFYPNRRSLPLVK

SEQ ID NO: 4484 - protein, 78 aa, Homo Sapiens
MAITQFRLFKFCTCLATVFSFLKRLICRSGRGRKLSGDQITLPTTVDYSSVPKQTDVEEWTSWDEDAPTSVKIEGGNG

SEQ ID NO: 4485 - protein, 197 aa, Homo Sapiens
MAITQFRLFKFCTCLATVFSFLKRLICRSGRGRKLSGDQITLPTTVDYSSVPKQTDVEEWTSWDEDAPTSVKIEGGNGNVATQQNSLEQLEPDYFKDMTPTIRKTQKIVIKKREPLNFGIPDGSTGFSSRLAATQDLPFIHQSSELGDLDTWQENTNAWEEEEDAAWQAEEVLRQQKLADREKRAAEQQRKKMEKEA

SEQ ID NO: 4486 - protein, 213 aa, Homo Sapiens
MAITQFRLFKFCTCLATVFSFLKRLICRSGRGRKLSGDQITLPTTVDYSSVPKQTDVEEWTSWDEDAPTSVKIEGGNGNVATQQNSLEQLEPDYFKDMTPTIRKTQKIVIKKREPLNFGIPDGSTGFSSRLAATQDLPFIHQSSELGDLDTWQENTNAWEEEEDAAWQAEEVLRQQKLADREKRAAEQQRKKMEKEAQRLMKKEQNKIGVKLS

SEQ ID NO: 4487 - protein, 213 aa, Homo Sapiens; identical to SEQ ID NO: 4486

SEQ ID NO: 4488 - protein, 213 aa, Homo Sapiens; identical to SEQ ID NO: 4486

SEQ ID NO: 4489 - protein, 258 aa, Homo Sapiens
MAITQFRLFKFCTCLATVFSFLKRLICRSGRGRKLSGDQITLPTTVDYSSVPKQTDVEEWTSWDEDAPTSVKIEGGNGNVATQQNSLEQLEPDYFKDMTPTIRKTQKIVIKKREPLNFGIPDGSTGFSSRLAATQDLPFIHQSSELGDLDTWQENTNAWEEEEDAAWQAEEVLRSRTNVCLLCSLLFHHPTPTSTPYINQSVKIERVSLGQWSYGKSKEQQKLADREKRAAEQQRKKMEKEAQRLMKKEQNKIGVKLS

SEQ ID NO: 4490 - protein, 258 aa, Homo Sapiens; identical to SEQ ID NO: 4489

SEQ ID NO: 4491 - protein, 153 aa, Homo Sapiens
MAITQFRLFKFCTCLATVFSFLKRLICRSGRGRKLSGDQITLPTTVDYSSVPKQTDVEEWTSWDEDAPTSVKIEGGNGNVATQQNSLEQLEPDYFKDMTPTIRKTQKIVIKKREPLNFGIPDGSTGFSSRLAATQDLPFIHQSTSHWVGATII

SEQ ID NO: 4492 - protein, 41 aa, Homo Sapiens
MTPTIRKTQKIVIKKREPLNFGIPDGSTGFSSRLAATQDLP

SEQ ID NO: 4493 - protein, 229 aa, Homo Sapiens
MTPQLLLALVLWASCPPCSGRKGPPAALTLPRVQCRASRYPIAVDCSWTLPPAPNSTSPVSFIATYRLGMAARGHSWPCLQQTPTSTSCTITDVQLFSMAPYVLNVTAVHPWGSSSSFVPFITEHIIKPDPPEGVRLSPLAERQLQVQWEPPGSWPFPEIFSLKYWIRYKRQGAARFHRVGPIEATSFILRAVRPRARYYVQVAAQDLTDYGELSDWSLPATATMSLGK

SEQ ID NO: 4494 - protein, 83 aa, Homo Sapiens
MAKSLLKTASLSGRTKLLHQTGLSLYSTSHGFYEEEVKKTLQQFPGGSIDLQKEDNGIGILTLNNPSRMNAFSEFREISLYQC

SEQ ID NO: 4495 - protein, 125 aa, Homo Sapiens
MAKSLLKTASLSGRTKLLHQTGLSLYSTSHGFYEEEVKKTLQQFPGGSIDLQKEDNGIGILTLNNPSRMNAFSGVMMLQLLEKVIELENWTEGKGLIVRGAKNTFSSGSDLNAVKSLGTPEANFL

SEQ ID NO: 4496 - protein, 135 aa, Homo Sapiens
MAKSLLKTASLSGRTKLLHQTGLSLYSTSHGFYEEEVKKTLQQFPGGSIDLQKEDNGIGILTLNNPSRMNAFSGVMMLQLLEKVIELENWTEGKGLIVRGAKNTFSSGSDLNAVKSLGTPEDGMAVCMFMQNTLT

SEQ ID NO: 4497 - protein, 139 aa, Homo Sapiens
MAKSLLKTASLSGRTKLLHQTGLSLYSTSHGFYEEEVKKTLQQFPGGSIDLQKEDNGIGILTLNNPSRMNAFSGVMMLQLLEKVIELENWTEGKGLIVRGAKNTFSSGSDLNAVKSLGTPEDGMAVCMFMQNTLTRFMR

SEQ ID NO: 4498 - protein, 151 aa, Homo Sapiens
MAKSLLKTASLSGRTKLLHQTGLSLYSTSHGFYEEEVKKTLQQFPGGSIDLQKEDNGIGILTLNNPSRMNAFSGVMMLQLLEKVIELENWTEGKGLIVRGAKNTFSSGSDLNAVKSLGTPEDGMAVCMFMQNTLTRFMRLPLISVALVQGW

SEQ ID NO: 4499 - protein, 301 aa, Homo Sapiens
MAKSLLKTASLSGRTKLLHQTGLSLYSTSHGFYEEEVKKTLQQFPGGSIDLQKEDNGIGILTLNNPSRMNAFSGVMMLQLLEKVIELENWTEGKGLIVRGAKNTFSSGSDLNAVKSLGTPEDGMAVCMFMQNTLTRFMRLPLISVALVQGWALGGGAEFTTACDFRLMTPESKIRFVHKEMGIIPSWGGTTRLVEIIGSRQALKVLSGALKLDSKNALNIGMVEEVLQSSDETKSLEEAQEWLKQFIQGPPEVIRALKKSVCSGRELYLEEALQNERDLLGTVWGGPANLEAIAKKGKFNK

SEQ ID NO: 4500 - protein, 301 aa, Homo Sapiens; identical to SEQ ID NO: 4499

SEQ ID NO: 4501 - protein, 301 aa, Homo Sapiens; identical to SEQ ID NO: 4499

SEQ ID NO: 4502 - protein, 179 aa, Homo Sapiens
MAKSLLKTASLSGRTKLLHQTGLSLYSTSHGFYEEEVKKTLQQFPGGSIDLQKEDNGIGILTLNNPSRMNAFSGVMMLQLLEKVIELENWTEGKGLIVRGAKNTFSSGSDLNAVKSLGTPEESCRWNTEFLYTLHPVSPFINILYSYGWNGRMHVHAKHLNKIYETSFNKCCAGSRLGI

SEQ ID NO: 4503 - protein, 125 aa, Homo Sapiens
MAKSLLKTASLSGRTKLLHQTGLSLYSTSHGFYEEEVKKTLQQFPGGSIDLQKEDNGIGILTLNNPSRMNAFSGVMMLQLLEKVIELENWTEGKGLIVRGAKNTFSSGSDLNAVKSLGTPEGDFL

SEQ ID NO: 4504 - protein, 145 aa, Homo Sapiens
MAKSLLKTASLSGRTKLLHQTGLSLYSTSHGFYEEEVKKTLQQFPGGSIDLQKEDNGIGILTLNNPSRMNAFSGVMMLQLLEKVIELENWTEGKGLIVRGAKNTFSSGSDLNAVKSLGTPETSFNKCCAGSRLGIGWRSRIYYSM

SEQ ID NO: 4505 - protein, 145 aa, Homo Sapiens; identical to SEQ ID NO: 4504

SEQ ID NO: 4506 - protein, 307 aa, Homo Sapiens
MALKQEMAKSLLKTASLSGRTKLLHQTGLSLYSTSHGFYEEEVKKTLQQFPGGSIDLQKEDNGIGILTLNNPSRMNAFSGVMMLQLLEKVIELENWTEGKGLIVRGAKNTFSSGSDLNAVKSLGTPEDGMAVCMFMQNTLTRFMRLPLISVALVQGWALGGGAEFTTACDFRLMTPESKIRFVHKEMGIIPSWGGTTRLVEIIGSRQALKVLSGALKLDSKNALNIGMVEEVLQSSDETKSLEEAQEWLKQFIQGPPEVIRALKKSVCSGRELYLEEALQNERDLLGTVWGGPANLEAIAKKGKFNK

SEQ ID NO: 4507 - protein, 226 aa, Homo Sapiens
MMLQLLEKVIELENWTEGKGLIVRGAKNTFSSGSDLNAVKSLGTPEDGMAVCMFMQNTLTRFMRLPLISVALVQGWALGGGAEFTTACDFRLMTPESKIRFVHKEMGIIPSWGGTTRLVEIIGSRQALKVLSGALKLDSKNALNIGMVEEVLQSSDETKSLEEAQEWLKQFIQGPPEVIRALKKSVCSGRELYLEEALQNERDLLGTVWGGPANLEAIAKKGKFNK

SEQ ID NO: 4508 - protein, 70 aa, Homo Sapiens
MMLQLLEKVIELENWTEGKGLIVRGAKNTFSSGSDLNAVKSLGTPETSFNKCCAGSRLGIGWRSRIYYSM

SEQ ID NO: 4509 - protein, 34 aa, Homo Sapiens
  misc_feature (1)..(1): Xaa can be any naturally occurring amino acid
XFMRLPLISVALVQGWALGGGAEFTTACDFSFRH

SEQ ID NO: 4510 - protein, 76 aa, Homo Sapiens
  misc_feature (1)..(1): Xaa can be any naturally occurring amino acid
XMLQLLEKVIELENWTEGKGLIVRGAKNTFSSGSDLNAVKSLGTPEDGMAVCMFMQNTLTRFMSRMCGEVVCIQRR

SEQ ID NO: 4511 - protein, 100 aa, Homo Sapiens
  misc_feature (1)..(1): Xaa can be any naturally occurring amino acid
XTPEVKKQRGKILLGLSRLPLISVALVQGWALGGGAEFTTACDFRLMTPESKIRFVHKEMGIIPSWGGTTRLVEIIGSRQALKVLSGALKLDSKNALNIG

SEQ ID NO: 4512 - protein, 255 aa, Homo Sapiens
  misc_feature (1)..(1): Xaa can be any naturally occurring amino acid
XTSHGFYEEEVKKTLQQFPGGSIDLQKEDNGIGILTLNNPSRMNAFSGVMMLQLLEKVIELENWTEGKGLIVRGAKNTFSSGSDLNAVKSLGTPEESCRWNTEFLYTLHPVSPFINILYSYGWNGRMHVHAKHLNKIYEVKKQRGKILLGLSRLPLISVALVQGWALGGGAEFTTACDFRLMTPESKIRFVHKEMGIIPSWGGTTRLVEIIGSRQALKVLSGALKLDSKNALNIGMVEEVLQSSDETKSLEEAQE

SEQ ID NO: 4513 - protein, 567 aa, Homo Sapiens
MGTTARAALVLTYLAVASAASEGGFTATGQRQLRPEHFQEVGYAAPPSPPLSRSLPMDHPDSSQHGPPFEGQSGKEGRGPRPHSQPWLGERVGCSHIPPSIVQPPPSQEATPLQQEKLLPAQLPAEKEVGPPLPQEAVPLQKELPSLQHPNEQKEGTPAPFGDQSHPEPESWNAAQHCQQDRSQGGWGHRLDGFPPGRPSPDNLNQICLPNRQHVVYGPWNLPQSSYSHLTRQGETLNFLEIGYSRCCHCRSHTNRLECAKLVWEEAMSRFCEAEFSVKTRPHWCCTRQGEARFSCFQEEAPQPHYQLRACPSHQPDISSGLELPFPPGVPTLDNIKNICHLRRFRSVPRNLPATDPLQRELLALIQLEREFQRCCRQGNNHTCTWKAWEDTLDKYCDREYAVKTHHHLCCRHPPSPTRDECFARRAPYPNYDRDILTIDIGRVTPNLMGHLCGNQRVLTKHKHIPGLIHNMTARCCDLPFPEQACCAEEEKLTFINDLCGPRRNIWRDPALCCYLSPGDEQVNCFNINYLRNVALVSGDTENAKGQGEQGSTGGTNISSTSEPKEE

SEQ ID NO: 4514 - protein, 415 aa, Homo Sapiens
MGTTARAALVLTYLAVASAASEGGFTATGQRQLRPEHFQEVGYAAPPSPPLSRSLPMDHPDSSQHGPPFEGQSQVQPPPSQEATPLQQEKLLPAQLPAEKEVGPPLPQEAVPLQKELPSLQHPNEQKEGTPAPFGDQSHPEPESWNAAQHCQQDRSQGGWGHRLDGFPPGRPSPDNLNQICLPNRQHVVYGPWNLPQSSYSHLTRQGETLNFLEIGYSRCCHCRSHTNRLECAKLVWEDTLDKYCDREYAVKTHHHLCCRHPPSPTRDECFARRAPYPNYDRDILTIDIGRVTPNLMGHLCGNQRVLTKHKHIPGLIHNMTARCCDLPFPEQACCAEEEKLTFINDLCGPRRNIWRDPALCCYLSPGDEQVNCFNINYLRNVALVSGDTENAKGQGEQGSTGGTNISSTSEPKEE

SEQ ID NO: 4515 - protein, 540 aa, Homo Sapiens
MGTTARAALVLTYLAVASAASEGGFTATGQRQLRPEHFQEVGYAAPPSPPLSRSLPMDHPDSSQHGPPFEGQSQVQPPPSQEATPLQQEKLLPAQLPAEKEVGPPLPQEAVPLQKELPSLQHPNEQKEGTPAPFGDQSHPEPESWNAAQHCQQDRSQGGWGHRLDGFPPGRPSPDNLNQICLPNRQHVVYGPWNLPQSSYSHLTRQGETLNFLEIGYSRCCHCRSHTNRLECAKLVWEEAMSRFCEAEFSVKTRPHWCCTRQGEARFSCFQEEAPQPHYQLRACPSHQPDISSGLELPFPPGVPTLDNIKNICHLRRFRSVPRNLPATDPLQRELLALIQLEREFQRCCRQGNNHTCTWKAWEDTLDKYCDREYAVKTHHHLCCRHPPSPTRDECFARRAPYPNYDRDILTIDIGRVTPNLMGHLCGNQRVLTKHKHIPGLIHNMTARCCDLPFPEQACCAEEEKLTFINDLCGPRRNIWRDPALCCYLSPGDEQVNCFNINYLRNVALVSGDTENAKGQGEQGSTGGTNISSTSEPKEE

SEQ ID NO: 4516 - protein, 160 aa, Homo Sapiens
MKIAVLFCFFLLIIFQTDFGKNEEIPRKQRRKIYHRRLRKSSTSHKHRSNRQLGIQQTTVFTPVARLPIVNFDYSMEEKFESFSSFPGVESSYNVLPGKKGHCLVKGITMYNKAVWSPEPCTTCLCSDGRVLCDETMCHPQRCPQTVIPEGECCPVCSAT

SEQ ID NO: 4517 - protein, 643 aa, Homo Sapiens
MKIAVLFCFFLLIIFQTDFGKNEEIPRKQRRKIYHRRLRKSSTSHKHRSNRQLGIQQTTVFTPVARLPIVNFDYSMEEKFESFSSFPGVESSYNVLPGKKGHCLVKGITMYNKAVWSPEPCTTCLCSDGRVLCDETMCHPQRCPQTVIPEGECCPVCSATEQREPTNLLHKQLPPPQVGMDRIVRKEALQSEEDEEVKEEDTEQKRETPESRNQGQLYSEGDSRGGDRKQRPGEERRLAHQQQRQGREEEEDEEEEGEEGEEDEEDEEDPVRGDMFRMPSRSPLPAPPRGTLRLPSGCSLSYRTISCINAMLTQIPPLTAPQITSLELTGNSIASIPDEAFNGLPNLERLDLSKNNITSSGIGPKAFKLLKKLMRLNMDGNNLIQIPSQLPSTLEELKVNENNLQAIDEESLSDLNQLVTLELEGNNLSEANVNPLAFKPLKSLAYLRLGKNKFRIIPQGLPGSIEELYLENNQIEEITEICFNHTRKINVIVLRYNKIEENRIAPLAWINQENLESIDLSYNKLYHVPSYLPKSLLHLVLLGNQIERIPGYVFGHMEPGLEYLYLSFNKLADDGMDRVSFYGAYHSLRELFLDHNDLKSIPPGIQEMKALHFLRLNNNKIRCVSDAVLETVTNRSDVAFPLW

SEQ ID NO: 4518 - protein, 164 aa, Homo Sapiens
MKIAVLFCFFLLIIFQTDFGKNEEIPRKQRRKIYHRRLRKSSTSHKHRSNRQLGIQQTTVFTPVARLPIVNFDYSMEEKFESFSSFPGVESSYNVLPGKKGHCLVKGITMYNKAVWSPEPCTTCLCSDGRVLCDETMCHPQRCPQTVIPEGECCPVCSATGTEI

SEQ ID NO: 4519 - protein, 699 aa, Homo Sapiens
MKIAVLFCFFLLIIFQTDFGKNEEIPRKQRRKIYHRRLRKSSTSHKHRSNRQLGIQQTTVFTPVARLPIVNFDYSMEEKFESFSSFPGVESSYNVLPGKKGHCLVKGITMYNKAVWSPEPCTTCLCSDGRVLCDETMCHPQRCPQTVIPEGECCPVCSATVSYSLLSGIALNDRNEFSGDSSEQREPTNLLHKQLPPPQVGMDRIVRKEALQSEEDEEVKEEDTEQKRETPESRNQGQLYSEGDSRGGDRKQRPGEERRLAHQQQRQGREEEEDEEEEGEEGEEDEEDEEDPVRGDMFRMPSRSPLPAPPRGTLRLPSGCSLSYRTISCINAMLTQIPPLTAPQITSLELTGNSIASIPDEAFNGLPNLERLDLSKNNITSSGIGPKAFKLLKKLMRLNMDGNNLIQIPSQLPSTLEELKVNENNLQAIDEESLSDLNQLVTLELEGNNLSEANVNPLAFKPLKSLAYLRLGKNKFRIIPQGLPGSIEELYLENNQIEEITEICFNHTRKINVIVLRYNKIEENRIAPLAWINQENLESIDLSYNKLYHVPSYLPKSLLHLVLLGNQIERIPGYVFGHMEPGLEYLYLSFNKLADDGMDRVSFYGAYHSLRELFLDHNDLKSIPPGIQEMKALHFLRLNNNKIRNILPEEICNAEEDDDSNLEHLHLENNYIKIREIPSYTFSCIRSYSSIVLKPQNIK

SEQ ID NO: 4520 - protein, 102 aa, Homo Sapiens
MREYGVERDLAVYNQLLNIFPKEVFRPRNIIQRIFVHYPRQQECGIAVLEQMENHGVMPNKETEFLLIQIFGRKSYPMLKLVRLKLWFPRFMNVNPFPVPRD

SEQ ID NO: 4521 - protein, 223 aa, Homo Sapiens
MREYGVERDLAVYNQLLNIFPKEVFRPRNIIQRIFVHYPRQQECGIAVLEQMENHGVMPNKETEFLLIQIFGRKSYPMLKLVRLKLWFPRFMNVNPFPVPRDLPQDPVELAMFGLRHMEPDLSARVTIYQVPLPKDSTGAADPPQPHIVGIQSPDQQAALARHNPARPVFVEGPFSLWLRNKCVYYHILRADLLPPEEREVEETPEEWNLYYPMQLDLEYVRS

SEQ ID NO: 4522 - protein, 267 aa, Homo Sapiens
MREYGVERDLAVYNQLLNIFPKEVFRPRNIIQRIFVHYPRQQECGIAVLEQMENHGVMPNKETEFLLIQIFGRKSYPMLKLVRLKLWFPRFMNVNPFPVPRDLPQDPVELAMFGLRHMEPDLSARVTIYQVPLPKDSTGAADPPQPHIVGKSESMGAAKSLTLPRPCQVLAGPRLGSLGLWAESLAGHRACMSPHQESRVPISRPPWPATIQPGLSLLRAPSPCGSATSVCITTSSELTCCPRRRGKWKRRRRSGTSTTRCSWTWSM

SEQ ID NO: 4523 - protein, 25 aa, Homo Sapiens
MSWVQATLLARGLCRAWGGTCGAAL

SEQ ID NO: 4524 - protein, 217 aa, Homo Sapiens
MSWVQATLLARGLCRAWGGTCGAALTGTSISQVPLPKDSTGAADPPQPHIVGIQSPDQQAALARHNPARPVFVEGPFSLWLRNKCVYYHILRADLLPPEEREVEETPEEWNLYYPMQLDLEYVRSGWDNYEFDINEVEEGPVFAMCMAGAHDQATMAKWIQGLQETNPTLAQIPVVFRLAGSTRELQTSSAGLEEPPLPEDHQEEDDNLQRQQQGQS

SEQ ID NO: 4525 - protein, 82 aa, Homo Sapiens
MSWVQATLLARGLCRAWGGTCGAALTGTSISQVPLPKDSTGAADPPQPHIVGSGRDAGGVEPLLPDAAGPGVCEEWLGQLRV

SEQ ID NO: 4526 - protein, 227 aa, Homo Sapiens
MSWVQATLLARGLCRAWGGTCGAALTGTSISQVPRRLPRGLHCSAAAHSSEQSLVPSPPEPRQRPTKALVPFEDLFGQAPGGERDKASFLQTVQKFAEHSVRKRGHIDFIYLALRKMREYGVERDLAVYNQLLNIFPKEVFRPRNIIQRIFVHYPRQQECGIAVLEQMENHGVMPNKETEFLLIQIFGRKSYPMLKLVRLKLWFPRFMNVNPFPVPRDLPQDPVELA

SEQ ID NO: 4527 - protein, 296 aa, Homo Sapiens
MSWVQATLLARGLCRAWGGTCGAALTGTSISQVPRRLPRGLHCSAAAHSSEQSLVPSPPEPRQRPTKALVPFEDLFGQAPGGERDKASFLQTVQKFAEHSVRKRGHIDFIYLALRKMREYGVERDLAVYNQLLNIFPKEVFRPRNIIQRIFVHYPRQQECGIAVLEQMENHGVMPNKETEFLLIQIFGRKSYPMLKLVRLKLWFPRFMNVNPFPVPRDLPQDPVELAMFGLRHMEPDLSARVTIYQVPLPKDSTGAADPPQPHIVGSGRDAGGVEPLLPDAAGPGVCEEWLGQLRV

SEQ ID NO: 4528 - protein, 431 aa, Homo Sapiens
MSWVQATLLARGLCRAWGGTCGAALTGTSISQVPRRLPRGLHCSAAAHSSEQSLVPSPPEPRQRPTKALVPFEDLFGQAPGGERDKASFLQTVQKFAEHSVRKRGHIDFIYLALRKMREYGVERDLAVYNQLLNIFPKEVFRPRNIIQRIFVHYPRQQECGIAVLEQMENHGVMPNKETEFLLIQIFGRKSYPMLKLVRLKLWFPRFMNVNPFPVPRDLPQDPVELAMFGLRHMEPDLSARVTIYQVPLPKDSTGAADPPQPHIVGIQSPDQQAALARHNPARPVFVEGPFSLWLRNKCVYYHILRADLLPPEEREVEETPEEWNLYYPMQLDLEYVRSGWDNYEFDINEVEEGPVFAMCMAGAHDQATMAKWIQGLQETNPTLAQIPVVFRLAGSTRELQTSSAGLEEPPLPEDHQEEDDNLQRQQQGQS

SEQ ID NO: 4529 - protein, 296 aa, Homo Sapiens
MSWVQATLLARGLCRAWGGTCGAALTGTSISQVPRRLPRGLHCSAAAHSSEQSLVPSPPEPRQRPTKALVPFEDLFGQAPGGERDKASFLQTVQKFAEHSVRKRGHIDFIYLALRKMREYGVERDLAVYNQLLNIFPKEVFRPRNIIQRIFVHYPRQQECGIAVLEQMENHGVMPNKETEFLLIQIFGRKSYPMLKLVRLKLWFPRFMNVNPFPVPRDLPQDPVELAMFGLRHMEPDLSARVTIYQVPLPKDSTGAADPPQPHIVELTCCPRRRGKWKRRRRSGTSTTRCSWTWSM

SEQ ID NO: 4530 - protein, 59 aa, Homo Sapiens
  misc_feature (1)..(1): Xaa can be any naturally occurring amino acid
XMREYGVERDLAVYNQLLNIFPKEVFRPRNIIQRIFVHYPRQQECGIAVLEQMENHAQV

SEQ ID NO: 4531 - protein, 71 aa, Homo Sapiens
  misc_feature (1)..(1): Xaa can be any naturally occurring amino acid
XVNPFPVPRDLPQDPVELAMFGLRHMEPDLSARVTIYQAPCAAPDAARLPPQRFLCPKTQQVQQIPPSPTS

SEQ ID NO: 4532 - protein, 147 aa, Homo Sapiens
MTSSLKIWGILLALLCILCRLCVYSNNIYWREFIKLHYLSPSREFKEYKCDVLMREKEALKGKSFHMFIYSLWFKIQRACINEKGSDRYRNAYVWAPGALKVLECHWEKYNNRYTESRSFSYIEFHCGVDGYVDNIEDLRIIEPISN

SEQ ID NO: 4533 - protein, 147 aa, Homo Sapiens
MASSLKIWGTLLALLCILCTLLVQSKEVSWREFMKQHYLSPSREFREYKCDVLMRENEALKDKSSHMFIYISWYKIEHICTSDNWMDRFRNAYVWVQNPLKVLKCHQENSKNSYTESRSFNYIEFHCSMDGYVDSIEDLKMVEPIGN

SEQ ID NO: 4534 - protein, 578 aa, Homo Sapiens
MPFRLLIPLGLLCALLPQHHGAPGPDGSAPDPAHYRERVKAMFYHAYDSYLENAFPFDELRPLTCDGHDTWGSFSLTLIDALDTLLILGNVSEFQRVVEVLQDSVDFDIDVNASVFETNIRVVGGLLSAHLLSKKAGVEVEAGWPCSGPLLRMAEEAARKLLPAFQTPTGMPYGTVNLLHGVNPGETPVTCTAGIGTFIVEFATLSSLTGDPVFEDVARVALMRLWESRSDIGLVGNHIDVLTGKWVAQDAGIGAGVDSYFEYLVKGAILLQDKKLMAMFLEYNKAIRNYTRFDDWYLWVQMYKGTVSMPVFQSLEAYWPGLQSLIGDIDNAMRTFLNYYTVWKQFGGLPEFYNIPQGYTVEKREGYPLRPELIESAMYLYRATGDPTLLELGRDAVESIEKISKVECGFATIKDLRDHKLDNRMESFFLAETVKYLYLLFDPTNFIHNNGSTFDAVITPYGECILGAGGYIFNTEAHPIDPAALHCCQRLKEEQWEVEDLMREFYSLKRSRSKFQKNTVSSGPWEPPARPGTLFSPENHDQARERKPAKQKVPLLSCPSQPFTSKLALLGQVFLDSS

SEQ ID NO: 4535 - protein, 541 aa, Homo Sapiens
MPFRLLIPLGLLCALLPQHHGAPGPDGSAPDPAHYSFSLTLIDALDTLLILGNVSEFQRVVEVLQDSVDFDIDVNASVFETNIRVVGGLLSAHLLSKKAGVEVEAGWPCSGPLLRMAEEAARKLLPAFQTPTGMPYGTVNLLHGVNPGETPVTCTAGIGTFIVEFATLSSLTGDPVFEDVARVALMRLWESRSDIGLVGNHIDVLTGKWVAQDAGIGAGVDSYFEYLVKGAILLQDKKLMAMFLEYNKAIRNYTRFDDWYLWVQMYKGTVSMPVFQSLEAYWPGLQSLIGDIDNAMRTFLNYYTVWKQFGGLPEFYNIPQGYTVEKREGYPLRPELIESAMYLYRATGDPTLLELGRDAVESIEKISKVECGFATIKDLRDHKLDNRMESFFLAETVKYLYLLFDPTNFIHNNGSTFDAVITPYGECILGAGGYIFNTEAHPIDPAALHCCQRLKEEQWEVEDLMREFYSLKRSRSKFQKNTVSSGPWEPPARPGTLFSPENHDQARERKPAKQKVPLLSCPSQPFTSKLALLGQVFLDSS

SEQ ID NO: 4536 - protein, 932 aa, Homo Sapiens
MSEAGGRGCGSPVPQRARWRLVAATAAFCLVSATSVWTAGAEPMSREEKQKLGNQVLEMFDHAYGNYMEHAYPADELMPLTCRGRVRGQEPSRGDVDDALGKFSLTLIDSLDTLVVLNKTKEFEDAVRKVLRDVNLDNDVVVSVFETNIRVLGGLLGGHSLAIMLKEKGEYMQWYNDELLQMAKQLGYKLLPAFNTTSGLPYPRINLKFGIRKPEARTGTETDTCTACAGTLILEFAALSRFTGATIFEEYARKALDFLWEKRQRSSNLVGVTINIHTGDWVRKDSGVGAGIDSYYEYLLKAYVLLGDDSFLERFNTHYDAIMRYISQPPLLLDVHIHKPMLNARTWMDALLAFFPGLQVLKGDIRPAIETHEMLYQVIKKHNFLPEAFTTDFRVHWAQHPLRPEFAESTYFLYKATGDPYYLEVGKTLIENLNKYARVPCGFAAMKDVRTGSHEDRMDSFFLAEMFKYLYLLFADKEDIIFDIEDYIFTTEAHLLPLWLSTTNQSISKKNTTSEYTELDDSNFDWTCPNTQILFPNDPLYAQSIREPLKNVVDKSCPRGIIRVEESFRSGAKPPLRARDFMATNPEHLEILKKMGVSLIHLKDGRVQLVQHAIQAASSIDAEDGLRFMQEMIELSSQQQKEQQLPPRAVQIVSHPFFGRVVLTAGPAQFGLDLSKHKETRGFVASSKPSNGCSELTNPEAVMGKIALIQRGQCMFAEKARNIQNAGAIGGIVIDDNEGSSSDTAPLFQMAGDGKDTDDIKIPMLFLFSKEGSIILDAIREYEEVEVLLSDKAKDRDPEMENEEQPSSENDSQNQSGEQISSSSQEVDLVDQESSEENSLNSHPESLSLADMDNAASISPSEQTSNPTENHETTNLNGECTDLDNQLQEQSETEEDSNPNVSWGKKVQPIDSILADWNEDIEAFEMMEKDEL

SEQ ID NO: 4537 - protein, 905 aa, Homo Sapiens
MSREEKQKLGNQVLEMFDHAYGNYMEHAYPADELMPLTCRGRVRGQEPSRGDVDDALGKFSLTLIDSLDTLVVLNKTKEFEDAVRKVLRDVNLDNDVVVSVFETNIRVLGGLLGGHSLAIMLKEKGEYMQWYNDELLQMAKQLGYKLLPAFNTTSGLPYPRINLKFGIRKPEARTGTETDTCTACAGTLILEFAALSRFTGATIFEEYARKALDFLWEKRQRSSNLVGVTINIHTGDWVRKDSGVGAGIDSYYEYLLKAYVLLGDDSFLERFNTHYDAIMRYISQPPLLLDVHIHKPMLNARTWMDALLAFFPGLQVLKGDIRPAIETHEMLYQVIKKHNFLPEAFTTDFRVHWAQHPLRPEFAESTYFLYKATGDPYYLEVGKTLIENLNKYARVPCGFAAMKDVRTGSHEDRMDSFFLAEMFKYLYLLFADKEDIIFDIEDYIFTTEAHLLPLWLSTTNQSISKKNTTSEYTELDDSNFDWTCPNTQILFPNDPLYAQSIREPLKNVVDKSCPRGIIRVEESFRSGAKPPLRARDFMATNPEHLEILKKMGVSLIHLKDGRVQLVQHAIQAASSIDAEDGLRFMQEMIELSSQQQKEQQLPPRAVQIVSHPFFGRVVLTAGPAQFGLDLSKHKETRGFVASSKPSNGCSELTNPEAVMGKIALIQRGQCMFAEKARNIQNAGAIGGIVIDDNEGSSSDTAPLFQMAGDGKDTDDIKIPMLFLFSKEGSIILDAIREYEEVEVLLSDKAKDRAAILKGKMIPSYIINSNPEMENEEQPSSENDSQNQSGEQISSSSQEVDLVDQESSEENSLNSHPESLSLADMDNAASISPSEQTSNPTENHETTNLNGECTDLDNQLQEQSETEEDSNPNVSWGKKVQPIDSILADWNEDIEAFEMMEKDEL

SEQ ID NO: 4538 - protein, 380 aa, Homo Sapiens
VDKSCPRGIIRVEESFRSGAKPPLRARDFMATNPEHLEILKKMGVSLIHLKDGRVQLVQHAIQAASSIDAEDGLRFMQEMIELSSQQQKEQQLPPRAVQIVSHPFFGRVVLTAGPAQFGLDLSKHKETRGFVASSKPSNGCSELTNPEAVMGKIALIQRGQCMFAEKARNIQNAGAIGGIVIDDNEGSSSDTAPLFQMAGDGKDTDDIKIPMLFLFSKEGSIILDAIREYEEVEVLLSDKAKDRDPEMENEEQPSSENDSQNQSGEQISSSSQEVDLVDQESSEENSLNSHPESLSLADMDNAASISPSEQTSNPTENHETTNLNGECTDLDNQLQEQSETEEDSNPNVSWGKKVQPIDSILADWNEDIEAFEMMEKDEL

SEQ ID NO: 4539 - protein, 480 aa, Homo Sapiens
MKRSVAVWLLVGLSLGVPQFGKGDICDPNPCENGGICLPGLADGSFSCECPDGFTDPNCSSVVEVASDEEEPTSAGPCTPNPCHNGGTCEISEAYRGDTFIGYVCKCPRGFNGIHCQHNINECEVEPCKNGGICTDLVANYSCECPGEFMGRNCQYKCSGPLGIEGGIISNQQITASSTHRALFGLQKWYPYYARLNKKGLINAWTAAENDRWPWIQINLQRKMRVTGVITQGAKRIGSPEYIKSYKIAYSNDGKTWAMYKVKGTNEDMVFRGNIDNNTPYANSFTPPIKAQYVRLYPQVCRRHCTLRMELLGCELSGCSEPLGMKSGHIQDYQITASSIFRTLNMDMFTWEPRKARLDKQGKVNAWTSGHNDQSQWLQVDLLVPTKVTGIITQGAKDFGHVQFVGSYKLAYSNDGEHWTVYQDEKQRKDKVFQGNFDNDTHRKNVIDPPIYARHIRILPWSWYGRITLRSELLGCTEEE

SEQ ID NO: 4540 - protein, 470 aa, Homo Sapiens
MKRSVAVWLLVGLSLGVPQFGKGDICDPNPCENGGICLPGLADGSFSCECPDGFTDPNCSSVVEVGPCTPNPCHNGGTCEISEAYRGDTFIGYVCKCPRGFNGIHCQHNINECEVEPCKNGGICTDLVANYSCECPGEFMGRNCQYKCSGPLGIEGGIISNQQITASSTHRALFGLQKWYPYYARLNKKGLINAWTAAENDRWPWIQINLQRKMRVTGVITQGAKRIGSPEYIKSYKIAYSNDGKTWAMYKVKGTNEDMVFRGNIDNNTPYANSFTPPIKAQYVRLYPQVCRRHCTLRMELLGCELSGCSEPLGMKSGHIQDYQITASSIFRTLNMDMFTWEPRKARLDKQGKVNAWTSGHNDQSQWLQVDLLVPTKVTGIITQGAKDFGHVQFVGSYKLAYSNDGEHWTVYQDEKQRKDKVFQGNFDNDTHRKNVIDPPIYARHIRILPWSWYGRITLRSELLGCTEEE

SEQ ID NO: 4541 - protein, 212 aa, Homo Sapiens
MDYLLMIFSLLFVACQGAPETAVLGAELSAVGENGGEKPTPSPPWRLRRSKRCSCSSLMDKECVYFCHLDIIWVNTPEHVVPYGLGSPRSKRALENLLPTKATDRENRCQCASQKDKKCWNFCQAGKELRAEDIMEKDWNNHKKGKDCSKLGKKCIYQQLVRGRKIRRSSEEHLRQTRSETMRNSVKSSFHDPKLKGKPSRERYVTHNRAHW

SEQ ID NO: 4542 - protein, 178 aa, Homo Sapiens
MVSVPTTWCSVALALLVALHEGKGQAAATLEQPASSSHAQGTHLRLRRCSCSSWLDKECVYFCHLDIIWVNTPEQTAPYGLGNPPRRRRRSLPRRCQCSSARDPACATFCLRRPWTEAGAVPSRKSPADVFQTGKTGATTGELLQRLRDISTVKSLFAKRQQEAMREPRSTHSRWRKR

SEQ ID NO: 4543 - protein, 192 aa, Homo Sapiens
MEPGLWLLFGLTVTSAAGFVPCSQSGDAGRRGVSQAPTAARSEGDCEETVAGPGEETVAGPGEGTVAPTALQGPSPGSPGQEQAAEGAPEHHRSRRCTCFTYKDKECVYYCHLDIIWINTPEQTVPYGLSNYRGSFRGKRSAGPLPGNLQLSHRPHLRCACVGRYDKACLHFCTQTLDVSRLKSRTNKASRL

SEQ ID NO: 4544 - protein, 224 aa, Homo Sapiens
MEPGLWLLFGLTVTSAAGFVPCSQSGDAGRRGVSQAPTAARSEGDCEETVAGPGEETVAGPGEGTVAPTALQGPSPGSPGQEQAAEGAPEHHRSRRCTCFTYKDKECVYYCHLDIIWINTPEQTVPYGLSNYRGSFRGKRSAGPLPGNLQLSHRPHLRCACVGRYDKACLHFCTQTLDVSRQVEVKDQQSKQALDLHHPKLMPGSGLALAPSTCPRCLFQEGAP

SEQ ID NO: 4545 - protein, 238 aa, Homo Sapiens
MEPGLWLLFGLTVTSAAGFVPCSQSGDAGRRGVSQAPTAARSEGDCEETVAGPGEETVAGPGEGTVAPTALQGPSPGSPGQEQAAEGAPEHHRSRRCTCFTYKDKECVYYCHLDIIWINTPEQTVPYGLSNYRGSFRGKRSAGPLPGNLQLSHRPHLRCACVGRYDKACLHFCTQTLDVSSNSRTAEKTDKEEEGKVEVKDQQSKQALDLHHPKLMPGSGLALAPSTCPRCLFQEGAP

SEQ ID NO: 4546 - protein, 238 aa, Homo Sapiens; identical to SEQ ID NO: 4545

SEQ ID NO: 4547 - protein, 219 aa, Homo Sapiens
MEPGLWLLFGLTVTSAAGFVPCSQSGDAGRRGVSQAPTAARSEGDCEETVAGPGEETVAGPGEGTVAPTALQGPSPGSPGQEQAAEGAPEHHRSRRCTCFTYKDKECVYYCHLDIIWINTPEQTVPYGLSNYRGSFRGKRSAGPLPGNLQLSHRPHLRCACVGRYDKACLHFCTQTLDVSSNSRTAEKTDKEEEGKVRGANRGLCQRRLKSRTNKASRL

SEQ ID NO: 4548 - protein, 198 aa, Homo Sapiens
MEPGLWLLFGLTVTSAAGFVPCSQSGDAGRRGVSQAPTAARSEGDCEETVAGPGEETVAGPGEGTVAPTALQGPSPGSPGQEQAAEGAPEHHRSRRCTCFTYKDKECVYYCHLDIIWINTPEQTVPYGLSNYRGSFRGKRSAGPLPGNLQLSHRPHLRCACVGRYDKACLHFCTQTLDVSSNSRTAEKTDKEEEGKVT

SEQ ID NO: 4549 - protein, 162 aa, Homo Sapiens
KLVPFIQKASVGITVLSLCALSIDRYRAVASWSRIKGIGVPKWTAVEIVLIWVVSVVLAVPEAIGFDIITMDYKGSYLRICLLHPVQKTAFMQFYKTAKDWWLFSFYFCLPLAITAFFYTLMTCEMLRKKSGMQIALNDHLKQLSVGIGLYWYQHGFTEFLH

SEQ ID NO: 4550 - protein, 532 aa, Homo Sapiens
MNKSTCLMAAETPSKRWRLHCLAFSQRFVRAGPACSSREACSSPRAGWNPAGFRLPGRWSPFVALHLVCQIREALKLRSGHRTPSGAGSSMQPPPSLCGRALVALVLACGLSRIWGEERGFPPDRATPLLQTAEIMTPPTKTLWPKGSNASLARSLAPAEVPKGDRTAGSPPRTISPPPCQGPIEIKETFKYINTVVSCLVFVLGIIGNSTLLRIIYKNKCMRNGPNILIASLALGDLLHIVIDIPINVYKLLAEDWPFGAEMCKLVPFIQKASVGITVLSLCALSIDRYRAVASWSRIKGIGVPKWTAVEIVLIWVVSVVLAVPEAIGFDIITMDYKGSYLRICLLHPVQKTAFMQFYKTAKDWWLFSFYFCLPLAITAFFYTLMTCEMLRKKSGMQIALNDHLKQRREVAKTVFCLVLVFALCWLPLHLSRILKLTLYNQNDPNRCELLSFLLVLDYIGINMASLNSCINPIALYLVSKRFKNCFKSCLCCWCQSFEEKQSLEEKQSCLKFKANDHGYDNFRSSNKYSSS

SEQ ID NO: 4551 - protein, 442 aa, Homo Sapiens
MQPPPSLCGRALVALVLACGLSRIWGEERGFPPDRATPLLQTAEIMTPPTKTLWPKGSNASLARSLAPAEVPKGDRTAGSPPRTISPPPCQGPIEIKETFKYINTVVSCLVFVLGIIGNSTLLRIIYKNKCMRNGPNILIASLALGDLLHIVIDIPINVYKLLAEDWPFGAEMCKLVPFIQKASVGITVLSLCALSIDRYRAVASWSRIKGIGVPKWTAVEIVLIWVVSVVLAVPEAIGFDIITMDYKGSYLRICLLHPVQKTAFMQFYKTAKDWWLFSFYFCLPLAITAFFYTLMTCEMLRKKSGMQIALNDHLKQRREVAKTVFCLVLVFALCWLPLHLSRILKLTLYNQNDPNRCELLSFLLVLDYIGINMASLNSCINPIALYLVSKRFKNCFKSCLCCWCQSFEEKQSLEEKQSCLKFKANDHGYDNFRSSNKYSSS

SEQ ID NO: 4552 - protein, 409 aa, Homo Sapiens
MQPPPSLCGRALVALVLACGLSRIWGEERGFPPDRATPLLQTAEIMTPPTKTLWPKGSNASLARSLAPAEVPKGDRTAGSPPRTISPPPCQGPIEIKETFKYINTVVSCLVFVLGIIGNSTLLRIIYKNKCMRNGPNILIASLALGDLLHIVIDIPINVYKLLAEDWPFGAEMCKLVPFIQKASVGITVLSLCALSIDRYRAVASWSRIKGIGVPKWTAVEIVLIWVVSVVLAVPEAIGFDIITMDYKGSYLRICLLHPVQKTAFMQFYKTAKDWWLFSFYFCLPLAITAFFYTLMTCEMLRKKSGMQIALNDHLKQRREVAKTVFCLVLVFALCWLPLHLSRILKLTLYNQNDPNRCELLSFLLVLDYIGINMASLNSCINPIALYLVSKRFKNCFKVRDYPKIKSSL

SEQ ID NO: 4553 - protein, 442 aa, Homo Sapiens; identical to SEQ ID NO: 4551

SEQ ID NO: 4554 - protein, 436 aa, Homo Sapiens
MQPPPSLCGRALVALVLACGLSRIWGEERGFPPDRATPLLQTAEIMTPPTKTLWPKGSNASLARSLAPAEVPKGDRTAGSPPRTISPPPCQGPIEIKETFKYINTVVSCLVFVLGIIGNSTLLRIIYKNKCMRNGPNILIASLALGDLLHIVIDIPINVYKLLAEDWPFGAEMCKLVPFIQKASVGITVLSLCALSIDRYRAVASWSRIKGIGVPKWTAVEIVLIWVVSVVLAVPEAIGFDIITMDYKGSYLRICLLHPVQKTAFMQFYKTAKDWWLFSFYFCLPLAITAFFYTLMTCEMLRKKSGMQIALNDHLKQRREVAKTVFCLVLVFALCWLPLHLSRILKLTLYNQNDPNRCELLSFLLVLDYIGINMASLNSCINPIALYLVSKRFKNCFKAGPHVGNKLVMLFSVNIECDGTVNQNPTMWPERKSNNN

SEQ ID NO: 4555 - protein, 442 aa, Homo Sapiens; identical to SEQ ID NO: 4551

SEQ ID NO: 4556 - protein, 442 aa, Homo Sapiens; identical to SEQ ID NO: 4551

SEQ ID NO: 4557 - protein, 442 aa, Homo Sapiens; identical to SEQ ID NO: 4551

SEQ ID NO: 4558 - protein, 27 aa, Homo Sapiens
MLKALFLTMLTLALVKSQDTEETITYT

SEQ ID NO: 4559 - protein, 52 aa, Homo Sapiens
MLKALFLTMLTLALVKSQDTEETITYTQCTDGYEWDPVRQQCKDIDECDIVP

SEQ ID NO: 4560 - protein, 62 aa, Homo Sapiens
MLKALFLTMLTLALVKSQDTEETITYTQCTDGYEWDPVRQQCKDIDECDIVPDACKGGMKCV

SEQ ID NO: 4561 - protein, 87 aa, Homo Sapiens
MLKALFLTMLTLALVKSQDTEETITYTQCTDGYEWDPVRQQCKDIDECDIVPDACKGGMKCVNHYGGYLCLPKTAQIIVNNEQPQQE

SEQ ID NO: 4562 - protein, 106 aa, Homo Sapiens
MLKALFLTMLTLALVKSQDTEETITYTQCTDGYEWDPVRQQCKDIDECDIVPDACKGGMKCVNHYGGYLCLPKTAQIIVNNEQPQQETQPAEGTSGATTGVVAASS

SEQ ID NO: 4563 - protein, 119 aa, Homo Sapiens
MLKALFLTMLTLALVKSQDTEETITYTQCTDGYEWDPVRQQCKDIDECDIVPDACKGGMKCVNHYGGYLCLPKTAQIIVNNEQPQQETQPAEGTSGATTGVVAASSMATSGVLPGGGFV

SEQ ID NO: 4564 - protein, 172 aa, Homo Sapiens
MLKALFLTMLTLALVKSQDTEETITYTQCTDGYEWDPVRQQCKDIDECDIVPDACKGGMKCVNHYGGYLCLPKTAQIIVNNEQPQQETQPAEGTSGATTGVVAASSMATSGVLPGGGFVASAAAVAGPEMQTGRNNFVIRRNPADPQRIPSNPSHRIQCAAGYEQSEHNVCQ

SEQ ID NO: 4565 - protein, 493 aa, Homo Sapiens
MLKALFLTMLTLALVKSQDTEETITYTQCTDGYEWDPVRQQCKDIDECDIVPDACKGGMKCVNHYGGYLCLPKTAQIIVNNEQPQQETQPAEGTSGATTGVVAASSMATSGVLPGGGFVASAAAVAGPEMQTGRNNFVIRRNPADPQRIPSNPSHRIQCAAGYEQSEHNVCQDIDECTAGTHNCRADQVCINLRGSFACQCPPGYQKRGEQCVDIDECTIPPYCHQRCVNTPGSFYCQCSPGFQLAANNYTCVDINECDASNQCAQQCYNILGSFICQCNQGYELSSDRLNCEDIDECRTSSYLCQYQCVNEPGKFSCMCPQGYQVVRSRTCQDINECETTNECREDEMCWNYHGGFRCYPRNPCQDPYILTPENRCVCPVSNAMCRELPQSIVYKYMSIRSDRSVPSDIFQIQATTIYANTINTFRIKSGNENGEFYLRQTSPVSAMLVLVKSLSGPREHIVDLEMLTVSSIGTFRTSSVLRLTIIVGPFSF

SEQ ID NO: 4566 - protein, 493 aa, Homo Sapiens; identical to SEQ ID NO: 4565

SEQ ID NO: 4567 - protein, 46 aa, Homo Sapiens
MLKALFLTMLTLALVKSQDTEETITYTQCTDGYEWDPVRQQCKEDS

SEQ ID NO: 4568 - protein, 280 aa, Homo Sapiens
  misc_feature (1)..(1): Xaa can be any naturally occurring amino acid
XNNFVIRRNPADPQRIPSNPSHRIQCAAGYEQSEHNVCQDIDECTAGTHNCRADQVCINLRGSFACQCPPGYQKRGEQCVDIDECRTSSYLCQYQCVNEPGKFSCMCPQGYQVVRSRTCQDINECETTNECREDEMCWNYHGGFRCYPRNPCQDPYILTPENRCVCPVSNAMCRELPQSIVYKYMSIRSDRSVPSDIFQIQATTIYANTINTFRIKSGNENGEFYLRQTSPVSAMLVLVKSLSGPREHIVDLEMLTVSSIGTFRTSSVLRLTIIVGPFSF

SEQ ID NO: 4569 - protein, 182 aa, Homo Sapiens
DECESGAHQCSEAQTCVNFHGGYRCVDTNRCVEPYIQVSENRCLCPASNPLCREQPSSIVHRYMTITSERSVPADVFQIQATSVYPGAYNAFQIRAGNSQGDFYIRGPTPSEEQEGATLPAATLAEEPVVRGRMRKAQGPPLTGAGSSAPRASVTPRGEEVTRRADSRPRPRDLDLAGLQGS

SEQ ID NO: 4570 - protein, 183 aa, Homo Sapiens
MLPCASCLPGSLLLWALLLLLLGSASPQDSEEPDSYTECTDGYEWDPDSQHCRDVNECLTIPEACKGEMKCINHYGGYLCLPRSAAVINDLHGEGPPPPVPPAQHPNPCPPGYEPDDQDSCVDVDECAQALHDCRPSQDCHNLPGSYQCTCPDGYRKIGPECVDIDECRYRYCQHRCVNLPGS

SEQ ID NO: 4571 - protein, 202 aa, Homo Sapiens
MLPCASCLPGSLLLWALLLLLLGSASPQDSEEPDSYTECTDGYEWDPDSQHCRDVNECLTIPEACKGEMKCINHYGGYLCLPRSAAVINDLHGEGPPPPVPPAQHPNPCPPGYEPDDQDSCVDVDECAQALHDCRPSQDCHNLPGSYQCTCPDGYRKIGPECVDIDECRYRYCQHRCVNLPGSFRCQCEPGFQLGPNNRSCV

SEQ ID NO: 4572 - protein, 443 aa, Homo Sapiens
MLPCASCLPGSLLLWALLLLLLGSASPQDSEEPDSYTECTDGYEWDPDSQHCRDVNECLTIPEACKGEMKCINHYGGYLCLPRSAAVINDLHGEGPPPPVPPAQHPNPCPPGYEPDDQDSCVDVDECAQALHDCRPSQDCHNLPGSYQCTCPDGYRKIGPECVDIDECRYRYCQHRCVNLPGSFRCQCEPGFQLGPNNRSCVDVNECDMGAPCEQRCFNSYGTFLCRCHQGYELHRDGFSCSDIDECSYSSYLCQYRCINEPGRFSCHCPQGYQLLATRLCQDIDECESGAHQCSEAQTCVNFHGGYRCVDTNRCVEPYIQVSENRCLCPASNPLCREQPSSIVHRYMTITSERSVPADVFQIQATSVYPGAYNAFQIRAGNSQGDFYIRQINNVSAMLVLARPVTGPREYVLDLEMVTMNSLMSYRASSVLRLTVFVGAYTF

SEQ ID NO: 4573 - protein, 443 aa, Homo Sapiens; identical to SEQ ID NO: 4572

SEQ ID NO: 4574 - protein, 436 aa, Homo Sapiens
MLPCASCLPGSLLLWALLLLLLGSASPQDSEEPDSYTECTDGYEWDPDSQHCRDVNECLTIPEACKGEMKCINHYGGYLCLPRSAAVINDLHGEGPPPPVPPAQHPNPCPPGYEPDDQDSCVDVDECAQALHDCRPSQDCHNLPGSYQCTCPDGYRKIGPECVDIDECRYRYCQHRCVNLPGSFRCQCEPGFQLGPNNRSCVDVNECDMGAPCEQRCFNSYGTFLCRCHQGYELHRDGFSCSDIDECSYSSYLCQYRCINEPGRFSCHCPQGYQLLATRLCQDIDECESGAHQCSEAQTCVNFHGGYRCVDTNRCVEPYIQVSENRCLCPASNPLCREQPSSIVHRYMTITSERSVPADVFQIQATSVYPGAYNAFQIRAGNSQGDFYIRAQGPPLTGAGSSAPRASVTPRGEEVTRRADSRPRPRDLDLAGLQGS

SEQ ID NO: 4575 - protein, 77 aa, Homo Sapiens
MLPCASCLPGSLLLWALLLLLLGSASPQDSEEPDSYTECTDGYEWDPDSQHCRGPAQETGCAQQAPLCRCQRVSDHP

SEQ ID NO: 4576 - protein, 58 aa, Homo Sapiens
MLPCASCLPGSLLLWALLLLLLGSASPQDSEEPDSYTVGTVRAAGLGQEGCQRVSDHP

SEQ ID NO: 4577 - protein, 76 aa, Homo Sapiens
MTITSERSVPADVFQIQATSVYPGAYNAFQIRAGNSQGDFYIRQINNVSAMLVLARPVTGPREYVLDLEMVTMNSL

SEQ ID NO: 4578 - protein, 74 aa, Homo Sapiens
SIVHRYMTITSERSVPADVFQIQATSVYPGAYNAFQIRAGNSQGDFYIRQINNVSAMLVLARPVTGPREPRGPH

SEQ ID NO: 4579 - protein, 69 aa, Homo Sapiens
  misc_feature (1)..(1): Xaa can be any naturally occurring amino acid
XFQIRAGNSQGDFYIRQINNVSAMLVLARPVTGPREYVLDLEMVTMNSLMSYRASSVLRLTVFVGAYTF

SEQ ID NO: 4580 - protein, 54 aa, Homo Sapiens
  misc_feature (1)..(1): Xaa can be any naturally occurring amino acid
XQINNVSAMLVLARPVTGPREYVLDLEMVTMNSLMSYRASSVLRLTVFVGAYTF

SEQ ID NO: 4581 - protein, 183 aa, Homo Sapiens
MEFLWAPLLGLCCSLAAADRHTVFWNSSNPKFRNEDYTIHVQLNDYVDIICPHYEDHSVADAAMEQYILYLVEHEEYQLCQPQSKDQVRWQCNRPSAKHGPEKLSEKFQRFTPFTLGKEFKEGHSYYYISHSPQAHDNPQEKRLAADDPEVRVLHSIGHSAAPRLFPLAWTVLLLPLLLLQTP

SEQ ID NO: 4582 - protein, 205 aa, Homo Sapiens
MEFLWAPLLGLCCSLAAADRHTVFWNSSNPKFRNEDYTIHVQLNDYVDIICPHYEDHSVADAAMEQYILYLVEHEEYQLCQPQSKDQVRWQCNRPSAKHGPEKLSEKFQRFTPFTLGKEFKEGHSYYYISKPIHQHEDRCLRLKVTVSGKITHSPQAHDNPQEKRLAADDPEVRVLHSIGHSAAPRLFPLAWTVLLLPLLLLQTP

SEQ ID NO: 4583 - protein, 213 aa, Homo Sapiens
MAPAQRPLLPLLLLLLPLPPPPFARAEDAARANSDRYAVYWNRSNPRFHAGAGDDGGGYTVEVSINDYLDIYCPHYGAPLPPAERMEHYVLYMVNGEGHASCDHRQRGFKRWECNRPAAPGGPLKFSEKFQLFTPFSLGFEFRPGHEYYYISATPPNAVDRPCLRLKVYVRPTNETLYEAPEPIFTSNNSCSSPGGCRLFLSTIPVLWTLLGS

SEQ ID NO: 4584 - protein, 201 aa, Homo Sapiens
MRLLPLLRTVLWAAFLGSPLRGGSSLRHVVYWNSSNPRLLRGDAVVELGLNDYLDIVCPHYEGPGPPEGPETFALYMVDWPGYESCQAEGPRAYKRWVCSLPFGHVQFSEKIQRFTPFSLGFEFLPGETYYYISVPTPESSGQCLRLQVSVCCKERKSESAHPVGSPGESGTSGWRGGDTPSPLCLLLLLLLLILRLLRIL

SEQ ID NO: 4585 - protein, 193 aa, Homo Sapiens
MRLLPLLRTVLWAAFLGSPLRGGSSLRHVVYWNSSNPRLLRGDAVVELGLNDYLDIVCPHYEGPGPPEGPETFALYMVDWPGYESCQAEGPRAYKRWVCSLPFGHVQFSEKIQRFTPFSLGFEFLPGETYYYISVPTPESSGQCLRLQVSVCCKERNLPSHPKEPESSQDPLEEEGSLLPALGVPIQTDKMEH

SEQ ID NO: 4586 - protein, 207 aa, Homo Sapiens
MRLLPLLRTVLWAAFLGSPLRGGSSLRHVVYWNSSNPRLLRGDAVVELGLNDYLDIVCPHYEGPGPPEGPETFALYMVDWPGYESCQAEGPRAYKRWVCSLPFGHVQFSEKIQRFTPFSLGFEFLPGETYYYISVPTPESSGQCLRLQVSVCCKERRARVLPRSPGGGGIPAACTGGANSDRQDGALMGEIRGSEVTLAGACPLITG

SEQ ID NO: 4587 - protein, 553 aa, Homo Sapiens
MPLPWSLALPLLLSWVAGGFGNAASARHHGLLASARQPGVCHYGTKLACCYGWRRNSKGVCEATCEPGCKFGECVGPNKCRCFPGYTGKTCSQDVNECGMKPRPCQHRCVNTHGSYKCFCLSGHMLMPDATCVNSRTCAMINCQYSCEDTEEGPQCLCPSSGLRLAPNGRDCLDIDECASGKVICPYNRRCVNTFGSYYCKCHIGFELQYISGRYDCIDINECTMDSHTCSHHANCFNTQGSFKCKCKQGYKGNGLRCSAIPENSVKEVLRAPGTIKDRIKKLLAHKNSMKKKAKIKNVTPEPTRTPTPKVNLQPFNYEEIVSRGGNSHGGKKGNEEKMKEGLEDEKREEKALKNDIEERSLRGDVFFPKVNEAGEFGLILVQRKALTSKLEHKDLNISVDCSFNHGICDWKQDREDDFDWNPADRDNAIGFYMAVPALAGHKKDIGRLKLLLPDLQPQSNFCLLFDYRLAGDKVGKLRVFVKNSNNALAWEKTTSEDEKWKTGKIQLYQGTDATKSIIFEAERGKGKTGEIAVDGVLLVSGLCPDSLLSVDD

SEQ ID NO: 4588 - protein, 554 aa, Homo Sapiens
MPLPWSLALPLLLSWVAGGFGNAASARHHGLLASARQPGVCHYGTKLACCYGWRRNSKGVCEATCEPGCKFGECVGPNKCRCFPGYTGKTCSQDVNECGMKPRPCQHRCVNTHGSYKCFCLSGHMLMPDATCVNSRTCAMINCQYSCEDTEEGPQCLCPSSGLRLAPNGRDCLDIDECASGKVICPYNRRCVNTFGSYYCKCHIGFELQYISGRYDCIDINECTMDSHTCSHHANCFNTQGSFKCKCKQGYKGNGLRCSAIPENSVKEVLRAPGTIKDRIKKLLAHKNSMKKKAKIKNVTPEPTRTPTPKVNLQPFNYEEIVSRGGNSHGGKKGNEEKMKEGLEDEKREEKALKNDIEERSLRGDVFFPKVNEAGEFGLILVQRKALTSKLEHKADLNISVDCSFNHGICDWKQDREDDFDWNPADRDNAIGFYMAVPALAGHKKDIGRLKLLLPDLQPQSNFCLLFDYRLAGDKVGKLRVFVKNSNNALAWEKTTSEDEKWKTGKIQLYQGTDATKSIIFEAERGKGKTGEIAVDGVLLVSGLCPDSLLSVDD

SEQ ID NO: 4589 - protein, 66 aa, Homo Sapiens
MRGSQEVLLMWLLVLAVGGTEHAYRPGRRVCAVRAHGDPVSESFVQRVYQPFLTTCDGHRACSTYR

SEQ ID NO: 4590 - protein, 273 aa, Homo Sapiens
MRGSQEVLLMWLLVLAVGGTEHAYRPGRRVCAVRAHGDPVSESFVQRVYQPFLTTCDGHRACSTYRTIYRTAYRRSPGLAPARPRYACCPGWKRTSGLPGACGAAICQPPCRNGGSCVQPGRCRCPAGWRGDTCQSDVDECSARRGGCPQRCVNTAGSYWCQCWEGHSLSADGTLCVPKGGPPRVAPNPTGVDSAMKEEVQRLQSRVDLLEEKLQLVLAPLHSLASQALEHGLPDPGSLLVHSFQQLGRIDSLSEQISFLEEQLGSCSCKKDS

SEQ ID NO: 4591 - protein, 273 aa, Homo Sapiens; identical to SEQ ID NO: 4590

SEQ ID NO: 4592 - protein, 273 aa, Homo Sapiens; identical to SEQ ID NO: 4590

SEQ ID NO: 4593 - protein, 273 aa, Homo Sapiens; identical to SEQ ID NO: 4590

SEQ ID NO: 4594 - protein, 293 aa, Homo Sapiens
MGSRAELCTLLGGFSFLLLLIPGEGAKGGSLRESQGVCSKQTLVVPLHYNESYSQPVYKPYLTLCAGRRICSTYRTMYRVMWREVRREVQQTHAVCCQGWKKRHPGALTCEAICAKPCLNGGVCVRPDQCECAPGWGGKHCHVDVDECRTSITLCSHHCFNTAGSFTCGCPHDLVLGVDGRTCMEGSPEPPTSASILSVAVREAEKDERALKQEIHELRGRLERLEQWAGQAGAWVRAVLPVPPEELQPEQVAELWGRGDRIESLSDQVLLLEERLGACSCEDNSLGLGVNHR

SEQ ID NO: 4595 - protein, 293 aa, Homo Sapiens; identical to SEQ ID NO: 4594

SEQ ID NO: 4596 - protein, 258 aa, Homo Sapiens
MGSRAELCTLLGGFSFLLLLIPGEGAKGGSLRESQGVCSKQTLVVPLHYNESYSQPVYKPYLTLCAGRRICSTYRTMYRVMWREVRREVQQTHAVCCQGWKKRHPGALTCEAICAKPCLNGGVCVRPDQCECAPGWGGKHCHVGSFTCGCPHDLVLGVDGRTCMEGSPEPPTSASILSVAVREAEKDERALKQEIHELRGRLERLEQWAGQAGAWVRAVLPVPPEELQPEQVAELWGRGDRIESLSDQVLLLEERLGA

SEQ ID NO: 4597 - protein, 1009 aa, Homo Sapiens
MDLIRGVLLRLLLLASSLGPGAVSLRAAIRKPGKVGPPLDIKLGALNCTAFSIQWKMPRHPGSPILGYTVFYSEVGADKSLQEQLHSVPLSRDIPTTEEVIGDLKPGTEYRVSIAAYSQAGKGRLSSPRHVTTLSQDSCLPPAAPQQPHVIVVSDSEVALSWKPGASEGSAPIQYYSVEFIRPDFDKKWTSIHERIQMDSMVIKGLDPDTNYQFAVRAMNSHGPSPRSWPSDIIRTLCPEEAGSGRYGPRYITDMGAGEDDEGFEDDLDLDISFEEVKPLPATKGGNKKFLVESKKMSISNPKTISRLIPPTSASLPVTTVAPQPIPIQRKGKNGVAIMSRLFDMPCDETLCSADSFCVNDYTWGGSRCQCTLGKGGESCSEDIVIQYPQFFGHSYVTFEPLKNSYQAFQITLEFRAEAEDGLLLYCGENEHGRGDFMSLAIIRRSLQFRFNCGTGVAIIVSETKIKLGGWHTVMLYRDGLNGLLQLNNGTPVTGQSQGQYSKITFRTPLYLGGAPSAYWLVRATGTNRGFQGCVQSLAVNGRRIDMRPWPLGKALSGADVGECSSGICDEASCIHGGTCTAIKADSYICLCPLGFKGRHCEDAFTLTIPQFRESLRSYAATPWPLEPQHYLSFMEFEITFRPDSGDGVLLYSYDTGSKDFLSINLAGGHVEFRFDCGSGTGVLRSEDPLTLGNWHELRVSRTAKNGILQVDKQKIVEGMAEGGFTQIKCNTDIFIGGVPNYDDVKKNSGVLKPFSGSIQKIILNDRTIHVKHDFTSGVNVENAAHPCVRAPCAHGGSCRPRKEGYDCDCPLGFEGLHCQKAIIEAIEIPQFIGRSYLTYDNPDILKRVSGSRSNVFMRFKTTAKDGLLLWRGDSPMRPNSDFISLGLRDGALVFSYNLGSGVASIMVNGSFNDGRWHRVKAVRDGQSGKITVDDYGARTGKSPGMMRQLNINGALYVGGMKEIALHTNRQYMRGLVGCISHFTLSTDYHISLVEDAVDGKNINTCGAK

SEQ ID NO: 4598 - protein, 1017 aa, Homo Sapiens
MDLIRGVLLRLLLLASSLGPGAVSLRAAIRKPGKVGPPLDIKLGALNCTAFSIQWKMPRHPGSPILGYTVFYSEVGADKSLQEQLHSVPLSRDIPTTEEVIGDLKPGTEYRVSIAAYSQAGKGRLSSPRHVTTLSQDSCLPPAAPQQPHVIVVSDSEVALSWKPGASEGSAPIQYYSVEFIRPDFDKKWTSIHERIQMDSMVIKGLDPDTNYQFAVRAMNSHGPSPRSWPSDIIRTLCPEEAGSGRYGPRYITDMGAGEDDEGFEDDLDLDISFEEVKPLPATKGGNKKFLVESKKMSISNPKTISRLIPPTSASLPVTTVAPQPIPIQRKGKNGVAIMSRLFDMPCDETLCSADSFCVNDYTWGGSRCQCTLGKGGESCSEDIVIQYPQFFGHSYVTFEPLKNSYQAFQITLEFRAEAEDGLLLYCGENEHGRGDFMSLAIIRRSLQFRFNCGTGVAIIVSETKIKLGGWHTVMLYRDGLNGLLQLNNGTPVTGQSQGQYSKITFRTPLYLGGAPSAYWLVRATGTNRGFQGCVQSLAVNGRRIDMRPWPLGKALSGADVGECSSGICDEASCIHGGTCTAIKADSYICLCPLGFKGRHCEDAFTLTIPQFRESLRSYAATPWPLEPQHYLSFMEFEITFRPDSGDGVLLYSYDTGSKDFLSINLAGGHVEFRFDCGSGTGVLRSEDPLTLGNWHELRVSRTAKNGILQVDKQKIVEGMAEGGFTQIKCNTDIFIGGVPNYDDVKKNSGVLKPFSGSIQKIILNDRTIHVKHDFTSGVNVENAAHPCVRAPCAHGGSCRPRKEGYDCDCPLGFEGLHCQKECGNYCLNTIIEAIEIPQFIGRSYLTYDNPDILKRVSGSRSNVFMRFKTTAKDGLLLWRGDSPMRPNSDFISLGLRDGALVFSYNLGSGVASIMVNGSFNDGRWHRVKAVRDGQSGKITVDDYGARTGKSPGMMRQLNINGALYVGGMKEIALHTNRQYMRGLVGCISHFTLSTDYHISLVEDAVDGKNINTCGAK

SEQ ID NO: 4599 - protein, 47 aa, Homo Sapiens
MDLIRGVLLRLLLLASSLGPGAVSLRAAIRKPGRCWRMTVTKTWTEP

SEQ ID NO: 4600 - protein, 375 aa, Homo Sapiens
MEFEITFRPDSGDGVLLYSYDTGSKDFLSINLAGGHVEFRFDCGSGTGVLRSEDPLTLGNWHELRVSRTAKNGILQVDKQKIVEGMAEGGFTQIKCNTDIFIGGVPNYDDVKKNSGVLKPFSGSIQKIILNDRTIHVKHDFTSGVNVENAAHPCVRAPCAHGGSCRPRKEGYDCDCPLGFEGLHCQKAIIEAIEIPQFIGRSYLTYDNPDILKRVSGSRSNVFMRFKTTAKDGLLLWRGDSPMRPNSDFISLGLRDGALVFSYNLGSGVASIMVNGSFNDGRWHRVKAVRDGQSGKITVDDYGARTGKSPGMMRQLNINGALYVGGMKEIALHTNRQYMRGLVGCISHFTLSTDYHISLVEDAVDGKNINTCGAK

SEQ ID NO: 4601 - protein, 775 aa, Homo Sapiens
MHPGPEEAGSGRYGPRYITDMGAGEDDEGFEDDLDLDISFEEVKPLPATKGGNKKFLVESKKMSISNPKTISRLIPPTSASLPVTTVAPQPIPIQRKGKNGVAIMSRLFDMPCDETLCSADSFCVNDYTWGGSRCQCTLGKGGESCSEDIVIQYPQFFGHSYVTFEPLKNSYQAFQITLEFRAEAEDGLLLYCGENEHGRGDFMSLAIIRRSLQFRFNCGTGVAIIVSETKIKLGGWHTVMLYRDGLNGLLQLNNGTPVTGQSQGQYSKITFRTPLYLGGAPSAYWLVRATGTNRGFQGCVQSLAVNGRRIDMRPWPLGKALSGADVGECSSGICDEASCIHGGTCTAIKADSYICLCPLGFKGRHCEDAFTLTIPQFRESLRSYAATPWPLEPQHYLSFMEFEITFRPDSGDGVLLYSYDTGSKDFLSINLAGGHVEFRFDCGSGTGVLRSEDPLTLGNWHELRVSRTAKNGILQVDKQKIVEGMAEGGFTQIKCNTDIFIGGVPNYDDVKKNSGVLKPFSGSIQKIILNDRTIHVKHDFTSGVNVENAAHPCVRAPCAHGGSCRPRKEGYDCDCPLGFEGLHCQKAIIEAIEIPQFIGRSYLTYDNPDILKRVSGSRSNVFMRFKTTAKDGLLLWRGDSPMRPNSDFISLGLRDGALVFSYNLGSGVASIMVNGSFNDGRWHRVKAVRDGQSGKITVDDYGARTGKSPGMMRQLNINGALYVGGMKEIALHTNRQYMRGLVGCISHFTLSTDYHISLVEDAVDGKNINTCGAK

SEQ ID NO: 4602 - protein, 112 aa, Homo Sapiens
MRFKTTAKDGLLLWRGDSPMRPNSDFISLGLRDGALVFSYNLGSGVASIMVNGSFNDGRWHRVKAVRDGQSGKITVDDYGARTGKSPGMMRQLNINGALYVGGMKEIALHTN

SEQ ID NO: 4603 - protein, 152 aa, Homo Sapiens
MRFKTTAKDGLLLWRGDSPMRPNSDFISLGLRDGALVFSYNLGSGVASIMVNGSFNDGRWHRVKAVRDGQSGKITVDDYGARTGKSPGMMRQLNINGALYVGGMKEIALHTNRQYMRGLVGCISHFTLSTDYHISLVEDAVDGKNINTCGAK

SEQ ID NO: 4604 - protein, 152 aa, Homo Sapiens; identical to SEQ ID NO: 4603

SEQ ID NO: 4605 - protein, 152 aa, Homo Sapiens; identical to SEQ ID NO: 4603

SEQ ID NO: 4606 - protein, 128 aa, Homo Sapiens
MFNNCEVVLGNLEITYVQRNYDLSFLKTIQEVAGYVLIALNTVERIPLENLQIIRGNMYYENSYALAVLSNYDANKTGLKELPMRNLQEILHGAVRFSNNPALCNVESIQWRDIVSSDFLSNMSMDFQ

SEQ ID NO: 4607 - protein, 1210 aa, Homo Sapiens [sequence omitted]

SEQ ID NO: 4608 - protein, 628 aa, Homo Sapiens
MRPSGTAGAALLALLAALCPASRALEEKKVCQGTSNKLTQLGTFEDHFLSLQRMFNNCEVVLGNLEITYVQRNYDLSFLKTIQEVAGYVLIALNTVERIPLENLQIIRGNMYYENSYALAVLSNYDANKTGLKELPMRNLQEILHGAVRFSNNPALCNVESIQWRDIVSSDFLSNMSMDFQNHLGSCQKCDPSCPNGSCWGAGEENCQKLTKIICAQQCSGRCRGKSPSDCCHNQCAAGCTGPRESDCLVCRKFRDEATCKDTCPPLMLYNPTTYQMDVNPEGKYSFGATCVKKCPRNYVVTDHGSCVRACGADSYEMEEDGVRKCKKCEGPCRKVCNGIGIGEFKDSLSINATNIKHFKNCTSISGDLHILPVAFRGDSFTHTPPLDPQELDILKTVKEITGFLLIQAWPENRTDLHAFENLEIIRGRTKQHGQFSLAVVSLNITSLGLRSLKEISDGDVIISGNKNLCYANTINWKKLFGTSGQKTKIISNRGENSCKATGQVCHALCSPEGCWGPEPRDCVSCRNVSRGRECVDKCNLLEGEPREFVENSECIQCHPECLPQAMNITCTGRGPDNCIQCAHYIDGPHCVKTCPAGVMGENNTLVWKYADAGHVCHLCHPNCTYGS

SEQ ID NO: 4609 - protein, 705 aa, Homo Sapiens
MRPSGTAGAALLALLAALCPASRALEEKKVCQGTSNKLTQLGTFEDHFLSLQRMFNNCEVVLGNLEITYVQRNYDLSFLKTIQEVAGYVLIALNTVERIPLENLQIIRGNMYYENSYALAVLSNYDANKTGLKELPMRNLQEILHGAVRFSNNPALCNVESIQWRDIVSSDFLSNMSMDFQNHLGSCQKCDPSCPNGSCWGAGEENCQKLTKIICAQQCSGRCRGKSPSDCCHNQCAAGCTGPRESDCLVCRKFRDEATCKDTCPPLMLYNPTTYQMDVNPEGKYSFGATCVKKCPRNYVVTDHGSCVRACGADSYEMEEDGVRKCKKCEGPCRKVCNGIGIGEFKDSLSINATNIKHFKNCTSISGDLHILPVAFRGDSFTHTPPLDPQELDILKTVKEITGFLLIQAWPENRTDLHAFENLEIIRGRTKQHGQFSLAVVSLNITSLGLRSLKEISDGDVIISGNKNLCYANTINWKKLFGTSGQKTKIISNRGENSCKATGQVCHALCSPEGCWGPEPRDCVSCRNVSRGRECVDKCNLLEGEPREFVENSECIQCHPECLPQAMNITCTGRGPDNCIQCAHYIDGPHCVKTCPAGVMGENNTLVWKYADAGHVCHLCHPNCTYGPGNESLKAMLFCLFKLSSCNQSNDGSVSHQSGSPAAQESCLGWIPSLLPSEFQLGWGGCSHLHAWPSASVIITASSCH

SEQ ID NO: 4610 - protein, 405 aa, Homo Sapiens
MRPSGTAGAALLALLAALCPASRALEEKKVCQGTSNKLTQLGTFEDHFLSLQRMFNNCEVVLGNLEITYVQRNYDLSFLKTIQEVAGYVLIALNTVERIPLENLQIIRGNMYYENSYALAVLSNYDANKTGLKELPMRNLQEILHGAVRFSNNPALCNVESIQWRDIVSSDFLSNMSMDFQNHLGSCQKCDPSCPNGSCWGAGEENCQKLTKIICAQQCSGRCRGKSPSDCCHNQCAAGCTGPRESDCLVCRKFRDEATCKDTCPPLMLYNPTTYQMDVNPEGKYSFGATCVKKCPRNYVVTDHGSCVRACGADSYEMEEDGVRKCKKCEGPCRKVCNGIGIGEFKDSLSINATNIKHFKNCTSISGDLHILPVAFRGDSFTHTPPLDPQELDILKTVKEITGLS

SEQ ID NO: 4611 - protein, 1091 aa, Homo Sapiens
MRPSGTAGAALLALLAALCPASRALEEKKVCQGTSNKLTQLGTFEDHFLSLQRMFNNCEVVLGNLEITYVQRNYDLSFLKTIQEVAGYVLIALNTVERIPLENLQIIRGNMYYENSYALAVLSNYDANKTGLKELPMRNLQGQKCDPSCPNGSCWGAGEENCQKLTKIICAQQCSGRCRGKSPSDCCHNQCAAGCTGPRESDCLVCRKFRDEATCKDTCPPLMLYNPTTYQMDVNPEGKYSFGATCVKKCPRNYVVTDHGSCVRACGADSYEMEEDGVRKCKKCEGPCRKVCNGIGIGEFKDSLSINATNIKHFKNCTSISGDLHILPVAFRGDSFTHTPPLDPQELDILKTVKEITGFLLIQAWPENRTDLHAFENLEIIRGRTKQHGQFSLAVVSLNITSLGLRSLKEISDGDVIISGNKNLCYANTINWKKLFGTSGQKTKIISNRGENSCKATGQVCHALCSPEGCWGPEPRDCVSCRNVSRGRECVDKCNLLEGEPREFVENSECIQCHPECLPQAMNITCTGRGPDNCIQCAHYIDGPHCVKTCPAGVMGENNTLVWKYADAGHVCHLCHPNCTYGCTGPGLEGCPTNGPKIPSIATGMVGALLLLLVVALGIGLFMRRRHIVRKRTLRRLLQERELVEPLTPSGEAPNQALLRILKETEFKKIKVLGSGAFGTVYKGLWIPEGEKVKIPVAIKELREATSPKANKEILDEAYVMASVDNPHVCRLLGICLTSTVQLITQLMPFGCLLDYVREHKDNIGSQYLLNWCVQIAKGMNYLEDRRLVHRDLAARNVLVKTPQHVKITDFGLAKLLGAEEKEYHAEGGKVPIKWMALESILHRIYTHQSDVWSYGVTVWELMTFGSKPYDGIPASEISSILEKGERLPQPPICTIDVYMIMVKCWMIDADSRPKFRELIIEFSKMARDPQRYLVIQGDERMHLPSPTDSNFYRALMDEEDMDDVVDADEYLIPQQGFFSSPSTSRTPLLSSLSATSNNSTVACIDRNGLQSCPIKEDSFLQRYSSDPTGALTEDSIDDTFLPVPGEWLVWKQSCSSTSSTHSAAASLQCPSQVLPPASPEGETVADLQTQ

SEQ ID NO: 4612 - protein, 1165 aa, Homo Sapiens
MRPSGTAGAALLALLAALCPASRALEEKKVCQGTSNKLTQLGTFEDHFLSLQRMFNNCEVVLGNLEITYVQRNYDLSFLKTIQEVAGYVLIALNTVERIPLENLQIIRGNMYYENSYALAVLSNYDANKTGLKELPMRNLQGQKCDPSCPNGSCWGAGEENCQKLTKIICAQQCSGRCRGKSPSDCCHNQCAAGCTGPRESDCLVCRKFRDEATCKDTCPPLMLYNPTTYQMDVNPEGKYSFGATCVKKCPRNYVVTDHGSCVRACGADSYEMEEDGVRKCKKCEGPCRKVCNGIGIGEFKDSLSINATNIKHFKNCTSISGDLHILPVAFRGDSFTHTPPLDPQELDILKTVKEITGFLLIQAWPENRTDLHAFENLEIIRGRTKQHGQFSLAVVSLNITSLGLRSLKEISDGDVIISGNKNLCYANTINWKKLFGTSGQKTKIISNRGENSCKATGQVCHALCSPEGCWGPEPRDCVSCRNVSRGRECVDKCNLLEGEPREFVENSECIQCHPECLPQAMNITCTGRGPDNCIQCAHYIDGPHCVKTCPAGVMGENNTLVWKYADAGHVCHLCHPNCTYGCTGPGLEGCPTNGPKIPSIATGMVGALLLLLVVALGIGLFMRRRHIVRKRTLRRLLQERELVEPLTPSGEAPNQALLRILKETEFKKIKVLGSGAFGTVYKGLWIPEGEKVKIPVAIKELREATSPKANKEILDEAYVMASVDNPHVCRLLGICLTSTVQLITQLMPFGCLLDYVREHKDNIGSQYLLNWCVQIAKGMNYLEDRRLVHRDLAARNVLVKTPQHVKITDFGLAKLLGAEEKEYHAEGGKVPIKWMALESILHRIYTHQSDVWSYGVTVWELMTFGSKPYDGIPASEISSILEKGERLPQPPICTIDVYMIMVKCWMIDADSRPKFRELIIEFSKMARDPQRYLVIQGDERMHLPSPTDSNFYRALMDEEDMDDVVDADEYLIPQQGFFSSPSTSRTPLLSSLSATSNNSTVACIDRNGLQSCPIKEDSFLQRYSSDPTGALTEDSIDDTFLPVPEYINQSVPKRPAGSVQNPVYHNQPLNPAPSRDPHYQDPHSTAVGNPEYLNTVQPTCVNSTFDSPAHWAQKGSHQISLDNPDYQQDFFPKEAKPNGIFKGSTAENAEYLRVAPQSSEFIGA

SEQ ID NO: 4613 - protein, 464 aa, Homo Sapiens
MSSLTKIICAQQCSGRCRGKSPSDCCHNQCAAGCTGPRESDCLVCRKFRDEATCKDTCPPLMLYNPTTYQMDVNPEGKYSFGATCVKKCPRNYVVTDHGSCVRACGADSYEMEEDGVRKCKKCEGPCRKVCNGIGIGEFKDSLSINATNIKHFKNCTSISGDLHILPVAFRGDSFTHTPPLDPQELDILKTVKEITGFLLIQAWPENRTDLHAFENLEIIRGRTKQHGQFSLAVVSLNITSLGLRSLKEISDGDVIISGNKNLCYANTINWKKLFGTSGQKTKIISNRGENSCKATGQVCHALCSPEGCWGPEPRDCVSCRNVSRGRECVDKCNLLEGEPREFVENSECIQCHPECLPQAMNITCTGRGPDNCIQCAHYIDGPHCVKTCPAGVMGENNTLVWKYADAGHVCHLCHPNCTYGCTGPGLEGCPTNGPKIPSIATGMVGALLLLLVVALGIGLFMRR

SEQ ID NO: 4614 - protein, 77 aa, Homo Sapiens
MASVWKRLQRVGKHASKFQFVASYQELMVECTKKWQPDKLVVVWTRRSRRKSSKAHSWQPGIKNPYRGVVVWPVPEN

SEQ ID NO: 4615 - protein, 1231 aa, Homo Sapiens
MASVWKRLQRVGKHASKFQFVASYQELMVECTKKWQPDKLVVVWTRRSRRKSSKAHSWQPGIKNPYRGVVVWPVPENIEITVTLFKDPHAEEFEDKEWTFVIENESPSGRRKALATSSINMKQYASPMPTQTDVKLKFKPLSKKVVSAALQFSLSCIFLREGKATDEDMQSLASLMSMKQADIGNLDDFEEDNEDDDENRVNQEEKAAKITEIVNQLNALSSLDEDQDDCIKQANMRSAKSASSSEELINKLNFLDEAEKDLATVNSNPFDDPDAAELNPFGDPDSEEPITETASPRKTEDSFYNNSYNPFKEVQTPQYLNPFDEPEAFVTIKDSPPQSTKRKNIRPVDMSKYLYADSSKTEEEELDESNPFYEPKSTPPPNNLVNPVQELETERRVKRKAPAPPVLSPKTGVLNENTVSAGKDLSTSPKPSPIPSPVLGRKPNASQSLLVWCKEVTKNYRGVKITNFTTSWRNGLSFCAILHHFRPDLIDYKSLNPQDIKENNKKAYDGFASIGISRLLEPSDMVLLAIPDKLTVMTYLYQIRAHFSGQELNVVQIEENSSKSTYKVGNYETDTNSSVDQEKFYAELSDLKREPELQQPISGAVDFLSQDDSVFVNDSGVGESESEHQTPDDHLSPSTASPYCRRTKSDTEPQKSQQSSGRTSGSDDPGICSNTDSTQAQVLLGKKRLLKAETLELSDLYVSDKKKDMSPPFICEETDEQKLQTLDIGSNLEKEKLENSRSLECRSDPESPIKKTSLSPTSKLGYSYSRDLDLAKKKHASLRQTESDPDADRTTLNHADHSSKIVQHRLLSRQEELKERARVLLEQARRDAALKAGNKHNTNTATPFCNRQLSDQQDEERRRQLRERARQLIAEARSGVKMSELPSYGEMAAEKLKERSKASGDENDNIEIDTNEEIPEGFVVGGGDELTNLENDLDTPEQNSKLVDLKLKKLLEVQPQVANSPSSAAQKAVTESSEQDMKSGTEDLRTERLQKTTERFRNPVVFSKDSTVRKTQLQSFSQYIENRPEMKRQRSIQEDTKKGNEEKAAITETQRKPSEDEVLNKGFKDTSQYVVGELAALENEQKQIDTRAALVEKRLRYLMDTGRNTEEEEAMMQEWFMLVNKKNALIRRMNQLSLLEKEHDLERRYELLNRELRAMLAIEDWQKTEAQKRREQLLLDELVALVNKRDALVRDLDAQEKQAEEEDEHLERTLEQNKGKMAKKEEKCVLQ

SEQ ID NO: 4616 - protein, 1160 aa, Homo Sapiens
MASVWKRLQRVGKHASKFQFVASYQELMVECTKKWQPDKLVVVWTRRSRRKSSKAHSWQPGIKNPYRGVVVWPVPENIEITVTLFKDPHAEEFEDKEWTFVIENESPSGRRKALATSSINMKQYASPMPTQTDVKLKFKPLSKKVVSAALQFSLSCIFLREGKATDEDMQSLASLMSMKQADIGNLDDFEEDNEDDDENRVNQEEKAAKITELINKLNFLDEAEKDLATVNSNPFDDPDAAELNPFGDPDSEEPITETASPRKTEDSFYNNSYNPFKEVQTPQYLNPFDEPEAFVTIKDSPPQSTKRKNIRPVDMSKYLYADSSKTEEEELDESNPFYEPKSTPPPNNLVNPVQELETERRVKRKAPAPPVLSPKTGVLNENTVSAGKDLSTSPKPSPIPSPVLGRKPNASQSLLVWCKEVTKNYRGVKITNFTTSWRNGLSFCAILHHFRPDLIDYKSLNPQDIKENNKKAYDGFASIGISRLLEPSDMVLLAIPDKLTVMTYLYQIRAHFSGQELNVVQIEENSSKSTYKVGNYETDTNSSVDQEKFYAELSDLKREPELQQPISGAVDFLSQDDSVFVNDSGVGESESEHQTPDDHLSPSTASPYCRRTKSDTEPQKSQQSSGRTSGSDDPGICSNTDSTQAQVLLGKKRLLKAETLELSDLYVSDKKKDMSPPFICEETDEQKLQTLDIGSNLEKEKLENSRSLECRSDPESPIKKTSLSPTSKLGYSYSRDLDLAKKKHASLRQTESDPDADRTTLNHADHSSKIVQHRLLSRQEELKERARVLLEQARRDAALKAGNKHNTNTATPFCNRQLSDQQDEERRRQLRERARQLIAEARSGVKMSELPSYGEMAAEKLKERSKASGEQNSKLVDLKLKKLLEVQPQVANSPSSAAQKAVTESSEQDMKSGTEDLRTERLQKTTERFRNPVVFSKDSTVRKTQLQSFSQYIENRPEMKRQRSIQEDTKKGNEEKAAITETQRKPSEDEVLNKGFKDTSQYVVGELAALENEQKQIDTRAALVEKRLRYLMDTGRNTEEEEAMMQEWFMLVNKKNALIRRMNQLSLLEKEHDLERRYELLNRELRAMLAIEDWQKTEAQKRREQLLLDELVALVNKRDALVRDLDAQEKQAEEEDEHLERTLEQNKGKMAKKEEKCVLQ

SEQ ID NO: 4617 - protein, 310 aa, Homo Sapiens
MASVWKRLQRVGKHASKFQFVASYQELMVECTKKWQPDKLVVVWTRRSRRKSSKAHSWQPGIKNPYRGVVVWPVPENIEITVTLFKDPHAEEFEDKEWTFVIENESPSGRRKALATSSINMKQYASPMPTQTDVKLKFKPLSKKVVSAALQFSLSCIFLREGKATDEDMQSLASLMSMKQADIGNLDDFEEDNEDDDENRVNQEEKAAKITELINKLNFLDEAEKDLATVNSNPFDDPDAAELNPFGDPDSEEPITETASPRKTEDSFYNNSYNPFKEVQTPQYLNPFDEPEAFVTIKDSPPQSTKRKNI

SEQ ID NO: 4618 - protein, 1196 aa, Homo Sapiens
MASVWKRLQRVGKHASKFQFVASYQELMVECTKKWQPDKLVVVWTRRSRRKSSKAHSWQPGIKNPYRGVVVWPVPENIEITVTLFKDPHAEEFEDKEWTFVIENESPSGRRKALATSSINMKQYASPMPTQTDVKLKFKPLSKKVVSAALQFSLSCIFLREGKATDEDMQSLASLMSMKQADIGNLDDFEEDNEDDDENRVNQEEKAAKITELINKLNFLDEAEKDLATVNSNPFDDPDAAELNPFGDPDSEEPITETASPRKTEDSFYNNSYNPFKEVQTPQYLNPFDEPEAFVTIKDSPPQSTKRKNIRPVDMSKYLYADSSKTEEEELDESNPFYEPKSTPPPNNLVNPVQELETERRVKRKAPAPPVLSPKTGVLNENTVSAGKDLSTSPKPSPIPSPVLGRKPNASQSLLVWCKEVTKNYRGVKITNFTTSWRNGLSFCAILHHFRPDLIDYKSLNPQDIKENNKKAYDGFASIGISRLLEPSDMVLLAIPDKLTVMTYLYQIRAHFSGQELNVVQIEENSSKSTYKVGNYETDTNSSVDQEKFYAELSDLKREPELQQPISGAVDFLSQDDSVFVNDSGVGESESEHQTPDDHLSPSTASPYCRRTKSDTEPQKSQQSSGRTSGSDDPGICSNTDSTQAQVLLGKKRLLKAETLELSDLYVSDKKKDMSPPFICEETDEQKLQTLDIGSNLEKEKLENSRSLECRSDPESPIKKTSLSPTSKLGYSYSRDLDLAKKKHASLRQTESDPDADRTTLNHADHSSKIVQHRLLSRQEELKERARVLLEQARRDAALKAGNKHNTNTATPFCNRQLSDQQDEERRRQLRERARQLIAEARSGVKMSELPSYGEMAAEKLKERSKASGDENDNIEIDTNEEIPEGFVVGGGDELTNLENDLDTPEQNSKLVDLKLKKLLEVQPQVANSPSSAAQKAVTESSEQDMKSGTEDLRTERLQKTTERFRNPVVFSKDSTVRKTQLQSFSQYIENRPEMKRQRSIQEDTKKGNEEKAAITETQRKPSEDEVLNKGFKDTSQYVVGELAALENEQKQIDTRAALVEKRLRYLMDTGRNTEEEEAMMQEWFMLVNKKNALIRRMNQLSLLEKEHDLERRYELLNRELRAMLAIEDWQKTEAQKRREQLLLDELVALVNKRDALVRDLDAQEKQAEEEDEHLERTLEQNKGKMAKKEEKCVLQ

SEQ ID NO: 4619 - protein, 1160 aa, Homo Sapiens; identical to SEQ ID NO: 4616

SEQ ID NO: 4620 - protein, 41 aa, Homo Sapiens
MKQYASPMPTQTDVKLKFKPLSKKVVSAALQFSLSCIFLRE

SEQ ID NO: 4621 - protein, 95 aa, Homo Sapiens
MKQYASPMPTQTDVKLKFKPLSKKVVSAALQFSLSCIFLREGKATDEDMQSLASLMSMKQADIGNLDDFEEDNEDDDENRVNQEEKAAKITEIVN

SEQ ID NO: 4622 - protein, 108 aa, Homo Sapiens
MNWQPDKLVVVWTRRSRRKSSKAHSWQPGIKNPYRGVVVWPVPENIEITVTLFKDPHAEEFEDKEWTFVIENESPSGRRKALATSSINMKQYASPMPTQTDVKLKFKP

SEQ ID NO: 4623 - protein, 110 aa, Homo Sapiens
  misc_feature (1)..(1): Xaa can be any naturally occurring amino acid
XLEKEKLENSRSLECRSDPESPIKKTSLSPTSKLGYSYSRDLDLAKKKHASLRQTESDPDADRTTLNHADHSSKIVQQQDEERRRQLRERARQLIAEARSGVKMSELPSY

SEQ ID NO: 4624 - protein, 223 aa, Homo Sapiens
  misc_feature (1)..(1): Xaa can be any naturally occurring amino acid
XNTNTATPFCNRQLSDQDEERRRQLRERARQLIAEARSGVKMSELPSYGEMAAEKLKERSKASGDENDNIEIDTNEEIPEGFVVGGGDELTNLENDLDTPEQNSKLVDLKLKKLLEVQPQVANSPSSAAQKAVTESSEQDMKSGTEDLRTERLQKTTERFRNPVVFSKDSTVRKTQLQSFSQYIENRPEMKRQRSIQEDTKKGNEEKAAITETQRKPSEDEVL

SEQ ID NO: 4625 - protein, 154 aa, Homo Sapiens
  misc_feature (1)..(1): Xaa can be any naturally occurring amino acid
XRLLEPSDMTESDPDADRTTLNHADHSSKIVQHRLLSRQEELKERARVLLEQARRDAALKAGNKHNTNTATPFCNRQLSDQQDEERRRQLRERARQLIAEARSGVKMSELPSYGEMAAEKLKERSKASGDENDNIEIDTNEEIPEGFVVGGGDE

SEQ ID NO: 4626 - protein, 322 aa, Homo Sapiens
MGLPERRGLVLLLSLAEILFKIMILEGGGVMNLNPGNNLLHQPPAWTDSYSTCNVSSGFFGGQWHEIHPQYWTKYQVWEWLQHLLDTNQLDANCIPFQEFDINGEHLCSMSLQEFTRAAGTAGQLLYSNLQHLKWNGQCSSDLFQSTHNVIVKTEQTEPSIMNTWKDENYLYDTNYGSTVDLLDSKTFCRAQISMTTTSHLPVAESPDMKKEQDPPAKCHTKKHNPRGTHLWEFIRDILLNPDKNPGLIKWEDRSEGVFRFLKSEAVAQLWGKKKNNSSMTYEKLSRAMRYYYKREILERVDGRRLVYKFGKNARGWRENEN

SEQ ID NO: 4627 - protein, 126 aa, Homo Sapiens
MILEGGGVMNLNPGNNLLHQPPAWTDSYSTCNVSSGFFGGQWHEIHPQYWTKYQVWEWLQHLLDTNQLDANCIPFQEFDINGEHLCSMSLQEFTRAAGTAGQLLYSNLQHLKWNGDSLFLCLSLPC

SEQ ID NO: 4628 - protein, 126 aa, Homo Sapiens; identical to SEQ ID NO: 4627

SEQ ID NO: 4629 - protein, 158 aa, Homo Sapiens
MILEGGGVMNLNPGNNLLHQPPAWTDSYSTCNVSSGFFGGQWHEIHPQYWTKYQVWEWLQHLLDTNQLDANCIPFQEFDINGEHLCSMSLQEFTRAAGTAGQLLYSNLQHLKWNGQCSSDLFQSTHNVIVKTEQTEPSIMNTWKDENYLYDTNYGSTV

SEQ ID NO: 4630 - protein, 166 aa, Homo Sapiens
MILEGGGVMNLNPGNNLLHQPPAWTDSYSTCNVSSGFFGGQWHEIHPQYWTKYQVWEWLQHLLDTNQLDANCIPFQEFDINGEHLCSMSLQEFTRAAGTAGQLLYSNLQHLKWNGQCSSDLFQSTHNVIVKTEQTEPSIMNTWKDENYLYDTNYGSTVAESPDMKK

SEQ ID NO: 4631 - protein, 277 aa, Homo Sapiens
MILEGGGVMNLNPGNNLLHQPPAWTDSYSTCNVSSGFFGGQWHEIHPQYWTKYQVWEWLQHLLDTNQLDANCIPFQEFDINGEHLCSMSLQEFTRAAGTAGQLLYSNLQHLKWNGQCSSDLFQSTHNVIVKTEQTEPSIMNTWKDENYLYDTNYGSTVAESPDMKKEQDPPAKCHTKKHNPRGTHLWEFIRDILLNPDKNPGLIKWEDRSEGVFRFLKSEAVAQLWGKKKNNSSMTYEKLSRAMRYYYKREILERVDGRRLVYKFGKNARGWRENEN

SEQ ID NO: 4632 - protein, 173 aa, Homo Sapiens
MILEGGGVMNLNPGNNLLHQPPAWTDSYSTCNVSSGFFGGQWHEIHPQYWTKYQVWEWLQHLLDTNQLDANCIPFQEFDINGEHLCSMSLQEFTRAAGTAGQLLYSNLQHLKWNGQCSSDLFQSTHNVIVKTEQTEPSIMNTWKDENYLYDTNYGSTVDLLDSKTFCRAQISM

SEQ ID NO: 4633 - protein, 300 aa, Homo Sapiens
MILEGGGVMNLNPGNNLLHQPPAWTDSYSTCNVSSGFFGGQWHEIHPQYWTKYQVWEWLQHLLDTNQLDANCIPFQEFDINGEHLCSMSLQEFTRAAGTAGQLLYSNLQHLKWNGQCSSDLFQSTHNVIVKTEQTEPSIMNTWKDENYLYDTNYGSTVDLLDSKTFCRAQISMTTTSHLPVAESPDMKKEQDPPAKCHTKKHNPRGTHLWEFIRDILLNPDKNPGLIKWEDRSEGVFRFLKSEAVAQLWGKKKNNSSMTYEKLSRAMRYYYKREILERVDGRRLVYKFGKNARGWRENEN

SEQ ID NO: 4634 - protein, 300 aa, Homo Sapiens; identical to SEQ ID NO: 4633

SEQ ID NO: 4635 - protein, 300 aa, Homo Sapiens; identical to SEQ ID NO: 4633

SEQ ID NO: 4636 - protein, 370 aa, Homo Sapiens
GLGRPTPGLSQGPGKETLESALIALDSEKPKKLRFHPKQLYFSARQGELQKVLLMLVDGIDPNFKMEHQNKRSPLHAAAEAGHVDICHMLVQAGANIDTCSEDQRTPLMEAAENNHLEAVKYLIKAGALVDPKDAEGSTCLHLAAKKGHYEVVQYLLSNGQMDVNCQDDGGWTPMIWATEYKHVDLVKLLLSKGSDINIRDNEENICLHWAAFSGCVDIAEILLAAKCDLHAVNIHGDSPLHIAARENRYDCVVLFLSRDSDVTLKNKEGETPLQCASLNSQVWSALQMSKALQDSAPDRPSPVERIVSRDIARGYERIPIPCVNAVDSEPCPSNYKYVSQNCVTSPMNIDRNITHLQALDMFLPAQPSP

SEQ ID NO: 4637 - protein, 1298 aa, Homo Sapiens
MAAADAEAVPARGEPQQDCCVKTELLGEETPMAADEGSAEKQAGEAHMAADGETNGSCENSDASSHANAAKHTQDSARVNPQDGTNTLTRIAENGVSERDSEAAKQNHVTADDFVQTSVIGSNGYILNKPALQAQPLRTTSTLASSLPGHAAKTLPGGAGKGRTPSAFPQTPAAPPATLGEGSADTEDRKLPAPGADVKVHRARKTMPKSVVGLHAASKDPREVREARDHKEPKEEINKNISDFGRQQLLPPFPSLHQSLPQNQCYMATTKSQTACLPFVLAAAVSRKKKRRMGTYSLVPKKKTKVLKQRTVIEMFKSITHSTVGSKGEKDLGASSLHVNGESLEMDSDEDDSEELEEDDGHGAEQAAAFPTEDSRTSKESMSEADRAQKMDGESEEEQESVDTGEEEEGGDESDLSSESSIKKKFLKRKGKTDSPWIKPARKRRRRSRKKPSGALGSESYKSSAGSAEQTAPGDSTGYMEVSLDSLDLRVKGILSSQAEGLANGPDVLETDGLQEVPLCSCRMETPKSREITTLANNQCMATESVDHELGRCTNSVVKYELMRPSNKAPLLVLCEDHRGRMVKHQCCPGCGYFCTAGNFMECQPESSISHRFHKDCASRVNNASYCPHCGEESSKAKEVTIAKADTTSTVTPVPGQEKGSALEGRADTTTGSAAGPPLSEDDKLQGAASHVPEGFDPTGPAGLGRPTPGLSQGPGKETLESALIALDSEKPKKLRFHPKQLYFSARQGELQKVLLMLVDGIDPNFKMEHQNKRSPLHAAAEAGHVDICHMLVQAGANIDTCSEDQRTPLMEAAENNHLEAVKYLIKAGALVDPKDAEGSTCLHLAAKKGHYEVVQYLLSNGQMDVNCQDDGGWTPMIWATEYKHVDLVKLLLSKGSDINIRDNEENICLHWAAFSGCVDIAEILLAAKCDLHAVNIHGDSPLHIAARENRYDCVVLFLSRDSDVTLKNKEGETPLQCASLNSQVWSALQMSKALQDSAPDRPSPVERIVSRDIARGYERIPIPCVNAVDSEPCPSNYKYVSQNCVTSPMNIDRNITHLQYCVCIDDCSSSNCMCGQLSMRCWYDKDGRLLPEFNMAEPPLIFECNHACSCWRNCRNRVVQNGLRARLQLYRTRDMGWGVRSLQDIPPGTFVCEYVGELISDSEADVREEDSYLFDLDNKDGEVYCIDARFYGNVSRFINHHCEPNLVPVRVFMAHQDLRFPRIAFFSTRLIEAGEQLGFDYGERFWDIKGKLFSCRCGSPKCRHSSAALAQRQASAAQEAQEDGLPDTSSAAAADPL

SEQ ID NO: 4638 - protein, 808 aa, Homo Sapiens
MAAADAEAVPARGEPQQDCCVKTELLGEETPMAADEGSAEKQAGEAHMAADGETNGSCENSDASSHANAAKHTQDSARVNPQDGTNTLTRIAENGVSERDSEAAKQNHVTADDFVQTSVIGSNGYILNKPALQAQPLRTTSTLASSLPGHAAKTLPGGAGKGRTPSAFPQTPAAPPATLGEGSADTEDRKLPAPGADVKVHRARKTMPKSVVGLHAASKDPREVREARDHKEPKEEINKNISDFGRQQLLPPFPSLHQSLPQNQCYMATTKSQTACLPFVLAAAVSRKKKRRMGTYSLVPKKKTKVLKQRTVIEMFKSITHSTVGSKGEKDLGASSLHVNGESLEMDSDEDDSEELEEDDGHGAEQAAAFPTEDSRTSKESMSEADRAQKMDGESEEEQESVDTGEEEEGGDESDLSSESSIKKKFLKRKGKTDSPWIKPARKRRRRSRKKPSGALGSESYKSSAGSAEQTAPGDSTGYMEVSLDSLDLRVKGILSSQAEGLANGPDVLETDGLQEVPLCSCRMETPKSREITTLANNQCMATESVDHELGRCTNSVVKYELMRPSNKAPLLVLCEDHRGRMVKHQCCPGCGYFCTAGNFMECQPESSISHRFHKDCASRVNNASYCPHCGEESSKAKEVTIAKADTTSTVTPVPGQEKGSALEGRADTTTGSAAGPPLSEDDKLQGAASHVPEGFDPTGPAGLGRPTPGLSQGPGKETLESALIALDSEKPKKLRFHPKQLYFSARQGELQKVLLMLVDGIDPNFKMEHQNKRSPLHAAAEAGHVDICHMLVQFCRLGSPRSRGCLW

SEQ ID NO: 4639 - protein, 556 aa, Homo Sapiens
MAAADAEAVPARGEPQQDCCVKTELLGEETPMAADEGSAEKQAGEAHMAADGETNGSCENSDASSHANAAKHTQDSARVNPQDGTNTLTRIAENGVSERDSEAAKQNHVTADDFVQTSVIGSNGYILNKPALQAQPLRTTSTLASSLPGHAAKTLPGGAGKGRTPSAFPQTPAAPPATLGEGSADTEDRKLPAPGADVKVHRARKTMPKSVVGLHAASKDPREVREARDHKEPKEEINKNISDFGRQQLLPPFPSLHQSLPQNQCYMATTKSQTACLPFVLAAAVSRKKKRRMGTYSLVPKKKTKVLKQRTVIEMFKSITHSTVGSKGEKDLGASSLHVNGESLEMDSDEDDSEELEEDDGHGAEQAAAFPTEDSRTSKESMSEADRAQKMDGESEEEQESVDTGEEEEGGDESDLSSESSIKKKFLKRKGKTDSPWIKPARKRRRRSRKKPSGALGSESYKSSAGSAEQTAPGDSTGYMEVSLDSLDLRVKGILSSQAEGLANGPDVLETDGLQEVPLCSCRMETPKSREITTLANNQCMATESVDHEVSTFVFI

SEQ ID NO: 4640 - protein, 66 aa, Homo Sapiens
MAAADAERHLWLPMKAQQRNRQERPTWLRTVRPMGLVKTAMPAVMQMLQSTLRTAQGSTPRMAPTH

SEQ ID NO: 4641 - protein, 106 aa, Homo Sapiens
MAADEGSAEKQAGEAHMAADGETNGSCENSDASSHANAAKHTQDSARVNPQDGTNTLTRIAENGVSERDSEAAKQNHVTADDFVQTSVIGSNGYILNKPALQAQPL

SEQ ID NO: 4642 - protein, 134 aa, Homo Sapiens
MAADEGSAEKQAGEAHMAADGETNGSCENSDASSHANAAKHTQDSARVNPQDGTNTLTRIAENGVSERDSEAAKQNHVTADDFVQTSVIGSNGYILNKPALQAQPLRTTSTLASSLPGHAAKTLPGGAGKGRTP

SEQ ID NO: 4643 - protein, 137 aa, Homo Sapiens
MAADEGSAEKQAGEAHMAADGETNGSCENSDASSHANAAKHTQDSARVNPQDGTNTLTRIAENGVSERDSEAAKQNHVTADDFVQTSVIGSNGYILNKPALQAQPLRTTSTLASSLPGHAAKTLPGGAGKGRTPSAF

SEQ ID NO: 4644 - protein, 139 aa, Homo Sapiens
MAADEGSAEKQAGEAHMAADGETNGSCENSDASSHANAAKHTQDSARVNPQDGTNTLTRIAENGVSERDSEAAKQNHVTADDFVQTSVIGSNGYILNKPALQAQPLRTTSTLASSLPGHAAKTLPGGAGKGRTPSAFPQ

SEQ ID NO: 4645 - protein, 982 aa, Homo Sapiens
MAADEGSAEKQAGEAHMAADGETNGSCENSDASSHANAAKHTQDSARVNPQDGTNTLTRIAENGVSERDSEAAKQNHVTADDFVQTSVIGSNGYILNKPALQAQPLRTTSTLASSLPGHAAKTLPGGAGKGRTPSAFPQTPAAPPATLGEGSADTEDRKLPAPGADVKVHRARKTMPKSVVGLHAASKDPREVREARDHKEPKEEINKNISDFGRQQLLPPFPSLHQSLPQNQCYMATTKSQTAAAVSRKKKRRMGTYSLVPKKKTKVLKQRTVIEMFKSITHSTVGSKGEKDLGASSLHVNGESLEMDSDEDDSEELEEDDGHGAEQAAAFPTEDSRTSKESMSEADRAQKMDGESEEEQESVDTGEEEEGGDESDLSSESSIKKKFLKRKGKTDSPWIKPARKRRRRSRKKPSGALGSESYKSSAGSAEQTAPGDSTGYMEVSLDSLDLRVKGILSSQAEGLANGPDVLETDGLQEVPLCSCRMETPKSREITTLANNQCMATESVDHELGRCTNSVVKYELMRPSNKAPLLVLCEDHRGRMVKHQCCPGCGYFCTAGNFMECQPESSISHRFHKDCASRVNNASYCPHCGEESSKAKEVTIAKADTTSTVTPVPGQEKGSALEGRADTTTGSAAGPPLSEDDKLQGAASHVPEGFDPTGPAGLGRPTPGLSQGPGKETLESALIALDSEKPKKLRFHPKQLYFSARQGELQKVLLMLVDGIDPNFKMEHQNKRSPLHAAAEAGHVDICHMLVQAGANIDTCSEDQRTPLMEAAENNHLEAVKYLIKAGALVDPKDAEGSTCLHLAAKKGHYEVVQYLLSNGQMDVNCQDDGGWTPMIWATEYKHVDLVKLLLSKGSDINIRDNEENICLHWAAFSGCVDIAEILLAAKCDLHAVNIHGDSPLHIAARENRYDCVVLFLSRDSDVTLKNKEGETPLQCASLNSQVWSALQMSKALQDSAPDRPSPVERIVSRDIARGYER

SEQ ID NO: 4646 - protein, 1267 aa, Homo Sapiens
MAADEGSAEKQAGEAHMAADGETNGSCENSDASSHANAAKHTQDSARVNPQDGTNTLTRIAENGVSERDSEAAKQNHVTADDFVQTSVIGSNGYILNKPALQAQPLRTTSTLASSLPGHAAKTLPGGAGKGRTPSAFPQTPAAPPATLGEGSADTEDRKLPAPGADVKVHRARKTMPKSVVGLHAASKDPREVREARDHKEPKEEINKNISDFGRQQLLPPFPSLHQSLPQNQCYMATTKSQTACLPFVLAAAVSRKKKRRMGTYSLVPKKKTKVLKQRTVIEMFKSITHSTVGSKGEKDLGASSLHVNGESLEMDSDEDDSEELEEDDGHGAEQAAAFPTEDSRTSKESMSEADRAQKMDGESEEEQESVDTGEEEEGGDESDLSSESSIKKKFLKRKGKTDSPWIKPARKRRRRSRKKPSGALGSESYKSSAGSAEQTAPGDSTGYMEVSLDSLDLRVKGILSSQAEGLANGPDVLETDGLQEVPLCSCRMETPKSREITTLANNQCMATESVDHELGRCTNSVVKYELMRPSNKAPLLVLCEDHRGRMVKHQCCPGCGYFCTAGNFMECQPESSISHRFHKDCASRVNNASYCPHCGEESSKAKEVTIAKADTTSTVTPVPGQEKGSALEGRADTTTGSAAGPPLSEDDKLQGAASHVPEGFDPTGPAGLGRPTPGLSQGPGKETLESALIALDSEKPKKLRFHPKQLYFSARQGELQKVLLMLVDGIDPNFKMEHQNKRSPLHAAAEAGHVDICHMLVQAGANIDTCSEDQRTPLMEAAENNHLEAVKYLIKAGALVDPKDAEGSTCLHLAAKKGHYEVVQYLLSNGQMDVNCQDDGGWTPMIWATEYKHVDLVKLLLSKGSDINIRDNEENICLHWAAFSGCVDIAEILLAAKCDLHAVNIHGDSPLHIAARENRYDCVVLFLSRDSDVTLKNKEGETPLQCASLNSQVWSALQMSKALQDSAPDRPSPVERIVSRDIARGYERIPIPCVNAVDSEPCPSNYKYVSQNCVTSPMNIDRNITHLQYCVCIDDCSSSNCMCGQLSMRCWYDKDGRLLPEFNMAEPPLIFECNHACSCWRNCRNRVVQNGLRARLQLYRTRDMGWGVRSLQDIPPGTFVCEYVGELISDSEADVREEDSYLFDLDNKDGEVYCIDARFYGNVSRFINHHCEPNLVPVRVFMAHQDLRFPRIAFFSTRLIEAGEQLGFDYGERFWDIKGKLFSCRCGSPKCRHSSAALAQRQASAAQEAQEDGLPDTSSAAAADPL

SEQ ID NO: 4647 - protein, 117 aa, Homo Sapiens
MEAAENNHLEAVKYLIKAGALVDPKDAEGSTCLHLAAKKGHYEVVQYLLSNGQMDVNCQDDGGWTPMIWATEYKHVDLVKLLLSKGSDINIRDNDDGTMKRGALSRQKEEKREAEEP

SEQ ID NO: 4648 - protein, 107 aa, Homo Sapiens
MEAAENNHLEAVKYLIKAGALVDPKDAEGSTCLHLAAKKGHYEVVQYLLSNGQMDVNCQDDGGWTPMIWATEYKHVDLVKLLLSKGSDINIRDNRVPEARNGKSSHK

SEQ ID NO: 4649 - protein, 394 aa, Homo Sapiens
MGFAAAAVSRKKKRRMGTYSLVPKKKTKVLKQRTVIEMFKSITHSTVGSKGEKDLGASSLHVNGESLEMDSDEDDSEELEEDDGHGAEQAAAFPTEDSRTSKESMSEADRAQKMDGESEEEQESVDTGEEEEGGDESDLSSESSIKKKFLKRKGKTDSPWIKPARKRRRRSRKKPSGALGSESYKSSAGSAEQTAPGDSTGYMEVSLDSLDLRVKGILSSQAEGLANGPDVLETDGLQEVPLCSCRMETPKSREITTLANNQCMATESVDHELGRCTNSVVKYELMRPSNKAPLLVLCEDHRGRMVKHQCCPGCGYFCTAGNFMECQPESSISHRFHKDCASRVNNASYCPHCGEESSKAKEVTIAKADTTSTVTPVPGQEKGSALEGRADTTT

SEQ ID NO: 4650 - protein, 126 aa, Homo Sapiens
MGTYSLVPKKKTKVLKQRTVIEMFKSITHSTVGSKGEKDLGASSLHVNGESLEMDSDEDDSEELEEDDGHGAEQAAAFPTEDSRTSKESMSEADRAQKKHEEENTASSPHCPGGSGTLKQSLQELP

SEQ ID NO: 4651 - protein, 126 aa, Homo Sapiens; identical to SEQ ID NO: 4650

SEQ ID NO: 4652 - protein, 268 aa, Homo Sapiens
MLYFSRSHFPRPCGGQVSAGSGLTLLLLLLPALWRGWLEGDGQQAVPARGEPQQDCCVKTELLGEETPMAADEGSAEKQAGEAHMAADGETNGSCENSDASSHANAAKHTQDSARVNPQDGTNTLTRIAENGVSERDSEAAKQNHVTADDFVQTSVIGSNGYILNKPALQAQPLRTTSTLASSLPGHAAKTLPGGAGKGRTPSAFPQTPAAPPATLGEGSADTEDRKLPAPGADVKVHRARKTMPKSVVGLHAASKDPREVREARDHK

SEQ ID NO: 4653 - protein, 803 aa, Homo Sapiens
MSEADRAQKMDGESEEEQESVDTGEEEEGGDESDLSSESSIKKKFLKRKGKTDSPWIKPARKRRRRSRKKPSGALGSESYKSSAGSAEQTAPGDSTGYMEVSLDSLDLRVKGILSSQAEGLANGPDVLETDGLQEVPLCSCRMETPKSREITTLANNQCMATESVDHELGRCTNSVVKYELMRPSNKAPLLVLCEDHRGRMVKHQCCPGCGYFCTAGNFMECQPESSISHRFHKDCASRVNNASYCPHCGEESSKAKEVTIAKADTTSTVTPVPGQEKGSALEGRADTTTGSAAGPPLSEDDKLQGAASHVPEGFDPTGPAGLGRPTPGLSQGPGKETLESALIALDSEKPKKLRFHPKQLYFSARQGELQKVLLMLVDGIDPNFKMEHQNKRSPLHAAAEAGHVDICHMLVQAGANIDTCSEDQRTPLMEAAENNHLEAVKYLIKAGALVDPKDAEGSTCLHLAAKKGHYEVVQYLLSNGQMDVNCQDDGGWTPMIWATEYKHVDLVKLLLSKGSDINIRDNEENICLHWAAFSGCVDIAEILLAAKCDLHAVNIHGDSPLHIAARENRYDCVVLFLSRDSDVTLKNKEGETPLQCASLNSQVWSALQMSKALQDSAPDRPSPVERIVSRDIARGYERIPIPCVNAVDSEPCPSNYKYVSQNCVTSPMNIDRNITHLQYCVCIDDCSSSNCMCGQLSMRCWYDKDGRLLPEFNMAEPPLIFECNHACSCWRNCRNRVVQNGLRARLQLYRTRDMGWGVRSLQDIPPGTFVCEYVGELISDSEADVREEDSYLFDLDNKISSA

SEQ ID NO: 4654 - protein, 153 aa, Homo Sapiens
SPLHAAAEAGHVDICHMLVQAGANIDTCSEDQRTPLMEAAENNHLEAVKYLIKAGALVDPKDAEGSTCLHLAAKKGHYEVVQYLLSNGQMDVNCQDDGGWTPMIWATEYKHVDLVKLLLSKGSDINIRDNDDGTMKRGALSRQKEEKREAEEP

SEQ ID NO: 4655 - protein, 277 aa, Homo Sapiens
VPARGEPQQDCCVKTELLGEETPMAADEGSAEKQAGEAHMAADGETNGSCENSDASSHANAAKHTQDSARVNPQDGTNTLTRIAENGVSERDSEAAKQNHVTADDFVQTSVIGSNGYILNKPALQAQPLRTTSTLASSLPGHAAKTLPGGAGKGRTPSAFPQTPAAPPATLGEGSADTEDRKLPAPGADVKVHRARKTMPKSVVGLHAASKDPREVREARDHKEPKEEINKNISDFGRQQLLPPFPSLHQSLPQNQCYMATTKSQTGKEDPATVSAL

SEQ ID NO: 4656 - protein, 168 aa, Homo Sapiens
WIKPARKRRRRSRKKPSGALGSESYKSSAGSAEQTAPGDSTGYMEVSLDSLDLRVKGILSSQAEGLANGPDVLETDGLQEVPLCSCRMETPKSREITTLANNQCMATESVDHEGNFMECQPESSISHRFHKDCASRVNNASYCPHCGEESSKAKEVTIAKADTTSTVT

SEQ ID NO: 4657 - protein, 543 aa, Homo Sapiens
  misc_feature (1)..(1): Xaa can be any naturally occurring amino acid
XCVKTELLGEETPMAADEGSAEKQAGEAHMAADGETNGSCENSDASSHANAAKHTQDSARVNPQDGTNTLTRIAENGVSERDSEAAKQNHVTADDFVQTSVIGSNGYILNKPALQAQPLRTTSTLASSLPGHAAKTLPGGAGKGRTPSAFPQTPAAPPATLGEGSADTEDRKLPAPGADVKVHRARKTMPKSVVGLHAASKDPREVREARDHKEPKEEINKNISDFGRQQLLPPFPSLHQSLPQNQCYMATTKSQTACLPFVLAAAVSRKKKRRMGTYSLVPKKKTKVLKQRTVIEMFKSITHSTVGSKGEKDLGASSLHVNGESLEMDSDEDDSEELEEDDGHGAEQAAAFPTEDSRTSKESMSEADRAQKMDGESEEEQESVDTGEEEEGGDESDLSSESSIKKKFLKRKGKTDSPWIKPARKRRRRSRKKPSGALGSESYKSSAGSAEQTAPGDSTGYMEVSLDSLDLRVKGILSSQAEGLANGPDVLETDGLQEVPLCSCRMETPKSREITTLANNQCMATESVDHEVLNRIQWSQIPV

SEQ ID NO: 4658 - protein, 433 aa, Homo Sapiens
  misc_feature (1)..(1): Xaa can be any naturally occurring amino acid
XGEETPMAADEGSAEKQAGEAHMAADGETNGSCENSDASSHANAAKHTQDSARVNPQDGTNTLTRIAENGVSERDSEAAKQNHVTADDFVQTSVIGSNGYILNKPALQAQPLRTTSTLASSLPGHAAKTLPGGAGKGRTPSAFPQTPAAPPATLGEGSADTEDRKLPAPGADVKVHRARKTMPKSVVGLHAASKDPREVREARDHKEPKEEINKNISDFGRQQLLPPFPSLHQSLPQNQCYMATTKSQTAAAVSRKKKRRMGTYSLVPKKKTKVLKQRTVIEMFKSITHSTVGSKGEKDLGASSLHVNGESLEMDSDEDDSEELEEDDGHGAEQAAAFPTEDSRTSKESMSEADRAQKMDGESEEEQESVDTGEEEEGGDESDLSSESSIKKKFLKRKGKTDSPWIKPARKRRRRSRKKPSGALGSESYKSSA

SEQ ID NO: 4659 - protein, 112 aa, Homo Sapiens
  misc_feature (1)..(1): Xaa can be any naturally occurring amino acid
XPALQAQPLRTTSTLASSLPGHAAKTLPGGAGKGRTPSAFPQTPAAPPATLGEGSADTEDRKLPAPGADVKVHRARKTMPKSVVGLVILCLLLLFPFSHLFCFNNGKWTLVH

SEQ ID NO: 4660 - protein, 230 aa, Homo Sapiens
  misc_feature (1)..(1): Xaa can be any naturally occurring amino acid
XPFVLAAAVSRKKKRRMGTYSLVPKKKTKVLKQRTVIEMFKSITHSTVGSKGEKDLGASSLHVNGESLEMDSDEDDSEELEEDDGHGAEQAAAFPTEDSRTSKESMSEADRAQKSSESSIKKKFLKRKGKTDSPWIKPARKRRRRSRKKPSGALGSESYKSSAGSAEQTAPGDSTGYMEVSLDSLDLRVKGILSSQAEGLANGPDVLETDGLQEVPLCSCRMETPKSREI

SEQ ID NO: 4661 - protein, 108 aa, Homo Sapiens
  misc_feature (1)..(1): Xaa can be any naturally occurring amino acid
XPLMEAAENNHLEAVKYLIKAGALVDPKDAEGSTCLHLAAKKGHYEVVQYLLSNGQMDVNCQDDGGWTPMIWATEYKHVDLVKLLLSKGSDINIRDNVGCIYSKYTLG

SEQ ID NO: 4662 - protein, 1176 aa, Homo Sapiens
MAAAAGAAAAAAAEGEAPAEMGALLLEKETRGATERVHGSLGDTPRSEETLPKATPDSLEPAGPSSPASVTVTVGDEGADTPVGATPLIGDESENLEGDGDLRGGRILLGHATKSFPSSPSKGGSCPSRAKMSMTGAGKSPPSVQSLAMRLLSMPGAQGAAAAGSEPPPATTSPEGQPKVHRARKTMSKPGNGQPPVPEKRPPEIQHFRMSDDVHSLGKVTSDLAKRRKLNSGGGLSEELGSARRSGEVTLTKGDPGSLEEWETVVGDDFSLYYDSYSVDERVDSDSKSEVEALTEQLSEEEEEEEEEEEEEEEEEEEEEEEEDEESGNQSDRSGSSGRRKAKKKWRKDSPWVKPSRKRRKREPPRAKEPRGVSNDTSSLETERGFEELPLCSCRMEAPKIDRISERAGHKCMATESVDGELSGCNAAILKRETMRPSSRVALMVLCETHRARMVKHHCCPGCGYFCTAGTFLECHPDFRVAHRFHKACVSQLNGMVFCPHCGEDASEAQEVTIPRGDGVTPPAGTAAPAPPPLSQDVPGRADTSQPSARMRGHGEPRRPPCDPLADTIDSSGPSLTLPNGGCLSAVGLPLGPGREALEKALVIQESERRKKLRFHPRQLYLSVKQGELQKVILMLLDNLDPNFQSDQQSKRTPLHAAAQKGSVEICHVLLQAGANINAVDKQQRTPLMEAVVNNHLEVARYMVQRGGCVYSKEEDGSTCLHHAAKIGNLEMVSLLLSTGQVDVNAQDSGGWTPIIWAAEHKHIEVIRMLLTRGADVTLTDNEENICLHWASFTGSAAIAEVLLNARCDLHAVNYHGDTPLHIAARESYHDCVLLFLSRGANPELRNKEGDTAWDLTPERSDVWFALQLNRKLRLGVGNRAIRTEKIICRDVARGYENVPIPCVNGVDGEPCPEDYKYISENCETSTMNIDRNITHLQHCTCVDDCSSSNCLCGQLSIRCWYDKDGRLLQEFNKIEPPLIFECNQACSCWRNCKNRVVQSGIKVRLQLYRTAKMGWGVRALQTIPQGTFICEYVGELISDAEADVREDDSYLFDLDNKDGEVYCIDARYYGNISRFINHLCDPNIIPVRVFMLHQDLRFPRIAFFSSRDIRTGEELGFDYGDRFWDIKSKYFTCQCGSEKCKHSAEAIALEQSRLARLDPHPELLPELGSLPPVNT

SEQ ID NO: 4663 - protein, 1210 aa, Homo Sapiens
MAAAAGAAAAAAAEGEAPAEMGALLLEKETRGATERVHGSLGDTPRSEETLPKATPDSLEPAGPSSPASVTVTVGDEGADTPVGATPLIGDESENLEGDGDLRGGRILLGHATKSFPSSPSKGGSCPSRAKMSMTGAGKSPPSVQSLAMRLLSMPGAQGAAAAGSEPPPATTSPEGQPKVHRARKTMSKPGNGQPPVPEKRPPEIQHFRMSDDVHSLGKVTSDLAKRRKLNSGGGLSEELGSARRSGEVTLTKGDPGSLEEWETVVGDDFSLYYDSYSVDERVDSDSKSEVEALTEQLSEEEEEEEEEEEEEEEEEEEEEEEEDEESGNQSDRSGSSGRRKAKKKWRKDSPWVKPSRKRRKREPPRAKEPRGVNGVGSSGPSEYMEVPLGSLELPSEGTLSPNHAGVSNDTSSLETERGFEELPLCSCRMEAPKIDRISERAGHKCMATESVDGELSGCNAAILKRETMRPSSRVALMVLCETHRARMVKHHCCPGCGYFCTAGTFLECHPDFRVAHRFHKACVSQLNGMVFCPHCGEDASEAQEVTIPRGDGVTPPAGTAAPAPPPLSQDVPGRADTSQPSARMRGHGEPRRPPCDPLADTIDSSGPSLTLPNGGCLSAVGLPLGPGREALEKALVIQESERRKKLRFHPRQLYLSVKQGELQKVILMLLDNLDPNFQSDQQSKRTPLHAAAQKGSVEICHVLLQAGANINAVDKQQRTPLMEAVVNNHLEVARYMVQRGGCVYSKEEDGSTCLHHAAKIGNLEMVSLLLSTGQVDVNAQDSGGWTPIIWAAEHKHIEVIRMLLTRGADVTLTDNEENICLHWASFTGSAAIAEVLLNARCDLHAVNYHGDTPLHIAARESYHDCVLLFLSRGANPELRNKEGDTAWDLTPERSDVWFALQLNRKLRLGVGNRAIRTEKIICRDVARGYENVPIPCVNGVDGEPCPEDYKYISENCETSTMNIDRNITHLQHCTCVDDCSSSNCLCGQLSIRCWYDKDGRLLQEFNKIEPPLIFECNQACSCWRNCKNRVVQSGIKVRLQLYRTAKMGWGVRALQTIPQGTFICEYVGELISDAEADVREDDSYLFDLDNKDGEVYCIDARYYGNISRFINHLCDPNIIPVRVFMLHQDLRFPRIAFFSSRDIRTGEELGFDYGDRFWDIKSKYFTCQCGSEKCKHSAEAIALEQSRLARLDPHPELLPELGSLPPVNT

SEQ ID NO: 4664 - protein, 1233 aa, Homo Sapiens
MRGLPRGRGLMRARGRGRAAPPGSRGRGRGGPHRGRGRPRSLLSLPRAQASWTPQLSTGLTSPPVPCLPSQGEAPAEMGALLLEKETRGATERVHGSLGDTPRSEETLPKATPDSLEPAGPSSPASVTVTVGDEGADTPVGATPLIGDESENLEGDGDLRGGRILLGHATKSFPSSPSKGGSCPSRAKMSMTGAGKSPPSVQSLAMRLLSMPGAQGAAAAGSEPPPATTSPEGQPKVHRARKTMSKPGNGQPPVPEKRPPEIQHFRMSDDVHSLGKVTSDLAKRRKLNSGGGLSEELGSARRSGEVTLTKGDPGSLEEWETVVGDDFSLYYDSYSVDERVDSDSKSEVEALTEQLSEEEEEEEEEEEEEEEEEEEEEEEEDEESGNQSDRSGSSGRRKAKKKWRKDSPWVKPSRKRRKREPPRAKEPRGVSNDTSSLETERGFEELPLCSCRMEAPKIDRISERAGHKCMATESVDGELSGCNAAILKRETMRPSSRVALMVLCETHRARMVKHHCCPGCGYFCTAGTFLECHPDFRVAHRFHKACVSQLNGMVFCPHCGEDASEAQEVTIPRGDGVTPPAGTAAPAPPPLSQDVPGRADTSQPSARMRGHGEPRRPPCDPLADTIDSSGPSLTLPNGGCLSAVGLPLGPGREALEKALVIQESERRKKLRFHPRQLYLSVKQGELQKVILMLLDNLDPNFQSDQQSKRTPLHAAAQKGSVEICHVLLQAGANINAVDKQQRTPLMEAVVNNHLEVARYMVQRGGCVYSKEEDGSTCLHHAAKIGNLEMVSLLLSTGQVDVNAQDSGGWTPIIWAAEHKHIEVIRMLLTRGADVTLTDNEENICLHWASFTGSAAIAEVLLNARCDLHAVNYHGDTPLHIAARESYHDCVLLFLSRGANPELRNKEGDTAWDLTPERSDVWFALQLNRKLRLGVGNRAIRTEKIICRDVARGYENVPIPCVNGVDGEPCPEDYKYISENCETSTMNIDRNITHLQHCTCVDDCSSSNCLCGQLSIRCWYDKDGRLLQEFNKIEPPLIFECNQACSCWRNCKNRVVQSGIKVRLQLYRTAKMGWGVRALQTIPQGTFICEYVGELISDAEADVREDDSYLFDLDNKDGEVYCIDARYYGNISRFINHLCDPNIIPVRVFMLHQDLRFPRIAFFSSRDIRTGEELGFDYGDRFWDIKSKYFTCQCGSEKCKHSAEAIALEQSRLARLDPHPELLPELGSLPPVNT

SEQ ID NO: 4665 - protein, 1267 aa, Homo Sapiens
MRGLPRGRGLMRARGRGRAAPPGSRGRGRGGPHRGRGRPRSLLSLPRAQASWTPQLSTGLTSPPVPCLPSQGEAPAEMGALLLEKETRGATERVHGSLGDTPRSEETLPKATPDSLEPAGPSSPASVTVTVGDEGADTPVGATPLIGDESENLEGDGDLRGGRILLGHATKSFPSSPSKGGSCPSRAKMSMTGAGKSPPSVQSLAMRLLSMPGAQGAAAAGSEPPPATTSPEGQPKVHRARKTMSKPGNGQPPVPEKRPPEIQHFRMSDDVHSLGKVTSDLAKRRKLNSGGGLSEELGSARRSGEVTLTKGDPGSLEEWETVVGDDFSLYYDSYSVDERVDSDSKSEVEALTEQLSEEEEEEEEEEEEEEEEEEEEEEEEDEESGNQSDRSGSSGRRKAKKKWRKDSPWVKPSRKRRKREPPRAKEPRGVNGVGSSGPSEYMEVPLGSLELPSEGTLSPNHAGVSNDTSSLETERGFEELPLCSCRMEAPKIDRISERAGHKCMATESVDGELSGCNAAILKRETMRPSSRVALMVLCETHRARMVKHHCCPGCGYFCTAGTFLECHPDFRVAHRFHKACVSQLNGMVFCPHCGEDASEAQEVTIPRGDGVTPPAGTAAPAPPPLSQDVPGRADTSQPSARMRGHGEPRRPPCDPLADTIDSSGPSLTLPNGGCLSAVGLPLGPGREALEKALVIQESERRKKLRFHPRQLYLSVKQGELQKVILMLLDNLDPNFQSDQQSKRTPLHAAAQKGSVEICHVLLQAGANINAVDKQQRTPLMEAVVNNHLEVARYMVQRGGCVYSKEEDGSTCLHHAAKIGNLEMVSLLLSTGQVDVNAQDSGGWTPIIWAAEHKHIEVIRMLLTRGADVTLTDNEENICLHWASFTGSAAIAEVLLNARCDLHAVNYHGDTPLHIAARESYHDCVLLFLSRGANPELRNKEGDTAWDLTPERSDVWFALQLNRKLRLGVGNRAIRTEKIICRDVARGYENVPIPCVNGVDGEPCPEDYKYISENCETSTMNIDRNITHLQHCTCVDDCSSSNCLCGQLSIRCWYDKDGRLLQEFNKIEPPLIFECNQACSCWRNCKNRVVQSGIKVRLQLYRTAKMGWGVRALQTIPQGTFICEYVGELISDAEADVREDDSYLFDLDNKDGEVYCIDARYYGNISRFINHLCDPNIIPVRVFMLHQDLRFPRIAFFSSRDIRTGEELGFDYGDRFWDIKSKYFTCQCGSEKCKHSAEAIALEQSRLARLDPHPELLPELGSLPPVNT

SEQ ID NO: 4666 - protein, 298 aa, Homo Sapiens
  misc_feature (1)..(1): Xaa can be any naturally occurring amino acid
XSKRTPLHAAAQKGSVEICHVLLQAGANINAVDKQQRTPLMEAVVNNHLEVARYMVQRGGCVYSKEEDGSTCLHHAAKIGNLEMVSLLLSTGQVDVNAQGQLPPPSLPSHPQDSGGWTPIIWAAEHKHIEVIRMLLTRGADVTLTDNEENICLHWASFTGSAAIAEVLLNARCDLHAVNYHGDTPLHIAARESYHDCVLLFLSRGANPELRNKEGDTAWDLTPERSDVWFALQLNRKLRLGVGNRAIRTEKIICRDVARGYENVPIPCVNGVDGEPCPEDYKYISENCETSTMNIDRN

SEQ ID NO: 4667 - protein, 81 aa, Homo Sapiens
MQGGNSGVRKREEEGDGAGAVAAPPAIDFPAEGPDPEYDEMWSCCVSQAGLERLASSDSPASAFQNAGIIDNLMFQQKSRC

SEQ ID NO: 4668 - protein, 164 aa, Homo Sapiens
MQGGNSGVRKREEEGDGAGAVAAPPAIDFPAEGPDPEYDESDVPAEIQVLKEPLQQPTFPFAVANQLLLVSLLEHLSHVHEPNPLRSRQVFKLLCQTFIKMGLLSSFTCSDEFSSLRLHHNRAITHLMRSAKERVRQDPCEDISRIQKIRDEKFHFSPSFPNQH

SEQ ID NO: 4669 - protein, 630 aa, Homo Sapiens
MQGGNSGVRKREEEGDGAGAVAAPPAIDFPAEGPDPEYDESDVPAEIQVLKEPLQQPTFPFAVANQLLLVSLLEHLSHVHEPNPLRSRQVFKLLCQTFIKMGLLSSFTCSDEFSSLRLHHNRAITHLMRSAKERVRQDPCEDISRIQKIRSREVALEAQTSRYLNEFEELAILGKGGYGRVYKVRNKLDGQYYAIKKILIKGATKTVCMKVLREVKVLAGLQHPNIVGYHTAWIEHVHVIQPRADRAAIELPSLEVLSDQEEDREQCGVKNDESSSSSIIFAEPTPEKEKRFGESDTENQNNKSVKYTTNLVIRESGELESTLELQENGLAGLSASSIVEQQLPLRRNSHLEESFTSTEESSEENVNFLGQTEAQYHLMLHIQMQLCELSLWDWIVERNKRGREYVDESACPYVMANVATKIFQELVEGVFYIHNMGIVHRDLKPRNIFLHGPDQQVKIGDFGLACTDILQKNTDWTNRNGKRTPTHTSRVGTCLYASPEQLEGSEYDAKSDMYSLGVVLLELFQPFGTEMERAEVLTGLRTGQLPESLRKRCPVQAKYIQHLTRRNSSQRPSAIQLLQSELFQNSGNVNLTLQMKIIEQEKEIAELKKQLNLLSQDKGVRDDGKDGGVG

SEQ ID NO: 4670 - protein, 72 aa, Homo Sapiens
  misc_feature (1)..(1): Xaa can be any naturally occurring amino acid
XLAGLTPLGVAAVASAGTGGICWCSQRGAEGWGPTPQRRPVNLTLQMKIIEQEKEIAELKKQLNLLSQDKGA

SEQ ID NO: 4671 - protein, 267 aa, Homo Sapiens
MTLGRRLACLFLACVLPALLLGGTALASEIVGGRRARPHAWPFMVSLQLRGGHFCGATLIAPNFVMSAAHCVANVNVRAVRVVLGAHNLSRREPTRQVFAVQRIFENGYDPVNLLNDIVILQLNGSATINANVQVAQLPAQGRRLGNGVQCLAMGWGLLGRNRGIASVLQELNVTVVTSLCRRSNVCTLVRGRQAGVCFGDSGSPLVCNGLIHGIASFVRGGCASGLYPDAFAPVAQFVNWIDSIIQRSEDNPCPHPRDPDPASRTH

SEQ ID NO: 4672 - protein, 267 aa, Homo Sapiens; identical to SEQ ID NO: 4671

SEQ ID NO: 4673 - protein, 152 aa, Homo Sapiens [sequence omitted]

SEQ ID NO: 4674 - protein, 700 aa, Homo Sapiens
MAGLTAAAPRPGVLLLLLSILHPSRPGGVPGAIPGGVPGGVFYPALGPGGKPLKPVPGGLAGAGLGAGLGAFPAVTFPGALVPGGVADAAAAYKAAKAGAGLGGVPGVGGLGVSAAPSVPGAVVPQPGAGVKPGKVPGVGLPGVYPGGVLPGARFPGVGVLPGVPTGAGVKPKAPGVGGAFAGIPGVGPFGGPQPGVPLGYPIKAPKLPGGYGLPYTTGKLPYGYGPGGVAGAAGKAGYPTGTGVGPQAAAAAAAKAAAKFGAGAAGVLPGVGGAGVPGVPGAIPGIGGIAGVGTPAAAAAAAAAAKAAKYGAAAGLVPGGPGFGPGVVGVPGAGVPGVGVPGAGIPVVPGAGIPGAAVPGVVSPEAAAKAAAKAAKYGARPGVGVGGIPTYGVGAGGFPGFGVGVGGIPGVAGVPGVGGVPGVGGVPGVGISPEAQAAAAAKAAKYGLVPGVGVAPGVGVAPGVGVAPGVGLAPGVGVAPGVGVAPGVGVAPGIGPGGVAAAAKSAAKVAAKAQLRAAAGLGAGIPGLGVGVGVPGLGVGAGVPGLGVGAGVPGFGAVPGALAAAKAAKYGAAVPGVLGGLGALGGVGIPGGVVGAGPAAAAAAAKAAAKAAQFGLVGAAGLGGLGVGGLGVPGVGGLGGIPPAAAAKAAKYGAAGLGGVLGGAGQFPLGGVAARPGFGLSPIFPGGACLGKACGRKRK

SEQ ID NO: 4675 - protein, 677 aa, Homo Sapiens
MAGLTAAAPRPGVLLLLLSILHPSRPGGVPGAIPGGVPGGVFYPALGPGGKPLKPVPGGLAGAGLGAGLGAFPAVTFPGALVPGGVADAAAAYKAAKAGAGLGGVPGVGGLGVSAGAVVPQPGAGVKPGKVPGVGLPGVYPGGVLPGARFPGVGVLPGVPTGAGVKPKAPGVGGAFAGIPGVGPFGGPQPGVPLGYPIKAPKLPGGYGLPYTTGKLPYGYGPGGVAGAAGKAGYPTGTGVGPQAAAAAAAKAAAKFGAGAAGVLPGVGGAGVPGVPGAIPGIGGIAGVGTPAAAAAAAAAAKAAKYGAAAGLVPGGPGFGPGVVGVPGAGVPGVGVPGAGIPVVPGAGIPGAAVPGVVSPEAAAKAAAKAAKYGARPGVGVGGIPTYGVGAGGFPGFGVGVGGIPGVAGVPGVGGVPGVGGVPGVGISPEAQAAAAAKAAKYGLVPGVGVAPGVGVAPGVGVAPGVGLAPGVGVAPGVGVAPGVGVAPGIGPGGVAAAAKSAAKVAAKAQLRAAAGLGAGIPGLGVGVGVPGLGVGAGVPGLGVGAGVPGFGAVPGALAAAKAAKYGAAVPGVLGGLGALGGVGIPGGVVGAGPAAAAAAAKAAAKAAQFGLVGAAGLGGLGVGGLGVPGVGGLGGIPPAAAAKAAKYGVAARPGFGLSPIFPGGACLGKACGRKRK

SEQ ID NO: 4676 - protein, 714 aa, Homo Sapiens
MAGLTAAAPRPGVLLLLLSILHPSRPGGVPGAIPGGVPGGVFYPALGPGGKPLKPVPGGLAGAGLGAGLGAFPAVTFPGALVPGGVADAAAAYKAAKAGAGLGGVPGVGGLGVSAGAVVPQPGAGVKPGKVPGVGLPGVYPGGVLPGARFPGVGVLPGVPTGAGVKPKAPGVGGAFAGIPGVGPFGGPQPGVPLGYPIKAPKLPGGYGLPYTTGKLPYGYGPGGVAGAAGKAGYPTGTGVGPQAAAAAAAKAAAKFGAGAAGVLPGVGGAGVPGVPGAIPGIGGIAGVGTPAAAAAAAAAAKAAKYGAAAGLVPGGPGFGPGVVGVPGAGVPGVGVPGAGIPVVPGAGIPGAAVPGVVSPEAAAKAAAKAAKYGARPGVGVGGIPTYGVGAGGFPGFGVGVGGIPGVAGVPGVGGVPGVGGVPGVGISPEAQAAAAAKAAKYGVGTPAAAAAKAAAKAAQFGLVPGVGVAPGVGVAPGVGVAPGVGLAPGVGVAPGVGVAPGVGVAPGIGPGGVAAAAKSAAKVAAKAQLRAAAGLGAGIPGLGVGVGVPGLGVGAGVPGLGVGAGVPGFGAVPGALAAAKAAKYGAAVPGVLGGLGALGGVGIPGGVVGAGPAAAAAAAKAAAKAAQFGLVGAAGLGGLGVGGLGVPGVGGLGGIPPAAAAKAAKYGAAGLGGVLGGAGQFPLGGVAARPGFGLSPIFPGGACLGKACGRKRK

SEQ ID NO: 4677 - protein, 617 aa, Homo Sapiens
MAGLTAAAPRPGVLLLLLSILHPSRPGGVPGAIPGGVPGGVFYPALGPGGKPLKPVPGGLAGAGLGAGLGAFPAVTFPGALVPGGVADAAAAYKAAKAGAGLGGVPGVGGLGVSAGAVVPQPGAGVKPGKVPGVGLPGVYPGGVLPGVGPFGGPQPGVPLGYPIKAPKLPGGYGLPYTTGKLPYGYGPGGVAGAAGKAGYPTGTGVGPQAAAAAAAKAAAKFGAGAAGVLPGVGGAGVPGVPGAIPGIGGIAGVGTPAAAAAAAAAAKAAKYGAAAGLVPGGPGFGPGVVGVPGAGVPGVGVPGAGIPVVPGAGIPGAAVPGVVSPEAAAKAAAKAAKYGARPGVGVGGIPTYGVGAGGFPGFGVGVGAEAQAAAAAKAAKYGLVPGVGVAPGVGVAPGVGVAPGVGLAPGVGVAPGVGVAPGVGVAPGIGPGGVAAAAKSAAKVAAKAQLRAAAGLGAGIPGLGVGVGVPGLGVGAGVPGLGVGAGVPGFGAVPGALAAAKAAKYGAAVPGVLGGLGALGGVGIPGGVVGAGPAAAAAAAKAAAKAAQFGLVGAAGLGGLGVGGLGVPGVGGLGGIPPAAAAKAAKYGVAARPGFGLSPIFPGGACLGKACGRKRK

SEQ ID NO: 4678 - protein, 294 aa, Homo Sapiens
MAGLTAAAPRPGVLLLLLSILHPSRPGGVPGAIPGGVPGGVFYPGAGLGALGGGALGPGGKPLKPGLGAFPAVTFPGALVPGGVADAAAAYKAAKAGAGLGGVPGVGGLGVSAGAVVPQPGAGVKPGKVPGVGLPGVYPGGVLPGARFPGVGVLPGVPTGAGVKPKAPGVGPFGGPQPGVPLGYPIKAPKLPGGYGLPYTTGKLPYGYGPGGVAGAAGKAGYPTGTGVGPQAAAAAAAKAAAKFGAGAAGVLPGVGGAGVPGVPGAIPGIGGIAGVGTPAAAAAAAAAAKAAKY

SEQ ID NO: 4679 - protein, 643 aa, Homo Sapiens
MAGLTAAAPRPGVLLLLLSILHPSRPGGVPGAIPGGVPGGVFYPGAGLGALGGGALGPGGKPLKPGLGAFPAVTFPGALVPGGVADAAAAYKAAKAGAGLGGVPGVGGLGVSAGAVVPQPGAGVKPGKVPGVGLPGVYPGGVLPGARFPGVGVLPGVPTGAGVKPKAPGVGPFGGPQPGVPLGYPIKAPKLPGYGPGGVAGAAGKAGYPTGTGVGPQAAAAAAAKAAAKFGAGAAGVLPGVGGAGVPGVPGAIPGIGGIAGVGTPAAAAAAAAAAKAAKYGAAAGLVPGGPGFGPGVVGVPGAGVPGVGVPGAGIPVVPGAGIPGAAVPGVVSPEAAAKAAAKAAKYGARPGVGVGGIPTYGVGAGGFPGFGVGVGAEAQAAAAAKAAKYGLVPGVGVAPGVGVAPGVGVAPGVGLAPGVGVAPGVGVAPGVGVAPGIGPGGVAAAAKSAAKVAAKAQLRAAAGLGAGIPGLGVGVGVPGLGVGAGVPGLGVGAGVPGFGAVPGALAAAKAAKYGAAVPGVLGGLGALGGVGIPGGVVGAGPAAAAAAAKAAAKAAQFGLVGAAGLGGLGVGGLGVPGVGGLGGIPPAAAAKAAKYGAAGLGGVLGGAGQFPLGGVAARPGFGLSPIFPGGACLGKACGRKRK

SEQ ID NO: 4680 - protein, 168 aa, Homo Sapiens
MAGLTAAAPRPGVLLLLLSILHPSRPGGVPGAIPGGVPGGVFYPGAGLGALGGGALGPGGKPLKPGVGPFGGPQPGVPLGYPIKAPKLPGYGPGGVAGAAGKAGYPTGTGVGPQAAAAAAAKAAAKFGAGAAGVLPGVGGAGVPGVPGAIPGIGGIAGVGTPAAAAAA

SEQ ID NO: 4681 - protein, 711 aa, Homo Sapiens
MAGLTAAAPRPGVLLLLLSILHPSRPGGVPGAIPGGVPGGVFYPGAGLGALGGGALGPGGKPLKPVPGGLAGAGLGAGLGAFPAVTFPGALVPGGVADAAAAYKAAKAGAGLGGVPGVGGLGVSAAPSVPGAVVPQPGAGVKPGKVPGVGLPGVYPGGVLPGARFPGVGVLPGVPTGAGVKPKAPGVGGAFAGIPGVGPFGGPQPGVPLGYPIKAPKLPGGYGLPYTTGKLPYGYGPGGVAGAAGKAGYPTGTGVGPQAAAAAAAKAAAKFGAGAAGVLPGVGGAGVPGVPGAIPGIGGIAGVGTPAAAAAAAAAAKAAKYGAAAGLVPGGPGFGPGVVGVPGAGVPGVGVPGAGIPVVPGAGIPGAAVPGVVSPEAAAKAAAKAAKYGARPGVGVGGIPTYGVGAGGFPGFGVGVGGIPGVAGVPGVGGVPGVGGVPGVGISPEAQAAAAAKAAKYGVGTPAAAAAKAAAKAAQFGLVPGVGVAPGVGVAPGVGVAPGVGLAPGVGVAPGVGVAPGVGVAPGIGPGGVAAAAKSAAKVAAKAQLRAAAGLGAGIPGLGVGVGVPGLGVGAGVPGLGVGAGVPGFGAVPGALAAAKAAKYGAAVPGVLGGLGALGGVGIPGGVVGAGPAAAAAAAKAAAKAAQFGLVGAAGLGGLGVGGLGVPGVGGLGGIPPAAAAKAAKYGVAARPGFGLSPIFPGGACLGKACGRKRK

SEQ ID NO: 4682 - protein, 692 aa, Homo Sapiens
MAGLTAAAPRPGVLLLLLSILHPSRPGGVPGAIPGGVPGGVFYPGAGLGALGGGALGPGGKPLKPVPGGLAGAGLGAGLGAFPAVTFPGALVPGGVADAAAAYKAAKAGAGLGGVPGVGGLGVSAAPSVPGAVVPQPGAGVKPGKVPGVGLPGVYPGGVLPGARFPGVGVLPGVPTGAGVKPKAPGVGGAFAGIPGVGPFGGPQPGVPLGYPIKAPKLPGGYGLPYTTGKLPYGYGPGGVAGAAGKAGYPTGTGVGPQAAAAAAAKAAAKFGAGAAGVLPGVGGAGVPGVPGAIPGIGGIAGVGTPAAAAAAAAAAKAAKYGAAAGLVPGGPGFGPGVVGVPGAGVPGVGVPGAGIPVVPGAGIPGAAVPGVVSPEAAAKAAAKAAKYGARPGVGVGGIPTYGVGAGGFPGFGVGVGGIPGVAGVPGVGGVPGVGGVPGVGISPEAQAAAAAKAAKYGLVPGVGVAPGVGVAPGVGVAPGVGLAPGVGVAPGVGVAPGVGVAPGIGPGGVAAAAKSAAKVAAKAQLRAAAGLGAGIPGLGVGVGVPGLGVGAGVPGLGVGAGVPGFGAVPGALAAAKAAKYGAAVPGVLGGLGALGGVGIPGGVVGAGPAAAAAAAKAAAKAAQFGLVGAAGLGGLGVGGLGVPGVGGLGGIPPAAAAKAAKYGVAARPGFGLSPIFPGGACLGKACGRKRK

SEQ ID NO: 4683 - protein, 176 aa, Homo Sapiens
MAGLTAAAPRPGVLLLLLSILHPSRPGGVPGAIPGGVPGGVFYPGAGLGALGGGALGPGGKPLKPVPGGLAGAGLGAGLGAFPAVTFPGALVPGGVADAAAAYKAAKAGAGLGGVPGVGGLGVSAGAVVPQPGAGVKPGKVPGVGGAFAGIPGVGPFGGPQPGVPLGYPIKAPKLP

SEQ ID NO: 4684 - protein, 724 aa, Homo Sapiens
MAGLTAAAPRPGVLLLLLSILHPSRPGGVPGAIPGGVPGGVFYPGAGLGALGGGALGPGGKPLKPVPGGLAGAGLGAGLGAFPAVTFPGALVPGGVADAAAAYKAAKAGAGLGGVPGVGGLGVSAGAVVPQPGAGVKPGKVPGVGLPGVYPGGVLPGARFPGVGVLPGVPTGAGVKPKAPGVGGAFAGIPGVGPFGGPQPGVPLGYPIKAPKLPGGYGLPYTTGKLPYGYGPGGVAGAAGKAGYPTGTGVGPQAAAAAAAKAAAKFGAGAAGVLPGVGGAGVPGVPGAIPGIGGIAGVGTPAAAAAAAAAAKAAKYGAAAGLVPGGPGFGPGVVGVPGAGVPGVGVPGAGIPVVPGAGIPGAAVPGVVSPEAAAKAAAKAAKYGARPGVGVGGIPTYGVGAGGFPGFGVGVGGIPGVAGVPGVGGVPGVGGVPGVGISPEAQAAAAAKAAKYGVGTPAAAAAKAAAKAAQFGLVPGVGVAPGVGVAPGVGVAPGVGLAPGVGVAPGVGVAPGVGVAPGIGPGGVAAAAKSAAKVAAKAQLRAAAGLGAGIPGLGVGVGVPGLGVGAGVPGLGVGAGVPGFGAVPGALAAAKAAKYGAAVPGVLGGLGALGGVGIPGGVVGAGPAAAAAAAKAAAKAAQFGLVGAAGLGGLGVGGLGVPGVGGLGGIPPAAAAKAAKYGAAGLGGVLGGAGQFPLGGVAARPGFGLSPIFPGGACLGKACGRKRK

SEQ ID NO: 4685 - protein, 757 aa, Homo Sapiens
MAGLTAAAPRPGVLLLLLSILHPSRPGGVPGAIPGGVPGGVFYPGAGLGALGGGALGPGGKPLKPVPGGLAGAGLGAGLGAFPAVTFPGALVPGGVADAAAAYKAAKAGAGLGGVPGVGGLGVSAGAVVPQPGAGVKPGKVPGVGLPGVYPGGVLPGARFPGVGVLPGVPTGAGVKPKAPGVGGAFAGIPGVGPFGGPQPGVPLGYPIKAPKLPGGYGLPYTTGKLPYGYGPGGVAGAAGKAGYPTGTGVGPQAAAAAAAKAAAKFGAGAAGVLPGVGGAGVPGVPGAIPGIGGIAGVGTPAAAAAAAAAAKAAKYGAAAGLVPGGPGFGPGVVGVPGAGVPGVGVPGAGIPVVPGAGIPGAAVPGVVSPEAAAKAAAKAAKYGARPGVGVGGIPTYGVGAGGFPGFGVGVGGIPGVAGVPGVGGVPGVGGVPGVGISPEAQAAAAAKAAKYGVGTPAAAAAKAAAKAAQFGLVPGVGVAPGVGVAPGVGVAPGVGLAPGVGVAPGVGVAPGVGVAPGIGPGGVAAAAKSAAKVAAKAQLRAAAGLGAGIPGLGVGVGVPGLGVGAGVPGLGVGAGVPGFGAGADEGVRRSLSPELREGDPSSSQHLPSTPSSPRVPGALAAAKAAKYGAAVPGVLGGLGALGGVGIPGGVVGAGPAAAAAAAKAAAKAAQFGLVGAAGLGGLGVGGLGVPGVGGLGGIPPAAAAKAAKYGAAGLGGVLGGAGQFPLGGVAARPGFGLSPIFPGGACLGKACGRKRK

SEQ ID NO: 4686 - protein, 786 aa, Homo Sapiens
MAGLTAAAPRPGVLLLLLSILHPSRPGGVPGAIPGGVPGGVFYPGAGLGALGGGALGPGGKPLKPVPGGLAGAGLGAGLGAFPAVTFPGALVPGGVADAAAAYKAAKAGAGLGGVPGVGGLGVSAGAVVPQPGAGVKPGKVPGVGLPGVYPGGVLPGARFPGVGVLPGVPTGAGVKPKAPGVGGAFAGIPGVGPFGGPQPGVPLGYPIKAPKLPGGYGLPYTTGKLPYGYGPGGVAGAAGKAGYPTGTGVGPQAAAAAAAKAAAKFGAGAAGVLPGVGGAGVPGVPGAIPGIGGIAGVGTPAAAAAAAAAAKAAKYGAAAGLVPGGPGFGPGVVGVPGAGVPGVGVPGAGIPVVPGAGIPGAAVPGVVSPEAAAKAAAKAAKYGARPGVGVGGIPTYGVGAGGFPGFGVGVGGIPGVAGVPGVGGVPGVGGVPGVGISPEAQAAAAAKAAKYGAAGAGVLGGLVPGAPGAVPGVPGTGGVPGVGTPAAAAAKAAAKAAQFGLVPGVGVAPGVGVAPGVGVAPGVGLAPGVGVAPGVGVAPGVGVAPGIGPGGVAAAAKSAAKVAAKAQLRAAAGLGAGIPGLGVGVGVPGLGVGAGVPGLGVGAGVPGFGAGADEGVRRSLSPELREGDPSSSQHLPSTPSSPRVPGALAAAKAAKYGAAVPGVLGGLGALGGVGIPGGVVGAGPAAAAAAAKAAAKAAQFGLVGAAGLGGLGVGGLGVPGVGGLGGIPPAAAAKAAKYGAAGLGGVLGGAGQFPLGGVAARPGFGLSPIFPGGACLGKACGRKRK

SEQ ID NO: 4687 - protein, 706 aa, Homo Sapiens
MAGLTAAAPRPGVLLLLLSILHPSRPGGVPGAIPGGVPGGVFYPGAGLGALGGGALGPGGKPLKPVPGGLAGAGLGAGLGAFPAVTFPGALVPGGVADAAAAYKAAKAGAGLGGVPGVGGLGVSAGAVVPQPGAGVKPGKVPGVGLPGVYPGGVLPGARFPGVGVLPGVPTGAGVKPKAPGVGGAFAGIPGVGPFGGPQPGVPLGYPIKAPKLPGGYGLPYTTGKLPYGYGPGGVAGAAGKAGYPTGTGVGPQAAAAAAAKAAAKFGAGAAGVLPGVGGAGVPGVPGAIPGIGGIAGVGTPAAAAAAAAAAKAAKYGAAAGLVPGGPGFGPGVVGVPGAGVPGVGVPGAGIPVVPGAGIPGAAVPGVVSPEAAAKAAAKAAKYGARPGVGVGGIPTYGVGAGGFPGFGVGVGGIPGVAGVPGVGGVPGVGGVPGVGISPEAQAAAAAKAAKYGVGTPAAAAAKAAAKAAQFGLVPGVGVAPGVGVAPGVGVAPGVGLAPGVGVAPGVGVAPGVGVAPGIGPGGVAAAAKSAAKVAAKAQLRAAAGLGAGIPGLGVGVGVPGLGVGAGVPGLGVGAGVPGFGAVPGALAAAKAAKYGAAVPGVLGGLGALGGVGIPGGVVGAGPAAAAAAAKAAAKAAQFGLVGAAGLGGLGVGGLGVPGVGGLGGIPPAAAAKAAKYGVAARPGFGLSPIFPGGACLGKACGRKRK

SEQ ID NO: 4688 - protein, 730 aa, Homo Sapiens
MAGLTAAAPRPGVLLLLLSILHPSRPGGVPGAIPGGVPGGVFYPGAGLGALGGGALGPGGKPLKPVPGGLAGAGLGAGLGAFPAVTFPGALVPGGVADAAAAYKAAKAGAGLGGVPGVGGLGVSAGAVVPQPGAGVKPGKVPGVGLPGVYPGGVLPGARFPGVGVLPGVPTGAGVKPKAPGVGGAFAGIPGVGPFGGPQPGVPLGYPIKAPKLPGGYGLPYTTGKLPYGYGPGGVAGAAGKAGYPTGTGVGPQAAAAAAAKAAAKFGAGAAGVLPGVGGAGVPGVPGAIPGIGGIAGVGTPAAAAAAAAAAKAAKYGAAAGLVPGGPGFGPGVVGVPGAGVPGVGVPGAGIPVVPGAGIPGAAVPGVVSPEAAAKAAAKAAKYGARPGVGVGGIPTYGVGAGGFPGFGVGVGGIPGVAGVPGVGGVPGVGGVPGVGISPEAQAAAAAKAAKYGVGTPAAAAAKAAAKAAQFALLNLAGLVPGVGVAPGVGVAPGVGVAPGVGLAPGVGVAPGVGVAPGVGVAPGIGPGGVAAAAKSAAKVAAKAQLRAAAGLGAGIPGLGVGVGVPGLGVGAGVPGLGVGAGVPGFGAVPGALAAAKAAKYGAAVPGVLGGLGALGGVGIPGGVVGAGPAAAAAAAKAAAKAAQFGLVGAAGLGGLGVGGLGVPGVGGLGGIPPAAAAKAAKYGAAGLGGVLGGAGQFPLGGVAARPGFGLSPIFPGGACLGKACGRKRK

SEQ ID NO: 4689 - protein, 705 aa, Homo Sapiens
MAGLTAAAPRPGVLLLLLSILHPSRPGGVPGAIPGGVPGGVFYPGAGLGALGGGALGPGGKPLKPVPGGLAGAGLGAGLGAFPAVTFPGALVPGGVADAAAAYKAAKAGAGLGGVPGVGGLGVSAGAVVPQPGAGVKPGKVPGVGLPGVYPGGVLPGARFPGVGVLPGVPTGAGVKPKAPGVGGAFAGIPGVGPFGGPQPGVPLGYPIKAPKLPGGYGLPYTTGKLPYGYGPGGVAGAAGKAGYPTGTGVGPQAAAAAAAKAAAKFGAGAAGVLPGVGGAGVPGVPGAIPGIGGIAGVGTPAAAAAAAAAAKAAKYGAAAGLVPGGPGFGPGVVGVPGAGVPGVGVPGAGIPVVPGAGIPGAAVPGVVSPEAAAKAAAKAAKYGARPGVGVGGIPTYGVGAGGFPGFGVGVGGIPGVAGVPGVGGVPGVGGVPGVGISPEAQAAAAAKAAKYGLVPGVGVAPGVGVAPGVGVAPGVGLAPGVGVAPGVGVAPGVGVAPGIGPGGVAAAAKSAAKVAAKAQLRAAAGLGAGIPGLGVGVGVPGLGVGAGVPGLGVGAGVPGFGAVPGALAAAKAAKYGAAVPGVLGGLGALGGVGIPGGVVGAGPAAAAAAAKAAAKAAQFGLVGAAGLGGLGVGGLGVPGVGGLGGIPPAAAAKAAKYGAAGLGGVLGGAGQFPLGGVAARPGFGLSPIFPGGACLGKACGRKRK

SEQ ID NO: 4690 - protein, 658 aa, Homo Sapiens
MAGLTAAAPRPGVLLLLLSILHPSRPGGVPGAIPGGVPGGVFYPGAGLGALGGGALGPGGKPLKPVPGGLAGAGLGAGLGAFPAVTFPGALVPGGVADAAAAYKAAKAGAGLGGVPGVGGLGVSAGAVVPQPGAGVKPGKVPGVGLPGVYPGGVLPGARFPGVGVLPGVPTGAGVKPKAPGVGGAFAGIPGVGPFGGPQPGVPLGYPIKAPKLPGYGPGGVAGAAGKAGYPTGTGVGPQAAAAAAAKAAAKFGAGAAGVLPGVGGAGVPGVPGAIPGIGGIAGVGTPAAAAAAAAAAKAAKYGAAAGLVPGGPGFGPGVVGVPGAGVPGVGVPGAGIPVVPGAGIPGAAVPGVVSPEAAAKAAAKAAKYGARPGVGVGGIPTYGVGAGGFPGFGVGVGGIPGVAGVPGVGGVPGVGGVPGVGISPEAQAAAAAKAAKYGLVPGVGVAPGVGVAPGVGVAPGVGLAPGVGVAPGVGVAPGVGVAPGIGPGGVAGAAAGLGAGIPGLGVGVGVPGLGVGAGVPGLGVGAGVPGFGAVPGALAAAKAAKYGAAVPGVLGGLGALGGVGIPGGVVGAGPAAAAAAAKAAAKAAQFGLVGAAGLGGLGVGGLGVPGVGGLGGIPPAAAAKAAKYGVAARPGFGLSPIFPGGACLGKACGRKRK

SEQ ID NO: 4691 - protein, 214 aa, Homo Sapiens
MAGLTAAAPRPGVLLLLLSILHPSRPGGVPGAIPGGVPGGVFYPGAGLGALGGGALGPGGKPLKPVPGGLAGAGLGAGLGAFPAVTFPGALVPGGVADAAAAYKAAKAGAGLGGVPGVGGLGVSAGAVVPQPGAGVKPGKVPGVGLPGVYPGGVLPGVGPFGGPQPGVPLGYPIKAPKLPGGYGLPYTTGKLPYGYGPGGVAGAAGKAGYPTGT

SEQ ID NO: 4692 - protein, 167 aa, Homo Sapiens [sequence omitted]

SEQ ID NO: 4693 - protein, 570 aa, Homo Sapiens
MAGLTAAAPRPGVLLLLLSILHPSRPGGVPGAIPGGVPGGVFYPGAGLGALGGGALGPGGKPLKPVPGGLAGAGLGAGVGGAFAGIPGVGPFGGPQPGVPLGYPIKAPKLPGYGPGGVAGAAGKAGYPTGTGVGPQAAAAAAAKAAAKFGAGAAGVLPGVGGAGVPGVPGAIPGIGGIAGVGTPAAAAAAAAAAKAAKYGAAAGLVPGGPGFGPGVVGVPGAGVPGVGVPGAGIPVVPGAGIPGAAVPGVVSPEAAAKAAAKAAKYGARPGVGVGGIPTYGVGAGGFPGFGVGVGGIPGVAGVPGVGGVPGVGGVPGVGISPEAQAAAAAKAAKYGLVPGVGVAPGVGVAPGVGVAPGVGLAPGVGVAPGVGVAPGVGVAPGIGPGGVAAAAKSAAKVAAKAQLRAAAGLGAGIPGLGVGVGVPGLGVGAGVPGLGVGAGVPGFGAVPGALAAAKAAKYGAAVPGVLGGLGALGGVGIPGGVVGAGPAAAAAAAKAAAKAAQFGLVGAAGLGGLGVGGLGVPGVGGLGGIPPAAAAKAAKYGVAARPGFGLSPIFPGGACLGKACGRKRK

SEQ ID NO: 4694 - protein, 68 aa, Homo Sapiens
MAGLTAAAPRPGVLLLLLSILHPSRPGGVPGAIPGGVPGGVFYPGNVHETSTHPGHADDADVHNRCTF

SEQ ID NO: 4695 - protein, 60 aa, Homo Sapiens
VTFPGALVPGGVADAAAAYKAAKAGAGLGGVPGVGGLGVSAGAVVPQPGAGVKPGKVPAL

SEQ ID NO: 4696 - protein, 47 aa, Homo Sapiens
DEEELLTSTGFEYQQVAFQPSILTEPPTEDHLLQNTLWPEVQKLASF

SEQ ID NO: 4697 - protein, 57 aa, Homo Sapiens
MCLQTLNFGNGFALALCLSFLPNTDVPILACGNDDCRIHIFAQQNDQFQKVLSLCGH

SEQ ID NO: 4698 - protein, 120 aa, Homo Sapiens
MVAPVLETSHVFCCPNRVRGVLNWSSGPRGLLAFGTSCSVVLYDPLKRVVVTNLNGHTARVNCIQWICKQDGSPSTELVSGGSDNQVIHWEIEDNQAMKDLFMRCMLFTRGGHQILHYVH

SEQ ID NO: 4699 - protein, 101 aa, Homo Sapiens
MVAPVLETSHVFCCPNRVRGVLNWSSGPRGLLAFGTSCSVVLYDPLKRVVVTNLNGHTARVNCIQWICKQDGSPSTELVSGGSDNQVIHWEIEDNQIWARL

SEQ ID NO: 4700 - protein, 756 aa, Homo Sapiens
MVAPVLETSHVFCCPNRVRGVLNWSSGPRGLLAFGTSCSVVLYDPLKRVVVTNLNGHTARVNCIQWICKQDGSPSTELVSGGSDNQVIHWEIEDNQLLKAVHLQGHEGPVYAVHAVYQRRTSDPALCTLIVSAAADSAVRLWSKKGPEGRDLFLASCSQDCLIRIWKLYIKSTSLETQDDDNIRLKENTFTIENESVKIAFAVTLETVLAGHENWVNAVHWQPVFYKDGVLQQPVRLLSASMDKTMILWAPDEESGVWLEQVRVGEVGGNTLGFYDCQFNEDGSMIIAHAFHGALHLWKQNTVNPREWTPEIVISGHFDGVQDLVWDPEGEFIITVGTDQTTRLFAPWKRKDQSQVTWHEIARPQIHGYDLKCLAMINRFQFVSGADEKVLRVFSAPRNFVENFCAITGQSLNHVLCNQDSDLPEGATVPALGLSNKAVFQGDIASQPSDEEELLTSTGFEYQQVAFQPSILTEPPTEDHLLQNTLWPEVQKLYGHGYEIFCVTCNSSKTLLASACKAAKKEHAAIILWNTTSWKQVQNLVFHSLTVTQMAFSPNEKFLLAVSRDRTWSLWKKQDTISPEFEPVFSLFAFTNKITSVHSRIIWSCDWSPDSKYFFTGSRDKKVVVWGECDSTDDCIEHNIGPCSSVLDVGGAVTAVSVCPVLHPSQRYVVAVGLECGKICLYTWKKTDQVPEINDWTHCVETSQSQSHTLAIRKLCWKNCSGKTEQKEAEGAEWLHFASCGEDHTVKIHRVNKCAL

SEQ ID NO: 4701 - protein, 826 aa, Homo Sapiens
MVAPVLETSHVFCCPNRVRGVLNWSSGPRGLLAFGTSCSVVLYDPLKRVVVTNLNGHTARVNCIQWICKQDGSPSTELVSGGSDNQVIHWEIEDNQLLKAVHLQGHEGPVYAVHAVYQRRTSDPALCTLIVSAAADSAVRLWSKKGPEVMCLQTLNFGNGFALALCLSFLPNTDVPILACGNDDCRIHIFAQQNDQFQKVLSLCGHEDWIRGVEWAAFGRDLFLASCSQDCLIRIWKLYIKSTSLETQDDDNIRLKENTFTIENESVKIAFAVTLETVLAGHENWVNAVHWQPVFYKDGVLQQPVRLLSASMDKTMILWAPDEESGVWLEQVRVGEVGGNTLGFYDCQFNEDGSMIIAHAFHGALHLWKQNTVNPREWTPEIVISGHFDGVQDLVWDPEGEFIITVGTDQTTRLFAPWKRKDQSQVTWHEIARPQIHGYDLKCLAMINRFQFVSGADEKVLRVFSAPRNFVENFCAITGQSLNHVLCNQDSDLPEGATVPALGLSNKAVFQGDIASQPSDEEELLTSTGFEYQQVAFQPSILTEPPTEDHLLQNTLWPEVQKLYGHGYEIFCVTCNSSKTLLASACKAAKKEHAAIILWNTTSWKQVQNLVFHSLTVTQMAFSPNEKFLLAVSRDRTWSLWKKQDTISPEFEPVFSLFAFTNKITSVHSRIIWSCDWSPDSKYFFTGSRDKKVVVWGECDSTDDCIEHNIGPCSSVLDVGGAVTAVSVCPVLHPSQRYVVAVGLECGKICLYTWKKTDQVPEINDWTHCVETSQSQSHTLAIRKLCWKNCSGKTEQKEAEGAEWLHFASCGEDHTVKIHRVNKCAL

SEQ ID NO: 4702 - protein, 705 aa, Homo Sapiens
MVAPVLETSHVFCCPNRVRGVLNWSSGPRGLLAFGTSCSVVLYDPLKRVVVTNLNGHTARVNCIQWICKQDGSPSTELVSGGSDNQVIHWEIEDNQLLKAVHLQGHEGPVYAVHAVYQRRTSDPALCTLIVSAAADSAVRLWSKKGPEVMCLQTLNFGNGFALALCLSFLPNTDVPILACGNDDCRIHIFAQQNDQFQKVLSLCGHEDWIRGVEWAAFGRDLFLASCSQDCLIRIWKLYIKSTSLETQDDDNIRLKENTFTIENESVKIAFAVTLETVLAGHENWVNAVHWQPVFYKDGVLQQPVRLLSASMDKTMILWAPDEESGVWLEQVRVGEVGGNTLGFYDCQFNEDGSMIIAHAFHGALHLWKQNTVNPREWTPEIVISGHFDGVQDLVWDPEGEFIITVGTDQTTRLFAPWKRKDQSQVTWHEIARPQIHGYDLKCLAMINRFQFVSGADEKVLRVFSAPRNFVENFCAITGQSLNHVLCNQDSDLPEGATVPALGLSNKAVFQGDIASQPSDEEELLTSTGFEYQQVAFQPSILTEPPTEDHLLQNTLWPEVQKLYGHGYEIFCVTCNSSKTLLASACKAAKKEHAAIILWNTTSWKQVQNLVFHSLTVTQMAFSPNEKFLLAVSRDRTWSLWKKQDTISPEFVELFGLVIGVLTASISSLGVETKRWLSGVSATPLMTVLSTTLAPAPQSWTWVGL

SEQ ID NO: 4703 - protein, 891 aa, Homo Sapiens
MVAPVLETSHVFCCPNRVRGVLNWSSGPRGLLAFGTSCSVVLYDPLKRVVVTNLNGHTARVNCIQWICKQDGSPSTELVSGGSDNQVIHWEIEDNQLLKAVHLQGHEGPVYAVHAVYQRRTSDPALCTLIVSAAADSAVRLWSKKGPEVMCLQTLNFGNGFALALCLSFLPNTDVTWKTGQVERGRAWKPPASLALCSRSCDSMVSCYASILCKALWKEKLHTFWHHNRISFLPSAFRPIPILACGNDDCRIHIFAQQNDQFQKVLSLCGHEDWIRGVEWAAFGRDLFLASCSQDCLIRIWKLYIKSTSLETQDDDNIRLKENTFTIENESVKIAFAVTLETVLAGHENWVNAVHWQPVFYKDGVLQQPVRLLSASMDKTMILWAPDEESGVWLEQVRVGEVGGNTLGFYDCQFNEDGSMIIAHAFHGALHLWKQNTVNPREWTPEIVISGHFDGVQDLVWDPEGEFIITVGTDQTTRLFAPWKRKDQSQVTWHEIARPQIHGYDLKCLAMINRFQFVSGADEKVLRVFSAPRNFVENFCAITGQSLNHVLCNQDSDLPEGATVPALGLSNKAVFQGDIASQPSDEEELLTSTGFEYQQVAFQPSILTEPPTEDHLLQNTLWPEVQKLYGHGYEIFCVTCNSSKTLLASACKAAKKEHAAIILWNTTSWKQVQNLVFHSLTVTQMAFSPNEKFLLAVSRDRTWSLWKKQDTISPEFEPVFSLFAFTNKITSVHSRIIWSCDWSPDSKYFFTGSRDKKVVVWGECDSTDDCIEHNIGPCSSVLDVGGAVTAVSVCPVLHPSQRYVVAVGLECGKICLYTWKKTDQVPEINDWTHCVETSQSQSHTLAIRKLCWKNCSGKTEQKEAEGAEWLHFASCGEDHTVKIHRVNKCAL

SEQ ID NO: 4704 - protein, 800 aa, Homo Sapiens
MVAPVLETSHVFCCPNRVRGVLNWSSGPRGLLAFGTSCSVVLYDPLKRVVVTNLNGHTARVNCIQWICKQDGSPSTELVSGGSDNQVIHWEIEDNQLLKAVHLQGHEGPVYAVHAVYQRRTSDPALCTLIVSAAADSAVRLWSKKGPEVPILACGNDDCRIHIFAQQNDQFQKVLSLCGHEDWIRGVEWAAFGRDLFLASCSQDCLIRIWKLYIKSTSLETQDDDNIRLKENTFTIENESVKIAFAVTLETVLAGHENWVNAVHWQPVFYKDGVLQQPVRLLSASMDKTMILWAPDEESGVWLEQVRVGEVGGNTLGFYDCQFNEDGSMIIAHAFHGALHLWKQNTVNPREWTPEIVISGHFDGVQDLVWDPEGEFIITVGTDQTTRLFAPWKRKDQSQVTWHEIARPQIHGYDLKCLAMINRFQFVSGADEKVLRVFSAPRNFVENFCAITGQSLNHVLCNQDSDLPEGATVPALGLSNKAVFQGDIASQPSDEEELLTSTGFEYQQVAFQPSILTEPPTEDHLLQNTLWPEVQKLYGHGYEIFCVTCNSSKTLLASACKAAKKEHAAIILWNTTSWKQVQNLVFHSLTVTQMAFSPNEKFLLAVSRDRTWSLWKKQDTISPEFEPVFSLFAFTNKITSVHSRIIWSCDWSPDSKYFFTGSRDKKVVVWGECDSTDDCIEHNIGPCSSVLDVGGAVTAVSVCPVLHPSQRYVVAVGLECGKICLYTWKKTDQVPEINDWTHCVETSQSQSHTLAIRKLCWKNCSGKTEQKEAEGAEWLHFASCGEDHTVKIHRVNKCAL

SEQ ID NO: 4705 - protein, 756 aa, Homo Sapiens
MVAPVLETSHVFCCPNRVRGVLNWSSGPRGLLAFGTSCSVVLYDPLKRVVVTNLNGHTARVNCIQWICKQDGSPSTELVSGGSDNQVIHWEIEDNQLLKAVHLQGHEGPVYAVHAVYQRRTSDPALCTLIVSAAADSAVRLWSKKGPEVPILACGNDDCRIHIFAQQNDQFQKVLSLCGHEDWIRGVEWAAFGRDLFLASCSQDCLIRIWKLYIKSTSLETQDDDNIRLKENTFTIENESVKIAFAVTLETVLAGHENWVNAVHWQPVFYKDGVLQQPVRLLSASMDKTMILWAPDEESGVWLEQREWTPEIVISGHFDGVQDLVWDPEGEFIITVGTDQTTRLFAPWKRKDQSQVTWHEIARPQIHGYDLKCLAMINRFQFVSGADEKVLRVFSAPRNFVENFCAITGQSLNHVLCNQDSDLPEGATVPALGLSNKAVFQGDIASQPSDEEELLTSTGFEYQQVAFQPSILTEPPTEDHLLQNTLWPEVQKLYGHGYEIFCVTCNSSKTLLASACKAAKKEHAAIILWNTTSWKQVQNLVFHSLTVTQMAFSPNEKFLLAVSRDRTWSLWKKQDTISPEFEPVFSLFAFTNKITSVHSRIIWSCDWSPDSKYFFTGSRDKKVVVWGECDSTDDCIEHNIGPCSSVLDVGGAVTAVSVCPVLHPSQRYVVAVGLECGKICLYTWKKTDQVPEINDWTHCVETSQSQSHTLAIRKLCWKNCSGKTEQKEAEGAEWLHFASCGEDHTVKIHRVNKCAL

SEQ ID NO: 4706 - protein, 821 aa, Homo Sapiens
MVAPVLETSHVFCCPNRVRGVLNWSSGPRGLLAFGTSCSVVLYDPLKRVVVTNLNGHTARVNCIQWICKQDGSPSTELVSGGSDNQVIHWEIEDNQLLKAVHLQGHEGPVYAVHAVYQRRTSDPALCTLIVSAAADSAVRLWSKKGPEVTWKTGQVERGRAWKPPASLALCSRSCDSMVSCYASILCKALWKEKLHTFWHHNRISFLPSAFRPIPILACGNDDCRIHIFAQQNDQFQKVLSLCGHEDWIRGVEWAAFGRDLFLASCSQDCLIRIWKLYIKSTSLETQDDDNIRLKENTFTIENESVKIAFAVTLETVLAGHENWVNAVHWQPVFYKDGVLQQPVRLLSASMDKTMILWAPDEESGVWLEQREWTPEIVISGHFDGVQDLVWDPEGEFIITVGTDQTTRLFAPWKRKDQSQVTWHEIARPQIHGYDLKCLAMINRFQFVSGADEKVLRVFSAPRNFVENFCAITGQSLNHVLCNQDSDLPEGATVPALGLSNKAVFQGDIASQPSDEEELLTSTGFEYQQVAFQPSILTEPPTEDHLLQNTLWPEVQKLYGHGYEIFCVTCNSSKTLLASACKAAKKEHAAIILWNTTSWKQVQNLVFHSLTVTQMAFSPNEKFLLAVSRDRTWSLWKKQDTISPEFEPVFSLFAFTNKITSVHSRIIWSCDWSPDSKYFFTGSRDKKVVVWGECDSTDDCIEHNIGPCSSVLDVGGAVTAVSVCPVLHPSQRYVVAVGLECGKICLYTWKKTDQVPEINDWTHCVETSQSQSHTLAIRKLCWKNCSGKTEQKEAEGAEWLHFASCGEDHTVKIHRVNKCAL

SEQ ID NO: 4707 - protein, 51 aa, Homo Sapiens
MVAPVLETSHVFCCPNRVRGVLNWSSGPRGLLAFGTSCSVVLYDPLPLLLN

SEQ ID NO: 4708 - protein, 51 aa, Homo Sapiens; identical to SEQ ID NO: 4707

SEQ ID NO: 4709 - protein, 150 aa, Homo Sapiens
MTRWSSYLLGWTTFLLYSYESSGDYPRCIFPFIYRGKAYNSCISQGSFLGSLWCSVTSVFDEKQQWKFCETNEYGGNSLRKPCIFPSIYRNNVVSDCMEDESNKLWCPTTENMDKDGKWSFCADTRISALVPGFPCHFPFNYKNKNYFNC

SEQ ID NO: 4710 - protein, 75 aa, Homo Sapiens
MTRWSSYLLGWTTFLLYSYESSGGISALVPGFPCHFPFNYKNKNYFNCTNEGSKENLVWCATSYNYDQDHTWVYC

SEQ ID NO: 4711 - protein, 223 aa, Homo Sapiens [sequence omitted]

SEQ ID NO: 4712 - protein, 220 aa, Homo Sapiens
MVQLPVGWTTFLLYSYESSGGMHEECVFPFTYKGSVYFTCTHIHSLSPWCATRAVYNGQWKYCQSEDYPRCIFPFIYRGKAYNSCISQGSFLGSLWCSVTSVFDEKQQWKFCETNEYGGNSLRKPCIFPSIYRNNVVSDCMEDESNKLWCPTTENMDKDGKWSFCADTRISALVPGFPCHFPFNYKNKNYFNCTNEGSKENLVWCATSYNYDQDHTWVYC

SEQ ID NO: 4713 - protein, 76 aa, Homo Sapiens
SNKLWCPTTENMDKDGKWSFCADTRISALVPGFPCHFPFNYKNKNYFNCTNEGSKENLVWCATSYNYDQDHTWVYC

SEQ ID NO: 4714 - protein, 154 aa, Homo Sapiens
  misc_feature (1)..(1): Xaa can be any naturally occurring amino acid
XYPRCIFPFIYRGKAYNSCISQGSFLGSLWCSVTSVFDEKQQWKFCETNEYGGNSLRKPCIFPSIYRNNVVSDCMEDESNKLWCPTTENMDKDGKWSFCADTRISALVPGFPCHFPFNYKNKNYFNCTNEGSKENLVWCATSYNYDQDHTWVYC

SEQ ID NO: 4715 - protein, 178 aa, Homo Sapiens
FIGIFLIDGVTGRIIHSSVQKKAKGPVHIVHSENWVVYQYWNTKARRNEFTVLELYEGTEQYNATAFSSLDRPQLPQVLQQSYIFPSSISAMEATITERGITSRHLLSFAGSPPPRDPNRTKQMYRYTQSDSSTITRQFLECEVSTQLPRVWSPLVWLWPMVWTFTKLESTHPSSLTF

SEQ ID NO: 4716 - protein, 75 aa, Homo Sapiens
MAAEWASRFWLWATLLIPAAAVYEDQVGKFDWRQQYVGKVKFASLEFSPGSKKLVVATEKNVIAALNSRTGEICE

SEQ ID NO: 4717 - protein, 992 aa, Homo Sapiens
MAAEWASRFWLWATLLIPAAAVYEDQVGKFDWRQQYVGKVKFASLEFSPGSKKLVVATEKNVIAALNSRTGEILWRHVDKGTAEGAVDAMLLHGQDVITVSNGGRIMRSWETNIGGLNWEITLDSGSFQALGLVGLQESVRYIAVLKKTTLALHHLSSGHLKWVEHLPESDSIHYQMVYSYGSGVVWALGVVPFSHVNIVKFNVEDGEIVQQVRVSTPWLQHLSGACGVVDEAVLVCPDPSSRSLQTLALETEWELRQIPLQSLDLEFGSGFQPRVLPTQPNPVDASRAQFFLHLSPSHYALLQYHYGTLSLLKNFPQTALVSFATTGEKTVAAVMACRNEVKSSSSEDGSMGSFSEKSSSKDSLACFNQTYTINLYLVETGRRLLDTTITFSLEQSGTRPERLYIQVFLKKDDSVGYRALVQTEDHLLLFLQQLAGKVVLWSREESLAEVVCLEMVDLPLTGAQAELEGEFGKKADGLLGMFLKRLSSQLILLQAWTSHLWKMFYDARKPRSQIKNEINIDTLARDEFNLQKMMVMVTASGKLFGIESSSGTILWKQYLPNVKPDSSFKLMVQRTTAHFPHPPQCTLLVKDKESGMSSLYVFNPIFGKWSQVAPPVLKRPILQSLLLPVMDQDYAKVLLLIDDEYKVTAFPATRNVLRQLHELAPSIFFYLVDAEQGRLCGYRLRKDLTTELSWELTIPPEVQRIVKVKGKRSSEHVHSQGRVMGDRSVLYKSLNPNLLAVVTESTDAHHERTFIGIFLIDGVTGRIIHSSVQKKAKGPVHIVHSENWVVYQYWNTKARRNEFTVLELYEGTEQYNATAFSSLDRPQLPQVLQQSYIFPSSISAMEATITERGITSRHLLIGLPSGAILSLPKALLDPRRPEIPTEQSREENLIPYSPDVQIHAERFINYNQTVSRMRGIYTAPSGLESTCLVVAYGLDIYQTRVYPSKQFDVLKDDYDYVLISSVLFGLVFATMITKRLAQVKLLNRAWR

SEQ ID NO: 4718 - protein, 993 aa, Homo Sapiens
MAAEWASRFWLWATLLIPAAAVYEDQVGKFDWRQQYVGKVKFASLEFSPGSKKLVVATEKNVIAALNSRTGEILWRHVDKGTAEGAVDAMLLHGQDVITVSNGGRIMRSWETNIGGLNWEITLDSGSFQALGLVGLQESVRYIAVLKKTTLALHHLSSGHLKWVEHLPESDSIHYQMVYSYGSGVVWALGVVPFSHVNIVKFNVEDGEIVQQVRVSTPWLQHLSGACGVVDEAVLVCPDPSSRSLQTLALETEWELRQIPLQSLDLEFGSGFQPRVLPTQPNPVDASRAQFFLHLSPSHYALLQYHYGTLSLLKNFPQTALVSFATTGEKTVAAVMACRNEVQKSSSSEDGSMGSFSEKSSSKDSLACFNQTYTINLYLVETGRRLLDTTITFSLEQSGTRPERLYIQVFLKKDDSVGYRALVQTEDHLLLFLQQLAGKVVLWSREESLAEVVCLEMVDLPLTGAQAELEGEFGKKADGLLGMFLKRLSSQLILLQAWTSHLWKMFYDARKPRSQIKNEINIDTLARDEFNLQKMMVMVTASGKLFGIESSSGTILWKQYLPNVKPDSSFKLMVQRTTAHFPHPPQCTLLVKDKESGMSSLYVFNPIFGKWSQVAPPVLKRPILQSLLLPVMDQDYAKVLLLIDDEYKVTAFPATRNVLRQLHELAPSIFFYLVDAEQGRLCGYRLRKDLTTELSWELTIPPEVQRIVKVKGKRSSEHVHSQGRVMGDRSVLYKSLNPNLLAVVTESTDAHHERTFIGIFLIDGVTGRIIHSSVQKKAKGPVHIVHSENWVVYQYWNTKARRNEFTVLELYEGTEQYNATAFSSLDRPQLPQVLQQSYIFPSSISAMEATITERGITSRHLLIGLPSGAILSLPKALLDPRRPEIPTEQSREENLIPYSPDVQIHAERFINYNQTVSRMRGIYTAPSGLESTCLVVAYGLDIYQTRVYPSKQFDVLKDDYDYVLISSVLFGLVFATMITKRLAQVKLLNRAWR

SEQ ID NO: 4719 - protein, 971 aa, Homo Sapiens
MAAEWASRFWLWATLLIPAAAVYEDQVGKFDWRQQYVGKVKFASLEFSPGSKKLVVATEKNVIAALNSRTGEIYVITVSNGGRIMRSWETNIGGLNWEITLDSGSFQALGLVGLQESVRYIAVLKKTTLALHHLSSGHLKWVEHLPESDSIHYQMVYSYGSGVVWALGVVPFSHVNIVKFNVEDGEIVQQVRVSTPWLQHLSGACGVVDEAVLVCPDPSSRSLQTLALETEWELRQIPLQSLDLEFGSGFQPRVLPTQPNPVDASRAQFFLHLSPSHYALLQYHYGTLSLLKNFPQTALVSFATTGEKTVAAVMACRNEVQKSSSSEDGSMGSFSEKSSSKDSLACFNQTYTINLYLVETGRRLLDTTITFSLEQSGTRPERLYIQVFLKKDDSVGYRALVQTEDHLLLFLQQLAGKVVLWSREESLAEVVCLEMVDLPLTGAQAELEGEFGKKADGLLGMFLKRLSSQLILLQAWTSHLWKMFYDARKPRSQIKNEINIDTLARDEFNLQKMMVMVTASGKLFGIESSSGTILWKQYLPNVKPDSSFKLMVQRTTAHFPHPPQCTLLVKDKESGMSSLYVFNPIFGKWSQVAPPVLKRPILQSLLLPVMDQDYAKVLLLIDDEYKVTAFPATRNVLRQLHELAPSIFFYLVDAEQGRLCGYRLRKDLTTELSWELTIPPEVQRIVKVKGKRSSEHVHSQGRVMGDRSVLYKSLNPNLLAVVTESTDAHHERTFIGIFLIDGVTGRIIHSSVQKKAKGPVHIVHSENWVVYQYWNTKARRNEFTVLELYEGTEQYNATAFSSLDRPQLPQVLQQSYIFPSSISAMEATITERGITSRHLLIGLPSGAILSLPKALLDPRRPEIPTEQSREENLIPYSPDVQIHAERFINYNQTVSRMRGIYTAPSGLESTCLVVAYGLDIYQTRVYPSKQFDVLKDDYDYVLISSVLFGLVFATMITKRLAQVKLLNRAWR

SEQ ID NO: 4720 - protein, 86 aa, Homo Sapiens
  misc_feature (1)..(1): Xaa can be any naturally occurring amino acid
XNATAFSSLDRPQLPQVLQQSYIFPSSISAMEATITERGITSRHLLIGLPSGAILSLPKALLDPRRPEIPTEQSRCTDTRRAIHQL

SEQ ID NO: 4721 - protein, 191 aa, Homo Sapiens
  misc_feature (1)..(1): Xaa can be any naturally occurring amino acid
XSSKDSLACFNQTYTINLYLVETGRRLLDTTITFSLEQSGTRPERLYIQVFLKKDDSVGYRALVQTEDHLLLFLQQLAGKVVLWSREESLAEVVCLEMVDLPLTGAQAELEGEFGKKAAIQDGLLGMFLKRLSSQLILLQAWTSHLWKMFYDARKPRSQIKNEINIDTLARDEFNLQKMMVMVTASGKVSG

SEQ ID NO: 4722 - protein, 43 aa, Homo Sapiens
MAAASAGATRLLLLLLMAHSFEIDDSANFRKRGSLLWNQQDGT

SEQ ID NO: 4723 - protein, 254 aa, Homo Sapiens
MAAASAGATRLLLLLLMAVAAPSRARGSGCRAGTGARGAGAEGREGEACGTVGLLLEHSFEIDDSANFRKRGSLLWNQQDGTLSLSQRQLSEEERGRLRDVAALNGLYRVRIPRRPGALDGLEAGGYVSSFVPACSLVESHLSDQLTLHVDVAGNVVGVSVVTHPGGCRGHEVEDVDLELFNTSVQLQPPTTAPGPETAAFIERLEMEQAQKAKNPQEQKSFFAKYWHIILGGAVLLTALRPAAPGPAPPPQEA

SEQ ID NO: 4724 - protein, 262 aa, Homo Sapiens
MAAASAGATRLLLLLLMAVAAPSRARGSGCRAGTGARGAGAEGREGEACGTVGLLLEHSFEIDDSANFRKRGSLLWNQQDGTLSLSQRQLSEEERGRLRDVAALNGLYRVRIPRRPGALDGLEAGGYVSSFVPACSLVESHLSDQLTLHVDVAGNVVGVSVVTHPGGCRGHEVEDVDLELFNTSVQLQPPTTAPGPETAAFIERLEMEQAQKAKNPQEQKSFFAKYWMYIIPVVLFLMMSGAPDTGGQGGGGGGGGGGGSGR

SEQ ID NO: 4725 - protein, 371 aa, Homo Sapiens
MAAASAGATRLLLLLLMAVAAPSRARGSGCRAGTGARGAGAEGREGEACGTVGLLLEHSFEIDDSANFRKRGSLLWNQQDGTLSLSQRQLSEEERGRLRDVAALNGLYRVRIPRRPGALDGLEAGGYVSSFVPACSLVESHLSDQLTLHVDVAGNVVGVSVVTHPGGCRGHEVEDVDLELFNTSVQLQPPTTAPGPETAAFIERLEMEQAQKAKNPQEQKSFFAKYWMYIIPVVLFLMMSGAPDTGGQGGGGGGGGGGGSGRPLSSAFCWQRSSWTGAFGTAAGVSCARLPHGPMQPQGLPPCPWSRARDPGHYASSDLASPYPEPMQSGNMPPSLQPLCLCSRWSHPPVPGWARWSCPGSCSAPLTLTLD

SEQ ID NO: 4726 - protein, 42 aa, Homo Sapiens
MAAASAGATRLLLLLLMAVAAPSRARGSGCRAGTGARGVSAL

SEQ ID NO: 4727 - protein, 42 aa, Homo Sapiens; identical to SEQ ID NO: 4726

SEQ ID NO: 4728 - protein, 89 aa, Homo Sapiens [sequence omitted]

SEQ ID NO: 4729 - protein, 94 aa, Homo Sapiens
MGEVEISALAYVKMCLHAARYPHAAVNGLFLAPAPRSGECLCLTDCVPLFHSHLALSVMLEVALNQVDVWGAQAGLVVAGYYHANAAVNDQSNI

SEQ ID NO: 4730 - protein, 208 aa, Homo Sapiens
MGEVEISALAYVKMCLHAARYPHAAVNGLFLAPAPRSGECLCLTDCVPLFHSHLALSVMLEVALNQVDVWGAQAGLVVAGYYHANAAVNDQSPGPLALKIAGRIAEFFPDAVLIMLDNQKLVPQPRVPPVIVLENQGLRWVPKDKNLVMWRDWEESRQMVGALLEDRAHQHLVDFDCHLDDIRQDWTNQRLNTQITQWVGPTNGNGNA

SEQ ID NO: 4731 - protein, 208 aa, Homo Sapiens; identical to SEQ ID NO: 4730

SEQ ID NO: 4732 - protein, 134 aa, Homo Sapiens
MGFAHSWLLTPLIFPLHSPGPLALKIAGRIAEFFPDAVLIMLDNQKLVPQPRVPPVIVLENQGLRWVPKDKNLVMWRDWEESRQMVGALLEDRAHQHLVDFDCHLDDIRQDWTNQRLNTQITQWVGPTNGNGNA

SEQ ID NO: 4733 - protein, 76 aa, Homo Sapiens
LMSTATFLTSKDEGLKATTTDVRKNDSIISNVTVTSVTLPNAVSTLQSSKPKTETQSSIKTTEIPGEHSAQGKTKN

SEQ ID NO: 4734 - protein, 248 aa, Homo Sapiens
MELLQVTILFLLPSICSSNSTGVLEAANNSLVVTTTKPSITTPNTESLQKNVVTPTTGTTPKGTITNELLKMSLMSTATFLTSKDEGLKATTTDVRKNDSIISNVTVTSVTLPNAVSTLQSSKPKSSVLQPDASPSKTGTLTSIPVTIPENTSQSQVIGTEGGKNASTSATSRSYSSIILPVVIALIVITLSVFVLVGLYRMCWKADPGTPENGNDQPQSDKESVKLLTVKTISHESGEHSAQGKTKN

SEQ ID NO: 4735 - protein, 165 aa, Homo Sapiens
MELLQVTILFLLPSICSSNSTGVLEAANNSLVVTTTKPSITTPNTESLQKNVVTPTTGTTPKGTITNELLKMSLMSTATFLTSKDEGLKATTTDVRKNDSIISNVTVTSVTLPNAVSTLQSSKPKTETQSSIKTTEIPGIILPVVIALIVITLSVFVLVGLYRMC

SEQ ID NO: 4736 - protein, 261 aa, Homo Sapiens
MELLQVTILFLLPSICSSNSTGVLEAANNSLVVTTTKPSITTPNTESLQKNVVTPTTGTTPKGTITNELLKMSLMSTATFLTSKDEGLKATTTDVRKNDSIISNVTVTSVTLPNAVSTLQSSKPKTETQSSIKTTEIPGSVLQPDASPSKTGTLTSIPVTIPENTSQSQVIGTEGGKNASTSATSRSYSSIILPVVIALIVITLSVFVLVGLYRMCWKADPGTPENGNDQPQSDKESVKLLTVKTISHESGEHSAQGKTKN

SEQ ID NO: 4737 - protein, 178 aa, Homo Sapiens
MELLQVTILFLLPSICSSNSTGVLEAANNSLVVTTTKPSITTPNTESLQKNVVTPTTGTTPKGTITNELLKMSLMSTATFLTSKDEGLKATTTDVRKNDSIISNVTVTSVTLPNAVSTLQSSKPKTETQSSIKTTEIPGTPENGNDQPQSDKESVKLLTVKTISHESGEHSAQGKTKN

SEQ ID NO: 4738 - protein, 34 aa, Homo Sapiens
MGGPRAWALLCLGLLLPGGGAAWSIGAAPFSGRR

SEQ ID NO: 4739 - protein, 175 aa, Homo Sapiens
MGGPRAWALLCLGLLLPGGGAAWSIGAAPFSGRRNWCSYVVTRTISCHVQNGTYLQRVLQNCPWPMSCPGSSYRTVVRPTYKVMYKIVTAREWRCCPGHSGVSCEEGCLNCSKVSELTERLKVLEAKMTMLTVIEQPVPPTPATPEDPAPLWGPPPAQGSPGDGGLQDQVGAWGL

SEQ ID NO: 4740 - protein, 443 aa, Homo Sapiens
MGGPRAWALLCLGLLLPGGGAAWSIGAAPFSGRRNWCSYVVTRTISCHVQNGTYLQRVLQNCPWPMSCPGSSYRTVVRPTYKVMYKIVTAREWRCCPGHSGVSCEEVAASSASLEPMWSGSTMRRMALRPTAFSGCLNCSKVSELTERLKVLEAKMTMLTVIEQPVPPTPATPEDPAPLWGPPPAQGSPGDGGLQDQVGAWGLPGPTGPKGDAGSRGPMGMRGPPGPQGPPGSPGRAGAVGTPGERGPPGPPGPPGPPGPPAPVGPPHARISQHGDPLLSNTFTETNNHWPQGPTGPPGPPGPMGPPGPPGPTGVPGSPGHIGPPGPTGPKGISGHPGEKGERGLRGEPGPQGSAGQRGEPGPKGDPGEKSHWGEGLHQLREALKILAERVLILETMIGLYEPELGSGAGPAGTGTPSLLRGKRGGHATNYRIVAPRSRDERG

SEQ ID NO: 4741 - protein, 422 aa, Homo Sapiens
MGGPRAWALLCLGLLLPGGGAAWSIGAAPFSGRRNWCSYVVTRTISCHVQNGTYLQRVLQNCPWPMSCPGSSYRTVVRPTYKVMYKIVTAREWRCCPGHSGVSCEEVAASSASLEPMWSGSTMRRMALRPTAFSGCLNCSKVSELTERLKVLEAKMTMLTVIEQPVPPTPATPEDPAPLWGPPPAQGSPGDGGLQDQVGAWGLPGPTGPKGDAGSRGPMGMRGPPGPQGPPGSPGRAGAVGTPGERGPPGPPGPPGPPGPPAPVGPPHARISQHGDPLLSNTFTETNNHWPQGPTGPPGPPGPMGPPGPPGPTGVPGSPGHIGLRGEPGPQGSAGQRGEPGPKGDPGEKSHWGEGLHQLREALKILAERVLILETMIGLYEPELGSGAGPAGTGTPSLLRGKRGGHATNYRIVAPRSRDERG

SEQ ID NO: 4742 - protein, 445 aa, Homo Sapiens
MGGPRAWALLCLGLLLPGGGAAWSIGAAPFSGRRNWCSYVVTRTISCHVQNGTYLQRVLQNCPWPMSCPGSSYRTVVRPTYKVMYKIVTAREWRCCPGHSGVSCEEVAASSASLEPMWSGSTMRRMALRPTAFSGCLNCSKVSELTERLKVLEAKMTMLTVIEQPVPPTPATPEDPAPLWGPPPAQGSPGDGGLQDQVGAWGLPGPTGPKGDAGSRGPMGMRGPPGPQGPPGSPGRAGAVGTPGERGPPGPPGPPGPPGPPAPVGPPHARISQHGDPLLSNTFTETNNHWPQGPTGPPGPPGPMGPPGPPGPTGVPGSPGHIGPPGPTGPKGISGHPGEKGERGLRGEPGPQGSAGQRGEPGPKGDPGEKSHWAPSLQSFLQQQAQLELLARRVTLLEAIIWPEPELGSGAGPAGTGTPSLLRGKRGGHATNYRIVAPRSRDERG

SEQ ID NO: 4743 - protein, 212 aa, Homo Sapiens
MGGPRAWALLCLGLLLPGGGAAWSIGAAPFSGRRNWCSYVVTRTISCHVQNGTYLQRVLQNCPWPMSCPGSSYRTVVRPTYKVMYKIVTAREWRCCPGHSGVSCEEVAASSASLEPMWSGSTMRRMALRPTAFSGCLNCSKVSELTERLKVLEAKMTMLTVIEQPVPPTPATPEDPAPLWGPPPAQGSPGDGGLQGDPLLSNTFTETNNHWP

SEQ ID NO: 4744 - protein, 236 aa, Homo Sapiens
  misc_feature (1)..(1): Xaa can be any naturally occurring amino acid
XMTMLTVIEQPVPPTPATPEDPAPLWGPPPAQGSPGDGGLQGLPGAIESVRVPLLPRNDQVGAWGLPGPTGPKGDAGSRGPMGMRGPPGPQGPPGSPGRAGAVGTPGERGPPGPPGPPGPPGPPAPVGPPHARISQHGDPLLSNTFTETNNHWPQGPTGPPGPPGPMGPPGPPGPTGVPGSPGHIGPPGPTGPKGISGHPGEKGERGLRGEPGPQGSAGQRGEPGPKGDPGEKSHW

SEQ ID NO: 4745 - protein, 1016 aa, Homo Sapiens
MAPRTLWSCYLCCLLTAAAGAASYPPRGFSLYTGSSGALSPGGPQAQIAPRPASRHRNWCAYVVTRTVSCVLEDGVETYVKYQPCAWGQPQCPQSIMYRRFLRPRYRVAYKTVTDMEWRCCQGYGGDDCAESPAPALGPASSTPRPLARPARPNLSGSSAGSPLSGLGGEGPGESEKVQQLEEQVQSLTKELQGLRGVLQGLSGRLAEDVQRAVETAFNGRQQPADAAARPGVHETLNEIQHQLQLLDTRVSTHDQELGHLNNHHGGSSSSGGSRAPAPASAPPGPSEELLRQLEQRLQESCSVCLAGLDGFRRQQQEDRERLRAMEKLLASVEERQRHLAGLAVGRRPPQECCSPELGRRLAELERRLDVVAGSVTVLSGRRGTELGGAAGQGGHPPGYTSLASRLSRLEDRFNSTLGPSEEQEESWPGAPGGLSHWLPAARGRLEQLGGLLANVSGELGGRLDLLEEQVAGAMQACGQLCSGAPGEQDSQVSEILSALERRVLDSEGQLRLVGSGLHTVEAAGEARQATLEGLQEVVGRLQDRVDAQDETAAEFTLRLNLTAARLGQLEGLLQAHGDEGCGACGGVQEELGRLRDGVERCSCPLLPPRGPGAGPGVGGPSRGPLDGFSVFGGSSGSALQALQGELSEVILSFSSLNDSLNELQTTVEGQGADLADLGATKDRIISEINRLQQEATEHATESEERFRGLEEGQAQAGQCPSLEGRLGRLEGVCERLDTVAGGLQGLREGLSRHVAGLWAGLRETNTTSQMQAALLEKLVGGQAGLGRRLGALNSSLQLLEDRLHQLSLKDLTGPAGEAGPPGPPGLQGPPGPAGPPGSPGKDGQEGPIGPPGPQGEQGVEGAPAAPVPQVAFSAALSLPRSEPGTVPFDRVLLNDGGYYDPETGVFTAPLAGRYLLSAVLTGHRHEKVEAVLSRSNQGVARVDSGGYEPEGLENKPVAESQPSPGTLGVFSLILPLQAGDTVCVDLVMGQLAHSEEPLTIFSGALLYGDPELEHA

SEQ ID NO: 4746 - protein, 347 aa, Homo Sapiens
  misc_feature (1)..(1): Xaa can be any naturally occurring amino acid
XADLGATKDRIISEINRLQQEATEHATESEERFRGLEEGQAQAGQCPSLEGRLGRLEGVCERLDTVAGGLQGLREGLSRHVAGLWAGLRETNTTSQMQAALLEKLVGGQAGLGRRLGALNSSLQLLEDRLHQLSLKDLTGEGTKGPAGEAGPPGPPGLQGPPGPAGPPGSPGKDGQEGPIGPPGPQGEQGVEGAPAAPVPQVAFSAALSLPRSEPGTVPFDRVLLNDGGYYDPETGVFTAPLAGRYLLSAVLTGHRHEKVEAVLSRSNQGVARVDSGGYEPEGLENKPVAESQPSPGTLGVFSLILPLQAGDTVCVDLVMGQLAHSEEPLTIFSGALLYGDPELEHA

SEQ ID NO: 4747 - protein, 1053 aa, Homo Sapiens
MWQPRRPWPRVPWRWALALLALVGAGLCHAGPQPGYPARPSARNKNWCAYIVNKNVSCSVLEGSESFIQAQYNCAWNQMPCPSALVYRVNFRPRYVTRYKTVTQLEWRCCPGFRGGDCQEGPKDPVKTLRPTPARPRNSLKKATDNEPSQFSEPRKTLSPTGTAQPSWGVDPKEGPQELQEKKIQVLEEKVLRLTRTVLDLQSSLAGVSENLKHATQDDASRTRAPGLSSQHPKPDTTVSGDTETGQSPGVFNTKESGMKDIKSELAEVKDTLKNKSDKLEELDGKVKGYEGQLRQLQEAAQGPTVTMTTNELYQAYVDSKIDALREELMEGMDRKLADLKNSCEYKLTGLQQQCDDYGSSYLGVIELIGEKETSLRKEINNLRARLQEPSAQANCCDSEKNGDIGQQIKTLDQKIERVAEATRMLNGRLDNEFDRLIVPEPDVDFDAKWNELDARINVTEKNAEEHCFYIEETLRGAINGEVGDLKQLVDQKIQSLEDRLGSVLLQMTNNTGAELSPPGAAALPGVSGSGDERVMMELNHLKDKVQVVEDICLLNIQGKPHGMEGALPNREDRAVRDSLHLLKSLNDTMHRKFQETEQTIQKLQQDFSFLYSQLNHTENDVTHLQKEMSNCRAGENAGMGRFTKVGEQERTVDTLPSPQHPVAHCCSQLEERWQRLQSQVISELDACKECTQGVQREVSMVEGRVSHMEKTCSKLDSISGNLQRIKEGLNKHVSSLWNCVRQMNGTLRSHSRDISGLKNSVQQFYSHVFQISTDLQDLVKFQPSAKAPSPPPPAEAPKEPLQPEPAPPRPSGPATAEDPGRRPVLPQRPPEERPPQPPGSTGVIAETGQAGPPAGAGVSGRGLPRGVDGQTGSGTVPGAEGFAGAPGYPKSPPVASPGAPVPSLVSFSAGLTQKPFPSDGGVVLFNKVLVNDGDVYNPSTGVFTAPYDGRYLITATLTPERDAYVEAVLSVSNASVAQLHTAGYRREFLEYHRPPGALHTCGGPGAFHLIVHLKAGDAVNVVVTGGKLAHTDFDEMYSTFSGVFLYPFLSHL

SEQ ID NO: 4748 - protein, 766 aa, Homo Sapiens
MGRRRLLVWLCAVAALLSGAQARGTPLLARPAPPGASRYSLYTTGWRPRLRPGPHKALCAYVVHRNVTCILQEGAESYVKAEYRQCRWGPKCPGTVTYRTVLRPKYKVGYKTVTDLAWRCCPGFTGKRCPEHLTDHGAASPQLEPEPQIPSGQLDPGPRPPSYSRAAPSPHGRKGPGLFGERLERLEGDVQRLAQTYGTLSGLVASHEDPNRMTGGPRAPAVPVGFGVIPEGLVGPGDRARGPLTPPLDEILSKVTEVSNTLQTKVQLLDKVHGLALGHEAHLQRLREAPPSPLTSLALLEEYVDRRLHRLWGSLLDGFEQKLQGVQSECDLRVQEVRRQCEEGQAASRRLHQSLDGRELALRQELSQLGSQLQGLSVSGRGSCCGQLALINARMDGLERALQAVTETQRGPGAPAGDELTRLSAAMLEGGVDGLLEGLETLNGTEGGARGCCLRLDMGGWGVGGFGTMLEERVQSLEERLATLAGELSHDSASPGRSARPLVQTELAVLEQRLVSLETSCTPSTTSAILDSLVAEVKAWQSRSEALLRQVASHAALLQQLNGTVAEVQGQLAEGTGSSLQGEITLLKVNLNSVSKSLTGLSDSVSQYSDAFLAANTSLDERERKVEAEVQAIQEQVSSQGSRLQAGHRQVLNLRGELEQLKAGVAKVASGLSRCQDTAQKLQHTVGHFDQRVAQVEGACRRLGLLAAGLDSLPTEPLRPREGLWSHVDQLNRTLAQHTQDIARLRDDLLDCQAQLAEQVRPGQAN

SEQ ID NO: 4749 - protein, 1142 aa, Homo Sapiens
MLVLRCRLGTSFPKLDNLVPKGKMKILLVFLGLLGNSVAMPMHMPRMPGFSSKSEEMMRYNQFNFMNGPHMAHLGPFFGNGLPQQFPQYQMPMWPQPPPNTWHPRKSSAPKRHNKTDQTQETQKPNQTQSKKPPQKRPLKQPSHNQPQPEEEAQPPQAFPPFGNGLFPYQQPPWQIPQRLPPPGYGRPPISNEEGGNPYFGYFGYHGFGGRPPYYSEEMFEQDFEKPKEEDPPKAESPGTEPTANSTVTETNSTQPNPKGSQGGNDTSPTGNSTPGLNTGNNPPAQNGIGPLPAVNASGQGGPGSQIPWRPSQPNIRENHPYPNIRNFPSGRQWYFTGTVMGHRQNRPFYRNQQVQRGPRWNFFAWERKQVARPGNPVYHKAYPPTSRGNYPNYAGNPANLRRKPQGPNKHPVGTTVAPLGPKPGPVVRNEKIQNPKEKPLGPKEQIIVPTKNPTSPWRNSQQYEVNKSNYKLPHSEGYMPVPNFNSVDQHENSYYPRGDSRKVPNSDGQTQSQNLPKGIVLGSRRMPYESETNQSELKHSSYQPAVYPEEIPSPAKEHFPAGRNTWDHQEISPPFKEDPGRQEEHLPHPSHGSRGSVFYPEYNPYDPRENSPYLRGNTWDERDDSPNTMGQKESPLYPINTPDQKEIVPYNEEDPVDPTGDEVFPGQNRWGEELSFKGGPTVRHYEGEQYTSNQPKEYLPYSLDNPSKPREDFYYSEFYPWSPDENFPSYNTASTMPPPIESRGYYVNNAAGPEESTLFPSRNSWDHRIQAQGQRERRPYFNRNIWDQATHLQKAPARPPDQKGNQPYYSNTPAGLQKNPIWHEGENLNYGMQITRMNSPEREHSSFPNFIPPSYPSGQKEAHLFHLSQRGSCCAGSSTGPKDNPLALQDYTPSYGLAPGENQDTSPLYTDGSHTKQTRDIISPTSILPGQRNSSEKRESQNPFRDDVSTLRRNTPCSIKNQLGQKEIMPFPEASSLQSKNTPCLKNDLGGDGNNILEQVFEDNQLNERTVDLTPEQLVIGTPDEGSNPEGIQSQVQENESERQQQRPSNILHLPCFGSKLAKHHSSTTGTPSSDGRQSPFDGDSITPTENPNTLVELATEEQFKSINVDPLDADEHSPFEFLQRGTNVQDQVQDCLLLQA

SEQ ID NO: 4750 - protein, 297 aa, Homo Sapiens
MRALRAGLTLASGAGLGAVVEGWRRRREDARAAPGLLGRLPVLPVAAAAELPPVPGGPRGPGELAKYGLPGLAQLKSRESYVLCYDPRTRGALWVVEQLRPERLRGDGDRRECDFREDDSVHAYHRATNADYRGSGFDRGHLAAAANHRWSQKAMDDTFYLSNVAPQVPHLNQNAWNNLEKYSRSLTRSYQNVYVCTGPLFLPRTEADGKSYVKYQVIGKNHVAVPTHFFKVLILEAAGGQIELRTYVMPNAPVDEAIPLERFLVPIESIERASGLLFVPNILARAGSLKAITAGSK

SEQ ID NO: 4751 - protein, 347 aa, Homo Sapiens
MRACISLVLAVLCGLAWADLYSAPTSCQGRCYEAFDKHHQCHCNARCQEFGNCCKDFESLCSDHEVSHSSDAITKEEIQSISEKIYRADTNKAQKEDIVLNSQNCISPSETRNQVDRCPKPLFTYVNEKLFSKPTYAAFINLLNNYQRATGHGEHFSAQELAEQDAFLREIMKTAVMKELYSFLHHQNRYGSEQEFVDDLKNMWFGLYSRGNEEGDSSGFEHVFSGEVKKGKVTGFHNWIRFYLEEKEGLVDYYSHIYDGPWDSYPDVLAMQFNWDGYYKEVGSAFIGSSPEFEFALYSLCFIARPGKVCQLSLGGYPLAVRTYTWDKSTYGNGKKYIATAYIVSST

SEQ ID NO: 4752 - protein, 369 aa, Homo Sapiens
MRACISLVLAVLCGLAWAEDHKESEPLPQLEEETEEALASNLYSAPTSCQGRCYEAFDKHHQCHCNARCQEFGNCCKDFESLCSDHEVSHSSDAITKEEIQSISEKIYRADTNKAQKEDIVLNSQNCISPSETRNQVDRCPKPLFTYVNEKLFSKPTYAAFINLLNNYQRATGHGEHFSAQELAEQDAFLREIMKTAVMKELYSFLHHQNRYGSEQEFVDDLKNMWFGLYSRGNEEGDSSGFEHVFSGEVKKGKVTGFHNWIRFYLEEKEGLVDYYSHIYDGPWDSYPDVLAMQFNWDGYYKEVGSAFIGSSPEFEFALYSLCFIARPGKVCQLSLGGYPLAVRTYTWDKSTYGNGKKYIATAYIVSST

SEQ ID NO: 4753 - protein, 410 aa, Homo Sapiens
MRACISLVLAVLCGLAWAGKIESCASRCNEKFNRDAACQCDRRCLWHGNCCEDYEHLCTEDHKESEPLPQLEEETEEALASNLYSAPTSCQGRCYEAFDKHHQCHCNARCQEFGNCCKDFESLCSDHEVSHSSDAITKEEIQSISEKIYRADTNKAQKEDIVLNSQNCISPSETRNQVDRCPKPLFTYVNEKLFSKPTYAAFINLLNNYQRATGHGEHFSAQELAEQDAFLREIMKTAVMKELYSFLHHQNRYGSEQEFVDDLKNMWFGLYSRGNEEGDSSGFEHVFSGEVKKGKVTGFHNWIRFYLEEKEGLVDYYSHIYDGPWDSYPDVLAMQFNWDGYYKEVGSAFIGSSPEFEFALYSLCFIARPGKVCQLSLGGYPLAVRTYTWDKSTYGNGKKYIATAYIVSST

SEQ ID NO: 4754 - protein, 76 aa, Homo Sapiens
MGAAISQGALIAIVCNGLVGFLLLLLWVILCWACHSRSADVDSLSESSPNSSPGPCPEKAPPPQKPSHEGSYLLQP

SEQ ID NO: 4755 - protein, 363 aa, Homo Sapiens
MAIGAVSLAVAKACAMLLNKPLYLNIALLKHNQEQPTTLSMPLLMVSLVSCGKSSSGKLNLMKEVICIPHPELTTKQGVEMLMEMQKHINKIIEMPSPPKAETKKGHDGSKRGQQQITGKMSHLGCLTINCDSIEQPLLLIQEICANLGLELGTNLHLAINCAGHELMDYNKGKYEVIMGTYKNAAEMVDLYVDLINKYPSIIALIDPFRKEDSEQWDSIYHALGSRCYIIAGTASKSISKLLEQGNISIPKSNGLIIKHTNQTTMSDLVEITNLIDSKKHITVFGSTEGESSDDSLVDLAVGLGVRFIKLGGLSRGERVTKYNRLLTIEEELVQNGTLATSSSSCDARIGGQEQETMTLVKV

SEQ ID NO: 4756 - protein, 625 aa, Homo Sapiens
MEEEGGGRSCGTTRELQKLKQQAMEYYRENDVPRRLEELLNSTFYLQPADVYGHLANCFSKLAKPPTICKIVGKDVLDGLGLPTLQVDIFCTIQNFPKNVCSVVISTHFEVHENALPELAKAEEAERASAVSTAVQWVNSTITHELQGMAPSDQAEVDHLLRIFFASKVQEDKGRKELEKSLEYSTVPTPLPPVPPPPPPPPPTKKKGQKPGRKDTITEKPIAPAEPVEPVLSGSMAIGAVSLAVAKACAMLLNKPLYLNIALLKHNQEQPTTLSMPLLMVSLVSCGKSSSGKLNLMKEVICIPHPELTTKQGVEMLMEMQKHINKIIEMPSPPKAETKKGHDGSKRGQQQITGKMSHLGCLTINCDSIEQPLLLIQEICANLGLELGTNLHLAINCAGHELMDYNKGKYEVIMGTYKNAAEMVDLYVDLINKYPSIIALIDPFRKEDSEQWDSIYHALGSRCYIIAGTASKSISKLLEQGNISIPKSNGLIIKHTNQTTMSDLVEITNLIDSKKHITVFGSTEGESSDDSLVDLAVGLGVRFIKLGGLSRGERVTKYNRLLTIEEELVQNGTLGFKEEHTFFYFNEEAEKAAEALEAAAAREPLVPTFPTQGVEESAETGASSG

SEQ ID NO: 4757 - protein, 628 aa, Homo Sapiens [sequence omitted]

SEQ ID NO: 4758 - protein, 308 aa, Homo Sapiens
MEEEGGGRSCGTTRELQKLKQQAMEYYRENDVPRRLEELLNSTFYLQPADVYGHLPSPPKAETKKGHDGSKRGQQQITGKMSHLGCLTINCDSIEQPLLLIQEICANLGLELGTNLHLAINCAGHELMDYDSEQWDSIYHALGSRCYIIAGTASKSISKLLEQGNISIPKSNGLIIKHTNQTTMSDLVEITNLIDSKKHITVFGSTEGESSDDSLVDLAVGLGVRFIKLGGLSRGERVTKYNRLLTIEEELVQNGTLGFKEEHTFFYFNEEAEKAAEALEAAAAREPLVPTFPTQGVEESAETGASSG

SEQ ID NO: 4759 - protein, 138 aa, Homo Sapiens
  misc_feature (1)..(1): Xaa can be any naturally occurring amino acid
XGRSCGTTRELQKLKQQAMEYYRENDVPRRLEELLNSTFYLQPADVYGHLANCFSKLAKPPTICKIVGKDVLDGLGLPTLQVDIFCTIQNFPKNVCSVVISTHFEVHENALPELAKAEEAERASAVSTAVQWVNSTIT

SEQ ID NO: 4760 - protein, 440 aa, Homo Sapiens
MAVKLGTLLLALALGLAQPASARRKLLVFLLDGFRSDYISDEALESLPGFKEIVSRGVKVDYLTPDFPSLSYPNYYTLMTGRHCEVHQMIGNYMWDPTTNKSFDIGVNKDSLMPLWWNGSEPLWVTLTKAKRKVYMYYWPGCEVEILGVRPTYCLEYKNVPTDINFANAVSDALDSFKSGRADLAAIYHERIDVEGHHYGPASPQRKDALKAVDTVLKYMTKWIQERGLQDRLNVIIFSDHGMTDIFWMDKVIELNKYISLNDLQQVKDRGPVVSLWPAPGKHSEIYNKLSTVEHMTVYEKEAIPSRFYYKKGKFVSPLTLVADEGWFITENREMLPFWMNSTGRREGWQRGWHGYDNELMDMRGIFLAFGPDFKSNFRAAPIRSVDVYNVMCNVVGITPLPNNGSWSRVMCMLKGRASTAPPVWPSHCALALILLFLLA

SEQ ID NO: 4761 - protein, 194 aa, Homo Sapiens
MIGNYMWDPTTNKSFDIGVNKDSLMPLWWNGSEPLWVTLTKAKRKVYMYYWPGCEVEILGVRPTYCLEYKNVPTDINFANAVSDALDSFKSGRADLAAIYHERIDVEGHHYGPASPQRKDALKAVDTVLKYMTKWIQERGLQDRLNVIIFSDHGMTDIFWMDKVIELNKYISLNDLQQVKDRGPVVSLWPAPGK

SEQ ID NO: 4762 - protein, 159 aa, Homo Sapiens
LKDAHPKLHVYKKEAFPEAFHYANNPRVTPLLMYSDLGYVIHGRINVQFNNGEHGFDNKDMDMKTIFRAVGPSFRAGLEVEPFESVHVYELMCRLLGIVPEANDGHLATLLPMLHTESALPPDGRPTLLPKGRSALPPSSRPLLVMGLLGTVILLSEVA

SEQ ID NO: 4763 - protein, 458 aa, Homo Sapiens
MRGPAVLLTVALATLLAPGAGAPVQSQGSQNKLLLVSFDGFRWNYDQDVDTPNLDAMARDGVKARYMTPAFVTMTSPCHFTLVTGKYIENHGVVHNMYYNTTSKVKLPYHATLGIQRWWDNGSVPIWITAQRQGLRAGSFFYPGGNVTYQGVAVTRSRKEGIAHNYKNETEWRANIDTVMAWFTEEDLDLVTLYFGEPDSTGHRYGPESPERREMVRQVDRTVGYLRESIARNHLTDRLNLIITSDHGMTTVDKRAGDLVEFHKFPNFTFRDIEFELLDYGPNGMLLPKEGRLEKVYDALKDAHPKLHVYKKEAFPEAFHYANNPRVTPLLMYSDLGYVIHGRINVQFNNGEHGFDNKDMDMKTIFRAVGPSFRAGLEVEPFESVHVYELMCRLLGIVPEANDGHLATLLPMLHTESALPPDGRPTLLPKGRSALPPSSRPLLVMGLLGTVILLSEVA

SEQ ID NO: 4764 - protein, 91 aa, Homo Sapiens
MATSWGTVFFMLVVSCVCSAVSHRNQQTWFEGIFLSSMCPINVSASTLYGIMFDAGSTGTRIHVYTFVQKMPGHLWSLGKGGGVRCPPEKW

SEQ ID NO: 4765 - protein, 211 aa, Homo Sapiens
MATSWGTVFFMLVVSCVCSAVSHRNQQTWFEGIFLSSMCPINVSASTLYGIMFDAGSTGTRIHVYTFVQKMPGQLPILEGEVFDSVKPGLSAFVDQPKQGAETVQGLLEVAKDSIPRSHWKKTPVVLKATAGLRLLPEHKAKALLFEVKEIFRKSPFLVPKGSVSIMDGSDEGILAWVTVNFLTGQLHGHRQETVGTLDLGGASTQITFLP

SEQ ID NO: 4766 - protein, 428 aa, Homo Sapiens
MATSWGTVFFMLVVSCVCSAVSHRNQQTWFEGIFLSSMCPINVSASTLYGIMFDAGSTGTRIHVYTFVQKMPGQLPILEGEVFDSVKPGLSAFVDQPKQGAETVQGLLEVAKDSIPRSHWKKTPVVLKATAGLRLLPEHKAKALLFEVKEIFRKSPFLVPKGSVSIMDGSDEGILAWVTVNFLTGQLHGHRQETVGTLDLGGASTQITFLPQFEKTLEQTPRGYLTSFEMFNSTYKLYTHSYLGFGLKAARLATLGALETEGTDGHTFRSACLPRWLEAEWIFGGVKYQYGGNQEGEVGFEPCYAEVLRVVRGKLHQPEEVQRGSFYAFSYYYDRAVDTDMIDYEKGGILKVEDFERKAREVCDNLENFTSGSPFLCMDLSYITALLKDGFGFADSTVLQLTKKVNNIETGWALGATFHLLQSLGISH

SEQ ID NO: 4767 - protein, 407 aa, Homo Sapiens
MATSWGTVFFMLVVSCVCSAVSHRNQQTWFEGIFLSSMCPINVSASTLYGIMFDAGSTGTRIHVYTFVQKMPGQLPILEGEVFDSVKPGLSAFVDQPKQGAETVQGLLEVAKDSIPRSHWKKTPVVLKATAGLRLLPEHKAKALLFEVKEIFRKSPFLVPKGSVSIMDGSDEGILAWVTVNFLTGQLHGHRQETVGTLDLGGASTQITFLPQFEKTLEQTPRGYLTSFEMFNSTYKLYTHSYLGFGLKAARLATLGALETEGTDGHTFRSACLPRWLEAEWIFGGVKYQYGGNQEGEVGFEPCYAEVLRVVRGKLHQPEEVQRGSFYAFSYYYDRAVDTDMIDYEKGGILKVEDFERKAREVCDNLENFTSGSPFLCMDLSYITALLKDGFGFADSTVLQHIISWVN

SEQ ID NO: 4768 - protein, 80 aa, Homo Sapiens
  misc_feature (1)..(1): Xaa can be any naturally occurring amino acid
XYAFSYYYDRAVDTDMIDYEKGGILKVEDFERKAREVCDNLENFTSGSPFLCMDLSYITALLKDGFGFADSTVLQAAVLR

SEQ ID NO: 4769 - protein, 223 aa, Homo Sapiens
LGASGVSGLTALILLLVEATSVLLPTDIKFGIVFDAGSSHTSLFLYQWLANKENGTGVVSQALACQVEGPGISSYTSNAAQAGESLQGCLEEALVLIPEAQHRKTPTFLGATAGMRLLSSHPGPGPVSRGLLGCRAPGRAGRRCLWLDHCQLRLGDAGQVLLHWRMDPASGGDAGGCPGHGRGLHPDHVRAWGPHLGQEHPGRFSPLRLRLQRLHSQLPVLWT

SEQ ID NO: 4770 - protein, 458 aa, Homo Sapiens
MGLSRKEQVFLALLGASGVSGLTALILLLVEATSVLLPTDIKFGIVFDAGSSHTSLFLYQWLANKENGTGVVSQALACQVEGPGISSYTSNAAQAGESLQGCLEEALVLIPEAQHRKTPTFLGATAGMRLLSRKNSSQARDIFAAVTQVLGRSPVDFWGAELLAGQAEGAFGWITVNYGLGTLVKYSFTGEWIQPPEEMLVGALDMGGASTQITFVPGGPILDKSTQADFRLYGSDYSVYTHSYLCFGRDQMLSRLLVGLVQSRPAALLRHPCYLSGYQTTLALGPLYESPCVHATPPLSLPQNLTVEGTGNPGACVSAIRELFNFSSCQGQEDCAFDGVYQPPLRGQFYVEASYPGQDRWLRDYCASGLYILTLLHEGYGFSEETWPSLEFRKQAGGVDIGWTLGYMLNLTGMIPADAPAQWRAESYGVWVAKVVFMVLALVAVVGAALVQLFWLQD

SEQ ID NO: 4771 - protein, 495 aa, Homo Sapiens
MGLSRKEQVFLALLGASGVSGLTALILLLVEATSVLLPTDIKFGIVFDAGSSHTSLFLYQWLANKENGTGVVSQALACQVEGPGISSYTSNAAQAGESLQGCLEEALVLIPEAQHRKTPTFLGATAGMRLLSRKNSSQARDIFAAVTQVLGRSPVDFWGAELLAGQAEGAFGWITVNYGLGTLVKYSFTGEWIQPPEEMLVGALDMGGASTQITFVPGGPILDKSTQADFRLYGSDYSVYTHSYLCFGRDQMLSRLLVGLVQSRPAALLRHPCYLSGYQTTLALGPLYESPCVHATPPLSLPQNLTVEGTGNPGACVSAIRELFNFSSCQGQEDCAFDGVYQPPLRGQFYAFSNFYYTFHFLNLTSRQPLSTVNATIWEFCQRPWKLVEASYPGQDRWLRDYCASGLYILTLLHEGYGFSEETWPSLEFRKQAGGVDIGWTLGYMLNLTGMIPADAPAQWRAESYGVWVAKVVFMVLALVAVVGAALVQLFWLQD

SEQ ID NO: 4772 - protein, 495 aa, Homo Sapiens; identical to SEQ ID NO: 4771

SEQ ID NO: 4773 - protein, 135 aa, Homo Sapiens
MISAHCNLCLLDSSDSCALASQVAGITGVHHHAQLIFVFLIETEFHHVGQAGLELWVQEILPPCLPKCWDYRCEPPRMALNFLFLGIPKFSTFSALEFVNIFVEYHMTVIPECSNLFMIYLGKFTTVLLFAIIWL

SEQ ID NO: 4774 - protein, 124 aa, Homo Sapiens
MLMLFVFGVLLHEVSLSGQNEAPPNTHSIPGEPLYNYASIRLPEEHIPFFLHNNRHIATVCRKDSLCPYKKHLEKLKYCWGYEKSCKPEFRFGYPVCSYVDMGWTDTLESAEDIFWKQADFGYA

SEQ ID NO: 4775 - protein, 132 aa, Homo Sapiens
MLMLFVFGVLLHEVSLSGQNEAPPNTHSIPGEPLYNYASIRLPEEHIPFFLHNNRHIATVCRKDSLCPYKKHLEKLKYCWGYEKSCKPEFRFGYPVCSYVDMGWTDTLESAEDIFWKQADFGYARERLEEMH

SEQ ID NO: 4776 - protein, 206 aa, Homo Sapiens
MLMLFVFGVLLHEVSLSGQNEAPPNTHSIPGEPLYNYASIRLPEEHIPFFLHNNRHIATVCRKDSLCPYKKHLEKLKYCWGYEKSCKPEFRFGYPVCSYVDMGWTDTLESAEDIFWKQADFGYARERLEEMHVLCQPKETSDSSLVCSRYLQYCRATNLYLDLRNIKRNHDRFKEDFFQSGEIGGHCKLDIRTLTSEGQRKSPLQS

SEQ ID NO: 4777 - protein, 443 aa, Homo Sapiens
MLMLFVFGVLLHEVSLSGQNEAPPNTHSIPGEPLYNYASIRLPEEHIPFFLHNNRHIATVCRKDSLCPYKKHLEKLKYCWGYEKSCKPEFRFGYPVCSYVDMGWTDTLESAEDIFWKQADFGYARERLEEMHVLCQPKETSDSSLVCSRYLQYCRATNLYLDLRNIKRNHDRFKEDFFQSGEIGGHCKLDIRTLTSEGQRKSPLQSWFAELQSYTQLNFRPIEDAKCDIVIEKPTYFMKLDAGVNMYHHFCDFINLYITQHVNNSFSTDVYIVMWDTDGKIRVTILARSTEYRKILNQNELVNALKTVSTFEVQIVDYKYRELGFLDQLRITHNTDIFIGMHGAGLTHLLFLPDWAAVFELYNCEDERCYLDLARLRGVHYITWRRQNKVFPQDKGHHPTLGEHPKFTNYSFDVEEFMYLVLQAADHVLQHPKWPFKKKHDEL

SEQ ID NO: 4778 - protein, 527 aa, Homo Sapiens
MLMLFVFGVLLHEVSLSGQNEAPPNTHSIPGEPLYNYASIRLPEEHIPFFLHNNRHIATVCRKDSLCPYKKHLEKLKYCWGYEKSCKPEFRFGYPVCSYVDMGWTDTLESAEDIFWKQADFGYARERLEEMHVLCQPKETSDSSLVCSRYLQYCRATNLYLDLRNIKRNHDRFKEDFFQSGEIGGHCKLDIRTLTSEGQRKSPLQSWFAELQSYTQLNFRPIEDAKCDIVIEKPTYFMKLDAGVNMYHHFCDFINLYITQHVNNSFSTDVYIVMWDTSSYGYGDLFSDTWNAFTDYDVIHLKTYDSKRVCFKEAVFSLLPRMRYGLFYNTPLISGCQNTGLFRAFAQHVLHRLNITQEGPKDGKIRVTILARSTEYRKILNQNELVNALKTVSTFEVQIVDYKYRELGFLDQLRITHNTDIFIGMHGAGLTHLLFLPDWAAVFELYNCEDERCYLDLARLRGVHYITWRRQNKVFPQDKGHHPTLGEHPKFTNYSFDVEEFMYLVLQAADHVLQHPKWPFKKKHDEL

SEQ ID NO: 4779 - protein, 443 aa, Homo Sapiens; identical to SEQ ID NO: 4777

SEQ ID NO: 4780 - protein, 527 aa, Homo Sapiens; identical to SEQ ID NO: 4778

SEQ ID NO: 4781 - protein, 314 aa, Homo Sapiens
MAPPQVLAFGLLLAAATATFAAAQEECVCENYKLAVNCFVNNNRQCQCTSVGAQNTVICSKLAAKCLVMKAEMNGSKLGRRAKPEGALQNNDGLYDPDCDESGLFKAKQCNGTSMCWCVNTAGVRRTDKDTEITCSERVRTYWIIIELKHKAREKPYDSKSLRTALQKEITTRYQLDPKFITSILYENNVITIDLVQNSSQKTQNDVDIADVAYYFEKDVKGESLFHSKKMDLTVNGEQLDLDPGQTLIYYVDEKAPEFSMQGLKAGVIAVIVVVVIAVVAGIVVLVISRKKRMAKYEKAEIKEMGEMHRELNA

SEQ ID NO: 4782 - protein, 199 aa, Homo Sapiens
MAPPQVLAFGLLLAAATATFAAAQEGEARIGAELWSWAGLGGSGPRPSAPETGIIGRGPRGRAFQRGDRTVRPCSGSGPPRGRKRRGPSRGAASLRSFARLECVCENYKLAVNCFVNNNRQCQCTSVGAQNTVICSKLAAKCLVMKAEMNGSKLGRRAKPEGALQNNDGLYDPDCDESGLFKAKQCNGTSMCWCVNTAG

SEQ ID NO: 4783 - protein, 342 aa, Homo Sapiens
METKHLGRGGAGRAGPHLWRGPRPNCSAGAGGGEPTHSPNSRAVTHQRAPAARECVCENYKLAVNCFVNNNRQCQCTSVGAQNTVICSKLAAKCLVMKAEMNGSKLGRRAKPEGALQNNDGLYDPDCDESGLFKAKQCNGTSMCWCVNTAGVRRTDKDTEITCSERVRTYWIIIELKHKAREKPYDSKSLRTALQKEITTRYQLDPKFITSILYENNVITIDLVQNSSQKTQNDVDIADVAYYFEKDVKGESLFHSKKMDLTVNGEQLDLDPGQTLIYYVDEKAPEFSMQGLKAGVIAVIVVVVIAVVAGIVVLVISRKKRMAKYEKAEIKEMGEMHRELNA

SEQ ID NO: 4784 - protein, 342 aa, Homo Sapiens; identical to SEQ ID NO: 4783

SEQ ID NO: 4785 - protein, 122 aa, Homo Sapiens
MFQIDQATKQCSKMTLTQPWDPLDIPQNSTFEDQYSIGGPQEQITVQEWSDRKSARSYETWIGIYTVKDCYPVQETFTINYSVILSTRFFDIQLGIKDPSVFTPPSTCQMAQLEKMSEDCSW

SEQ ID NO: 4786 - protein, 90 aa, Homo Sapiens
MPGRAPLRTVPGALGAWLLGGLWAWTLCGLCSLGAVGAPRPCQAPQQWEGRQVMYQQSSGRNSRALLSYDGLNQRVRVLDERKALIPCKR

SEQ ID NO: 4787 - protein, 224 aa, Homo Sapiens
MPGRAPLRTVPGALGAWLLGGLWAWTLCGLCSLGAVGAPRPCQAPQQWEGRQVMYQQSSGRNSRALLSYDGLNQRVRVLDERKALIPCKRLFEYILLYKDGVMFQIDQATKQCSKMTLTQPWDPLDIPQNSTFEDQYSIGGPQEQITVQEWSDRKSARSYETWIGIYTVKDCYPVQETFTINYSVILSTRFFDIQLGIKDPSVFTPPSTCQMAQLEKMSEDCSW

SEQ ID NO: 4788 - protein, 163 aa, Homo Sapiens
MVRDWEGRCAHRGRPAGGGLSNTQRGGGRLFEYILLYKDGVMFQIDQATKQCSKMTLTQPWDPLDIPQNSTFEDQYSIGGPQEQITVQEWSDRKSARSYETWIGIYTVKDCYPVQETFTINYSVILSTRFFDIQLGIKDPSVFTPPSTCQMAQLEKMSEDCSW

SEQ ID NO: 4789 - protein, 73 aa, Homo Sapiens
MALGVPISVYLLFNADNIEGPIALKFSHLCLEDHNSYCINGACAFHHELEKAICRCLKLKSPYNVCSGERRPL

SEQ ID NO: 4790 - protein, 133 aa, Homo Sapiens
MALGVPISVYLLFNAMTALTEEAAVTVTPPITAQQADNIEGPIALKFSHLCLEDHNSYCINGACAFHHELEKAICRCFTGYTGERCEHLTLTSYAVDSYEKYIAIGIGVGLLLSGFLVIFYCYIRKRYEKDKI

SEQ ID NO: 4791 - protein, 103 aa, Homo Sapiens
MALGVPISVYLLFNAMTALTEEAAVTVTPPITAQQADNIEGPIALKFSHLCLEDHNSYCINGACAFHHELEKAICRCFTGYTGERCLKLKSPYNVCSGERRPL

SEQ ID NO: 4792 - protein, 94 aa, Homo Sapiens
MALGVPISVYLLFNAMTALTEEAAVTVTPPITAQQADNIEGPIALKFSHLCLEDHNSYCINGACAFHHELEKAICRCLKLKSPYNVCSGERRPL

SEQ ID NO: 4793 - protein, 94 aa, Homo Sapiens
MALGVPISVYLLFNAMTALTEEAAVTVTPPITAQQGNWTVNKTEADNIEGPIALKFSHLCLEDHNSYCINGACAFHHELEKAICRCFTGYTGER

SEQ ID NO: 4794 - protein, 154 aa, Homo Sapiens
MALGVPISVYLLFNAMTALTEEAAVTVTPPITAQQGNWTVNKTEADNIEGPIALKFSHLCLEDHNSYCINGACAFHHELEKAICRCFTGYTGERCEHLTLTSYAVDSYEKYIAIGIGVGLLLSGFLVIFYCYIRKRCLKLKSPYNVCSGERRPL

SEQ ID NO: 4795 - protein, 112 aa, Homo Sapiens
MALGVPISVYLLFNAMTALTEEAAVTVTPPITAQQGNWTVNKTEADNIEGPIALKFSHLCLEDHNSYCINGACAFHHELEKAICRCFTGYTGERCLKLKSPYNVCSGERRPL

SEQ ID NO: 4796 - protein, 103 aa, Homo Sapiens
MALGVPISVYLLFNAMTALTEEAAVTVTPPITAQQGNWTVNKTEADNIEGPIALKFSHLCLEDHNSYCINGACAFHHELEKAICRCLKLKSPYNVCSGERRPL

SEQ ID NO: 4797 - protein, 130 aa, Homo Sapiens
  misc_feature (1)..(1): Xaa can be any naturally occurring amino acid
XTALTEEAAVTVTPPITAQQADNIEGPIALKFSHLCLEDHNSYCINGACAFHHELEKAICRCFTGYTGERCEHLTLTSYAVDSYEKYIAIGIGVGLLLSGFLVIFYCYIRKRCLKLKSPYNVCSGERRPL

SEQ ID NO: 4798 - protein, 218 aa, Homo Sapiens
AQVTVSTGPGAPWEEDEIRRDRVEPQSVSLSWREPIPAGAPGANDTEYEIRYYEKGQSEQTYSMVKTGAPTVTVTNLKPATRYVFQIRAASPGPSWEAQSFNPSIEVQTLGEAASGSRDQSPAIVVTVVTISALLVLGSVMSVLAIWRRPCSYGKGGGDAHDEEELYFHFKVPTRRTFLDPQSCGDLLQAVHLFAKELDAKSVTLERSLGGGLETSPH

SEQ ID NO: 4799 - protein, 392 aa, Homo Sapiens
EQTYSMVKTGAPTVTVTNLKPATRYVFQIRAASPGPSWEAQSFNPSIEVQTLGEAASGSRDQSPAIVVTVVTISALLVLGSVMSVLAIWRRPCSYGKGGGDAHDEEELYFHFKVPTRRTFLDPQSCGDLLQAVHLFAKELDAKSVTLERSLGGGRFGELCCGCLQLPGRQELLVAVHMLRDSASDSQRLGFLAEALTLGQFDHSHIVRLEGVVTRGSTLMIVTEYMSHGALDGFLRRHEGQLVAGQLMGLLPGLASAMKYLSEMGYVHRGLAARHVLVSSDLVCKISGFGRGPRDRSEAVYTTMSGRSPALWAAPETLQFGHFSSASDVWSFGIIMWEVMAFGERPYWDMSGQDVIKAVEDGFRLPPPRNCPNLLHRLMLDCWQKDPGLPPH

SEQ ID NO: 4800 - protein, 295 aa, Homo Sapiens
METCAGPHPLRLFLCRMQLCLALLLGPWRPGTAEEVILLDSKASQAELGWTALPSNGWEEISGVDEHDRPIRTYQVCNVLEPNQDNWLQTGWISRGRGQRIFVELQFTLRDCSSIPGAAGTCKETFNVYYLETEADLGRGRPRLGGSRPRKIDTIAADESFTQGDLGERKMKLNTEVREIGPLSRRGFHLAFQDVGACVALVSVRVYYKQCRATVRGLATFPATAAESAFSTLVEVAGTCVAHSEGEPGSPPRMHCGADGEWLVPVGRCSCSAGFQERGDFCEGIQLAGGRGVGV

SEQ ID NO: 4801 - protein, 1008 aa, Homo Sapiens
METCAGPHPLRLFLCRMQLCLALLLGPWRPGTAEEVILLDSKASQAELGWTALPSNGWEEISGVDEHDRPIRTYQVCNVLEPNQDNWLQTGWISRGRGQRIFVELQFTLRDCSSIPGAAGTCKETFNVYYLETEADLGRGRPRLGGSRPRKIDTIAADESFTQGDLGERKMKLNTEVREIGPLSRRGFHLAFQDVGACVALVSVRVYYKQCRATVRGLATFPATAAESAFSTLVEVAGTCVAHSEGEPGSPPRMHCGADGEWLVPVGRCSCSAGFQERGDFCEACPPGFYKVSPRRPLCSPCPEHSRALENASTFCVCQDSYARSPTDPPSASCTRPPSAPRDLQYSLSRSPLVLRLRWLPPADSGGRSDVTYSLLCLRCGREGPAGACEPCGPRVAFLPRQAGLRERAATLLHLRPGARYTVRVAALNGVSGPAAAAGTTYAQVTVSTGPGAPWEEDEIRRDRVEPQSVSLSWREPIPAGAPGANDTEYEIRYYEKGQSEQTYSMVKTGAPTVTVTNLKPATRYVFQIRAASPGPSWEAQSFNPSIEVQTLGEAASGSRDQSPAIVVTVVTISALLVLGSVMSVLAIWRRPCSYGKGGGDAHDEEELYFHFKVPTRRTFLDPQSCGDLLQAVHLFAKELDAKSVTLERSLGGGRFGELCCGCLQLPGRQELLVAVHMLRDSASDSQRLGFLAEALTLGQFDHSHIVRLEGVVTRGSTLMIVTEYMSHGALDGFLRRHEGQLVAGQLMGLLPGLASAMKYLSEMGYVHRGLAARHVLVSSDLVCKISGFGRGPRDRSEAVYTTMSGRSPALWAAPETLQFGHFSSASDVWSFGIIMWEVMAFGERPYWDMSGQDVIKAVEDGFRLPPPRNCPNLLHRLMLDCWQKDPGERPRFSQIHSILSKMVQDPEPPKCALTTCPRPPTPLADRAFSTFPSFGSVGAWLEALDLCRYKDSFAAAGYGSLEAVAEMTAQDLVSLGISLAEHREALLSGISALQARVLQLQGQGVQV

SEQ ID NO: 4802 - protein, 1014 aa, Homo Sapiens
METCAGPHPLRLFLCRMQLCLALLLGPWRPGTAEEVILLDSKASQAELGWTALPSNGWEEISGVDEHDRPIRTYQVCNVLEPNQDNWLQTGWISRGRGQRIFVELQFTLRDCSSIPGAAGTCKETFNVYYLETEADLGRGRPRLGGSRPRKIDTIAADESFTQGDLGERKMKLNTEVREIGPLSRRGFHLAFQDVGACVALVSVRVYYKQCRATVRGLATFPATAAESAFSTLVEVAGTCVAHSEGEPGSPPRMHCGADGEWLVPVGRCSCSAGFQERGDFCEACPPGFYKVSPRRPLCSPCPEHSRALENASTFCVCQDSYARSPTDPPSASCTRPPSAPRDLQYSLSRSPLVLRLRWLPPADSGGRSDVTYSLLCLRCGREGPAGACEPCGPRVAFLPRQAGLRERAATLLHLRPGARYTVRVAALNGVSGPAAAAGTTYAQVTVSTGPGAPWEEDEIRRDRVEPQSVSLSWREPIPAGAPGANDTEYEIRYYEKGQSEQTYSMVKTGAPTVTVTNLKPATRYVFQIRAASPGPSWEAQSFNPSIEVQTLGEAASGSRDQSPAIVVTVVTISALLVLGSVMSVLAIWRRPCSYGKGGGDAHDEEELYFHFKVPTRRTFLDPQSCGDLLQAVHLFAKELDAKSVTLERSLGGGRFGELCCGCLQLPGRQELLVAVHMLRDSASDSQRLGFLAEALTLGQFDHSHIVRLEGVVTRGSTLMIVTEYMSHGALDGFLRRHEGQLVAGQLMGLLPGLASAMKYLSEMGYVHRGLAARHVLVSSDLVCKISGFGRGPRDRSEAVYTTMSGRSPALWAAPETLQFGHFSSASDVWSFGIIMWEVMAFGERPYWDMSGQDVIKAVEDGFRLPPPRNCPNLLHRLMLDCWQKDPGERPRFSQIHSILSKMVQDPEPPKCALTTCPRPPTPLADRAFSTFPSFGSVGAWLEALDLCRYKDSFAAAGYGSLEAVAEMTAQDLVSLGISLAEHREALLSGISALQARVLQLQGQGVQVIIKTCL

SEQ ID NO: 4803 - protein, 155 aa, Homo Sapiens
MVKTGAPTVTVTNLKPATRYVFQIRAASPGPSWEAQSFNPSIEVQTLGEAASGSRDQSPAIVVTVVTISALLVLGSVMSVLAIWRRPCSYGKGGGDAHDEEELYFHFKVPTRRTFLDPQSCGDLLQAVHLFAKELDAKSVTLERSLGGGLETSPH

SEQ ID NO: 4804 - protein, 92 aa, Homo Sapiens
  misc_feature (1)..(1): Xaa can be any naturally occurring amino acid
XHLRPGARYTVRVAALNGVSGPAAAAGTTYAQVTVSTGPGAPWEEDEIRRDRVEPQSVSLSWREPIPAGAPGANDTEYEIRYYEKDTCADFC

SEQ ID NO: 4805 - protein, 217 aa, Homo Sapiens
  misc_feature (1)..(1): Xaa can be any naturally occurring amino acid
XQIRAASPGPSWEAQSFNPSIEVQTLGEAASGSRDQSPAIVVTVVTISALLVLGSVMSVLAIWRRPCSYGKGGGDAHDEEELYFHFKVPTRRTFLDPQSCGDLLQAVHLFAKELDAKSVTLERSLGGGLCSCLEALPPHQAHPPPRKSLACLIIGKRMAEGSVTLSWSSRAVWGAVLWLLAAPRSPGAARSRAYAEGQRLRLTEARLPGRGPHAGPV

SEQ ID NO: 4806 - protein, 983 aa, Homo Sapiens
MDCQLSILLLLSCSVLDSFGELIPQPSNEVNLLDSKTIQGELGWISYPSHGWEEISGVDEHYTPIRTYQVCNVMDHSQNNWLRTNWVPRNSAQKIYVELKFTLRDCNSIPLVLGTCKETFNLYYMESDDDHGVKFREHQFTKIDTIAADESFTQMDLGDRILKLNTEIREVGPVNKKGFYLAFQDVGACVALVSVRVYFKKCPFTVKNLAMFPDTVPMDSQSLVEVRGSCVNNSKEEDPPRMYCSTEGEWLVPIGKCSCNAGYEERGFMCQACRPGFYKALDGNMKCAKCPPHSSTQEDGSMNCRCENNYFRADKDPPSMACTRPPSSPRNVISNINETSVILDWSWPLDTGGRKDVTFNIICKKCGWNIKQCEPCSPNVRFLPRQFGLTNTTVTVTDLLAHTNYTFEIDAVNGVSELSSPPRQFAAVSITTNQAAPSPVLTIKKDRTSRNSISLSWQEPEHPNGIILDYEVKYYEKQEQETSYTILRARGTNVTISSLKPDTIYVFQIRARTAAGYGTNSRKFEFETSPDSFSISGESSQVVMIAISAAVAIILLTVVIYVLIGRFCGYKSKHGADEKRLHFGNGHLKLPGLRTYVDPHTYEDPTQAVHEFAKELDATNISIDKVVGAGEFGEVCSGRLKLPSKKEISVAIKTLKVGYTEKQRRDFLGEASIMGQFDHPNIIRLEGVVTKSKPVMIVTEYMENGSLDSFLRKHDAQFTVIQLVGMLRGIASGMKYLSDMGYVHRDLAARNILINSNLVCKVSDFGLSRVLEDDPEAAYTTRGGKIPIRWTSPEAIAYRKFTSASDVWSYGIVLWEVMSYGERPYWEMSNQDVIKAVDEGYRLPPPMDCPAALYQLMLDCWQKDRNNRPKFEQIVSILDKLIRNPGSLKIITSAAARPSNLLLDQSNVDITTFRTTGDWLNGVWTAHCKEIFTGVEYSSCDTIAKISTDDMKKVGVTVVGPQKKIISSIKALETQSKNGPVPV

SEQ ID NO: 4807 - protein, 918 aa, Homo Sapiens
MDCQLSILLLLSCSVLDSFGELIPQPSNEVNLLDSKTIQGELGWISYPSHGWEEISGVDEHYTPIRTYQVCNVMDHSQNNWLRTNWVPRNSAQKIYVELKFTLRDCNSIPLVLGTCKETFNLYYMESDDDHGVKFREHQFTKIDTIAADESFTQMDLGDRILKLNTEIREVGPVNKKGFYLAFQDVGACVALVSVRVYFKKCPFTVKNLAMFPDTVPMDSQSLVEVRGSCVNNSKEEDPPRMYCSTEGEWLVPIGKCSCNAGYEERGFMCQACRPGFYKALDGNMKCAKCPPHSSTQEDGSMNCRCENNYFRADKDPPSMACTRPPSSPRNVISNINETSVILDWSWPLDTGGRKDVTFNIICKKCGWNIKQCEPCSPNVRFLPRQFGLTNTTVTVTDLLAHTNYTFEIDAVNGVSELSSPPRQFAAVSITTNQAAPSPVLTIKKDRTSRNSISLSWQEPEHPNGIILDYEVKYYEKQEQETSYTILRARGTNVTISSLKPDTIYVFQIRARTAAGYGTNSRKFEFETSPDSFSISGESSQVVMIAISAAVAIILLTVVIYVLIGRFCGYKSKHGADEKRLHFGNGHLKLPGLRTYVDPHTYEDPTQAVHEFAKELDATNISIDKVVGAGEFGEVCSGRLKLPSKKEISVAIKTLKVGYTEKQRRDFLGEASIMGQFDHPNIIRLEGVVTKSKPVMIVTEYMENGSLDSFLRKHDAQFTVIQLVGMLRGIASGMKYLSDMGYVHRDLAARNILINSNLVCKVSDFGLSRVLEDDPEAAYTTRGGKIPIRWTSPEAIAYRKFTSASDVWSYGIVLWEVMSYGERPYWEMSNQDVIKAVDEGYRLPPPMDCPAALYQLMLDCWQKDRNNRPKFEQIVSILDKLIRNPGSLKIITSAAARPSNLLLDQSNVDITTFRTTVT

SEQ ID NO: 4808 - protein, 539 aa, Homo Sapiens
MDCQLSILLLLSCSVLDSFGELIPQPSNEVNLLDSKTIQGELGWISYPSHGWEEISGVDEHYTPIRTYQVCNVMDHSQNNWLRTNWVPRNSAQKIYVELKFTLRDCNSIPLVLGTCKETFNLYYMESDDDHGVKFREHQFTKIDTIAADESFTQMDLGDRILKLNTEIREVGPVNKKGFYLAFQDVGACVALVSVRVYFKKCPFTVKNLAMFPDTVPMDSQSLVEVRGSCVNNSKEEDPPRMYCSTEGEWLVPIGKCSCNAGYEERGFMCQACRPGFYKALDGNMKCAKCPPHSSTQEDGSMNCRCENNYFRADKDPPSMACTRPPSSPRNVISNINETSVILDWSWPLDTGGRKDVTFNIICKKCGWNIKQCEPCSPNVRFLPRQFGLTNTTVTVTDLLAHTNYTFEIDAVNGVSELSSPPRQFAAVSITTNQAAPSPVLTIKKDRTSRNSISLSWQEPEHPNGIILDYEVKYYEKQEQETSYTILRARGTNVTISSLKPDTIYVFQIRARTAAGYGTNSRKFEFETSPDCMYYFNAV

SEQ ID NO: 4809 - protein, 37 aa, Homo Sapiens
AYRKFTSASDVWSYGIVMWEVMSYGERPYWDMSNQDT

SEQ ID NO: 4810 - protein, 177 aa, Homo Sapiens
MAGIFYFALFSCLFGICDAVTGSRVYPANEGPPSAPLNLISNVNETSVNLEWSSPQNTGGRQDISYNVVCKKCGAGDPSKCRPCGSGVHYTPQQNGLKTTKVSITDLLAHTNYTFEIWAVNGVSKYNPNPDQSVSVTVTTNQAAPSSIALVQAKEVTRYSVALAWLEPDRPNGVILE

SEQ ID NO: 4811 - protein, 38 aa, Homo Sapiens
MAGIFYFALFSCLFGICDAVTGSRVYPANEVGGSEYHG

SEQ ID NO: 4812 - protein, 91 aa, Homo Sapiens
MAGIFYFALFSCLFGICDAVTGSRVYPANEVTLLDSRSVQGELGWIASPLEGGWEEVSIMDEKNTPIRTYQVCNVMEPSQNNWLRTDWITR

SEQ ID NO: 4813 - protein, 149 aa, Homo Sapiens
MAGIFYFALFSCLFGICDAVTGSRVYPANEVTLLDSRSVQGELGWIASPLEGGWEEVSIMDEKNTPIRTYQVCNVMEPSQNNWLRTDWITREGAQRVYIEIKFTLRDCNSLPGVMGTCKETFNLYYYESDNDKERFIRENQFVKIDTIA

SEQ ID NO: 4814 - protein, 986 aa, Homo Sapiens
MAGIFYFALFSCLFGICDAVTGSRVYPANEVTLLDSRSVQGELGWIASPLEGGWEEVSIMDEKNTPIRTYQVCNVMEPSQNNWLRTDWITREGAQRVYIEIKFTLRDCNSLPGVMGTCKETFNLYYYESDNDKERFIRENQFVKIDTIAADESFTQVDIGDRIMKLNTEIRDVGPLSKKGFYLAFQDVGACIALVSVRVFYKKCPLTVRNLAQFPDTITGADTSSLVEVRGSCVNNSEEKDVPKMYCGADGEWLVPIGNCLCNAGHEERSGECQACKIGYYKALSTDATCAKCPPHSYSVWEGATSCTCDRGFFRADNDAASMPCTRPPSAPLNLISNVNETSVNLEWSSPQNTGGRQDISYNVVCKKCGAGDPSKCRPCGSGVHYTPQQNGLKTTKVSITDLLAHTNYTFEIWAVNGVSKYNPNPDQSVSVTVTTNQAAPSSIALVQAKEVTRYSVALAWLEPDRPNGVILEYEVKYYEKDQNERSYRIVRTAARNTDIKGLNPLTSYVFHVRARTAAGYGDFSEPLEVTTNTVPSRIIGDGANSTVLLVSVSGSVVLVVILIAAFVISRRRSKYSKAKQEADEEKHLNQGVRTYVDPFTYEDPNQAVREFAKEIDASCIKIEKVIGVGEFGEVCSGRLKVPGKREICVAIKTLKAGYTDKQRRDFLSEASIMGQFDHPNIIHLEGVVTKCKPVMIITEYMENGSLDAFLRKNDGRFTVIQLVGMLRGIGSGMKYLSDMSYVHRDLAARNILVNSNLVCKVSDFGMSRVLEDDPEAAYTTRGGKIPIRWTAPEAIAYRKFTSASDVWSYGIVMWEVMSYGERPYWDMSNQDVIKAIEEGYRLPPPMDCPIALHQLMLDCWQKERSDRPKFGQIVNMLDKLIRNPNSLKRTGTESSRPNTALLDPSSPEFSAVVSVGDWLQAIKMDRYKDNFTAAGYTTLEAVVHVNQEDLARIGITAITHQNKILSSVQAMRTQMQQMHGRMVPV

SEQ ID NO: 4815 - protein, 986 aa, Homo Sapiens; identical to SEQ ID NO: 4814

SEQ ID NO: 4816 - protein, 949 aa, Homo Sapiens
MAGIFYFALFSCLFGICDAVTGSRVYPANEVTLLDSRSVQGELGWIASPLEGGWEEVSIMDEKNTPIRTYQVCNVMEPSQNNWLRTDWITREGAQRVYIEIKFTLRDCNSLPGVMGTCKETFNLYYYESDNDKERFIRENQFVKIDTIAADESFTQVDIGDRIMKLNTEIRDVGPLSKKGFYLAFQDVGACIALVSVRVFYKKCPLTVRNLAQFPDTITGADTSSLVEVRGSCVNNSEEKDVPKMYCGADGEWLVPIGNCLCNAGHEERSGECQACKIGYYKALSTDATCAKCPPHSYSVWEGATSCTCDRGFFRADNDAASMPCTRPPSAPLNLISNVNETSVNLEWSSPQNTGGRQDISYNVVCKKCGAGDPSKCRPCGSGVHYTPQQNGLKTTKVSITDLLAHTNYTFEIWAVNGVSKYNPNPDQSVSVTVTTNQAAPSSIALVQAKEVTRYSVALAWLEPDRPNGVILEYEVKYYEKDQNERSYRIVRTAARNTDIKGLNPLTSYVFHVRARTAAGYGDFSEPLEVTTNTVPSRIIGDGANSTVLLVSVSGSVVLVVILIAAFVISRRRSKYSKAKQEADEEKHLNQGVRTYVDPFTYEDPNQAVREFAKEIDASCIKIEKVIGVGEFGEVCSGRLKVPGKREICVAIKTLKAGYTDKQRRDFLSEASIMGQFDHPNIIHLEGVVTKCKPVMIITEYMENGSLDAFLRKNDGRFTVIQLVGMLRGIGSGMKYLSDMSYVHRDLAARNILVNSNLVCKVSDFGMSRVLEDDPEAAYTTRGGKIPIRWTAPEAIAYRKFTSASDVWSYGIVMWEVMSYGERPYWDMSNQDVIKAIEEGYRLPPPMDCPIALHQLMLDCWQKERSDRPKFGQIVNMLDKLIRNPNSLKRTGTESSRPNTALLDPSSPEFSAVVSVGDWLQAIKMDRYKDNFTAAGYTTLEAVVHVNQE

SEQ ID NO: 4817 - protein, 126 aa, Homo Sapiens
MDEKNTPIRTYQVCNVMEPSQNNWLRTDWITREGAQRVYIEIKFTLRDCNSLPGVMGTCKETFNLYYYESDNDKERFIRENQFVKIDTIAADESFTQVDIGDRIMKLNTEIRDVGPLSKKGFYLAF

SEQ ID NO: 4818 - protein, 189 aa, Homo Sapiens
  misc_feature (1)..(1): Xaa can be any naturally occurring amino acid
XFHGSLSSTHFTCKIGYYKALSTDATCAKCPPHSYSVWEGATSCTCDRGFFRADNDAASMPCTRPPSAPLNLISNVNETSVNLEWSSPQNTGGRQDISYNVVCKKCGAGDPSKCRPCGSGVHYTPQQNGLKTTKVSITDLLAHTNYTFEIWAVNGVSKYNPNPDQSVSVTVTTNQAAPSSIALVQAKEV

SEQ ID NO: 4819 - protein, 279 aa, Homo Sapiens
MVFQTRYPSWIILCYIWLLRFAHTGEAQAAKEVLLLDSKAQQTELEWISSPPNGWEEISGLDENYTPIRTYQVCQVMEPNQNNWLRTNWISKGNAQRIFVELKFTLRDCNSLPGVLGTCKETFNLYYYETDYDTGRNIRENLYVKIDTIAADESFTQGDLGERKMKLNTEVREIGPLSKKGFYLAFQDVGACIALVSVKVYYKKCWSIIENLAIFPDTVTGSEFSSLVEVRGTCVSSAEEEAENAPRMHCSAEGEWLVPIGKCICKAGYQQKGDTCERK

SEQ ID NO: 4820 - protein, 998 aa, Homo Sapiens
MVFQTRYPSWIILCYIWLLRFAHTGEAQAAKEVLLLDSKAQQTELEWISSPPNGWEEISGLDENYTPIRTYQVCQVMEPNQNNWLRTNWISKGNAQRIFVELKFTLRDCNSLPGVLGTCKETFNLYYYETDYDTGRNIRENLYVKIDTIAADESFTQGDLGERKMKLNTEVREIGPLSKKGFYLAFQDVGACIALVSVKVYYKKCWSIIENLAIFPDTVTGSEFSSLVEVRGTCVSSAEEEAENAPRMHCSAEGEWLVPIGKCICKAGYQQKGDTCEPCGRGFYKSSSQDLQCSRCPTHSFSDKEGSSRCECEDGYYRAPSDPPYVACTRPPSAPQNLIFNINQTTVSLEWSPPADNGGRNDVTYRILCKRCSWEQGECVPCGSNIGYMPQQTGLEDNYVTVMDLLAHANYTFEVEAVNGVSDLSRSQRLFAAVSITTGQAAPSQVSGVMKERVLQRSVELSWQEPEHPNGVITEYEIKYYEKDQRERTYSTVKTKSTSASINNLKPGTVYVFQIRAFTAAGYGNYSPRLDVATLEEATGKMFEATAVSSEQNPVIIIAVVAVAGTIILVFMVFGFIIGRRHCGYSKADQEGDEELYFHFKFPGTKTYIDPETYEDPNRAVHQFAKELDASCIKIERVIGAGEFGEVCSGRLKLPGKRDVAVAIKTLKVGYTEKQRRDFLCEASIMGQFDHPNVVHLEGVVTRGKPVMIVIEFMENGALDAFLRKHDGQFTVIQLVGMLRGIAAGMRYLADMGYVHRDLAARNILVNSNLVCKVSDFGLSRVIEDDPEAVYTTTGGKIPVRWTAPEAIQYRKFTSASDVWSYGIVMWEVMSYGERPYWDMSNQDVIKAIEEGYRLPAPMDCPAGLHQLMLDCWQKERAERPKFEQIVGILDKMIRNPNSLKTPLGTCSRPISPLLDQNTPDFTTFCSVGEWLQAIKMERYKDNFTAAGYNSLESVARMTIEDVMSLGITLVGHQKKIMSSIQTMRAQMLHLHGTGIQV

SEQ ID NO: 4821 - protein, 1005 aa, Homo Sapiens
MAPARGRLPPALWVVTAAAAAATCVSAARGEVNLLDTSTIHGDWGWLTYPAHGWDSINEVDESFQPIHTYQVCNVMSPNQNNWLRTSWVPRDGARRVYAEIKFTLRDCNSMPGVLGTCKETFNLYYLESDRDLGASTQESQFLKIDTIAADESFTGADLGVRRLKLNTEVRSVGPLSKRGFYLAFQDIGACLAILSLRIYYKKCPAMVRNLAAFSEAVTGADSSSLVEVRGQCVRHSEERDTPKMYCSAEGEWLVPIGKCVCSAGYEERRDACVACELGFYKSAPGDQLCARCPPHSHSAAPAAQACHCDLSYYRAALDPPSSACTRPPSAPVNLISSVNGTSVTLEWAPPLDPGGRSDITYNAVCRRCPWALSRCEACGSGTRFVPQQTSLVQASLLVANLLAHMNYSFWIEAVNGVSDLSPEPRRAAVVNITTNQAAPSQVVVIRQERAGQTSVSLLWQEPEQPNGIILEYEIKYYEKDKEMQSYSTLKAVTTRATVSGLKPGTRYVFQVRARTSAGCGRFSQAMEVETGKPRPRYDTRTIVWICLTLITGLVVLLLLLICKKRHCGYSKAFQDSDEEKMHYQNGQAPPPVFLPLHHPPGKLPEPQFYAEPHTYEEPGRAGRSFTREIEASRIHIEKIIGSGDSGEVCYGRLRVPGQRDVPVAIKALKAGYTERQRRDFLSEASIMGQFDHPNIIRLEGVVTRGRLAMIVTEYMENGSLDTFLRTHDGQFTIMQLVGMLRGVGAGMRYLSDLGYVHRDLAARNVLVDSNLVCKVSDFGLSRVLEDDPDAAYTTTGGKIPIRWTAPEAIAFRTFSSASDVWSFGVVMWEVLAYGERPYWNMTNRDVISSVEEGYRLPAPMGCPHALHQLMLDCWHKDRAQRPRFSQIVSVLDALIRSPESLRATATVSRCPPPAFVRSCFDLRGGSGGGGGLTVGDWLDSIRMGRYRDHFAAGGYSSLGMVLRMNAQDVRALGITLMGHQKKILGSIQTMRAQLTSTQGPRRHL

SEQ ID NO: 4822 - protein, 495 aa, Homo Sapiens
MAPARGRLPPALWVVTAAAAAATCVSAARGEVNLLDTSTIHGDWGWLTYPAHGWDSINEVDESFQPIHTYQVCNVMSPNQNNWLRTSWVPRDGARRVYAEIKFTLRDCNSMPGVLGTCKETFNLYYLESDRDLGASTQESQFLKIDTIAADESFTGADLGVRRLKLNTEVRSVGPLSKRGFYLAFQDIGACLAILSLRIYYKKCPAMVRNLAAFSEAVTGADSSSLVEVRGQCVRHSEERDTPKMYCSAEGEWLVPIGKCVCSAGYEERRDACVACELGFYKSAPGDQLCARCPPHSHSAAPAAQACHCDLSYYRAALDPPSSACTRPPSAPVNLISSVNGTSVTLEWAPPLDPGGRSDITYNAVCRRCPWALSRCEACGSGTRFVPQQTSLVQASLLVANLLAHMNYSFWIEAVNGVSDLSPEPRRAAVVNITTNQAGRRRNSVPQRPGPPASPASDPSRDQSSAGDVLWAFRQVPLWPCAPHQDPELEALHCL

SEQ ID NO: 4823 - protein, 986 aa, Homo Sapiens
MALRRLGAALLLLPLLAAVEETLMDSTTATAELGWMVHPPSGWEEVSGYDENMNTIRTYQVCNVFESSQNNWLRTKFIRRRGAHRIHVEMKFSVRDCSSIPSVPGSCKETFNLYYYEADFDSATKTFPNWMENPWVKVDTIAADESFSQVDLGGRVMKINTEVRSFGPVSRSGFYLAFQDYGGCMSLIAVRVFYRKCPRIIQNGAIFQETLSGAESTSLVAARGSCIANAEEVDVPIKLYCNGDGEWLVPIGRCMCKAGFEAVENGTVCRGCPSGTFKANQGDEACTHCPINSRTTSEGATNCVCRNGYYRADLDPLDMPCTTIPSAPQAVISSVNETSLMLEWTPPRDSGGREDLVYNIICKSCGSGRGACTRCGDNVQYAPRQLGLTEPRIYISDLLAHTQYTFEIQAVNGVTDQSPFSPQFASVNITTNQAAPSAVSIMHQVSRTVDSITLSWSQPDQPNGVILDYELQYYEKELSEYNATAIKSPTNTVTVQGLKAGAIYVFQVRARTVAGYGRYSGKMYFQTMTEAEYQTSIQEKLPLIIGSSAAGLVFLIAVVVIAIVCNRRGFERADSEYTDKLQHYTSGHMTPGMKIYIDPFTYEDPNEAVREFAKEIDISCVKIEQVIGAGEFGEVCSGHLKLPGKREIFVAIKTLKSGYTEKQRRDFLSEASIMGQFDHPNVIHLEGVVTKSTPVMIITEFMENGSLDSFLRQNDGQFTVIQLVGMLRGIAAGMKYLADMNYVHRDLAARNILVNSNLVCKVSDFGLSRFLEDDTSDPTYTSALGGKIPIRWTAPEAIQYRKFTSASDVWSYGIVMWEVMSYGERPYWDMTNQDVINAIEQDYRLPPPMDCPSALHQLMLDCWQKDRNHRPKFGQIVNTLDKMIRNPNSLKAMAPLSSGINLPLLDRTIPDYTSFNTVDEWLEAIKMGQYKESFANAGFTSFDVVSQMMMEDILRVGVTLAGHQKKILNSIQVMRAQMNQIQSVEV

SEQ ID NO: 4824 - protein, 1055 aa, Homo Sapiens
MALRRLGAALLLLPLLAAVEETLMDSTTATAELGWMVHPPSGWEEVSGYDENMNTIRTYQVCNVFESSQNNWLRTKFIRRRGAHRIHVEMKFSVRDCSSIPSVPGSCKETFNLYYYEADFDSATKTFPNWMENPWVKVDTIAADESFSQVDLGGRVMKINTEVRSFGPVSRSGFYLAFQDYGGCMSLIAVRVFYRKCPRIIQNGAIFQETLSGAESTSLVAARGSCIANAEEVDVPIKLYCNGDGEWLVPIGRCMCKAGFEAVENGTVCRGCPSGTFKANQGDEACTHCPINSRTTSEGATNCVCRNGYYRADLDPLDMPCTTIPSAPQAVISSVNETSLMLEWTPPRDSGGREDLVYNIICKSCGSGRGACTRCGDNVQYAPRQLGLTEPRIYISDLLAHTQYTFEIQAVNGVTDQSPFSPQFASVNITTNQAAPSAVSIMHQVSRTVDSITLSWSQPDQPNGVILDYELQYYEKELSEYNATAIKSPTNTVTVQGLKAGAIYVFQVRARTVAGYGRYSGKMYFQTMTEAEYQTSIQEKLPLIIGSSAAGLVFLIAVVVIAIVCNRRGFERADSEYTDKLQHYTSGHMTPGMKIYIDPFTYEDPNEAVREFAKEIDISCVKIEQVIGAGEFGEVCSGHLKLPGKREIFVAIKTLKSGYTEKQRRDFLSEASIMGQFDHPNVIHLEGVVTKSTPVMIITEFMENGSLDSFLRQNDGQFTVIQLVGMLRGIAAGMKYLADMNYVHRDLAARNILVNSNLVCKVSDFGLSRFLEDDTSDPTYTSALGGKIPIRWTAPEAIQYRKFTSASDVWSYGIVMWEVMSYGERPYWDMTNQDVINAIEQDYRLPPPMDCPSALHQLMLDCWQKDRNHRPKFGQIVNTLDKMIRNPNSLKAMAPLSSGINLPLLDRTIPDYTSFNTVDEWLEAIKMGQYKESFANAGFTSFDVVSQMMMEDILRVGVTLAGHQKKILNSIQVMRAQMNQIQSVEGQPLARRPRATGRTKRCQPRDVTKKTCNSNDGKKKGMGKKKTDPGRGREIQGIFFKEDSHKESNDCSCGG

SEQ ID NO: 4825 - protein, 987 aa, Homo Sapiens
MALRRLGAALLLLPLLAAVEETLMDSTTATAELGWMVHPPSGWEEVSGYDENMNTIRTYQVCNVFESSQNNWLRTKFIRRRGAHRIHVEMKFSVRDCSSIPSVPGSCKETFNLYYYEADFDSATKTFPNWMENPWVKVDTIAADESFSQVDLGGRVMKINTEVRSFGPVSRSGFYLAFQDYGGCMSLIAVRVFYRKCPRIIQNGAIFQETLSGAESTSLVAARGSCIANAEEVDVPIKLYCNGDGEWLVPIGRCMCKAGFEAVENGTVCRGCPSGTFKANQGDEACTHCPINSRTTSEGATNCVCRNGYYRADLDPLDMPCTTIPSAPQAVISSVNETSLMLEWTPPRDSGGREDLVYNIICKSCGSGRGACTRCGDNVQYAPRQLGLTEPRIYISDLLAHTQYTFEIQAVNGVTDQSPFSPQFASVNITTNQAAPSAVSIMHQVSRTVDSITLSWSQPDQPNGVILDYELQYYEKELSEYNATAIKSPTNTVTVQGLKAGAIYVFQVRARTVAGYGRYSGKMYFQTMTEAEYQTSIQEKLPLIIGSSAAGLVFLIAVVVIAIVCNRRRGFERADSEYTDKLQHYTSGHMTPGMKIYIDPFTYEDPNEAVREFAKEIDISCVKIEQVIGAGEFGEVCSGHLKLPGKREIFVAIKTLKSGYTEKQRRDFLSEASIMGQFDHPNVIHLEGVVTKSTPVMIITEFMENGSLDSFLRQNDGQFTVIQLVGMLRGIAAGMKYLADMNYVHRDLAARNILVNSNLVCKVSDFGLSRFLEDDTSDPTYTSALGGKIPIRWTAPEAIQYRKFTSASDVWSYGIVMWEVMSYGERPYWDMTNQDVINAIEQDYRLPPPMDCPSALHQLMLDCWQKDRNHRPKFGQIVNTLDKMIRNPNSLKAMAPLSSGINLPLLDRTIPDYTSFNTVDEWLEAIKMGQYKESFANAGFTSFDVVSQMMMEDILRVGVTLAGHQKKILNSIQVMRAQMNQIQSVEV

SEQ ID NO: 4826 - protein, 482 aa, Homo Sapiens
MALRRLGAALLLLPLLAAVEETLMDSTTATAELGWMVHPPSGWEEVSGYDENMNTIRTYQVCNVFESSQNNWLRTKFIRRRGAHRIHVEMKFSVRDCSSIPSVPGSCKETFNLYYYEADFDSATKTFPNWMENPWVKVDTIAADESFSQVDLGGRVMKINTEVRSFGPVSRSGFYLAFQDYGGCMSLIAVRVFYRKCPRIIQNGAIFQETLSGAESTSLVAARGSCIANAEEVDVPIKLYCNGDGEWLVPIGRCMCKAGFEAVENGTVCRGCPSGTFKANQGDEACTHCPINSRTTSEGATNCVCRNGYYRADLDPLDMPCTTIPSAPQAVISSVNETSLMLEWTPPRDSGGREDLVYNIICKSCGSGRGACTRCGDNVQYAPRQLGLTEPRIYISDLLAHTQYTFEIQAVNGVTDQSPFSPQFASVNITTNQAAPSAVSIMHQVSRTVDSITLSWSQPDQPNGVILDYELQYYEKMKTQRS

SEQ ID NO: 4827 - protein, 946 aa, Homo Sapiens
MWVPVLALPVCTYAETLMDSTTATAELGWMVHPPSGWEEVSGYDENMNTIRTYQVCNVFESSQNNWLRTKFIRRRGAHRIHVEMKFSVRDCSSIPSVPGSCKETFNLYYYEADFDSATKTFPNWMENPWVKVDTIAADESFSQVDLGGRVMKINTEVRSFGPVSRSGFYLAFQDYGGCMSLIAVRVFYRKCPRIIQNGAIFQETLSGAESTSLVAARGSCIANAEEVDVPIKLYCNGDGEWLVPIGRCMCKAGFEAVENGTVCRGCPSGTFKANQGDEACTHCPINSRTTSEGATNCVCRNGYYRADLDPLDMPCTTIPSAPQAVISSVNETSLMLEWTPPRDSGGREDLVYNIICKSCGSGRGACTRCGDNVQYAPRQLGLTEPRIYISDLLAHTQYTFEIQAVNGVTDQSPFSPQFASVNITTNQAAPSAVSIMHQVSRTVDSITLSWSQPDQPNGVILDYELQYYEKQELSEYNATAIKSPTNTVTVQGLKAGAIYVFQVRARTVAGYGRYSGKMYFQTMTEAEYQTSIQEKLPLIIGSSAAGLVFLIAVVVIAIVCNRRGFERADSEYTDKLQHYTSGHMTPGMKIYIDPFTYEDPNEAVREFAKEIDISCVKIEQVIGAGEFGEVCSGHLKLPGKREIFVAIKTLKSGYTEKQRRDFLSEASIMGQFDHPNVIHLEGVVTKSTPVMIITEFMENGSLDSFLRQNDGQFTVIQLVGMLRGIAAGMKYLADMNYVHRDLAARNILVNSNLVCKVSDFGLSRFLEDDTSDPTYTSALGGKIPIRWTAPEAIQYRKFTSASDVWSYGIVMWEVMSYGERPYWDMTNQDVINAIEQDYRLPPPMDCPSALHQLMLDCWQKDRNHRPKFGQIVNTLDKMIRNPNSLKAMAPLSSGINLPLLDRTIPDYTSFNTVDEWLEAIKMGQYKESFANAGFTSFDVVSQMMME

SEQ ID NO: 4828 - protein, 935 aa, Homo Sapiens
MELRVLLCWASLAAALEETLLNTKLETADLKWVTFPQVDGQWEELSGLDEEQHSVRTYEVCDVQRAPGQAHWLRTGWVPRRGAVHVYATLRFTMLECLSLPRAGRSCKETFTVFYYESDADTATALTPAWMENPYIKVDTVAAEHLTRKRPGAEATGKVNVKTLRLGPLSKAGFYLAFQDQGACMALLSLHLFYKKCAQLTVNLTRFPETVPRELVVPVAGSCVVDAVPAPGPSPSLYCREDGQWAEQPVTGCSCAPGFEAAEGNTKCRACAQGTFKPLSGEGSCQPCPANSHSNTIGSAVCQCRVGYFRARTDPRGAPCTTPPSAPRSVVSRLNGSSLHLEWSAPLESGGREDLTYALRCRECRPGGSCAPCGGDLTFDPGPRDLVEPWVVVRGLRPDFTYTFEVTALNGVSSLATGPVPFEPVNVTTDREVPPAVSDIRVTRSSPSSLSLAWAVPRAPSGAVLDYEVKYHEKGAEGPSSVRFLKTSENRAELRGLKRGASYLVQVRARSEAGYGPFGQEHHSQTQLDESEGWREQLALIAGTAVVGVVLVLVVIVVAVLCLRKQSNGREAEYSDKHGQYLIGHGTKVYIDPFTYEDPNEAVREFAKEIDVSYVKIEEVIGAGEFGEVCRGRLKAPGKKESCVAIKTLKGGYTERQRREFLSEASIMGQFEHPNIIRLEGVVTNSMPVMILTEFMENGALDSFLRLNDGQFTVIQLVGMLRGIASGMRYLAEMSYVHRDLAARNILVNSNLVCKVSDFGLSRFLEENSSDPTYTSSLGGKIPIRWTAPEAIAFRKFTSASDAWSYGIVMWEVMSFGERPYWDMSNQDVINAIEQDYRLPPPPDCPTSLHQLMLDCWQKDRNARPRFPQVVSALDKMIRNPASLKIVARENGGDLLRIGVTLAGHQKKILASVQHMKSQAKPGTPGGTGGPAPQY

SEQ ID NO: 4829 - protein, 987 aa, Homo Sapiens
MELRVLLCWASLAAALEETLLNTKLETADLKWVTFPQVDGQWEELSGLDEEQHSVRTYEVCDVQRAPGQAHWLRTGWVPRRGAVHVYATLRFTMLECLSLPRAGRSCKETFTVFYYESDADTATALTPAWMENPYIKVDTVAAEHLTRKRPGAEATGKVNVKTLRLGPLSKAGFYLAFQDQGACMALLSLHLFYKKCAQLTVNLTRFPETVPRELVVPVAGSCVVDAVPAPGPSPSLYCREDGQWAEQPVTGCSCAPGFEAAEGNTKCRACAQGTFKPLSGEGSCQPCPANSHSNTIGSAVCQCRVGYFRARTDPRGAPCTTPPSAPRSVVSRLNGSSLHLEWSAPLESGGREDLTYALRCRECRPGGSCAPCGGDLTFDPGPRDLVEPWVVVRGLRPDFTYTFEVTALNGVSSLATGPVPFEPVNVTTDREVPPAVSDIRVTRSSPSSLSLAWAVPRAPSGAVLDYEVKYHEKGAEGPSSVRFLKTSENRAELRGLKRGASYLVQVRARSEAGYGPFGQEHHSQTQLDESEGWREQLALIAGTAVVGVVLVLVVIVVAVLCLRKQSNGREAEYSDKHGQYLIGHGTKVYIDPFTYEDPNEAVREFAKEIDVSYVKIEEVIGAGEFGEVCRGRLKAPGKKESCVAIKTLKGGYTERQRREFLSEASIMGQFEHPNIIRLEGVVTNSMPVMILTEFMENGALDSFLRLNDGQFTVIQLVGMLRGIASGMRYLAEMSYVHRDLAARNILVNSNLVCKVSDFGLSRFLEENSSDPTYTSSLGGKIPIRWTAPEAIAFRKFTSASDAWSYGIVMWEVMSFGERPYWDMSNQDVINAIEQDYRLPPPPDCPTSLHQLMLDCWQKDRNARPRFPQVVSALDKMIRNPASLKIVARENGGASHPLLDQRQPHYSAFGSVGEWLRAIKMGRYEESFAAAGFGSFELVSQISAEDLLRIGVTLAGHQKKILASVQHMKSQAKPGTPGGTGGPAPQY

SEQ ID NO: 4830 - protein, 306 aa, Homo Sapiens
MELRVLLCWASLAAALEETLLNTKLETADLKWVTFPQVDGQWEELSGLDEEQHSVRTYEVCDVQRAPGQAHWLRTGWVPRRGAVHVYATLRFTMLECLSLPRAGRSCKETFTVFYYESDADTATALTPAWMENPYIKVDTVAAEHLTRKRPGAEATGKVNVKTLRLGPLSKAGFYLAFQDQGACMALLSLHLFYKKCAQLTVNLTRFPETVPRELVVPVAGSCVVDAVPAPGPSPSLYCREDGQWAEQPVTGCSCAPGFEAAEGNTKCRGRRGSQQRAVPEDVRKPGRAAGAEAGSQLPGAGTGAL

SEQ ID NO: 4831 - protein, 126 aa, Homo Sapiens
MPELVVTALLAPSRLSLKLLRAFMWSLVFSVALVAAAVYGCIALTHVLCRPRRGCCGRRRSASPACLSDPSLGEHGFLNLKSSGLRLHYVSAGRGNGPLMLFLHGFPENWFSWRYQLREFQSRFHV

SEQ ID NO: 4832 - protein, 360 aa, Homo Sapiens
MPELVVTALLAPSRLSLKLLRAFMWSLVFSVALVAAAVYGCIALTHVLCRPRRGCCGRRRSASPACLSDPSLGEHGFLNLKSSGLRLHYVSAGRGNGPLMLFLHGFPENWFSWRYQLREFQSRFHVVAVDLRGYGPSDAPRDVDCYTIDLLLVDIKDVILGLGYSKCILVAHDWGALLAWHFSIYYPSLVERMVVVSGAPMSVYQDYSLHHISQFFRSHYMFLFQLPWLPEKLLSMSDFQILKTTLTHRKTGIPCLTPSELEAFLYNFSQPGGLTGPLNYYRNLFRNFPLEPQELTTPTLLLWGEKDTYLELGLVEAIGSRFVPGRLEAHILPGIGHWIPQSNPQEMHQYMWAFLQDLLD

SEQ ID NO: 4833 - protein, 360 aa, Homo Sapiens; identical to SEQ ID NO: 4832

SEQ ID NO: 4834 - protein, 360 aa, Homo Sapiens; identical to SEQ ID NO: 4832

SEQ ID NO: 4835 - protein, 193 aa, Homo Sapiens
MGVHECPAWLWLLLSLLSLPLGLPVLGAPPRLICDSRVLERYLLEAKEAENITTGCAEHCSLNENITVPDTKVNFYAWKRMEVGQQAVEVWQGLALLSEAVLRGQALLVNSSQPWEPLQLHVDKAVSGLRSLTTLLRALGAQKEAISPPDAASAAPLRTITADTFRKLFRVYSNFLRGKLKLYTGEACRTGDR

SEQ ID NO: 4836 - protein, 133 aa, Homo Sapiens
MGSSGLLSLLVLFVLLANVQGPGLTDWLFPRRCPKIREECEFQERDVCTKDRQCQDNKKCCVFSCGKKCLDLKQDVCEMPKETGPCLAYFLHWWYDKKDNTCSMFVYGGCQGNNNNFQSKANCLNTCKNKRFP

SEQ ID NO: 4837 - protein, 77 aa, Homo Sapiens
MGSSGLLSLLVLFVLLANVQGPGLTDWLFPRRCPKIREECEFQERDVCTKDRQCQDNKKCCVFSCGKKCLDLKQGKQ

SEQ ID NO: 4838 - protein, 117 aa, Homo Sapiens
MLSKAHGCKTALSLGRCPKIREECEFQERDVCTKDRQCQDNKKCCVFSCGKKCLDLKQDVCEMPKETGPCLAYFLHWWYDKKDNTCSMFVYGGCQGNNNNFQSKANCLNTCKNKRFP

SEQ ID NO: 4839 - protein, 179 aa, Homo Sapiens
MGSSGLLSLLVLFVLLANVQGPGLTDWLFPRRCPKIREECEFQERDVCTKDRQCQDNKKCCVFSCGKKCLDLKQDVCEMPKETGPCLAYFLHWWYDKKDNTCSMFVYGGCQGNNNNFQSKANCLNTCKNKQPCPKIKVECEVEEIDQCTKPRDCPENMKCCPFSRGKKCLDFRKASLST

SEQ ID NO: 4840 - protein, 762 aa, Homo Sapiens
MAAAAQLSLTQLSSGNPVYEKYYRQVDTGNTGRVLASDAAAFLKKSGLPDLILGKIWDLADTDGKGILNKQEFFVALRLVACAQNGLEVSLSSLNLAVPPPRFHDTSSPLLISGTSAAELPWAVKPEDKAKYDAIFDSLSPVNGFLSGDKVKPVLLNSKLPVDILGRVWELSDIDHDGMLDRDEFAVAMFLVYCALEKEPVPMSLPPALVPPSKRKTWVVSPAEKAKYDEIFLKTDKDMDGFVSGLEVREIFLKTGLPSTLLAHIWSLCDTKDCGKLSKDQFALAFHLISQKLIKGIDPPHVLTPEMIPPSDRASLQKNIIGSSPVADFSAIKELDTLNNEIVDLQREKNNVEQDLKEKEDTIKQRTSEVQDLQDEVQRENTNLQKLQAQKQQVQELLDELDEQKAQLEEQLKEVRKKCAEEAQLARSSPELLPSGVTDENEVTTAVTEKVCSELDNNRHSKEEDPFNVDSSSLTGPVADTNLDFFQSDPFVGSDPFKDDPFGKIDPFGGDPFKGSDPFASDCFFRQSTDPFATSSTDPFSAANNSSITSVETLKHNDPFAPGGTVVAASDSATDPFASVFGNESFGGGFADFSTLSKVNNEDPFRSATSSSVSNVVITKNVFEETSVKSEDEPPALPPKIGTPTRPCPLPPGKRSINKLDSPDPFKLNDPFQPFPGNDSPKEKDPEIFCDPFTSATTTTNKEADPSNFANFSAYPSEEDMIEWAKRESEREEEQRLARLNQQEQEDLELAIALSKSEISEA

SEQ ID NO: 4841 - protein, 896 aa, Homo Sapiens
MAAAAQLSLTQLSSGNPVYEKYYRQVDTGNTGRVLASDAAAFLKKSGLPDLILGKIWDLADTDGKGILNKQEFFVALRLVACAQNGLEVSLSSLNLAVPPPRFHDTSSPLLISGTSAAELPWAVKPEDKAKYDAIFDSLSPVNGFLSGDKVKPVLLNSKLPVDILGRVWELSDIDHDGMLDRDEFAVAMFLVYCALEKEPVPMSLPPALVPPSKRKTWVVSPAEKAKYDEIFLKTDKDMDGFVSGLEVREIFLKTGLPSTLLAHIWSLCDTKDCGKLSKDQFALAFHLISQKLIKGIDPPHVLTPEMIPPSDRASLQKNIIGSSPVADFSAIKELDTLNNEIVDLQREKNNVEQDLKEKEDTIKQRTSEVQDLQDEVQRENTNLQKLQAQKQQVQELLDELDEQKAQLEEQLKEVRKKCAEEAQLISSLKAELTSQESQISTYEEELAKAREELSRLQQETAELEESVESGKAQLEPLQQHLQDSQQEISSMQMKLMEMKDLENHNSQLNWCSSPHSILVNGATDYCSLSTSSSETANLNEHVEGQSNLESEPIHQESPARSSPELLPSGVTDENEVTTAVTEKVCSELDNNRHSKEEDPFNVDSSSLTGPVADTNLDFFQSDPFVGSDPFKDDPFGKIDPFGGDPFKGSDPFASDCFFRQSTDPFATSSTDPFSAANNSSITSVETLKHNDPFAPGGTVVAASDSATDPFASVFGNESFGGGFADFSTLSKVNNEDPFRSATSSSVSNVVITKNVFEETSVKSEDEPPALPPKIGTPTRPCPLPPGKRSINKLDSPDPFKLNDPFQPFPGNDSPKEKDPEIFCDPFTSATTTTNKEADPSNFANFSAYPSEEDMIEWAKRESEREEEQRLARLNQQEQEDLELAIALSKSEISEA

SEQ ID NO: 4842 - protein, 90 aa, Homo Sapiens
  misc_feature (1)..(1): Xaa can be any naturally occurring amino acid
XAAAQLSLTQLSSGNPVYEKYYRQVDTGNTGRVLASDAAAFLKKSGLPDLILGKIWDLADTDGKGILNKQHDTSSPLLISGTSAAELPWA

SEQ ID NO: 4843 - protein, 659 aa, Homo Sapiens
MDSQGRVWAQEMLLRVSPDHVTLLDPASKEELESYPLGAIVRCDAVMPPGRSRSLLLLVCQEPERAQPDVHFFQGLRLGAELIREDIQGALHNYRSGRGERRAAALRATQEELQRDRSPAAETPPLQRRPSVRAVISTVERGAGRGRPQAKPIPEAEEAQRPEPVGTSSNADSASPDLGPRGPDLAVLQAEREVDILNHVFDDVESFVSRLQKSAEAARVLEHRERGRRSRRRAAGEGLLTLRAKPPSEAEYTDVLQKIKYAFSLLARLRGNIADPSSPELLHFLFGPLQMIVNTSGGPEFASSVRRPHLTSDAVALLRDNVTPRENELWTSLGDSWTRPGLELSPEEGPPYRPEFFSGWEPPVTDPQSRAWEDPVEKQLQHERRRRQQSAPQVAVNGHRDLEPESEPQLESETAGKWVLCNYDFQARNSSELSVKQRDVLEVLDDSRKWWKVRDPAGQEGYVPYNILTPYPGPRLHHSQSPARSLNSTPPPPPAPAPAPPPALARPRWDRPRWDSCDSLNGLDPSEKEKFSQMLIVNEELQARLAQGRSGPSRAVPGPRAPEPQLSPGSDASEVRAWLQAKGFSSGTVDALGVLTGAQLFSLQKEELRAVSPEEGARVYSQVTVQRSLLEDKEKVSELEAVMEKQKKKVEGEVEMEVI

SEQ ID NO: 4844 - protein, 548 aa, Homo Sapiens
MGRKAIVLAIANTSLAFPLCQHLVTFCLGEDDGVHTVEDASRKLAVMDSQGRVWAQEMLLRVSPDHVTLLDPASKEELESYPLGAIVRCDAVMPPGRSRSLLLLVCQEPERAQPDVHFFQGLRLGAELIREDIQGALHNYRSGRGERRAAALRATQEELQRDRSPAAETPPLQRRPSVRAVISTVERGAGRGRPQAKPIPEAEEAQRPEPVGTSSNADSASPDLGPRGPDLAVLQAEREVDILNHVFDDVESFVSRLQKSAEAARVLEHRERGRRSRRRAAGEGLLTLRAKPPSEAEYTDVLQKIKYAFSLLARLRGNIADPSSPELLHFLFGPLQMIVNTSGGPEFASSVRRPHLTSDAVALLRDNVTPRENELWTSLGDSWTRPGLELSPEEGPPYRPEFFSGWEPPVTDPQSRAWEDPVEKQLQHERRRRQVTQATQQGRGWEVRGRGRSAWPRLTRLSYFLQQSAPQVAVNGHRDLEPESEPQLESETAGKWVLCNYDFQARNSSELSVKQRDVLEDKEKVSELEAVMEKQKKKVEGEVEMEVI

SEQ ID NO: 4845 - protein, 428 aa, Homo Sapiens
MHLVTFCLGEDDGVHTVEDASRKLAVMDSQGRVWAQEMLLRVSPDHVTLLDPASKEELESYPLGAIVRCDAVMPPGRSRSLLLLVCQEPERAQPDVHFFQGLRLGAELIREDIQGALHNYRSGRGERRAAALRATQEELQRDRSPAAETPPLQRRPSVRAVISTVERGAGRGRPQAKPIPEAEEAQRPEPVGTSSNADSASPDLGPRGPDLAVLQAEREVDILNHVFDDVESFVSRLQKSAEAARVLEHRERGRRSRRRAAGEGLLTLRAKPPSEAEYTDVLQKIKYAFSLLARLRGNIADPSSPELLHFLFGPLQMIVNTSGGPEFASSVRRPHLTSDAVALLRDNVTPRENELWTSLGDSWTRPGLELSPEEGPPYRPEFFSGWEPPVTDPQSRAWEDPVEKQLQHERRRRQQSAPQVAVNGWVRW

SEQ ID NO: 4846 - protein, 596 aa, Homo Sapiens
MNRTWPRRIWGSSQDEAELIREDIQGALHNYRSGRGERRAAALRATQEELQRDRSPAAETPPLQRRPSVRAVISTVERGAGRGRPQAKPIPEAEEAQRPEPVGTSSNADSASPDLGPRGPDLAVLQAEREVDILNHVFDDVESFVSRLQKSAEAARVLEHRERGRRSRRRAAGEGLLTLRAKPPSEAEYTDVLQKIKYAFSLLARLRGNIADPSSPELLHFLFGPLQMIVNTSGGPEFASSVRRPHLTSDAVALLRDNVTPRENELWTSLGDSWTRPGLELSPEEGPPYRPEFFSGWEPPVTDPQSRAWEDPVEKQLQHERRRRQQSAPQVAVNGHRDLEPESEPQLESETAGKWVLCNYDFQARNSSELSVKQRDVLEVLDDSRKWWKVRDPAGQEGYVPYNILTPYPGPRLHHSQSPARSLNSTPPPPPAPAPAPPPALARPRWDRPRWDSCDSLNGLDPSEKEKFSQMLIVNEELQARLAQGRSGPSRAVPGPRAPEPQLSPGSDASEVRAWLQAKGFSSGTVDALGVLTGAQLFSLQKEELRAVSPEEGARVYSQVTVQRSLLEDKEKVSELEAVMEKQKKKVEGEVEMEVI

SEQ ID NO: 4847 - protein, 409 aa, Homo Sapiens
MNRTWPRRIWGSSQDEVGFASSVRRPHLTSDAVALLRDNVTPRENELWTSLGDSWTRPGLELSPEEGPPYRPEFFSGWEPPVTDPQSRAWEDPVEKQLQHERRRRQVTQATQQGRGWEVRGRGRSAWPRLTRLSYFLQQSAPQVAVNGHRDLEPESEPQLESETAGKWVLCNYDFQARNSSELSVKQRDVLEVLDDSRKWWKVRDPAGQEGYVPYNILTPYPGPRLHHSQSPARSLNSTPPPPPAPAPAPPPALARPRWDRPRWDSCDSLNGLDPSEKEKFSQMLIVNEELQARLAQGRSGPSRAVPGPRAPEPQLSPGSDASEVRAWLQAKGFSSGTVDALGVLTGAQLFSLQKEELRAVSPEEGARVYSQVTVQRSLLEDKEKVSELEAVMEKQKKKVEGEVEMEVI

SEQ ID NO: 4848 - protein, 723 aa, Homo Sapiens
MSTATGPEAAPKPSAKSIYEQRKRYSTVVMADVSQYPVNHLVTFCLGEDDGVHTVEDASRKLAVMDSQGRVWAQEMLLRVSPDHVTLLDPASKEELESYPLGAIVRCDAVMPPGRSRSLLLLVCQEPERAQPDVHFFQGLRLGAELIREDIQGALHNYRSGRGERRAAALRATQEELQRDRSPAAETPPLQRRPSVRAVISTVERGAGRGRPQAKPIPEAEEAQRPEPVGTSSNADSASPDLGPRGPDLAVLQAEREVDILNHVFDDVESFVSRLQKSAEAARVLEHRERGRRSRRRAAGEGLLTLRAKPPSEAEYTDVLQKIKYAFSLLARLRGNIADPSSPELLHFLFGPLQMIVNTSGGPEFASSVRRPHLTSDAVALLRDNVTPRENELWTSLGDSWTRPGLELSPEEGPPYRPEFFSGWEPPVTDPQSRAWEDPVEKQLQHERRRRQQSAPQVAVNGHRDLEPESEPQLESETAGKWVLCNYDFQARNSSELSVKQRDVLEVLDDSRKWWKVRDPAGQEGYVPYNILTPYPGPRLHHSQSPARSLNSTPPPPPAPAPAPPPALARPRWDRPRWDSCDSLNGLDPSEKEKFSQMLIVNEELQARLAQGRSGPSRAVPGPRAPEPQLSPGSDASEVRAWLQAKGFSSGTVDALGVLTGAQLFSLQKEELRAVSPEEGARVYSQVTVQRSLLEDKEKVSELEAVMEKQKKKVEGEVEMEVI

SEQ ID NO: 4849 - protein, 715 aa, Homo Sapiens
MHLLPALAGVLATLVLAQPCEGTDPASPGAVETSVLRDCIAEAKLLVDAAYNWTQKSIKQRLRSGSASPMDLLSYFKQPVAATRTVVRAADYMHVALGLLEEKLQPQRSGPFNVTDVLTEPQLRLLSQASGCALRDQAERCSDKYRTITGRCNNKRRPLLGASNQALARWLPAEYEDGLSLPFGWTPSRRRNGFLLPLVRAVSNQIVRFPNERLTSDRGRALMFMQWGQFIDHDLDFSPESPARVAFTAGVDCERTCAQLPPCFPIKIPPNDPRIKNQRDCIPFFRSAPSCPQNKNRVRNQINALTSFVDASMVYGSEVSLSLRLRNRTNYLGLLAINQRFQDNGRALLPFDNLHDDPCLLTNRSARIPCFLAGDTRSTETPKLAAMHTLFMREHNRLATELRRLNPRWNGDKLYNEARKIMGAMVQIITYRDFLPLVLGKARARRTLGHYRGYCSNVDPRVANVFTLAFRFGHTMLQPFMFRLDSQYRASAPNSHVPLSSAFFASWRIVYEGGIDPILRGLMATPAKLNRQDAMLVDELRDRLFRQVRRIGLDLAALNMQRSRDHGLPGYNAWRRFCGLSQPRNLAQLSRVLKNQDLARKFLNLYGTPDNIDIWIGAIAEPLLPGARVGPLLACLFENQFRRARDGDRFWWQKRGVFTKRQRKALSRISLSRIICDNTGITTVSRDIFRANIYPRGFVNCSRIPRLNLSAWRGT

SEQ ID NO: 4850 - protein, 234 aa, Homo Sapiens
MKTLAGLVLGLVIFDAAVTAPTLESINYDSETYDATLEDLDNLYNYENIPVDKVEIEIATVMPSGNRELLTPPPQPEKAQEEEEEEESTPRLIDGSSPQEPEFTGVLGPHTNEDFPTCLLCTCISTTVYCDDHELDAIPPLPKNTAYFYSRFNRIKKINKNDFASLSDLKRIDLTSNLISEIDEDAFRKLPQLRELVLRDNKIRQLPELPTTLTFIDISNNRLGRKGIKQEAFK

SEQ ID NO: 4851 - protein, 322 aa, Homo Sapiens
MKTLAGLVLGLVIFDAAVTAPTLESINYDSETYDATLEDLDNLYNYENIPVDKVEIEIATVMPSGNRELLTPPPQPEKAQEEEEEEESTPRLIDGSSPQEPEFTGVLGPHTNEDFPTCLLCTCISTTVYCDDHELDAIPPLPKNTAYFYSRFNRIKKINKNDFASLSDLKRIDLTSNLISEIDEDAFRKLPQLRELVLRDNKIRQLPELPTTLTFIDISNNRLGRKGIKQEAFKDMYDLHHLYLTDNNLDHIPLPLPENLRALHLQNNNILEMHEDTFCNVKNLTYIRKALEDIRLDGNPINLSKTPQAYMCLPRLPVGSLV

SEQ ID NO: 4852 - protein, 294 aa, Homo Sapiens
MNFILFIFIPGVFSLKSSTLKPTIEALPNVLPLNEDVNKQEEKNEDHTPNYAPANEKNGNYYKDIKQYVFTTQNPNGTESEISVRATTDLNFALKNDKTVNATTYEKSTIEEETTTSEPSHKNIQRSTPNVPAFWTMLAKAINGTAVVMDDKDQLFHPIPESDVNATQGENQPDLEDLKIKIMLGISLMTLLLFVVLLAFCSATLYKLRHLSYKSCESQYSVNPELATMSYFHPSEGVSDTSFSKSAESSTFLGTTSSDMRRSGTRTSESKIMTDIISIGSDNEMHENDESVTR

SEQ ID NO: 4853 - protein, 127 aa, Homo Sapiens
MNFILFIFIPGVFSLKSSTLKPTIEALPNVLPLNEDVNKQEEKNEDHTPNYAPANEKNGNYYKDIKQYVFTTQNPNGTESEISVRATTDLNFALKNDKTVNATTYEKSTIEEETTTSEPSHKNIQSI

SEQ ID NO: 4854 - protein, 265 aa, Homo Sapiens
MNFILFIFIPGVFSLKSSTLKPTIEALPNVLPLNEDVNKQEEKNEDHTPNYAPANEKNGNYYKDIKQYVFTTQNPNGTESEISVRATTDLNFALKNGSTPNVPAFWTMLAKAINGTAVVMDDKDQLFHPIPESDVNATQGENQPDLEDLKIKIMLGISLMTLLLFVVLLAFCSATLYKLRHLSYKSCESQYSVNPELATMSYFHPSEGVSDTSFSKSAESSTFLGTTSSDMRRSGTRTSESKIMTDIISIGSDNEMHENDESVTR

SEQ ID NO: 4855 - protein, 9 aa, Homo Sapiens
MAFPCFDEP

SEQ ID NO: 4856 - protein, 129 aa, Homo Sapiens
MVFLPLKWSLATMSFLLSSLLALLTVSTPSWCQSTEASPKRSDGTPFPWNKIRLPEYVIPVHYDLLIHANLTTLTFWGTTKVEITASQPTSTIILHSHHLQISRATLRKGAGERLSEEPLQVLEHPRQE

SEQ ID NO: 4857 - protein, 948 aa, Homo Sapiens
MVFLPLKWSLATMSFLLSSLLALLTVSTPSWCQSTEASPKRSDGTPFPWNKIRLPEYVIPVHYDLLIHANLTTLTFWGTTKVEITASQPTSTIILHSHHLQISRATLRKGAGERLSEEPLQVLEHPRQEQIALLAPEPLLVGLPYTVVIHYAGNLSETFHGFYKSTYRTKEGELRILASTQFEPTAARMAFPCFDEPAFKASFSIKIRREPRHLAISNMPLVKSVTVAEGLIEDHFDVTVKMSTYLVAFIISDFESVSKITKSGVKVSVYAVPDKINQADYALDAAVTLLEFYEDYFSIPYPLPKQDLAAIPDFQSGAMENWGLTTYRESALLFDAEKSSASSKLGITMTVAHELAHQWFGNLVTMEWWNDLWLNEGFAKFMEFVSVSVTHPELKVGDYFFGKCFDAMEVDALNSSHPVSTPVENPAQIREMFDDVSYDKGACILNMLREYLSADAFKSGIVQYLQKHSYKNTKNEDLWDSMASICPTDGVKGMDGFCSRSQHSSSSSHWHQEGVDVKTMMNTWTLQKGFPLITITVRGRNVHMKQEHYMKGSDGAPDTGYLWHVPLTFITSKSDMVHRFLLKTKTDVLILPEEVEWIKFNVGMNGYYIVHYEDDGWDSLTGLLKGTHTAVSSNDRASLINNAFQLVSIGKLSIEKALDLSLYLKHETEIMPVFQGLNELIPMYKLMEKRDMNEVETQFKAFLIRLLRDLIDKQTWTDEGSVSERMLRSQLLLLACVHNYQPCVQRAEGYFRKWKESNGNLSLPVDVTLAVFAVGAQSTEGWDFLYSKYQFSLSSTEKSQIEFALCRTQNKEKLQWLLDESFKGDKIKTQEFPQILTLIGRNPVGYPLAWQFLRKNWNKLVQKFELGSSSIAHMVMGTTNQFSTRTRLEEVKGFFSSLKENGSQLRCVQQTIETIEENIGWMDKNFDKIRVWLQSEKLEHDPEADATG

SEQ ID NO: 4858 - protein, 941 aa, Homo Sapiens
MVFLPLKWSLATMSFLLSSLLALLTVSTPSWCQSTEASPKRSDGTPFPWNKIRLPEYVIPVHYDLLIHANLTTLTFWGTTKVEITASQPTSTIILHSHHLQISRATLRKGAGERLSEEPLQVLEHPRQEQIALLAPEPLLVGLPYTVVIHYAGNLSETFHGFYKSTYRTKEGELRILASTQFEPTAARMAFPCFDEPAFKASFSIKIRREPRHLAISNMPLVKSVTVAEGLIEDHFDVTVKMSTYLVAFIISDFESVSKITKSGVKVSVYAVPDKINQADYALDAAVTLLEFYEDYFSIPYPLPKQDLAAIPDFQSGAMENWGLTTYRESALLFDAEKSSASSKLGITMTVAHELAHQWFGNLVTMEWWNDLWLNEGFAKFMEFVSVSVTHPELKVGDYFFGKCFDAMEVDALNSSHPVSTPVENPAQIREMFDDVSYDKGACILNMLREYLSADAFKSGIVQYLQKHSYKNTKNEDLWDSMASICPTDGVKGMDGFCSRSQHSSSSSHWHQEGVDVKTMMNTWTLQKGFPLITITVRGRNVHMKQEHYMKGSDGAPDTGYLWHVPLTFITSKSDMVHRFLLKTKTDVLILPEEVEWIKFNVGMNGYYIVHYEDDGWDSLTGLLKGTHTAVSSNDRASLINNAFQLVSIGKLSIEKALDLSLYLKHETEIMPVFQGLNELIPMYKLMEKRDMNEVETQFKAFLIRLLRDLIDKQTWTDEGSVSERMLRSQLLLLACVHNYQPCVQRAEGYFRKWKESNGNLSLPVDVTLAVFAVGAQSTEGWDFLYSKYQFSLSSTEKSQIEFALCRTQNKEKLQWLLDESFKGDKIKTQEFPQILTLIGRNPVGYPLAWQFLRKNWNKLVQKFELGSSSIAHMVMGTTNQFSTRTRLEEVKGFFSSLKENGSQLRCVQQTIETIEENIGWMDKNFDKIRVWLQSEKLERM

SEQ ID NO: 4859 - protein, 144 aa, Homo Sapiens
  misc_feature (1)..(1): Xaa can be any naturally occurring amino acid
XKGDKIKTQEFPQILTLIGRNPVGYPLAWQFLRKNWNKLVQKFELGSSSIAHMVMGTTNQFSTRTRLEEVKGFFSSLKENGSQLRCVQQTIETIEENIGWMDKNFDKIRVWLQSEKLERVALQRKPKCWVPCHRRIKYLILLIL

SEQ ID NO: 4860 - protein, 960 aa, Homo Sapiens
MFHSSAMVNSHRKPMFNIHRGFYCLTAILPQICICSQFSVPSSYHFTEDPGAFPVATNGERFPWQELRLPSVVIPLHYDLFVHPNLTSLDFVASEKIEVLVSNATQFIILHSKDLEITNATLQSEEDSRYMKPGKELKVLSYPAHEQIALLVPEKLTPHLKYYVAMDFQAKLGDGFEGFYKSTYRTLGGETRILAVTDFEPTQARMAFPCFDEPLFKANFSIKIRRESRHIALSNMPKVKTIELEGGLLEDHFETTVKMSTYLVAYIVCDFHSLSGFTSSGVKVSIYASPDKRNQTHYALQASLKLLDFYEKYFDIYYPLSKLDLIAIPDFAPGAMENWGLITYRETSLLFDPKTSSASDKLWVTRVIAHELAHQWFGNLVTMEWWNDIWLKEGFAKYMELIAVNATYPELQFDDYFLNVCFEVITKDSLNSSRPISKPAETPTQIQEMFDEVSYNKGACILNMLKDFLGEEKFQKGIIQYLKKFSYRNAKNDDLWSSLSNSCLESDFTSGGVCHSDPKMTSNMLAFLGENAEVKEMMTTWTLQKGIPLLVVKQDGCSLRLQQERFLQGVFQEDPEWRALQERYLWHIPLTYSTSSSNVIHRHILKSKTDTLDLPEKTSWVKFNVDSNGYYIVHYEGHGWDQLITQLNQNHTLLRPKDRVGLIHDVFQLVGAGRLTLDKALDMTYYLQHETSSPALLEGLSYLESFYHMMDRRNISDISENLKRYLLQYFKPVIDRQSWSDKGSVWDRMLRSALLKLACDLNHAPCIQKAAELFSQWMESSGKLNIPTDVLKIVYSVGAQTTAGWNYLLEQYELSMSSAEQNKILYALSTSKHQEKLLKLIELGMEGKVIKTQNLAALLHAIARRPKGQQLAWDFVRENWTHLLKKFDLGSYDIRMIISGTTAHFSSKDKLQEVKLFFESLEAQGSHLDIFQTVLETITKNIKWLEKNLPTLRTWLMVNT

SEQ ID NO: 4861 - protein, 350 aa, Homo Sapiens
MFHSSAMVNSHRKPMFNIHRGFYCLTAILPQICICSQFSVPSSYHFTEDPGAFPVATNGERFPWQELRLPSVVIPLHYDLFVHPNLTSLDFVASEKIEVLVSNATQFIILHSKDLEITNATLQSEEDSRYMKPGKELKVLSYPAHEQIALLVPEKLTPHLKYYVAMDFQAKLGDGFEGFYKSTYRTLGGETRILAVTDFEPTQARMAFPCFDEPLFKANFSIKIRRESRHIALSNMPKVKTIELEGGLLEDHFETTVKMSTYLVAYIVCDFHSLSGFTSSGVKVSIYASPDKRNQTHYALQASLKLLDFYEKYFDIYYPLSKLGMFKFHIIVFIFAHKTCFDLFPLSLSM

SEQ ID NO: 4862 - protein, 694 aa, Homo Sapiens
MFHSSAMVNSHRKPMFNIHRGFYCLTAILPQICICSQFSVPSSYHFTEDPGAFPVATNGERFPWQELRLPSVVIPLHYDLFVHPNLTSLDFVASEKIEVLVSNATQFIILHSKDLEITNATLQSEEDSRYMKPGKELKVLSYPAHEQIALLVPEKLTPHLKYYVAMDFQAKLGDGFEGFYKSTYRTLGGETRILAVTDFEPTQARMAFPCFDEPLFKANFSIKIRRESRHIALSNMPKVKTIELEGGLLEDHFETTVKMSTYLVAYIVCDFHSLSGFTSSGVKVSIYASPDKRNQTHYALQASLKLLDFYEKYFDIYYPLSKLDLIAIPDFAPGAMENWGLITYRETSLLFDPKTSSASDKLWVTRVIAHELAHQWFGNLVTMEWWNDIWLKEGFAKYMELIAVNATYPELQFDDYFLNVCFEVITKDSLNSSRPISKPAETPTQIQEMFDEVSYNKGACILNMLKDFLGEEKFQKGIIQYLKKFSYRNAKNDDLWSSLSNSCLESDFTSGGVCHSDPKMTSNMLAFLGENAEVKEMMTTWTLQKGIPLLVVKQDGCSLRLQQERFLQGVFQEDPEWRALQERYLWHIPLTYSTSSSNVIHRHILKSKTDTLDLPEKTSWVKFNVDSNGYYIVHYEGHGWDQLITQLNQNHTLLRPKDRVGLIHDVFQLVGAGRLTLDKALDMTYYLQHETSSP

SEQ ID NO: 4863 - protein, 532 aa, Homo Sapiens
MFHSSAMVNSHRKPMFNIHRGFYCLTAILPQICICSQFSVPSSYHFTEDPGAFPVATNGERFPWQELRLPSVVIPLHYDLFVHPNLTSLDFVASEKIEVLVSNATQFIILHSKDLEITNATLQSEEDSRYMKPGKELKVLSYPAHEQIALLVPEKLTPHLKYYVAMDFQAKLGDGFEGFYKSTYRTLGGETRILAVTDFEPTQARMAFPCFDEPLFKANFSIKIRRESRHIALSNMPKVKTIELEGGLLEDHFETTVKMSTYLVAYIVCDFHSLSGFTSSGVKVSIYASPDKRNQTHYALQASLKLLDFYEKYFDIYYPLSKLDLIAIPDFAPGAMENWGLITYRETSLLFDPKTSSASDKLWVTRVIAHELAHQWFGNLVTMEWWNDIWLKEGFAKYMELIAVNATYPELQFDDYFLNVCFEVITKDSLNSSRPISKPAETPTQIQEMFDEVSYNKGACILNMLKDFLGEEKFQKGIIQYLKKFSYRNAKNDDLWSSLSNSCLESDFTSGGVCHSDPKMTSNMVRIKRVTE

SEQ ID NO: 4864 - protein, 915 aa, Homo Sapiens
MFHSSAMVNSHRKPMFNIHRGFYCLTAILPQICICSQFSVPSSYHFTEDPGAFPVATNGERFPWQELRLPSVVIPLHYDLFVHPNLTSLDFVASEKIEVLVSNATQFIILHSKDLEITNATLQSEEDSRYMKPGKELKVLSYPAHEQIALLVPEKLTPHLKYYVAMDFQAKLGDGFEGFYKSTYRTLGGETRILAVTDFEPTQARMAFPCFDEPLFKANFSIKIRRESRHIALSNMPKVSIYASPDKRNQTHYALQASLKLLDFYEKYFDIYYPLSKLDLIAIPDFAPGAMENWGLITYRETSLLFDPKTSSASDKLWVTRVIAHELAHQWFGNLVTMEWWNDIWLKEGFAKYMELIAVNATYPELQFDDYFLNVCFEVITKDSLNSSRPISKPAETPTQIQEMFDEVSYNKGACILNMLKDFLGEEKFQKGIIQYLKKFSYRNAKNDDLWSSLSNSCLESDFTSGGVCHSDPKMTSNMLAFLGENAEVKEMMTTWTLQKGIPLLVVKQDGCSLRLQQERFLQGVFQEDPEWRALQERYLWHIPLTYSTSSSNVIHRHILKSKTDTLDLPEKTSWVKFNVDSNGYYIVHYEGHGWDQLITQLNQNHTLLRPKDRVGLIHDVFQLVGAGRLTLDKALDMTYYLQHETSSPALLEGLSYLESFYHMMDRRNISDISENLKRYLLQYFKPVIDRQSWSDKGSVWDRMLRSALLKLACDLNHAPCIQKAAELFSQWMESSGKLNIPTDVLKIVYSVGAQTTAGWNYLLEQYELSMSSAEQNKILYALSTSKHQEKLLKLIELGMEGKVIKTQNLAALLHAIARRPKGQQLAWDFVRENWTHLLKKFDLGSYDIRMIISGTTAHFSSKDKLQEVKLFFESLEAQGSHLDIFQTVLETITKNIKWLEKNLPTLRTWLMVNT

SEQ ID NO: 4865 - protein, 29 aa, Homo Sapiens
MLHRVDGLVSQGQDPSGRILAVTDFEPTQ

SEQ ID NO: 4866 - protein, 79 aa, Homo Sapiens
  misc_feature (1)..(1): Xaa can be any naturally occurring amino acid
XGKVIKTQNLAALLHAIARRPKGQQLAWDFVRENWTHLLKKFDLGSYDIRMIISGTTAHFSSKDKLQEVCDFLFLTISK

SEQ ID NO: 4867 - protein, 163 aa, Homo Sapiens
  misc_feature (1)..(1): Xaa can be any naturally occurring amino acid
XQTHYALQASLKLLDFYEKYFDIYYPLSKLDLIAIPDFAPGAMENWGLITYRETSLLFDPKTSSASDKLWVTRVIAHELAHQWFGNLVTMEWWNDIWLKEGFAKYMELIAVNATYPELQFGACILNMLKDFLGEEKFQKGIIQYLKKFSYRNAKNDDLWSSLS

SEQ ID NO: 4868 - protein, 649 aa, Homo Sapiens
CLSCRNYSRGGVCVTHCNFLNGEPREFAHEAECFSCHPECQPMEGTATCNGSGSDTCAQCAHFRDGPHCVSSCPHGVLGAKGPIYKYPDVQNECRPCHENCTQGCKGPELQDCLGQTLVLIGKTHLTMALTVIAGLVVIFMMLGGTFLYWRGRRIQNKRAMRRYLERGESIEPLDPSEKTPIKWMALESIHFGKYTHQSDVWSYGVTVWELMTFGAEPYAGLRLAEVPDLLEKGERLAQPQICTIDVYMVMVKCWMIDENIRPTFKELANEFTRMARDPPRYLVIKRESGPGIAPGPEPHGLTNKKLEEVELEPELDLDLDLEAEEDNLATTTLGSALSLPVGTLNRPRGSQSLLSPSSGYMPMNQGNLGESCQESAVSGSSERCPRPVSLHPMPRGCLASESSEGHVTGSEAELQEKVSMCRSRSRSRSPRPRGDSAYHSQRHSLLTPVTPLSPPGLEEEDVNGYVMPDTHLKGTPSSREGTLSSVGLSSVLGTEEEDEDEEYEYMNRRRRHSPPHPPRPSSLEELGYEYMDVGSDLSASLGSTQSCPLHPVPIMPTAGTTPDEDYEYMNRQRDGGGPGGDYAAMGACPASEQGYEEMRAFQGPGHQAPHVHYARLKTLRSLEATDSAFDNPDYWHSRLFPKANAQRT

SEQ ID NO: 4869 - protein, 81 aa, Homo Sapiens
LDIKHNRPRRDCVAEGKVCDPLCSSGGCWGPGPGQCLSCRNYSRGGVCVTHCNFLNGYSKGSQSRMGGGGALQWNCSGGIQ

SEQ ID NO: 4870 - protein, 19 aa, Homo Sapiens
MGNLEIVLTGHNADLSFLQ

SEQ ID NO: 4871 - protein, 115 aa, Homo Sapiens
MGNLEIVLTGHNADLSFLQWIREVTGYVLVAMNEFSTLPLPNLRVVRGTQVYDGKFAIFVMLNYNTNSSHALRQLRLTQLTEILSGGVYIEKNDKLCHMDTIDWRDIVRDRDAEI

SEQ ID NO: 4872 - protein, 116 aa, Homo Sapiens
MGNLEIVLTGHNADLSFLQWIREVTGYVLVAMNEFSTLPLPNLRVVRGTQVYDGKFAIFVMLNYNTNSSHALRQLRLTQLTEILSGGVYIEKNDKLCHMDTIDWRDIVRDRDAEIV

SEQ ID NO: 4873 - protein, 1283 aa, Homo Sapiens
MGNLEIVLTGHNADLSFLQWIREVTGYVLVAMNEFSTLPLPNLRVVRGTQVYDGKFAIFVMLNYNTNSSHALRQLRLTQLTEILSGGVYIEKNDKLCHMDTIDWRDIVRDRDAEIVVKDNGRSCPPCHEVCKGRCWGPGSEDCQTLTKTICAPQCNGHCFGPNPNQCCHDECAGGCSGPQDTDCFACRHFNDSGACVPRCPQPLVYNKLTFQLEPNPHTKYQYGGVCVASCPHNFVVDQTSCVRACPPDKMEVDKNGLKMCEPCGGLCPKACEGTGSGSRFQTVDSSNIDGFVNCTKILGNLDFLITGLNGDPWHKIPALDPEKLNVFRTVREITGYLNIQSWPPHMHNFSVFSNLTTIGGRSLYNRGFSLLIMKNLNVTSLGFRSLKEISAGRIYISANRQLCYHHSLNWTKVLRGPTEERLDIKHNRPRRDCVAEGKVCDPLCSSGGCWGPGPGQCLSCRNYSRGGVCVTHCNFLNGEPREFAHEAECFSCHPECQPMEGTATCNGSGSDTCAQCAHFRDGPHCVSSCPHGVLGAKGPIYKYPDVQNECRPCHENCTQGCKGPELQDCLGQTLVLIGKTHLTMALTVIAGLVVIFMMLGGTFLYWRGRRIQNKRAMRRYLERGESIEPLDPSEKANKVLARIFKETELRKLKVLGSGVFGTVHKGVWIPEGESIKIPVCIKVIEDKSGRQSFQAVTDHMLAIGSLDHAHIVRLLGLCPGSSLQLVTQYLPLGSLLDHVRQHRGALGPQLLLNWGVQIAKGMYYLEEHGMVHRNLAARNVLLKSPSQVQVADFGVADLLPPDDKQLLYSEAKTPIKWMALESIHFGKYTHQSDVWSYGVTVWELMTFGAEPYAGLRLAEVPDLLEKGERLAQPQICTIDVYMVMVKCWMIDENIRPTFKELANEFTRMARDPPRYLVIKRESGPGIAPGPEPHGLTNKKLEEVELEPELDLDLDLEAEEDNLATTTLGSALSLPVGTLNRPRGSQSLLSPSSGYMPMNQGNLGESCQESAVSGSSERCPRPVSLHPMPRGCLASESSEGHVTGSEAELQEKVSMCRSRSRSRSPRPRGDSAYHSQRHSLLTPVTPLSPPGLEEEDVNGYVMPDTHLKGTPSSREGTLSSVGLSSVLGTEEEDEDEEYEYMNRRRRHSPPHPPRPSSLEELGYEYMDVGSDLSASLGSTQSCPLHPVPIMPTAGTTPDEDYEYMNRQRDGGGPGGDYAAMGACPASEQGYEEMRAFQGPGHQAPHVHYARLKTLRSLEATDSAFDNPDYWHSRLFPKANAQRT

SEQ ID NO: 4874 - protein, 583 aa, Homo Sapiens
MLAIGSLDHAHIVRLLGLCPGSSLQLVTQYLPLGSLLDHVRQHRGALGPQLLLNWGVQIAKGMYYLEEHGMVHRNLAARNVLLKSPSQVQVADFGVADLLPPDDKQLLYSEAKTPIKWMALESIHFGKYTHQSDVWSYGVTVWELMTFGAEPYAGLRLAEVPDLLEKGERLAQPQICTIDVYMVMVKCWMIDENIRPTFKELANEFTRMARDPPRYLVIKRESGPGIAPGPEPHGLTNKKLEEVELEPELDLDLDLEAEEDNLATTTLGSALSLPVGTLNRPRGSQSLLSPSSGYMPMNQGNLGESCQESAVSGSSERCPRPVSLHPMPRGCLASESSEGHVTGSEAELQEKVSMCRSRSRSRSPRPRGDSAYHSQRHSLLTPVTPLSPPGLEEEDVNGYVMPDTHLKGTPSSREGTLSSVGLSSVLGTEEEDEDEEYEYMNRRRRHSPPHPPRPSSLEELGYEYMDVGSDLSASLGSTQSCPLHPVPIMPTAGTTPDEDYEYMNRQRDGGGPGGDYAAMGACPASEQGYEEMRAFQGPGHQAPHVHYARLKTLRSLEATDSAFDNPDYWHSRLFPKANAQRT

SEQ ID NO: 4875 - protein, 462 aa, Homo Sapiens
MPMSTILPVTSPCLPATGVTVWELMTFGAEPYAGLRLAEVPDLLEKGERLAQPQICTIDVYMVMVKCWMIDENIRPTFKELANEFTRMARDPPRYLVIKRESGPGIAPGPEPHGLTNKKLEEVELEPELDLDLDLEAEEDNLATTTLGSALSLPVGTLNRPRGSQSLLSPSSGYMPMNQGNLGESCQESAVSGSSERCPRPVSLHPMPRGCLASESSEGHVTGSEAELQEKVSMCRSRSRSRSPRPRGDSAYHSQRHSLLTPVTPLSPPGLEEEDVNGYVMPDTHLKGTPSSREGTLSSVGLSSVLGTEEEDEDEEYEYMNRRRRHSPPHPPRPSSLEELGYEYMDVGSDLSASLGSTQSCPLHPVPIMPTAGTTPDEDYEYMNRQRDGGGPGGDYAAMGACPASEQGYEEMRAFQGPGHQAPHVHYARLKTLRSLEATDSAFDNPDYWHSRLFPKANAQRT

SEQ ID NO: 4876 - protein, 126 aa, Homo Sapiens
MRANDALQVLGLLFSLARGSEVGNSQAVCPGTLNGLSVTGDAENQYQTLYKLYERCEVVMGNLEIVLTGHNADLSFLQWIREVTGYVLVAMNEFSTLPLPNLRVVRGTQVYDGKFAIFVMLNYNTN

SEQ ID NO: 4877 - protein, 1342 aa, Homo Sapiens
MRANDALQVLGLLFSLARGSEVGNSQAVCPGTLNGLSVTGDAENQYQTLYKLYERCEVVMGNLEIVLTGHNADLSFLQWIREVTGYVLVAMNEFSTLPLPNLRVVRGTQVYDGKFAIFVMLNYNTNSSHALRQLRLTQLTEILSGGVYIEKNDKLCHMDTIDWRDIVRDRDAEIVVKDNGRSCPPCHEVCKGRCWGPGSEDCQTLTKTICAPQCNGHCFGPNPNQCCHDECAGGCSGPQDTDCFACRHFNDSGACVPRCPQPLVYNKLTFQLEPNPHTKYQYGGVCVASCPHNFVVDQTSCVRACPPDKMEVDKNGLKMCEPCGGLCPKACEGTGSGSRFQTVDSSNIDGFVNCTKILGNLDFLITGLNGDPWHKIPALDPEKLNVFRTVREITGYLNIQSWPPHMHNFSVFSNLTTIGGRSLYNRGFSLLIMKNLNVTSLGFRSLKEISAGRIYISANRQLCYHHSLNWTKVLRGPTEERLDIKHNRPRRDCVAEGKVCDPLCSSGGCWGPGPGQCLSCRNYSRGGVCVTHCNFLNGEPREFAHEAECFSCHPECQPMEGTATCNGSGSDTCAQCAHFRDGPHCVSSCPHGVLGAKGPIYKYPDVQNECRPCHENCTQGCKGPELQDCLGQTLVLIGKTHLTMALTVIAGLVVIFMMLGGTFLYWRGRRIQNKRAMRRYLERGESIEPLDPSEKANKVLARIFKETELRKLKVLGSGVFGTVHKGVWIPEGESIKIPVCIKVIEDKSGRQSFQAVTDHMLAIGSLDHAHIVRLLGLCPGSSLQLVTQYLPLGSLLDHVRQHRGALGPQLLLNWGVQIAKGMYYLEEHGMVHRNLAARNVLLKSPSQVQVADFGVADLLPPDDKQLLYSEAKTPIKWMALESIHFGKYTHQSDVWSYGVTVWELMTFGAEPYAGLRLAEVPDLLEKGERLAQPQICTIDVYMVMVKCWMIDENIRPTFKELANEFTRMARDPPRYLVIKRESGPGIAPGPEPHGLTNKKLEEVELEPELDLDLDLEAEEDNLATTTLGSALSLPVGTLNRPRGSQSLLSPSSGYMPMNQGNLGESCQESAVSGSSERCPRPVSLHPMPRGCLASESSEGHVTGSEAELQEKVSMCRSRSRSRSPRPRGDSAYHSQRHSLLTPVTPLSPPGLEEEDVNGYVMPDTHLKGTPSSREGTLSSVGLSSVLGTEEEDEDEEYEYMNRRRRHSPPHPPRPSSLEELGYEYMDVGSDLSASLGSTQSCPLHPVPIMPTAGTTPDEDYEYMNRQRDGGGPGGDYAAMGACPASEQGYEEMRAFQGPGHQAPHVHYARLKTLRSLEATDSAFDNPDYWHSRLFPKANAQRT

SEQ ID NO: 4878 - protein, 921 aa, Homo Sapiens
MRANDALQVLGLLFSLARGSEVGNSQAVCPGTLNGLSVTGDAENQYQTLYKLYERCEVVMGNLEIVLTGHNADLSFLQWIREVTGYVLVAMNEFSTLPLPNLRVVRGTQVYDGKFAIFVMLNYNTNSSHALRQLRLTQLTEILSGGVYIEKNDKLCHMDTIDWRDIVRDRDAEIVVKDNGRSCPPCHEVCKGRCWGPGSEDCQTLTKTICAPQCNGHCFGPNPNQCCHDECAGGCSGPQDTDCFACRHFNDSGACVPRCPQPLVYNKLTFQLEPNPHTKYQYGGVCVASCPHNFVVDQTSCVRACPPDKMEVDKNGLKMCEPCGGLCPKACEGTGSGSRFQTVDSSNIDGFVNCTKILGNLDFLITGLNGDPWHKIPALDPEKLNVFRTVREITGYLNIQSWPPHMHNFSVFSNLTTIGGRSLYNRGFSLLIMKNLNVTSLGFRSLKEISAGRIYISANRQLCYHHSLNWTKVLRGPTEERLDIKHNRPRRDCVAEGKVCDPLCSSGGCWGPGPGQCLSCRNYSRGGVCVTHCNFLNGEPREFAHEAECFSCHPECQPMEGTATCNGSGSDTCAQCAHFRDGPHCVSSCPHGVLGAKGPIYKYPDVQNECRPCHENCTQGCKGPELQDCLGQTLVLIGKTHLTMALTVIAGLVVIFMMLGGTFLYWRGRRIQNKRAMRRYLERGESIEPLDPSEKANKVLARIFKETELRKLKVLGSGVFGTVHKGVWIPEGESIKIPVCIKVIEDKSGRQSFQAVTDHMLAIGSLDHAHIVRLLGLCPGSSLQLVTQYLPLGSLLDHVRQHRGALGPQLLLNWGVQIAKGMYYLEEHGMVHRNLAARNVLLKSPSQVQVADFGVADLLPPDDKQLLYSEAKTPIKWMALESIHFGKYTHQSDVWSYGQCIWMPSLPSLAPVSNLPFETPS

SEQ ID NO: 4879 - protein, 331 aa, Homo Sapiens
MRANDALQVLGLLFSLARGSEVGNSQAVCPGTLNGLSVTGDAENQYQTLYKLYERCEVVMGNLEIVLTGHNADLSFLQWIREVTGYVLVAMNEFSTLPLPNLRVVRGTQVYDGKFAIFVMLNYNTNSSHALRQLRLTQLTEILSGGVYIEKNDKLCHMDTIDWRDIVRDRDAEIVVKDNGRSCPPCHEVCKGRCWGPGSEDCQTLTKTICAPQCNGHCFGPNPNQCCHDECAGGCSGPQDTDCFACRHFNDSGACVPRCPQPLVYNKLTFQLEPNPHTKYQYGGVCVASCPHNFVVDQTSCVRACPPDKMEVDKNGLKMCEPCGGLCPKAF

SEQ ID NO: 4880 - protein, 183 aa, Homo Sapiens
MRANDALQVLGLLFSLARGSEVGNSQAVCPGTLNGLSVTGDAENQYQTLYKLYERCEVVMGNLEIVLTGHNADLSFLQWIREVTGYVLVAMNEFSTLPLPNLRVVRGTQVYDGKFAIFVMLNYNTNSSHALRQLRLTQLTGQFPMVPSGLTPQPAQDWYLLDDDPRLLTLSASSKVPVTLAAV

SEQ ID NO: 4881 - protein, 43 aa, Homo Sapiens
MRANDALQVPRAQSTSTQMFRMNVGPAMRTAPRGVKDQSFKTV

SEQ ID NO: 4882 - protein, 354 aa, Homo Sapiens
MAPARRPAGARLLLVYAGLLAAAAAGLGSPEPGAPSRSRARREPPPGNELPRGPGESRAGPAARPPEPTAERAHSVDPRDAWMLFVRQSDKGVNGKKRSRGKAKKLKFGLPGPPGPPGPQGPPGPIIPPEALLKEFQLLLKGAVRQRERAEPEPCTCGPAGPVAASLAPVSATAGEDDDDVVGDVLALLAAPLAPGPRAPRVEAAFLCRLRRDALVERRALHELGVYYLPDAEGAFRRGPGLNLTSGQYRAPVAGFYALAATLHVALGEPPRRGPPRPRDHLRLLICIQSRCQRNASLEAIMGLESSSELFTISVNGVLYLQMGQWTSVFLDNASGCSLTVRSGSHFSAVLLGV

SEQ ID NO: 4883 - protein, 63 aa, Homo Sapiens
  misc_feature (1)..(1): Xaa can be any naturally occurring amino acid
XFGYSSLEAIMGLESSSELFTISVNGVLYLQMGQWTSVFLDNASGCSLTVRSGSHFSAVLLGV

SEQ ID NO: 4884 - protein, 74 aa, Homo Sapiens
  misc_feature (1)..(1): Xaa can be any naturally occurring amino acid
XIQSRCQRNASLEAIMGLESSSELFTISVNGVLYLQATKNLVPQDLLGAKLVWQGRSGLGEKGAMASHLHLLTN

SEQ ID NO: 4885 - protein, 275 aa, Homo Sapiens
MNMTQARVLVAAVVGLVAVLLYASIHKIEEGHLAVYYRGGALLTSPSGPGYHIMLPFITTFRSVQTTLQTDEVKNVPCGTSGGVMIYIDRIEVVNMLAPYAVFDIVRNYTADYDKTLIFNKIHHELNQFCSAHTLQEVYIELFDQIDENLKQALQKDLNLMAPGLTIQAVRVTKPKIPEAIRRNFELMEAEKTKLLIAAQKQKVVEKEAETERKKAVIEAEKIAQVAKIRFQQKVMEKETEKRISEIEDAAFLAREKAKADAEYYAAHKYATSNK

SEQ ID NO: 4886 - protein, 348 aa, Homo Sapiens
MNMTQARVLVAAVVGLVAVLLYASIHKIEEGHLAVYYRGGALLTSPSGPGYHIMLPFITTFRSVQTTLQTDEVKNVPCGTSGGVMIYIDRIEVVNMLAPYAVFDIVRNYTADYDKTLIFNKIHHELNQFCSAHTLQEVYIELFDQIDENLKQALQKDLNLMAPGLTIQAVRVTKPKIPEAIRRNFELMEAEKTKLLIAAQKQKVVEKEAETERKKAVIEAEKIAQVAKIRFQQKVMEKETEKRISEIEDAAFLAREKAKADAEYYAAHKYATSNKHKLTPEYLELKKYQAIASNSKIYFGSNIPNMFVDSSCALKYSDIRTGRESSLPSKEALEPSGENVIQNKESTG

SEQ ID NO: 4887 - protein, 348 aa, Homo Sapiens; identical to SEQ ID NO: 4886

SEQ ID NO: 4888 - protein, 339 aa, Homo Sapiens
MAQLGAVVAVASSFFCASLFSAVHKIEEGHIGVYYRGGALLTSTSGPGFHLMLPFITSYKSVQTTLQTDEVKNVPCGTSGGVMIYFDRIEVVNFLVPNAVYDIVKNYTADYDKALIFNKIHHELNQFCSVHTLQEVYIELFDQIDENLKLALQQDLTSMAPGLVIQAVRVTKPNIPEAIRRNYELMESEKTKLLIAAQKQKVVEKEAETERKKALIEAEKVAQVAEITYGQKVMEKETEKKISEIEDAAFLAREKAKADAECYTAMKIAEANKLKLTPEYLQLMKYKAIASNSKIYFGKDIPNMFMDSAGSVSKQFEGLADKLSFGLEDEPLETATKEN

SEQ ID NO: 4889 - protein, 339 aa, Homo Sapiens; identical to SEQ ID NO: 4888

SEQ ID NO: 4890 - protein, 338 aa, Homo Sapiens
MAQLGAVVAVASSFFCASLFSAVHKIEEGHIGVYYRGGALLTSTSGPGFHLMLPFITSYKSVQTTLQTDEVKNVPCGTSGGVMIYFDRIEVVNFLVPNAVYDIVKNYTADYDKALIFNKIHHELNQFCSVHTLQEVYIELFDQIDENLKLALQQDLTSMAPGLVIQAVRVTKPNIPEAIRRNYELMESEKTKLLIAAQKQKVVEKEAETERKKALIEAEKVAQVAEITYGQKVMEKETEKKISEIEDAAFLAREKAKADAECYTAMKIAEANKLKLTPEYLQLMKYKAIASNSKIYFGKDIPNMFMDSAGSVSKQFEGLADKLSFGLEDEPLETATKE

SEQ ID NO: 4891 - protein, 206 aa, Homo Sapiens
MAQLGAVVAVASSFFCASLFSAVHKIEEGHIGVYYRGGALLTSTSGPGFHLMLPFITSYKSVQTTLQTDEVKNVPCGTSGGVMIYFDRIEVVNFLVPNAVYDIVKNYTADYDKALIFNKIHHELNQFCSVHTLQEVYIELFGKKVSPEHAVLKQGSWNPASLHCLKPGCLQGVMVTYGQEMLKNLVLRSWSQRSSWRMLIAMQQDP

SEQ ID NO: 4892 - protein, 206 aa, Homo Sapiens; identical to SEQ ID NO: 4891

SEQ ID NO: 4893 - protein, 206 aa, Homo Sapiens; identical to SEQ ID NO: 4891

SEQ ID NO: 4894 - protein, 152 aa, Homo Sapiens
MAQLGAVVAVASSFFCASLFSAVHKIEEGHIGVYYRGGALLTSTSGPGFHLMLPFITSYKSVQTTLQTDEVKNVPCGTSGGVMIYFDRIEVVNFLVPNAVYDIVKNYTADYDKALIFNKIHHELNQFCSVHTLQEVYIELFGLENDFSQESS

SEQ ID NO: 4895 - protein, 152 aa, Homo Sapiens; identical to SEQ ID NO: 4894

SEQ ID NO: 4896 - protein, 197 aa, Homo Sapiens
MAQLGAVVAVASSFFCASLFSAVHKIEEGHIGVYYSGGVMIYFDRIEVVNFLVPNAVYDIVKNYTADYDKALIFNKIHHELNQFCSVHTLQEVYIELFDQIDENLKLALQQDLTSMAPGLVIQAVRVTKPNIPEAIRRNYELMESEKTKLLIAAQKQKVVEKEAETERKKALIEAEKVAQVAEITYGQKVMEKETEK

SEQ ID NO: 4897 - protein, 977 aa, Homo Sapiens
MPARRLLLLLTLLLPGLGIFGSTSTVTLPETLLFVSTLDGSLHAVSKRTGSIKWTLKEDPVLQVPTHVEEPAFLPDPNDGSLYTLGSKNNEGLTKLPFTIPELVQASPCRSSDGILYMGKKQDIWYVIDLLTGEKQQTLSSAFADSLCPSTSLLYLGRTEYTITMYDTKTRELRWNATYFDYAASLPEDDVDYKMSHFVSNGDGLVVTVDSESGDVLWIQNYASPVVAFYVWQREGLRKVMHINVAVETLRYLTFMSGEVGRITKWKYPFPKETEAKSKLTPTLYVGKYSTSLYASPSMVHEGVAVVPRGSTLPLLEGPQTDGVTIGDKGECVITPSTDVKFDPGLKSKNKLNYLRNYWLLIGHHETPLSASTKMLERFPNNLPKHRENVIPADSEKKSFEEVINLVDQTSENAPTTVSRDVEEKPAHAPARPEAPVDSMLKDMATIILSTFLLIGWVAFIITYPLSMHQQQQLQHQQFQKELEKIQLLQQQQQQLPFHPPGDTAQDGELLDTSGPYSESSGTSSPSTSPRASNHSLCSGSSASKAGSSPSLEQDDGDEETSVVIVGKISFCPKDVLGHGAEGTIVYRGMFDNRDVAVKRILPECFSFADREVQLLRESDEHPNVIRYFCTEKDRQFQYIAIELCAATLQEYVEQKDFAHLGLEPITLLQQTTSGLAHLHSLNIVHRDLKPHNILISMPNAHGKIKAMISDFGLCKKLAVGRHSFSRRSGVPGTEGWIAPEMLSEDCKENPTYTVDIFSAGCVFYYVISEGSHPFGKSLQRQANILLGACSLDCLHPEKHEDVIARELIEKMIAMDPQKRPSAKHVLKHPFFWSLEKQLQFFQDVSDRIEKESLDGPIVKQLERGGRAVVKMDWRENITVPLQTDLRKFRTYKGGSVRDLLRAMRNKKHHYRELPAEVRETLGSLPDDFVCYFTSRFPHLLAHTYRAMELCSHERLFQPYYFHEPPEPQPPVTPDAL

SEQ ID NO: 4898 - protein, 70 aa, Homo Sapiens
MPARRLLLLLTLLLPGLGVSDRGAWGGGQLATAGSGPGQRRGAGAGVRAGSATAAARCPVSPAVGGSGRA

SEQ ID NO: 4899 - protein, 23 aa, Homo Sapiens
ELLQLLPPDSPTRWLPGTWLEPC

SEQ ID NO: 4900 - protein, 80 aa, Homo Sapiens
MASAVRGSRPWPRLGLQLQFAALLLGTLSPQGCGWATRMLGLLLGAQPHPVCSRRDWSRFILSGQRTSCWCPPWMEVSTH

SEQ ID NO: 4901 - protein, 129 aa, Homo Sapiens
MASAVRGSRPWPRLGLQLQFAALLLGTLSPQVHTLRPENLLLVSTLDGSLHALSKQTGDLKWTLRDDPVIEGPMYVTEMAFLSDPADGSLYILGTQKQQGLMAGVQWYDHKAHCSLELLASSNPRTSVS

SEQ ID NO: 4902 - protein, 926 aa, Homo Sapiens
MASAVRGSRPWPRLGLQLQFAALLLGTLSPQVHTLRPENLLLVSTLDGSLHALSKQTGDLKWTLRDDPVIEGPMYVTEMAFLSDPADGSLYILGTQKQQGLMKLPFTIPELVHASPCRSSDGVFYTGRKQDAWFVVDPESGETQMTLTTEGPSTPRLYIGRTQYTVTMHDPRAPALRWNTTYRRYSAPPMDGSPGKYMSHLASCGMGLLLTVDPGSGTVLWTQDLGVPVMGVYTWHQDGLRQLPHLTLARDTLHFLALRWGHIRLPASGPRDTATLFSTLDTQLLMTLYVGKDETGFYVSKALVHTGVALVPRGLTLAPADGPTTDEVTLQVSGEREGSPSTAVRYPSGSVALPSQWLLIGHHELPPVLHTTMLRVHPTLGSGTAETRPPENTQAPAFFLELLSLSREKLWDSELHPEEKTPDSYLGLGPQDLLAASLTAVLLGGWILFVMRQQQPQVVEKQQETPLAPADFAHISQDAQSLHSGASRRSQKRLQSPSKQAQPLDDPEAEQLTVVGKISFNPKDVLGRGAGGTFVFRGQFEGRAVAVKRLLRECFGLVRREVQLLQESDRHPNVLRYFCTERGPQFHYIALELCRASLQEYVENPDLDRGGLEPEVVLQQLMSGLAHLHSLHIVHRDLKPGNILITGPDSQGLGRVVLSDFGLCKKLPAGRCSFSLHSGIPGTEGWMAPELLQLLPPDSPTSAVDIFSAGCVFYYVLSGGSHPFGDSLYRQANILTGAPCLAHLEEEVHDKVVARDLVGAMLSPLPQPRPSAPQVLAHPFFWSRAKQLQFFQDVSDWLEKESEQEPLVRALEAGGCAVVRDNWHEHISMPLQTDLRKFRSYKGTSVRDLLRAVRNKKHHYRELPVEVRQALGQVPDGFVQYFTNRFPRLLLHTHRAMRSCASESLFLPYYPPDSEARRPCPGATGR

SEQ ID NO: 4903 - protein, 874 aa, Homo Sapiens
MASAVRGSRPWPRLGLQLQFAALLLGTLSPQVHTLRPENLLLVSTLDGSLHALSKQTGDLKWTLRDDPVIEGPMYVTEMAFLSDPADGSLYILGTQKQQGLMKLPFTIPELVHASPCRSSDGVFYTGRKQDAWFVVDPESGETQMTLTTEGPSTPRLYIGRTQYTVTMHDPRAPALRWNTTYRRYSAPPMDGSPGKYMSHLASCGMGLLLTVDPGSGTVLWTQDLGVPVMGVYTWHQDGLRQLPHLTLARDTLHFLALRWGHIRLPASGPRDTATLFSTLDTQLLMTLYVGKDETGFYVSKALVHTGVALVPRGLTLAPADGPTTDEVTLQVSGEREGSPSTAVRYPSGSVALPSQWLLIGHHELPPVLHTTMLRVHPTLGSGTAETRPPENTQAPAFFLEQQPQVVEKQQETPLAPADFAHISQDAQSLHSGASRRSQKRLQSPSKQAQPLDDPEAEQLTVVGKISFNPKDVLGRGAGGTFVFRGQFEGRAVAVKRLLRECFGLVRREVQLLQESDRHPNVLRYFCTERGPQFHYIALELCRASLQEYVENPDLDRGGLEPEVVLQQLMSGLAHLHSLHIVHRDLKPGNILITGPDSQGLGRVVLSDFGLCKKLPAGRCSFSLHSGIPGTEGWMAPELLQLLPPDSPTSAVDIFSAGCVFYYVLSGGSHPFGDSLYRQANILTGAPCLAHLEEEVHDKVVARDLVGAMLSPLPQPRPSAPQVLAHPFFWSRAKQLQFFQDVSDWLEKESEQEPLVRALEAGGCAVVRDNWHEHISMPLQTDLRKFRSYKGTSVRDLLRAVRNKKHHYRELPVEVRQALGQVPDGFVQYFTNRFPRLLLHTHRAMRSCASESLFLPYYPPDSEARRPCPGATGR

SEQ ID NO: 4904 - protein, 169 aa, Homo Sapiens
MGRGWGFLFGLLGAVWLLSSGHGEEQPPETAAQRCFCQVNLKRPCPFWNDISQCGRRDCAVKPCQSDEVPDGIKSASYKYSEEANNLIEECEQAERLGAVDESLSEETQKAVLQWTKHDDSSDNFCEADDIQSPEAEYVDLLLNPERYTGYKGPDAWKIWNVIYEENCF

SEQ ID NO: 4905 - protein, 125 aa, Homo Sapiens
MGRGWGFLFGLLGAVWLLSSGHGEEQPPETAAQRCFCQVSGYLDDCTCDVETIDRFNNYRLFPRLQKLLESDYFRYYKVNLKRPCPFWNDISQCGRRDCAVKPCQSDEVPDGIKSASYKVCTYTY

SEQ ID NO: 4906 - protein, 257 aa, Homo Sapiens
MGRGWGFLFGLLGAVWLLSSGHGEEQPPETAAQRCFCQVSGYLDDCTCDVETIDRFNNYRLFPRLQKLLESDYFRYYKVNLKRPCPFWNDISQCGRRDCAVKPCQSDEVPDGIKSASYKYSEEANNLIEECEQAERLGAVDESLSEETQKAVLQWTKHDDSSDNFCEADDIQSPEAEYVDLLLNPERYTGYKGPDAWKIWNVIYEENCFKPQTIKRPLNPLASGQGKLLICVSLLFLRSLCRKKSILQTYIWPTCKH

SEQ ID NO: 4907 - protein, 257 aa, Homo Sapiens; identical to SEQ ID NO: 4906

SEQ ID NO: 4908 - protein, 257 aa, Homo Sapiens; identical to SEQ ID NO: 4906

SEQ ID NO: 4909 - protein, 468 aa, Homo Sapiens
MGRGWGFLFGLLGAVWLLSSGHGEEQPPETAAQRCFCQVSGYLDDCTCDVETIDRFNNYRLFPRLQKLLESDYFRYYKVNLKRPCPFWNDISQCGRRDCAVKPCQSDEVPDGIKSASYKYSEEANNLIEECEQAERLGAVDESLSEETQKAVLQWTKHDDSSDNFCEADDIQSPEAEYVDLLLNPERYTGYKGPDAWKIWNVIYEENCFKPQTIKRPLNPLASGQGTSEENTFYSWLEGLCVEKRAFYRLISGLHASINVHLSARYLLQETWLEKKWGHNITEFQQRFDGILTEGEGPRRLKNLYFLYLIELRALSKVLPFFERPDFQLFTGNKIQDEENKMLLLEILHEIKSFPLHFDENSFFAGDKKEAHKLKEDFRLHFRNISRIMDCVGCFKCRLWGKLQTQGLGTALKILFSEKLIANMPESGPSYEFHLTRQEIVSLFNAFGRISTSVKELENFRNLLQNIH

SEQ ID NO: 4910 - protein, 75 aa, Homo Sapiens
MLLLEILHEIKSFPLHFDENSFFAGDKKEAHKLKEDFRLHFRNISRIMDCVGCFKCRLWGKLQTQGLGTALKILF

SEQ ID NO: 4911 - protein, 71 aa, Homo Sapiens
MANNTKELEDCEQANKLGAINSTLSNQSKEAFIDWARYDDSRDHFCELDDERSPAAQYVDLLLNPERYTGY

SEQ ID NO: 4912 - protein, 467 aa, Homo Sapiens
MSQGVRRAGAGQGVAAAVQLLVTLSFLRSVVEAQVTGVLDDCLCDIDSIDNFNTYKIFPKIKKLQERDYFRYYKVNLKRPCPFWAEDGHCSIKDCHVEPCPESKIPVGIKAGHSNKYLKMANNTKELEDCEQANKLGAINSTLSNQSKEAFIDWARYDDSRDHFCELDDERSPAAQYVDLLLNPERYTGYKGTSAWRVWNSIYEENCFKPRSVYRPLNPLAPSRGEDDGESFYTWLEGLCLEKRVFYKLISGLHASINLHLCANYLLEETWGKPSWGPNIKEFKHRFDPVETKGEGPRRLKNLYFLYLIELRALSKVAPYFERSIVDLYTGNAEEDADTKTLLLNIFQDTKSFPMHFDEKSMFAGDKKGAKSLKEEFRLHFKNISRIMDCVGCDKCRLWGKLQTQGLGTALKILFSEKEIQKLPENSPSKGFQLTRQEIVALLNAFGRLSTSIRDLQNFKVLLQHSR

SEQ ID NO: 4913 - protein, 173 aa, Homo Sapiens
WGPNIKEFKHRFDPVETKGEGPRRLKNLYFLYLIELRALSKVAPYFERSIVDLYTGNAEEDADTKTLLLNIFQDTKSFPMHFDEKSMFAGDKKGAKSLKEEFRLHFKNISRIMDCVGCDKCRLWGKLQTQGLGTALKILFSEKEIQKLPENSPSKGFQLTRQEIVALLNAFGR

SEQ ID NO: 4914 - protein, 273 aa, Homo Sapiens
MEAAPSRFMFLLFLLTCELAAEVAAEVEKSSDGPGAAQEPTWLTDVPAAMEFIAATEVAVIGFFQDLEIPAVPILHSMVQKFPGVSFGISTDSEVLTHYNITGNTICLFRLVDNEQLNLEDEDIESIDATKLSRFIEINSLHMVTEYNPVTVIGLFNSVIQIHLLLIMNKASPEYEENMHRYQKAAKLFQGKILFILVDSGMKENGKVISFFKLKESQLPALAIYQTLDDEWDTLPTAEVSVEHVQNFCDGFLSGKLLKENRESEGKTPKVEL

SEQ ID NO: 4915 - protein, 172 aa, Homo Sapiens
MKETCQLEIQVDNEQLNLEDEDIESIDATKLSRFIEINSLHMVTEYNPVTVIGLFNSVIQIHLLLIMNKASPEYEENMHRYQKAAKLFQGKILFILVDSGMKENGKVISFFKLKESQLPALAIYQTLDDEWDTLPTAEVSVEHVQNFCDGFLSGKLLKENRESEGKTPKVEL

SEQ ID NO: 4916 - protein, 53 aa, Homo Sapiens
MAAAVPRAAFLSPLLPLLLGFLLLSAPHGGSGLHTKGALPLDTVTFYKIMVTS

SEQ ID NO: 4917 - protein, 261 aa, Homo Sapiens
MAAAVPRAAFLSPLLPLLLGFLLLSAPHGGSGLHTKGALPLDTVTFYKVIPKSKFVLVKFDTQYPYGEKQDEFKRLAENSASSDDLLVAEVGISDYGDKLNMELSEKYKLDKESYPVFYLFRDGDFENPVPYTGAVKVGAIQRWLKGQGVYLGMPGCLPVYDALAGEFIRASGVEARQALLKQGQDNLSSVKETQKKWAEQYLKIMGKILDQGEDFPASEMTRIARLIEKNKMSDGKKEELQKSLNILTAFQKKGAEKEEL

SEQ ID NO: 4918 - protein, 160 aa, Homo Sapiens
MELSEKYKLDKESYPVFYLFRDGDFENPVPYTGAVKVGAIQRWLKGQGVYLGMPGCLPVYDALAGEFIRASGVEARQALLKQGQDNLSSVKETQKKWAEQYLKIMGKILDQGEDFPASEMTRIARLIEKNKMSDGKKEELQKSLNILTAFQKKGAEKEEL

SEQ ID NO: 4919 - protein, 95 aa, Homo Sapiens
  misc_feature (1)..(1): Xaa can be any naturally occurring amino acid
XPAPHFSPRCFPFSWASCSSPLRMAAAACTPRAPFPWIRSLSTRGPLGRGISPKSPWNTHLLSSIRPQVIPKSKFVLVKFDTQYPYGEKQDEFKR

SEQ ID NO: 4920 - protein, 406 aa, Homo Sapiens
MHPAVFLSLPDLRCSLLLLVTWVFTPVTTEITSLDTENIDEILNNADVALVNFYADWCRFSQMLHPIFEEASDVIKEEFPNENQVVFARVDCDQHSDIAQRYRISKYPTLKLFRNGMMMKREYRGQRSVKALADYIRQQKSDPIQEIRDLAEITTLDRSKRNIIGYFEQKDSDNYRVFERVANILHDDCAFLSAFGDVSKPERYSGDNIIYKPPGHSAPDMVYLGAMTNFDVTYNWIQDKCVPLVREITFENGEELTEEGLPFLILFHMKEDTESLEIFQNEVARQLISEKGTINFLHADCDKFRHPLLHIQKTPADCPVIAIDSFRHMYVFGDFKDVLIPGKLKQFVFDLHSGKLHREFHHGPDPTDTAPGEQAQDVASSPPESSFQKLAPSEYRYTLLRDRDEL

SEQ ID NO: 4921 - protein, 604 aa, Homo Sapiens
MLGMNMLLITLFLLLPLSMLKGEPWEGCLHCTHTTWSGNIMTKTLLYHTYYECAGTCLGTCTHNQTTYSVCDPGRGQPYVCYDPKSSPGTWFEIHVGSKEGDLLNQTKVFPSGKDVVSLYFDVCQIVSMGSLFPVIFSSMEYYSSCHKNRYAHPACSTDSPVTTCWDCTTWSTNQQSLGPIMLTKIPLEPDCKTSTCNSVNLTILEPDQPIWTTGLKAPLGARVSGEEIGPGAYVYLYIIKKTRTRSTQQFRVFESFYEHVNQKLPEPPPLASNLFAQLAENIASSLHVASCYVCGGMNMGDQWPWEARELMPQDNFTLTASSLEPAPSSQSIWFLKTSIIGKFCIARWGKAFTDPVGELTCLGQQYYNETLGKTLWRGKSNNSESPHPSPFSRFPSLNHSWYQLEAPNTWQAPSGLYWICGPQAYRQLPAKWSGACVLGTIRPSFFLMPLKQGEALGYPIYDETKRKSKRGITIGDWKDNEWPPERIIQYYGPATWAEDGMWGYRTPVYMLNRIIRLQAVLEIITNETAGALNLLAQQATKMRNVIYQNRLALDYLLAQEEGVCGKFNLTNCCLELDDEGKVIKEITAKIQKLAHIPVQTWKG

SEQ ID NO: 4922 - protein, 89 aa, Homo Sapiens
MKSVLLLTTLLVPAHLVAAWSNNYAVDCPQHCDSSECKSSPRCKRTVLDDCGCCRVCAAGRGETCYRTVSGMDGMKCGPGLRCQPSNGE

SEQ ID NO: 4923 - protein, 184 aa, Homo Sapiens
MKSVLLLTTLLVPAHLVAAWSNNYAVDCPQHCDSSECKSSPRCKRTVLDDCGCCRVCAAGRGETCYRTVSGMDGMKCGPGLRCQPSNGEDPFGEEFGICKDCPYGTFGMDCRETCNCQSGICDRGTGKCLKFPFFQYSVTKSSNRFVSLTEHDMASGDGNIVREEVVKENAAGSPVMRKWLNPR

SEQ ID NO: 4924 - protein, 134 aa, Homo Sapiens
MKSVLLLTTLLVPAHLVAAWSNNYAVDCPQHCDSSECKSSPRCKRTVLDDCGCCRVCAAGRGETCYRTVSGMDGMKCGPGLRCQPSNGEDPFGEEFGICKEHDMASGDGNIVREEVVKENAAGSPVMRKWLNPR

SEQ ID NO: 4925 - protein, 522 aa, Homo Sapiens
EFKKCCPGSPDIDKLDVATMTEYLNFEKSSSVSRYGASQVEDMGNIILAMISEPYNHRFSDPERVNYKFESGTCSKMELIDDNTVVRARGLPWQSSDQDIARFFKGLNIAKGGAALCLNAQGRRNGEALVRFVSEEHRDLALQRHKHHMGTRYIEVYKATGEDFLKIAGGTSNEVAQFLSKENQVIVRMRGLPFTATAEEVVAFFGQHCPITGGKEGILFVTYPDGRPTGDAFVLFACEEYAQNALRKHKDLLGKRYIELFRSTAAEVQQVLNRFSSAPLIPLPTPPIIPVLPQQFVPPTNVRDCIRLRGLPYAATIEDILDFLGEFATDIRTHGVHMVLNHQGRPSGDAFIQMKSADRAFMAAQKCHKKNMKDRYVEVFQCSAEEMNFVLMGGTLNRNGLSPPPCKLPCLSPPSYTFPAPAAVIPTEAAIYQPSVILNPRALQPSTAYYPAGTQLFMNYTAYYPSPPGSPNSLGYFPTAANLSGVPPQPGTVVRMQGLAYNTGVKEILNFFQGYQCLKDVW

SEQ ID NO: 4926 - protein, 677 aa, Homo Sapiens
MTASPDYLVVLFGITAGATGAKLGSDEKELILLFWKVVDLANKKVGQLHEVLVRPDQLELTEDCKEETKIDVESLSSASQLDQALRQFNQSVSNELNIGVGTSFCLCTDGQLHVRQILHPEASKKNVLLPECFYSFFDLRKEFKKCCPGSPDIDKLDVATMTEYLNFEKSSSVSRYGASQVEDMGNIILAMISEPYNHRFSDPERVNYKFESGTCSKMELIDDNTVVRARGLPWQSSDQDIARFFKGLNIAKGGAALCLNAQGRRNGEALVRFVSEEHRDLALQRHKHHMGTRYIEVYKATGEDFLKIAGGTSNEVAQFLSKENQVIVRMRGLPFTATAEEVVAFFGQHCPITGGKEGILFVTYPDGRPTGDAFVLFACEEYAQNALRKHKDLLGKRYIELFRSTAAEVQQVLNRFSSAPLIPLPTPPIIPVLPQQFVPPTNVRDCIRLRGLPYAATIEDILDFLGEFATDIRTHGVHMVLNHQGRPSGDAFIQMKSADRAFMAAQKCHKKNMKDRYVEVFQCSAEEMNFVLMGGTLNRNGLSPPPCLSPPSYTFPAPAAVIPTEAAIYQPSVILNPRALQPSTAYYPAGTQLFMNYTAYYPSPPGSPNSLGYFPTAANLSGVPPQPGTVVRMQGLAYNTGVKEILNFFQGYQYATEDGLIHTNDQARTLPKEWVCI

SEQ ID NO: 4927 - protein, 681 aa, Homo Sapiens
MTASPDYLVVLFGITAGATGAKLGSDEKELILLFWKVVDLANKKVGQLHEVLVRPDQLELTEDCKEETKIDVESLSSASQLDQALRQFNQSVSNELNIGVGTSFCLCTDGQLHVRQILHPEASKKNVLLPECFYSFFDLRKEFKKCCPGSPDIDKLDVATMTEYLNFEKSSSVSRYGASQVEDMGNIILAMISEPYNHRFSDPERVNYKFESGTCSKMELIDDNTVVRARGLPWQSSDQDIARFFKGLNIAKGGAALCLNAQGRRNGEALVRFVSEEHRDLALQRHKHHMGTRYIEVYKATGEDFLKIAGGTSNEVAQFLSKENQVIVRMRGLPFTATAEEVVAFFGQHCPITGGKEGILFVTYPDGRPTGDAFVLFACEEYAQNALRKHKDLLGKRYIELFRSTAAEVQQVLNRFSSAPLIPLPTPPIIPVLPQQFVPPTNVRDCIRLRGLPYAATIEDILDFLGEFATDIRTHGVHMVLNHQGRPSGDAFIQMKSADRAFMAAQKCHKKNMKDRYVEVFQCSAEEMNFVLMGGTLNRNGLSPPPCKLPCLSPPSYTFPAPAAVIPTEAAIYQPSVILNPRALQPSTAYYPAGTQLFMNYTAYYPSPPGSPNSLGYFPTAANLSGVPPQPGTVVRMQGLAYNTGVKEILNFFQGYQYATEDGLIHTNDQARTLPKEWVCI

SEQ ID NO: 4928 - protein, 659 aa, Homo Sapiens
MTASPDYLVVLFGITAGATGAKLGSDEKELILLFWKVVDLANKKVGQLHEVLVRPDQLELTEDCKEETKIDVESLSSASQLDQALRQFNQSVSNELNIGVGTSFCLCTDGQLHVRQILHPEASKKNVLLPECFYSFFDLRKEFKKCCPGSPDIDKLDVATMTEYLNFEKSSSVSRYGASQVEDMGNIILAMISEPYNHRFSDPERVNYKFESGTCSKMELIDDNTVVRARGLPWQSSDQDIARFFKGLNIAKGGAALCLNAQGRRNGEALVRFVSEEHRDLALQRHKHHMGTRYIEVYKATGEDFLKIAGGTSNEVAQFLSKENQVIVRMRGLPFTATAEEVVAFFGQHCPITGGKEGILFVTYPDGRPTGDAFVLFACEEYAQNALRKHKDLLGKRYIELFRSTAAEVQQVLNRFSSAPLIPLPTPPIIPVLPQQFVPPTNVRDCIRLRGLPYAATIEDILDFLGEFATDIRTHGVHMVLNHQGRPSGDAFIQMKSADRAFMAAQKCHKKNMKDRYVEVFQCSAEEMNFVLMGGTLNRNGLSPPPCLSPPSYTFPAPAAVIPTEAAIYQPSVILNPRALQPSTAYYPAGTQLFMNYTAYYPSPPGSPNSLGYFPTAANLSGVPPQPGTVVRMQGLAYNTGVKEILNFFQGYQCLKDVW

SEQ ID NO: 4929 - protein, 604 aa, Homo Sapiens
MTASPDYLVVLFGITAGATGAKLGSDEKELILLFWKVVDLANKKVGQLHEVLVRPDQLELTEDCKEETKIDVESLSSASQLDQALRQFNQSVSNELNIGVGTSFCLCTDGQLHVRQILHPEASKKNVLLPECFYSFFDLRKEFKKCCPGSPDIDKLDVATMTEYLNFEKSSSVSRYGASQVEDMGNIILAMISEPYNHRFSDPERVNYKFESGTCSKMELIDDNTVVRARGLPWQSSDQDIARFFKGLNIAKGGAALCLNAQGRRNGEALVRFVSEEHRDLALQRHKHHMGTRYIEVYKATGEDFLKIAGGTSNEVAQFLSKENQVIVRMRGLPFTATAEEVVAFFGQHCPITGGKEGILFVTYPDGRPTGDAFVLFACEEYAQNALRKHKDLLGKRYIELFRSTAAEVQQVLNRFSSAPLIPLPTPPIIPVLPQQFVPPTNVRDCIRLRGLPYAATIEDILDFLGEFATDIRTHGVHMVLNHQGRPSGDAFIQMKSADRAFMAAQKCHKKNMKDRYVEVFQCSAEEMNFVLMGGTLNRNGLSPPPCLSPPSYTFPAPAAVIPTEAAIYQPSVILNPRALQPSTAYYPAGTQLFMNYTAYYPSV

SEQ ID NO: 4930 - protein, 681 aa, Homo Sapiens; identical to SEQ ID NO: 4927

SEQ ID NO: 4931 - protein, 608 aa, Homo Sapiens
MTASPDYLVVLFGITAGATGAKLGSDEKELILLFWKVVDLANKKVGQLHEVLVRPDQLELTEDCKEETKIDVESLSSASQLDQALRQFNQSVSNELNIGVGTSFCLCTDGQLHVRQILHPEASKKNVLLPECFYSFFDLRKEFKKCCPGSPDIDKLDVATMTEYLNFEKSSSVSRYGASQVEDMGNIILAMISEPYNHRFSDPERVNYKFESGTCSKMELIDDNTVVRARGLPWQSSDQDIARFFKGLNIAKGGAALCLNAQGRRNGEALVRFVSEEHRDLALQRHKHHMGTRYIEVYKATGEDFLKIAGGTSNEVAQFLSKENQVIVRMRGLPFTATAEEVVAFFGQHCPITGGKEGILFVTYPDGRPTGDAFVLFACEEYAQNALRKHKDLLGKRYIELFRSTAAEVQQVLNRFSSAPLIPLPTPPIIPVLPQQFVPPTNVRDCIRLRGLPYAATIEDILDFLGEFATDIRTHGVHMVLNHQGRPSGDAFIQMKSADRAFMAAQKCHKKNMKDRYVEVFQCSAEEMNFVLMGGTLNRNGLSPPPCKLPCLSPPSYTFPAPAAVIPTEAAIYQPSVILNPRALQPSTAYYPAGTQLFMNYTAYYPSV

SEQ ID NO: 4932 - protein, 502 aa, Homo Sapiens
  misc_feature (1)..(1): Xaa can be any naturally occurring amino acid
XFFDLRKEFKKCCPGSPDIDKLDVATMTEYLNFEKSSSVSRYGASQVEDMGNIILAMISEPYNHRFSDPERVNYKFESGTCSKMELIDDNTVVRARGLPWQSSDQDIARFFKGLNIAKGGAALCLNAQGRRNGEALVRFVSEEHRDLALQRHKHHMGTRYIEVYKATGEDFLKIAGGTSNEVAQFLSKENQVIVRMRGLPFTATAEEVVAFFGQHCPITGGKEGILFVTYPDGRPTGDAFVLFACEEYAQNALRKHKDLLGKRYIELFRSTAAEVQQVLNRFSSAPLIPLPTPPIIPVLPQQFVPPTNVRDCIRLRGLPYAATIEDILDFLGEFATDIRTHGVHMVLNHQGRPSGDAFIQMKSADRAFMAAQKCHKKNMKDRYVEVFQCSAEEMNFVLMGGTLNRNGLSPPPCKLPCLSPPSYTFPAPAAVIPTEAAIYQPSVILNPRALQPSTAYYPAGTQLFMNYTAYYPSMQPRMDLYTQMTRPGLYPKNGFVFKGPSS

SEQ ID NO: 4933 - protein, 40 aa, Homo Sapiens
  misc_feature (1)..(1): Xaa can be any naturally occurring amino acid
XLLPECFYSFFDLRKEFKKCCPGSPDIDKLDVATMTECIL

SEQ ID NO: 4934 - protein, 56 aa, Homo Sapiens
MAIKSIASRLRGSRRFLSGFVAGAVVGAAGAGLAALQFFRSQGAEGALTGKQPDDC

SEQ ID NO: 4935 - protein, 56 aa, Homo Sapiens; identical to SEQ ID NO: 4934

SEQ ID NO: 4936 - protein, 56 aa, Homo Sapiens; identical to SEQ ID NO: 4934

SEQ ID NO: 4937 - protein, 56 aa, Homo Sapiens; identical to SEQ ID NO: 4934

SEQ ID NO: 4938 - protein, 56 aa, Homo Sapiens; identical to SEQ ID NO: 4934

SEQ ID NO: 4939 - protein, 318 aa, Homo Sapiens
MAIKSIASRLRGSRRFLSGFVAGAVVGAAGAGLAALQFFRSQGAEGALTGKQPDGDADRKHCKFKPDPNIPPTFSAFNEDYVGSGWSRGHMAPAGNNKFSSKAMAETFYLSNIVPQDFDNNSGYWNRIEMYCRELTERFEDVWVVSGPLTLPQTRGDGKKIVSYQVIGEDNVAVPSHLYKVILARRSSVSTEPLALGAFVVPNEAIGFQPQLTEFQVSLQDLEKLSGLVFFPHLDRTSDIRNICSVDTCKLLDFQEFTLYLSTRKIEGARSVLRLEKIMENLKNAEIEPDDYFMSRYEKKLEELKAKEQSGTQIRKPS

SEQ ID NO: 4940 - protein, 368 aa, Homo Sapiens
MAIKSIASRLRGSRRFLSGFVAGAVVGAAGAGLAALQFFRSQGAEGALTGKQPDGSAEKAVLEQFGFPLTGTEARCYTNHALSYDQAKRVPRWVLEHISKSKIMGDADRKHCKFKPDPNIPPTFSAFNEDYVGSGWSRGHMAPAGNNKFSSKAMAETFYLSNIVPQDFDNNSGYWNRIEMYCRELTERFEDVWVVSGPLTLPQTRGDGKKIVSYQVIGEDNVAVPSHLYKVILARRSSVSTEPLALGAFVVPNEAIGFQPQLTEFQVSLQDLEKLSGLVFFPHLDRTSDIRNICSVDTCKLLDFQEFTLYLSTRKIEGARSVLRLEKIMENLKNAEIEPDDYFMSRYEKKLEELKAKEQSGTQIRKPS

SEQ ID NO: 4941 - protein, 143 aa, Homo Sapiens
MAIKSIASRLRGSRRFLSGFVAGAVVGAAGAGLAALQFFRSQGAEGALTGKQPDGSAEKAVLEQFGFPLTGTEARCYTNHALSYDQAKRVPRWVLEHISKSKIMGRFFKFTLLASLFLLSLNLHLWLVLNFWVQVTLLPQPPE

SEQ ID NO: 4942 - protein, 107 aa, Homo Sapiens
MAIKSIASRLRGSRRFLSGFVAGAVVGAAGAGLAALQFFRSQGAEGALTGKQPDGSAEKAVLEQFGFPLTGTEARCYTNHALSYDQAKRVPRWVLEHISKSKIMGWS

SEQ ID NO: 4943 - protein, 81 aa, Homo Sapiens
MAIKSIASRLRGSRRFLSGFVAGAVVGAAGAGLAALQFFRSQGAEGALTGKQPDGSAEKAVLEQFGFPLTGTEVDSSSLHS

SEQ ID NO: 4944 - protein, 146 aa, Homo Sapiens
MAIKSIASRLRGSRRFLSGFVAGAVVGAAGAGLAALQFFRSQGAEGALTGKQPDGSAEKAVLEQFGFPLTGTEVMQTESIVNLSLIPISLQPSVPSMKIMLEVGGHEDTWLQQEITNFQVKPWLKPFTFLTLCLRILIIILDIGTE

SEQ ID NO: 4945 - protein, 107 aa, Homo Sapiens
RSQGAEGALTGKQPDGSAEKAVLEQFGFPLTGTEVMQTESIVNLSLIPISLQPSVPSMKIMLEVGGHEDTWLQQEITNFQVKPWLKPFTFLTLCLRILIIILDIGTE

SEQ ID NO: 4946 - protein, 187 aa, Homo Sapiens
  misc_feature (1)..(1): Xaa can be any naturally occurring amino acid
XFRSQGAEGALTGKQPDGSAEKAVLEQFGFPLTGTEARCYTNHALSYDQAKRVPRWVLEHISKSKIMGDADRKHCKFKPDPNIPPTFSAFNEDYVGSGWSRGHMAPAGNNKFSSKAMAETFYLSNIVPQDFDNNSGYWNRIEMYCRELTERFEDVWVVSGPLTLPQTRGDGKKIVSYQSWEYPSLQF

SEQ ID NO: 4947 - protein, 15 aa, Homo Sapiens
  misc_feature (1)..(1): Xaa can be any naturally occurring amino acid
XGAEGALTGKQPDDC

SEQ ID NO: 4948 - protein, 676 aa, Homo Sapiens
MQSWRRRKSLWLALSASWLLLVLLGGFSLLRLALPPRPRPGASQGWPRWLDAELLQSFSQPGELPEDAVSPPQAPHGGSCNWESCFDTSKCRGDGLKVFVYPAVGTISETHRRILASIEGSRFYTFSPAGACLLLLLSLDAQTGECSSMPLQWNRGRNHLVLRLHPAPCPRTFQLGQAMVAEASPTVDSFRPGFDVALPFLPEAHPLRGGAPGQLRQHSPQPGVALLALEEERGGWRTADTGSSACPWDGRCEQDPGPGQTQRQETLPNATFCLISGHRPEAASRFLQALQAGCIPVLLSPRWELPFSEVIDWTKAAIVADERLPLQVLAALQEMSPARVLALRQQTQFLWDAYFSSVEKVIHTTLEVIQDRIFGTSAHPSLLWNSPPGALLALSTFSTSPQDFPFYYLQQGSRPEGRFSALIWVGPPGQPPLKLIQAVAGSQHCAQILVLWSNERPLPSRWPETAVPLTVIDGHRKVSDRFYPYSTIRTDAILSLDARSSLSTSEVDFAFLVWQSFPERMVGFLTSSHFWDEAHGGWGYTAERTNEFSMVLTTAAFYHRYYHTLFTHSLPKALRTLADEAPTCVDVLMNFIVAAVTKLPPIKVPYGKQRQEAAPLAPGGPGPRPKPPAPAPDCINQIAAAFGHMPLLSSRLRLDPVLFKDPVSVQRKKYRSLEKP

SEQ ID NO: 4949 - protein, 117 aa, Homo Sapiens
MGIRVLRLSLVVILVLLLVAGALTALLPSVKEDKMLMLRREIKSQGKSTMDSFTLIMQTYNRTDLLLKLLNHYQAVPNLHKVIVVWNNIGEKAPDELWNSLGPHPIPVIFKQQTANR

SEQ ID NO: 4950 - protein, 147 aa, Homo Sapiens
MRCCHICKLPGRVMGIRVLRLSLVVILVLLLVAGALTALLPSVKEDKMLMLRREIKSQGKSTMDSFTLIMQTYNRTDLLLKLLNHYQAVPNLHKVIVVWNNIGEKAPDELWNSLGPHPIPVIFKQQTANRMRNRLQVFPELETNAIS

SEQ ID NO: 4951 - protein, 330 aa, Homo Sapiens
MRCCHICKLPGRVMGIRVLRLSLVVILVLLLVAGALTALLPSVKEDKMLMLRREIKSQGKSTMDSFTLIMQTYNRTDLLLKLLNHYQAVPNLHKVIVVWNNIGEKAPDELWNSLGPHPIPVIFKQQTANRMRNRLQVFPELETNAVLMVDDDTLISTPDLVFAFSVWQQFPDQIVGFVPRKHVSTSSGIYSYGSFEMQAPGSGNGDQYSMVLIGASFFNSKYLELFQRQPAAVHALIDDTQNCDDIAMNFIIAKHIGKTSGIFVKPVNMDNLEKETNSGYSGMWHRAEHALQRSYCINKLVNIYDSMPLRYSNIMISQFGFPYANYKRKI

SEQ ID NO: 4952 - protein, 330 aa, Homo Sapiens; identical to SEQ ID NO: 4951

SEQ ID NO: 4953 - protein, 266 aa, Homo Sapiens
MRTWNSGGTKCCHICKLPGRVMGIRVLRLSLVVILVLLLVAGALTALLPSVKEDKMLMLRREIKSQGKSTMDSFTLIMQTYNRTDLLLKLLNHYQAVPNLHKVIVVWNNIGEKAPDELWNSLGPHPIPVIFKQQTANRMRNRLQVFPELETNAVLMVDDDTLISTPDLVFAFSVWQQFPDQIVGFVPRKHVSTSSGIYSYGSFEMQAPGSGNGDQYSMVLIGASFFNSKYLELFQRQPAAVHALIDDTQNCDDIAMNFIIAKHIGK

SEQ ID NO: 4954 - protein, 130 aa, Homo Sapiens
MGRPLHLVLLSASLAGLLLLGESLFIRREQANNILARVTRANSFLEEMKKGHLERECMEETCSYEEAREVFEDSDKTNEFWNKYKDGDQCETSPCQNQGKCKDGLGEYTCTCLEGFEGKNCELCMLIFAL

SEQ ID NO: 4955 - protein, 334 aa, Homo Sapiens
MGRPLHLVLLSASLAGLLLLGESLFIRREQANNILARVTRANSFLEEMKKGHLERECMEETCSYEEAREVFEDSDKTNEFWNKYKDGDQCETSPCQNQGKCKDGLGEYTCTCLEGFEGKNCELFTRKLCSLDNGDCDQFCHEEQNSVVCSCARGYTLADNGKACIPTGPYPCGKQTLERRKRSVAQATSSSGEAPDSITWKPYDAADLDPTENPFDLLDFNQTQPERGDNNLTRIVGGQECKDGECPWQALLINEENEGFCGGTILSEFYILTAAHCLYQAKRFKVRGTGTRSRRRAVRRCTRWRWSSSTTGSQRRPMTSTSPCSGSRPPSPSA

SEQ ID NO: 4956 - protein, 332 aa, Homo Sapiens
MGRPLHLVLLSASLAGLLLLGESLFIRREQANNILARVTRANSFLEEMKKGHLERECMEETCSYEEAREVFEDSDKTNEFWNKYKDGDQCETSPCQNQGKCKDGLGEYTCTCLEGFEGKNCELFTRKLCSLDNGDCDQFCHEEQNSVVCSCARGYTLADNGKACIPTGPYPCGKQTLERRKRSVAQATSSSGEAPDSITWKPYDAADLDPTENPFDLLDFNQTQPERGDNNLTRIVGGQECKDGECPWQALLINEENEGFCGGTILSEFYILTAAHCLYQAKRFKGTGTRSRRRAVRRCTRWRWSSSTTGSQRRPMTSTSPCSGSRPPSPSA

SEQ ID NO: 4957 - protein, 488 aa, Homo Sapiens
MGRPLHLVLLSASLAGLLLLGESLFIRREQANNILARVTRANSFLEEMKKGHLERECMEETCSYEEAREVFEDSDKTNEFWNKYKDGDQCETSPCQNQGKCKDGLGEYTCTCLEGFEGKNCELFTRKLCSLDNGDCDQFCHEEQNSVVCSCARGYTLADNGKACIPTGPYPCGKQTLERRKRSVAQATSSSGEAPDSITWKPYDAADLDPTENPFDLLDFNQTQPERGDNNLTRIVGGQECKDGECPWQALLINEENEGFCGGTILSEFYILTAAHCLYQAKRFKVRVGDRNTEQEEGGEAVHEVEVVIKHNRFTKETYDFDIAVLRLKTPITFRMNVAPACLPERDWAESTLMTQKTGIVSGFGRTHEKGRQSTRLKMLEVPYVDRNSCKLSSSFIITQNMFCAGYDTKQEDACQGDSGGPHVTRFKDTYFVTGIVSWGEGCARKGKYGIYTKVTAFLKWIDRSMKTRGLPKAKSHAPEVITSSPLK

SEQ ID NO: 4958 - protein, 162 aa, Homo Sapiens
MIFLYQVVHFILFTSVSGECVTQLLKDTCFEGGDITTVFTPSAKYCQVVCTYHPRCLLFTFTAESPSEDPTRWFTCVLKDSVTETLPRVNRTAAISGYSFKQCSHQISACNKDIYVDLDMKGINYNSSVAKSAQECQERCTDDVHCHFFTYATRQFPSLEHR

SEQ ID NO: 4959 - protein, 625 aa, Homo Sapiens
MIFLYQVVHFILFTSVSGECVTQLLKDTCFEGGDITTVFTPSAKYCQVVCTYHPRCLLFTFTAESPSEDPTRWFTCVLKDSVTETLPRVNRTAAISGYSFKQCSHQISACNKDIYVDLDMKGINYNSSVAKSAQECQERCTDDVHCHFFTYATRQFPSLEHRNICLLKHTQTGTPTRITKLDKVVSGFSLKSCALSNLACIRDIFPNTVFADSNIDSVMAPDAFVCGRICTHHPGCLFFTFFSQEWPKESQRNLCLLKTSESGLPSTRIKKSKALSGFSLQSCRHSIPVFCHSSFYHDTDFLGEELDIVAAKSHEACQKLCTNAVRCQFFTYTPAQASCNEGKGKCYLKLSSNGSPTKILHGRGGISGYTLRLCKMDNECTTKIKPRIVGGTASVRGEWPWQVTLHTTSPTQRHLCGGSIIGNQWILTAAHCFYGVESPKILRVYSGILNQSEIKEDTSFFGVQEIIIHDQYKMAESGYDIALLKLETTVNYTDSQRPICLPSKGDRNVIYTDCWVTGWGYRKLRDKIQNTLQKAKIPLVTNEECQKRYRGHKITHKMICAGYREGGKDACKGDSGGPLSCKHNEVWHLVGITSWGEGCAQRERPGVYTNVVEYVDWILEKTQAV

SEQ ID NO: 4960 - protein, 571 aa, Homo Sapiens
MIFLYQVVHFILFTSVSGECVTQLLKDTCFEGGDITTVFTPSAKYCQVVCTYHPRCLLFTFTAESPSEDPTRWFTCVLKDSVTETLPRVNRTAAISGYSFKQCSHQISNICLLKHTQTGTPTRITKLDKVVSGFSLKSCALSNLACIRDIFPNTVFADSNIDSVMAPDAFVCGRICTHHPGCLFFTFFSQEWPKESQRNLCLLKTSESGLPSTRIKKSKALSGFSLQSCRHSIPVFCHSSFYHDTDFLGEELDIVAAKSHEACQKLCTNAVRCQFFTYTPAQASCNEGKGKCYLKLSSNGSPTKILHGRGGISGYTLRLCKMDNECTTKIKPRIVGGTASVRGEWPWQVTLHTTSPTQRHLCGGSIIGNQWILTAAHCFYGVESPKILRVYSGILNQSEIKEDTSFFGVQEIIIHDQYKMAESGYDIALLKLETTVNYTDSQRPICLPSKGDRNVIYTDCWVTGWGYRKLRDKIQNTLQKAKIPLVTNEECQKRYRGHKITHKMICAGYREGGKDACKGDSGGPLSCKHNEVWHLVGITSWGEGCAQRERPGVYTNVVEYVDWILEKTQAV

SEQ ID NO: 4961 - protein, 210 aa, Homo Sapiens
  misc_feature (1)..(1): Xaa can be any naturally occurring amino acid
XSGFSLKSCALSNLACIRDIFPNTVFADSNIDSVMAPDAFVCGRICTHHPGCLFFTFFSQEWPKESQRNLCLLKTSESGLPSTRIKKSKALSGFSLQSCRHSIPVFCHSSFYHDTDFLGEELDIVAAKSHEACQKLCTNAVRCQFFTYTPAQASCNEGKGKCYLKLSSNGSPTKILHGRGGISGYTLRLCKMDNELRGAPMKISGWLKTS

SEQ ID NO: 4962 - protein, 159 aa, Homo Sapiens
  misc_feature (1)..(1): Xaa can be any naturally occurring amino acid
XVESPKILRVYSGILNQSEIKEDTSFFGVQEIIIHDQYKMAESGYDIALLKLETTVNYTDKIQNTLQKAKIPLVTNEECQKRYRGHKITHKMICAGYREGGKDACKGDSGGPLSCKHNEVWHLVGITSWGEGCAQRERPGVYTNVVEYVDWILEKTQAV

SEQ ID NO: 4963 - protein, 615 aa, Homo Sapiens
MRALLLLGFLLVSLESTLSIPPWEAPKEHKYKAEEHTVVLTVTGEPCHFPFQYHRQLYHKCTHKGRPGPQPWCATTPNFDQDQRWGYCLEPKKVKDHCSKHSPCQKGGTCVNMPSGPHCLCPQHLTGNHCQKEKCFEPQLLRFFHKNEIWYRTEQAAVARCQCKGPDAHCQRLASQACRTNPCLHGGRCLEVEGHRLCHCPVGYTGAFCDVDTKASCYDGRGLSYRGLARTTLSGAPCQPWASEATYRNVTAEQARNWGLGGHAFCRNPDNDIRPWCFVLNRDRLSWEYCDLAQCQTPTQAAPPTPVSPRLHVPLMPAQPAPPKPQPTTRTPPQSQTPGALPAKREQPPSLTRNGPLSCGQRLRKSLSSMTRVVGGLVALRGAHPYIAALYWGHSFCAGSLIAPCWVLTAAHCLQDRPAPEDLTVVLGQERRNHSCEPCQTLAVRSYRLHEAFSPVSYQHDLALLRLQEDADGSCALLSPYVQPVCLPSGAARPSETTLCQVAGWGHQFEGAEEYASFLQEAQVPFLSLERCSAPDVHGSSILPGMLCAGFLEGGTDACQGDSGGPLVCEDQAAERRLTLQGIISWGSGCGDRNKPGVYTDVAYYLAWIREHTVS

SEQ ID NO: 4964 - protein, 661 aa, Homo Sapiens
MRLKNLTFIIILIISGELYAEEKPCGFPHVENGRIAQYYYTFKSFYFPMSIDKKLSFFCLAGYTTESGRQEEQTTCTTEGWSPEPRCFKKCTKPDLSNGYISDVKLLYKIQENMRYGCASGYKTTGGKDEEVVQCLSDGWSSQPTCRKEHETCLAPELYNGNYSTTQKTFKVKDKVQYECATGYYTAGGKKTEEVECLTYGWSLTPKCTKLKCSSLRLIENGYFHPVKQTYEEGDVVQFFCHENYYLSGSDLIQCYNFGWYPESPVCEGRRNRCPPPPLPINSKIQTHSTTYRHGEIVHIECELNFEIHGSAEIRCEDGKWTEPPKCIEGQEKVACEEPPFIENGAANLHSKIYYNGDKVTYACKSGYLLHGSNEITCNRGKWTLPPECVENNENCKHPPVVMNGAVADGILASYATGSSVEYRCNEYYLLRGSKISRCEQGKWSSPPVCLEPCTVNVDYMNRNNIEMKWKYEGKVLHGDLIDFVCKQGYDLSPLTPLSELSVQCNRGEVKYPLCTRKESKGMCTSPPLIKHGVIISSTVDTYENGSSVEYRCFDHHFLEGSREAYCLDGMWTTPPLCLEPCTLSFTEMEKNNLLLKWDFDNRPHILHGEYIEFICRGDTYPAELYITGSILRMQCDRGQLKYPRCIPRQSTLSYQEPLRT

SEQ ID NO: 4965 - protein, 622 aa, Homo Sapiens
MAHVRGLQLPGCLALAALCSLVHSQHVFLAPQQARSLLQRVRRANTFLEEVRKGNLERECVEETCSYEEAFEALESSTATDVFWAKYTACETARTPRDKLAACLEGNCAEGLGTNYRGHVNITRSGIECQLWRSRYPHKPEINSTTHPGADLQENFCRNPDSSTTGPWCYTTDPTVRRQECSIPVCGQDQVTVAMTPRSEGSSVNLSPPLEQCVPDRGQQYQGRLAVTTHGLPCLAWASAQAKALSKHQDFNSAVQLVENFCRNPDGDEEGVWCYVAGKPGDFGYCDLNYCEEAVEEETGDGLDEDSDRAIEGRTATSEYQTFFNPRTFGSGEADCGLRPLFEKKSLEDKTERELLESYIDGRIVEGSDAEIGMSPWQVMLFRKSPQELLCGASLISDRWVLTAAHCLLYPPWDKNFTENDLLVRIGKHSRTRYERNIEKISMLEKIYIHPRYNWRENLDRDIALMKLKKPVAFSDYIHPVCLPDRETAASLLQAGYKGRVTGWGNLKETWTANVGKGQPSVLQVVNLPIVERPVCKDSTRIRITDNMFCAGYKPDEGKRGDACEGDSGGPFVMKSPFNNRWYQMGIVSWGEGCDRDGKYGFYTHVFRLKKWIQKVIDQFGE

SEQ ID NO: 4966 - protein, 583 aa, Homo Sapiens
MAHVRGLQLPGCLALAALCSLVHSQHVFLAPQQARSLLQRVRRANTFLEEVRKGNLERECVEETCSYEEAFEALESSTATDVFWAKYTACETARTPRDKLAACLEGNCAEGLGTNYRGHVNITRSGIECQLWRSRYPHKPEINSTTHPGADLQENFCRNPDSSTTGPWCYTTDPTVRRQECSIPVCGQDQVTVAMTPRSEGSSVNLSPPLEQCVPDRGQQYQGRLAVTTHGLPCLAWASAQAKALSKHQDFNSAVQLVENFCRNPDGDEEGVWCYVAGKPGDFGYCDLNYCEEAVEEETGDGLDEDSDRAIEGRTATSEYQTFFNPRTFGSGEADCGLRPLFEKKSLEDKTERELLESYIDGRIVEGSDAEIGMSPWQVMLFRKSPQELLCGASLISDRWVLTAAHCLLYPPWDKNFTENDLLVRIGKHSRTRYERNIEKISMLEKIYIHPSLLQAGYKGRVTGWGNLKETWTANVGKGQPSVLQVVNLPIVERPVCKDSTRIRITDNMFCAGYKPDEGKRGDACEGDSGGPFVMKSPFNNRWYQMGIVSWGEGCDRDGKYGFYTHVFRLKKWIQKVIDQFGE

SEQ ID NO: 4967 - protein, 324 aa, Homo Sapiens
MGWGLLAGQSTQSWPLMFLAPQQARSLLQRVRRANTFLEEVRKGNLERECVEETCSYEEAFEALESSTATDVFWAKYTACETARTPRDKLAACLEGNCAEGLGTNYRGHVNITRSGIECQLWRSRYPHKPEINSTTHPGADLQENFCRNPDSSTTGPWCYTTDPTVRRQECSIPVCGQDQVTVAMTPRSEGSSVNLSPPLEQCVPDRGQQYQGRLAVTTHGLPCLAWASAQAKALSKHQDFNSAVQLVENFCRNPDGDEEGVWCYVAGKPGDFGYCDLNYCEEAVEEETGDGLDEDSDRAIEGRTATSEYQTFFNPRTFGSGEA

SEQ ID NO: 4968 - protein, 425 aa, Homo Sapiens
MGPRRLLLVAACFSLCGPLLSARTRARRPESKATNATLDPRSFLLRNPNDKYEPFWEDEEKNESGLTEYRLVSINKSSPLQKQLPAFISEDASGYLTSSWLTLFVPSVYTGVFVVSLPLNIMAIVVFILKMKVKKPAVVYMLHLATADVLFVSVLPFKISYYFSGSDWQFGSELCRFVTAAFYCNMYASILLMTVISIDRFLAVVYPMQSLSWRTLGRASFTCLAIWALAIAGVVPLLLKEQTIQVPGLNITTCHDVLNETLLEGYYAYYFSAFSAVFFFVPLIISTVCYVSIIRCLSSSAVANRSKKSRALFLSAAVFCIFIICFGPTNVLLIAHYSFLSHTSTTEAAYFAYLLCVCVSSISCCIDPLIYYYASSECQRYVYSILCCKESSDPSSYNSSGQLMASKMDTCSSNLNNSIYKKLLT

SEQ ID NO: 4969 - protein, 102 aa, Homo Sapiens
MGPRRLLLVAACFSLCGPLLSARTRARRPVTFRWGVPPPSRAQPMPLWTRSWRVQPACHGVLDMEEDGAEAPWGSLQSCVALVIVFLPGPPPKRKALTLLHQ

SEQ ID NO: 4970 - protein, 113 aa, Homo Sapiens
MWGRLLLWPLVLGFSLSGGTQTPSVYDESGSTGGGDARPQSCLPPAATQAKSVPMTVTPWSSRTAHGHCFWAGCPPGWCPPSMGWSWWWGCRPMGWRCGCWPRRHLGCPPPCC

SEQ ID NO: 4971 - protein, 385 aa, Homo Sapiens
MWGRLLLWPLVLGFSLSGGTQTPSVYDESGSTGGGDDSTPSILPAPRGYPGQVCANDSDTLELPDSSRALLLGWVPTRLVPALYGLVLVVGLPANGLALWVLATQAPRLPSTMLLMNLAAADLLLALALPPRIAYHLRGQRWPFGEAACRLATAALYGHMYGSVLLLAAVSLDRYLALVHPLRARALRGRRLALGLCMAAWLMAAALALPLTLQRQTFRLARSDRVLCHDALPLDAQASHWQPAFTCLALLGCFLPLLAMLLCYGATLHTLAASGRRYGHALRLTAVVLASAVAFFVPSNLLLLLHYSDPSPSAWGNLYGAYVPSLALSTLNSCVDPFIYYYVSAEFRDKVRAGLFQRSPGDTVASKASAEGGSRGMGTHSSLLQ

SEQ ID NO: 4972 - protein, 2224 aa, Homo Sapiens
MFPGCPRLWVLVVLGTSWVGWGSQGTEAAQLRQFYVAAQGISWSYRPEPTNSSLNLSVTSFKKIVYREYEPYFKKEKPQSTISGLLGPTLYAEVGDIIKVHFKNKADKPLSIHPQGIRYSKLSEGASYLDHTFPAEKMDDAVAPGREYTYEWSISEDSGPTHDDPPCLTHIYYSHENLIEDFNSGLIGPLLICKKGTLTEGGTQKTFDKQIVLLFAVFDESKSWSQSSSLMYTVNGYVNGTMPDITVCAHDHISWHLLGMSSGPELFSIHFNGQVLEQNHHKVSAITLVSATSTTANMTVGPEGKWIISSLTPKHLQAGMQAYIDIKNCPKKTRNLKKITREQRRHMKRWEYFIAAEEVIWDYAPVIPANMDKKYRSQHLDNFSNQIGKHYKKVMYTQYEDESFTKHTVNPNMKEDGILGPIIRAQVRDTLKIVFKNMASRPYSIYPHGVTFSPYEDEVNSSFTSGRNNTMIRAVQPGETYTYKWNILEFDEPTENDAQCLTRPYYSDVDIMRDIASGLIGLLLICKSRSLDRRGIQRAADIEQQAVFAVFDENKSWYLEDNINKFCENPDEVKRDDPKFYESNIMSTINGYVPESITTLGFCFDDTVQWHFCSVGTQNEILTIHFTGHSFIYGKRHEDTLTLFPMRGESVTVTMDNVGTWMLTSMNSSPRSKKLRLKFRDVKCIPDDDEDSYEIFEPPESTVMATRKMHDRLEPEDEESDADYDYQNRLAAALGIRSFRNSSLNQEEEEFNLTALALENGTEFVSSNTDIIVGSNYSSPSNISKFTVNNLAEPQKAPSHQQATTAGSPLRHLIGKNSVLNSSTAEHSSPYSEDPIEDPLQPDVTGIRLLSLGAGEFKSQEHAKHKGPKVERDQAAKHRFSWMKLLAHKVGRHLSQDTGSPSGMRPWEDLPSQDTGSPSRMRPWKDPPSDLLLLKQSNSSKILVGRWHLASEKGSYEIIQDTDEDTAVNNWLISPQNASRAWGESTPLANKPGKQSGHPKFPRVRHKSLQVRQDGGKSRLKKSQFLIKTRKKKKEKHTHHAPLSPRTFHPLRSEAYNTFSERRLKHSLVLHKSNETSLPTDLNQTLPSMDFGWIASLPDHNQNSSNDTGQASCPPGLYQTVPPEEHYQTFPIQDPDQMHSTSDPSHRSSSPELSEMLEYDRSHKSFPTDISQMSPSSEHEVWQTVISPDLSQVTLSPELSQTNLSPDLSHTTLSPELIQRNLSPALGQMPISPDLSHTTLSPDLSHTTLSLDLSQTNLSPELSQTNLSPALGQMPLSPDLSHTTLSLDFSQTNLSPELSHMTLSPELSQTNLSPALGQMPISPDLSHTTLSLDFSQTNLSPELSQTNLSPALGQMPLSPDPSHTTLSLDLSQTNLSPELSQTNLSPDLSEMPLFADLSQIPLTPDLDQMTLSPDLGETDLSPNFGQMSLSPDLSQVTLSPDISDTTLLPDLSQISPPPDLDQIFYPSESSQSLLLQEFNESFPYPDLGQMPSPSSPTLNDTFLSKEFNPLVIVGLSKDGTDYIEIIPKEEVQSSEDDYAEIDYVPYDDPYKTDVRTNINSSRDPDNIAAWYLRSNNGNRRNYYIAAEEISWDYSEFVQRETDIEDSDDIPEDTTYKKVVFRKYLDSTFTKRDPRGEYEEHLGILGPIIRAEVDDVIQVRFKNLASRPYSLHAHGLSYEKSSEGKTYEDDSPEWFKEDNAVQPNSSYTYVWHATERSGPESPGSACRAWAYYSAVNPEKDIHSGLIGPLLICQKGILHKDSNMPMDMREFVLLFMTFDEKKSWYYEKKSRSSWRLTSSEMKKSHEFHAINGMIYSLPGLKMYEQEWVRLHLLNIGGSQDIHVVHFHGQTLLENGNKQHQLGVWPLLPGSFKTLEMKASKPGWWLLNTEVGENQRAGMQTPFLIMDRDCRMPMGLSTGIISDSQIKASEFLGYWEPRLARLNNGGSYNAWSVEKLAAEFASKPWIQVDMQKEVIITGIQTQGAKHYLKSCYTTEFYVAYSSNQINWQIFKGNSTRNVMYFNGNSDASTIKENQFDPPIVARYIRISPTRAYNRPTLRLELQGCEVNGCSTPLGMENGKIENKQITASSFKKSWWGDYWEPFRARLNAQGRVNAWQAKANNNKQWLEIDLLKIKKITAIITQGCKSLSSEMYVKSYTIHYSEQGVEWKPYRLKSSMVDKIFEGNTNTKGHVKNFFNPPIISRFIRVIPKTWNQSIALRLELFGCDIY

SEQ ID NO: 4973 - protein, 2229 aa, Homo Sapiens
MFPGCPRLWVLVVLGTSWVGWGSQGTEAAQLRQFYVAAQGISWSYRPEPTNSSLNLSVTSFKKIVYREYEPYFKKEKPQSTISGLLGPTLYAEVGDIIKVHFKNKADKPLSIHPQGIRYSKLSEGASYLDHTFPAEKMDDAVAPGREYTYEWSISEDSGPTHDDPPCLTHIYYSHENLIEDFNSGLIGPLLICKKGTLTEGGTQKTFDKQIVLLFAVFDESKSWSQSSSLMYTVNGYVNGTMPDITVCAHDHISWHLLGMSSGPELFSIHFNGQVLEQNHHKVSAITLVSATSTTANMTVGPEGKWIISSLTPKHLQAGMQAYIDIKNCPKKTRNLKKITREQRRHMKRWEYFIAAEEVIWDYAPVIPANMDKKYRSQHLDNFSNQIGKHYKKVMYTQYEDESFTKHTVNPNMKEDGILGPIIRAQVRDTLKIVFKNMASRPYSIYPHGVTFSPYEDEVNSSFTSGRNNTMIRAVQPGETYTYKWNILEFDEPTENDAQCLTRPYYSDVDIMRDIASGLIGLLLICKSRSLDRRGIQRAADIEQQAVFAVFDENKSWYLEDNINKFCENPDEVKRDDPKFYESNIMSNFTLSAINGYVPESITTLGFCFDDTVQWHFCSVGTQNEILTIHFTGHSFIYGKRHEDTLTLFPMRGESVTVTMDNVGTWMLTSMNSSPRSKKLRLKFRDVKCIPDDDEDSYEIFEPPESTVMATRKMHDRLEPEDEESDADYDYQNRLAAALGIRSFRNSSLNQEEEEFNLTALALENGTEFVSSNTDIIVGSNYSSPSNISKFTVNNLAEPQKAPSHQQATTAGSPLRHLIGKNSVLNSSTAEHSSPYSEDPIEDPLQPDVTGIRLLSLGAGEFKSQEHAKHKGPKVERDQAAKHRFSWMKLLAHKVGRHLSQDTGSPSGMRPWEDLPSQDTGSPSRMRPWKDPPSDLLLLKQSNSSKILVGRWHLASEKGSYEIIQDTDEDTAVNNWLISPQNASRAWGESTPLANKPGKQSGHPKFPRVRHKSLQVRQDGGKSRLKKSQFLIKTRKKKKEKHTHHAPLSPRTFHPLRSEAYNTFSERRLKHSLVLHKSNETSLPTDLNQTLPSMDFGWIASLPDHNQNSSNDTGQASCPPGLYQTVPPEEHYQTFPIQDPDQMHSTSDPSHRSSSPELSEMLEYDRSHKSFPTDISQMSPSSEHEVWQTVISPDLSQVTLSPELSQTNLSPDLSHTTLSPELIQRNLSPALGQMPISPDLSHTTLSPDLSHTTLSLDLSQTNLSPELSQTNLSPALGQMPLSPDLSHTTLSLDFSQTNLSPELSHMTLSPELSQTNLSPALGQMPISPDLSHTTLSLDFSQTNLSPELSQTNLSPALGQMPLSPDPSHTTLSLDLSQTNLSPELSQTNLSPDLSEMPLFADLSQIPLTPDLDQMTLSPDLGETDLSPNFGQMSLSPDLSQVTLSPDISDTTLLPDLSQISPPPDLDQIFYPSESSQSLLLQEFNESFPYPDLGQMPSPSSPTLNDTFLSKEFNPLVIVGLSKDGTDYIEIIPKEEVQSSEDDYAEIDYVPYDDPYKTDVRTNINSSRDPDNIAAWYLRSNNGNRRNYYIAAEEISWDYSEFVQRETDIEDSDDIPEDTTYKKVVFRKYLDSTFTKRDPRGEYEEHLGILGPIIRAEVDDVIQVRFKNLASRPYSLHAHGLSYEKSSEGKTYEDDSPEWFKEDNAVQPNSSYTYVWHATERSGPESPGSACRAWAYYSAVNPEKDIHSGLIGPLLICQKGILHKDSNMPMDMREFVLLFMTFDEKKSWYYEKKSRSSWRLTSSEMKKSHEFHAINGMIYSLPGLKMYEQEWVRLHLLNIGGSQDIHVVHFHGQTLLENGNKQHQLGVWPLLPGSFKTLEMKASKPGWWLLNTEVGENQRAGMQTPFLIMDRDCRMPMGLSTGIISDSQIKASEFLGYWEPRLARLNNGGSYNAWSVEKLAAEFASKPWIQVDMQKEVIITGIQTQGAKHYLKSCYTTEFYVAYSSNQINWQIFKGNSTRNVMYFNGNSDASTIKENQFDPPIVARYIRISPTRAYNRPTLRLELQGCEVNGCSTPLGMENGKIENKQITASSFKKSWWGDYWEPFRARLNAQGRVNAWQAKANNNKQWLEIDLLKIKKITAIITQGCKSLSSEMYVKSYTIHYSEQGVEWKPYRLKSSMVDKIFEGNTNTKGHVKNFFNPPIISRFIRVIPKTWNQSIALRLELFGCDIY

SEQ ID NO: 4974 - protein, 382 aa, Homo Sapiens
MVSQALRLLCLLLGLQGCLAADGDQCASSPCQNGGSCKDQLQSYICFCLPAFEGRNCETHKDDQLICVNENGGCEQYCSDHTGTKRSCRCHEGYSLLADGVSCTPTVEYPCGKIPILEKRNASKPQGRIVGGKVCPKGECPWQVLLLVNGAQLCGGTLINTIWVVSAAHCFDKIKNWRNLIAVLGEHDLSEHDGDEQSRRVAQVIIPSTYVPGTTNHDIALLRLHQPVVLTDHVVPLCLPERTFSERTLAFVRFSLVSGWGQLLDRGATALELMVLNVPRLMTQDCLQQSRKVGDSPNITEYMFCAGYSDGSKDSCKGDSGGPHATHYRGTWYLTGIVSWGQGCATVGHFGVYTRVSQYIEWLQKLMRSEPRPGVLLRAPFP

SEQ ID NO: 4975 - protein, 74 aa, Homo Sapiens
MVSQALRLLCLLLGLQGCLAAGGSPRRPAPAPARQRVPGGAAAGLPGEGVQGGAVLLRGGPGDLQGRGEDVVSG

SEQ ID NO: 4976 - protein, 466 aa, Homo Sapiens
MVSQALRLLCLLLGLQGCLAAGGVAKASGGETRDMPWKPGPHRVFVTQEEAHGVLHRRRRANAFLEELRPGSLERECKEEQCSFEEAREIFKDAERTKLFWISYSDGDQCASSPCQNGGSCKDQLQSYICFCLPAFEGRNCETHKDDQLICVNENGGCEQYCSDHTGTKRSCRCHEGYSLLADGVSCTPTVEYPCGKIPILEKRNASKPQGRIVGGKVCPKGECPWQVLLLVNGAQLCGGTLINTIWVVSAAHCFDKIKNWRNLIAVLGEHDLSEHDGDEQSRRVAQVIIPSTYVPGTTNHDIALLRLHQPVVLTDHVVPLCLPERTFSERTLAFVRFSLVSGWGQLLDRGATALELMVLNVPRLMTQDCLQQSRKVGDSPNITEYMFCAGYSDGSKDSCKGDSGGPHATHYRGTWYLTGIVSWGQGCATVGHFGVYTRVSQYIEWLQKLMRSEPRPGVLLRAPFP

SEQ ID NO: 4977 - protein, 444 aa, Homo Sapiens
MVSQALRLLCLLLGLQGCLAAVFVTQEEAHGVLHRRRRANAFLEELRPGSLERECKEEQCSFEEAREIFKDAERTKLFWISYSDGDQCASSPCQNGGSCKDQLQSYICFCLPAFEGRNCETHKDDQLICVNENGGCEQYCSDHTGTKRSCRCHEGYSLLADGVSCTPTVEYPCGKIPILEKRNASKPQGRIVGGKVCPKGECPWQVLLLVNGAQLCGGTLINTIWVVSAAHCFDKIKNWRNLIAVLGEHDLSEHDGDEQSRRVAQVIIPSTYVPGTTNHDIALLRLHQPVVLTDHVVPLCLPERTFSERTLAFVRFSLVSGWGQLLDRGATALELMVLNVPRLMTQDCLQQSRKVGDSPNITEYMFCAGYSDGSKDSCKGDSGGPHATHYRGTWYLTGIVSWGQGCATVGHFGVYTRVSQYIEWLQKLMRSEPRPGVLLRAPFP

SEQ ID NO: 4978 - protein, 165 aa, Homo Sapiens [sequence omitted]

SEQ ID NO: 4979 - protein, 222 aa, Homo Sapiens
MHRDARAQKASRGFPPRVPKSFPFNTSVVYKKTLFVEFTDHLFNIAKPRPPWMGLLGPTIQAEVYDTVVITLKNMASHPVSLHAVGVSYWKASEGAEYDDQTSQREKEDDKVFPGGSHTYVWQVLKENGPMASDPLCLTYSYLSHVDLVKDLNSGLIGALLVCREGSLAKEKTQTLHKFILLFAVFDEGKSWHSETKNSLMQDRDAASARAWPKMHTVNGYV

SEQ ID NO: 4980 - protein, 262 aa, Homo Sapiens
MLEQEEERENARKGGSAAHFQTIIRSCERSIRRIARGKSAPMIQSPPTRPFLQQVFFGNVDSSGIKHNIFNPPIIARYIRLHPTHYSIRSTLRMELMGCDLNSCSMPLGMESKAISDAQITASSYFTNMFATWSPSKARLHLQGRSNAWRPQVNNPKEWLQVDFQKTMKVTGVTTQGVKSLLTSMYVKEFLISSSQDGHQWTLFFQNGKVKVFQGNQDSFTPVVNSLDPPLLTRYLRIHPQSWVHQIALRMEVLGCEAQDLY

SEQ ID NO: 4981 - protein, 63 aa, Homo Sapiens
MQIELSTCFFLCLLRFCFSATRRYYLGAVELSWDYMQSDLDFLLECQNLFHSTPQSCTKRLCL

SEQ ID NO: 4982 - protein, 2351 aa, Homo Sapiens
MQIELSTCFFLCLLRFCFSATRRYYLGAVELSWDYMQSDLGELPVDARFPPRVPKSFPFNTSVVYKKTLFVEFTDHLFNIAKPRPPWMGLLGPTIQAEVYDTVVITLKNMASHPVSLHAVGVSYWKASEGAEYDDQTSQREKEDDKVFPGGSHTYVWQVLKENGPMASDPLCLTYSYLSHVDLVKDLNSGLIGALLVCREGSLAKEKTQTLHKFILLFAVFDEGKSWHSETKNSLMQDRDAASARAWPKMHTVNGYVNRSLPGLIGCHRKSVYWHVIGMGTTPEVHSIFLEGHTFLVRNHRQASLEISPITFLTAQTLLMDLGQFLLFCHISSHQHDGMEAYVKVDSCPEEPQLRMKNNEEAEDYDDDLTDSEMDVVRFDDDNSPSFIQIRSVAKKHPKTWVHYIAAEEEDWDYAPLVLAPDDRSYKSQYLNNGPQRIGRKYKKVRFMAYTDETFKTREAIQHESGILGPLLYGEVGDTLLIIFKNQASRPYNIYPHGITDVRPLYSRRLPKGVKHLKDFPILPGEIFKYKWTVTVEDGPTKSDPRCLTRYYSSFVNMERDLASGLIGPLLICYKESVDQRGNQIMSDKRNVILFSVFDENRSWYLTENIQRFLPNPAGVQLEDPEFQASNIMHSINGYVFDSLQLSVCLHEVAYWYILSIGAQTDFLSVFFSGYTFKHKMVYEDTLTLFPFSGETVFMSMENPGLWILGCHNSDFRNRGMTALLKVSSCDKNTGDYYEDSYEDISAYLLSKNNAIEPRSFSQNSRHPSTRQKQFNATTIPENDIEKTDPWFAHRTPMPKIQNVSSSDLLMLLRQSPTPHGLSLSDLQEAKYETFSDDPSPGAIDSNNSLSEMTHFRPQLHHSGDMVFTPESGLQLRLNEKLGTTAATELKKLDFKVSSTSNNLISTIPSDNLAAGTDNTSSLGPPSMPVHYDSQLDTTLFGKKSSPLTESGGPLSLSEENNDSKLLESGLMNSQESSWGKNVSSTESGRLFKGKRAHGPALLTKDNALFKVSISLLKTNKTSNNSATNRKTHIDGPSLLIENSPSVWQNILESDTEFKKVTPLIHDRMLMDKNATALRLNHMSNKTTSSKNMEMVQQKKEGPIPPDAQNPDMSFFKMLFLPESARWIQRTHGKNSLNSGQGPSPKQLVSLGPEKSVEGQNFLSEKNKVVVGKGEFTKDVGLKEMVFPSSRNLFLTNLDNLHENNTHNQEKKIQEEIEKKETLIQENVVLPQIHTVTGTKNFMKNLFLLSTRQNVEGSYDGAYAPVLQDFRSLNDSTNRTKKHTAHFSKKGEEENLEGLGNQTKQIVEKYACTTRISPNTSQQNFVTQRSKRALKQFRLPLEETELEKRIIVDDTSTQWSKNMKHLTPSTLTQIDYNEKEKGAITQSPLSDCLTRSHSIPQANRSPLPIAKVSSFPSIRPIYLTRVLFQDNSSHLPAASYRKKDSGVQESSHFLQGAKKNNLSLAILTLEMTGDQREVGSLGTSATNSVTYKKVENTVLPKPDLPKTSGKVELLPKVHIYQKDLFPTETSNGSPGHLDLVEGSLLQGTEGAIKWNEANRPGKVPFLRVATESSAKTPSKLLDPLAWDNHYGTQIPKEEWKSQEKSPEKTAFKKKDTILSLNACESNHAIAAINEGQNKPEIEVTWAKQGRTERLCSQNPPVLKRHQREITRTTLQSDQEEIDYDDTISVEMKKEDFDIYDEDENQSPRSFQKKTRHYFIAAVERLWDYGMSSSPHVLRNRAQSGSVPQFKKVVFQEFTDGSFTQPLYRGELNEHLGLLGPYIRAEVEDNIMVTFRNQASRPYSFYSSLISYEEDQRQGAEPRKNFVKPNETKTYFWKVQHHMAPTKDEFDCKAWAYFSDVDLEKDVHSGLIGPLLVCHTNTLNPAHGRQVTVQEFALFFTIFDETKSWYFTENMERNCRAPCNIQMEDPTFKENYRFHAINGYIMDTLPGLVMAQDQRIRWYLLSMGSNENIHSIHFSGHVFTVRKKEEYKMALYNLYPGVFETVEMLPSKAGIWRVECLIGEHLHAGMSTLFLVYSNKCQTPLGMASGHIRDFQITASGQYGQWAPKLARLHYSGSINAWSTKEPFSWIKVDLLAPMIIHGIKTQGARQKFSSLYISQFIIMYSLDGKKWQTYRGNSTGTLMVFFGNVDSSGIKHNIFNPPIIARYIRLHPTHYSIRSTLRMELMGCDLNSCSMPLGMESKAISDAQITASSYFTNMFATWSPSKARLHLQGRSNAWRPQVNNPKEWLQVDFQKTMKVTGVTTQGVKSLLTSMYVKEFLISSSQDGHQWTLFFQNGKVKVFQGNQDSFTPVVNSLDPPLLTRYLRIHPQSWVHQIALRMEVLGCEAQDLY

SEQ ID NO: 4983 - protein, 216 aa, Homo Sapiens
MRIQDPGKVFFGNVDSSGIKHNIFNPPIIARYIRLHPTHYSIRSTLRMELMGCDLNSCSMPLGMESKAISDAQITASSYFTNMFATWSPSKARLHLQGRSNAWRPQVNNPKEWLQVDFQKTMKVTGVTTQGVKSLLTSMYVKEFLISSSQDGHQWTLFFQNGKVKVFQGNQDSFTPVVNSLDPPLLTRYLRIHPQSWVHQIALRMEVLGCEAQDLY

SEQ ID NO: 4984 - protein, 461 aa, Homo Sapiens
MQRVNMIMAESPGLITICLLGYLLSAECTVFLDHENANKILNRPKRYNSGKLEEFVQGNLERECMEEKCSFEEAREVFENTERTTEFWKQYVDGDQCESNPCLNGGSCKDDINSYECWCPFGFEGKNCELDVTCNIKNGRCEQFCKNSADNKVVCSCTEGYRLAENQKSCEPAVPFPCGRVSVSQTSKLTRAETVFPDVDYVNSTEAETILDNITQSTQSFNDFTRVVGGEDAKPGQFPWQVVLNGKVDAFCGGSIVNEKWIVTAAHCVETGVKITVVAGEHNIEETEHTEQKRNVIRIIPHHNYNAAINKYNHDIALLELDEPLVLNSYVTPICIADKEYTNIFLKFGSGYVSGWGRVFHKGRSALVLQYLRVPLVDRATCLRSTKFTIYNNMFCAGFHEGGRDSCQGDSGGPHVTEVEGTSFLTGIISWGEECAMKGKYGIYTKVSRYVNWIKEKTKLT

SEQ ID NO: 4985 - protein, 423 aa, Homo Sapiens
MQRVNMIMAESPGLITICLLGYLLSAECTVFLDHENANKILNRPKRYNSGKLEEFVQGNLERECMEEKCSFEEAREVFENTERTTEFWKQYVDVTCNIKNGRCEQFCKNSADNKVVCSCTEGYRLAENQKSCEPAVPFPCGRVSVSQTSKLTRAETVFPDVDYVNSTEAETILDNITQSTQSFNDFTRVVGGEDAKPGQFPWQVVLNGKVDAFCGGSIVNEKWIVTAAHCVETGVKITVVAGEHNIEETEHTEQKRNVIRIIPHHNYNAAINKYNHDIALLELDEPLVLNSYVTPICIADKEYTNIFLKFGSGYVSGWGRVFHKGRSALVLQYLRVPLVDRATCLRSTKFTIYNNMFCAGFHEGGRDSCQGDSGGPHVTEVEGTSFLTGIISWGEECAMKGKYGIYTKVSRYVNWIKEKTKLT

SEQ ID NO: 4986 - protein, 38 aa, Homo Sapiens
LTQVLRAVLSACTWVSRKGDLQRMKQTHKGKRTFSQDG

SEQ ID NO: 4987 - protein, 128 aa, Homo Sapiens
MAFTGKFEMESEKNYDEFMKLLGISSDVIEKARNFKIVTEVQQDGQDFTWSQHYSGGHTMTNKFTVGKESNIQTMGGKTFKATVQMEGGKLVVNFPNYHQTSEIVGDKLVEVSTIGGVTYERVSKRLA

SEQ ID NO: 4988 - protein, 177 aa, Homo Sapiens
MKTVTMMMVVEMQALTQVLRAVLSACTWVSRKGDLQRMKQTHKGKPPSSMAFTGKFEMESEKNYDEFMKLLGISSDVIEKARNFKIVTEVQQDGQDFTWSQHYSGGHTMTNKFTVGKESNIQTMGGKTFKATVQMEGGKLVVNFPNYHQTSEIVGDKLVEVSTIGGVTYERVSKRLA

SEQ ID NO: 4989 - protein, 67 aa, Homo Sapiens
MAEPDYIEDDNPELIRPQKLINPVKTSRNHQDLHRELLMNQKRGLAPQNKPELQKVMEKRKRDQVIK

SEQ ID NO: 4990 - protein, 84 aa, Homo Sapiens
MAEPDYIEDDNPELIRPQKLINPVKTSRNHQDLHRELLMNQKRGLAPQNKPELQKVMEKRKRDQVIKQKEEEAQKKKSDLEIEL

SEQ ID NO: 4991 - protein, 90 aa, Homo Sapiens
MAEPDYIEDDNPELIRPQKLINPVKTSRNHQDLHRELLMNQKRGLAPQNKPELQKVMEKRKRDQVIKQKEEEAQKKKSDLEIELLKRQQK

SEQ ID NO: 4992 - protein, 93 aa, Homo Sapiens
MAEPDYIEDDNPELIRPQKLINPVKTSRNHQDLHRELLMNQKRGLAPQNKPELQKVMEKRKRDQVIKQKEEEAQKKKSDLEIELLKRQQKLEQ

SEQ ID NO: 4993 - protein, 101 aa, Homo Sapiens
MAEPDYIEDDNPELIRPQKLINPVKTSRNHQDLHRELLMNQKRGLAPQNKPELQKVMEKRKRDQVIKQKEEEAQKKKSDLEIELLKRQQKLEQLELEKQKL

SEQ ID NO: 4994 - protein, 125 aa, Homo Sapiens
MAEPDYIEDDNPELIRPQKLINPVKTSRNHQDLHRELLMNQKRGLAPQNKPELQKVMEKRKRDQVIKQKEEEAQKKKSDLEIELLKRQQKLEQLELEKQKLQEEQENAPEFVKVKGNLRRTGQEV

SEQ ID NO: 4995 - protein, 126 aa, Homo Sapiens
MAEPDYIEDDNPELIRPQKLINPVKTSRNHQDLHRELLMNQKRGLAPQNKPELQKVMEKRKRDQVIKQKEEEAQKKKSDLEIELLKRQQKLEQLELEKQKLQEEQENAPEFVKVKGNLRRTGQEVA

SEQ ID NO: 4996 - protein, 128 aa, Homo Sapiens
MAEPDYIEDDNPELIRPQKLINPVKTSRNHQDLHRELLMNQKRGLAPQNKPELQKVMEKRKRDQVIKQKEEEAQKKKSDLEIELLKRQQKLEQLELEKQKLQEEQENAPEFVKVKGNLRRTGQEVAQA

SEQ ID NO: 4997 - protein, 131 aa, Homo Sapiens
MAEPDYIEDDNPELIRPQKLINPVKTSRNHQDLHRELLMNQKRGLAPQNKPELQKVMEKRKRDQVIKQKEEEAQKKKSDLEIELLKRQQKLEQLELEKQKLQEEQENAPEFVKVKGNLRRTGQEVAQAQES

SEQ ID NO: 4998 - protein, 131 aa, Homo Sapiens; identical to SEQ ID NO: 4997

SEQ ID NO: 4999 - protein, 131 aa, Homo Sapiens; identical to SEQ ID NO: 4997

SEQ ID NO: 5000 - protein, 131 aa, Homo Sapiens; identical to SEQ ID NO: 4997

SEQ ID NO: 5001 - protein, 131 aa, Homo Sapiens; identical to SEQ ID NO: 4997

SEQ ID NO: 5002 - protein, 131 aa, Homo Sapiens; identical to SEQ ID NO: 4997

SEQ ID NO: 5003 - protein, 131 aa, Homo Sapiens; identical to SEQ ID NO: 4997

SEQ ID NO: 5004 - protein, 131 aa, Homo Sapiens; identical to SEQ ID NO: 4997

SEQ ID NO: 5005 - protein, 131 aa, Homo Sapiens; identical to SEQ ID NO: 4997

SEQ ID NO: 5006 - protein, 131 aa, Homo Sapiens; identical to SEQ ID NO: 4997

SEQ ID NO: 5007 - protein, 131 aa, Homo Sapiens; identical to SEQ ID NO: 4997

SEQ ID NO: 5008 - protein, 51 aa, Homo Sapiens
MAEPDYIEDDNPELIRPQKLINPVKTSRNHQDLHRELLMNQKRILVWLEIH

SEQ ID NO: 5009 - protein, 306 aa, Homo Sapiens
MSTWKARLTKRLKSPSRSMHPFPCSALLACFGNTRESASFNQSGVADTHSTVRVQPVAKAGRQPRHPSAEGAPEKRQDSSTHAERNGSANRNSSHRTAAQPAETPEDVPGSLDDGADCEAVVFHASIPRPSIIDTPKEEEFREEPKCLELEQKMTSDSPPEDIDHKDSYLITRSIMAEPDYIEDDNPELIRPQKLINPVKTSRNHQDLHRELLMNQKRGLAPQNKPELQKVMEKRKRDQVIKQKEEEAQKKKSDLEIELLKRQQKLEQLELEKQKLQEEQENAPEFVKVKGNLRRTGQEVAQAQES

SEQ ID NO: 5010 - protein, 160 aa, Homo Sapiens
MSTWKARLTKRLKSPSRSMHPFPCSALLACFGNTRESASFNQSGVADTHSTVRVQPVAKAGRQPRHPSAEGAPEKRQDSSTHAERNGSANRNSSHRTAAQPAETPEDVPGSLDDGADCEAVVFHASIPRPSIIDTPKEEEFREEPKCLELEQKMTSGECS

SEQ ID NO: 5011 - protein, 251 aa, Homo Sapiens
MAQGRVAHLIEWKGWSKPSDSPAALESAFSSYSDLSEGEQEARFAAGVAEQFAIAEAKLRAWSSVDGEDSTDDSYDEDFAGGMDTDMAGQLPLGPHLQDLFTGHRFSRPVRQGSVEPESDCSQTVSPDTLCSSLCSLEDGLLGSPARLASQLLGDELLLAKLPPSRESAFRSLGPLEAQDSLYNSPLTEGWLLPSRSLWVEPSLKGPCPAGLVLCFIHLSIVSKSSSFFLKTEGFWSVFSVGSSLLWEALE

SEQ ID NO: 5012 - protein, 335 aa, Homo Sapiens
MFLATLSFLLPFAHPFGTVSCEYMLGSPLSSLAQVNLSPFSHPKVHMDPNYCHPSTSLHLCSLAWSFTRLLHPPLSPGISQVVKDHVTKPTAMAQGRVAHLIEWKGWSKPSDSPAALESAFSSYSDLSEGEQEARFAAGVAEQFAIAEAKLRAWSSVDGEDSTDDSYDEDFAGGMDTDMAGQLPLGPHLQDLFTGHRFSRPVRQGSVEPESDCSQTVSPDTLCSSLCSLEDGLLGSPARLASQLLGDELLLAKLPPSRESAFRSLGPLEAQDSLYNSPLTESCLSPAEEEPAPCKDCQPLCPPLTGSWERQRQASDLASSGVVSLDEDEAEPEEQ

SEQ ID NO: 5013 - protein, 123 aa, Homo Sapiens
MLPKSRRALTIQEIAALARSSLHGISQVVKDHVTKPTAMAQGRVAHLIEWKGWSKPSDSPAALESAFSSYSDLSEGEQEARFAAGVAEQFAIAEAKLRAWSSVDGEDSTDDSYDEDFAGGMDT

SEQ ID NO: 5014 - protein, 232 aa, Homo Sapiens
MLPKSRRALTIQEIAALARSSLHGISQVVKDHVTKPTAMAQGRVAHLIEWKGWSKPSDSPAALESAFSSYSDLSEGEQEARFAAGVAEQFAIAEAKLRAWSSVDGEDSTDDSYDEDFAGGMDTDMAGQLPLGPHLQDLFTGHRFSRPVRQGSVEPESDCSQTVSPDTLCSSLCSLEDGLLGSPARLASQLLGDELLLAKLPPSRESAFRSLGPLEAQDSLYNSPLTESCLSP

SEQ ID NO: 5015 - protein, 281 aa, Homo Sapiens
MLPKSRRALTIQEIAALARSSLHGISQVVKDHVTKPTAMAQGRVAHLIEWKGWSKPSDSPAALESAFSSYSDLSEGEQEARFAAGVAEQFAIAEAKLRAWSSVDGEDSTDDSYDEDFAGGMDTDMAGQLPLGPHLQDLFTGHRFSRPVRQGSVEPESDCSQTVSPDTLCSSLCSLEDGLLGSPARLASQLLGDELLLAKLPPSRESAFRSLGPLEAQDSLYNSPLTESCLSPAEEEPAPCKDCQPLCPPLTGSWERQRQASDLASSGVVSLDEDEAEPEEQ

SEQ ID NO: 5016 - protein, 281 aa, Homo Sapiens; identical to SEQ ID NO: 5015

SEQ ID NO: 5017 - protein, 281 aa, Homo Sapiens; identical to SEQ ID NO: 5015

SEQ ID NO: 5018 - protein, 366 aa, Homo Sapiens
MPMISVLGKMFLWQREGPGGRWTCQTSRRVSSDPAWAVEWIELPRGLSLSSLGSARTLRGWSRSSRPSSVDSQDLPEVNVGDTVAMLPKSRRALTIQEIAALARSSLHGISQVVKDHVTKPTAMAQGRVAHLIEWKGWSKPSDSPAALESAFSSYSDLSEGEQEARFAAGVAEQFAIAEAKLRAWSSVDGEDSTDDSYDEDFAGGMDTDMAGQLPLGPHLQDLFTGHRFSRPVRQGSVEPESDCSQTVSPDTLCSSLCSLEDGLLGSPARLASQLLGDELLLAKLPPSRESAFRSLGPLEAQDSLYNSPLTESCLSPAEEEPAPCKDCQPLCPPLTGSWERQRQASDLASSGVVSLDEDEAEPEEQ

SEQ ID NO: 5019 - protein, 359 aa, Homo Sapiens
MPMISVLGKMFLWQREGPGGRWTCQTSRRVSSDPAWAVEWIELPRGLSLSSLGSARTLRGWSRSSRPSSVDSQDLPEVNVGDTVAMLPKSRRALTIQEIAALARSSLHGISQVVKDHVTKPTAMAQGRVAHLIEWKGWSKPSDSPAALESAFSSYSDLSEGEQEARFAAGVAEQFAIAEAKLRAWSSVDGEDSTDDSYDEDFAGGMDTDMAGQLPLGPHLQDLFTGHRFSRPVRQGSVEPESDCSQTVSPDTLCSSLCSLEDGLLGSPARLASQLLGDELLLAKLPPSRESAFRSLGPLEAQDSLYNSPLTESCLSPAEEEPAPCKDCQPLCPPLTGSWERQRQASDLGLAPALPEPMG

SEQ ID NO: 5020 - protein, 890 aa, Homo Sapiens
MSRSATLLLCLLGCHVWKAVTKTLREPGAGAQEVTLKVHISDASTHQPVADALIEIFTNQASIASGTSGTDGVAFIKFQYKLGSQLIVTASKHAYVPNSAPWKPIRLPVFSSLSLGLLPERSATLMVYEDVVQIVSGFQGARPQPRVHFQRRALRLPENTSYSDLTAFLTAASSPSEVDSFPYLRGLDGNGTGNSTRHDLTPVTAVSVHLLSSNGTPVLVDGPIYVTVPLATQSSLRHNAYVAAWRFDQKLGTWLKSGLGLVHQEGSQLTWTYIAPQLGYWVAAMSPPIPGPVVTQDITTYHTVFLLAILGGMAFILLVLLCLLLYYCRRKCLKPRQHHRKLQLPAGLESSKRDQSTSMSHINLLFSRRASEFPGPLSVTSHGRPEAPGTKELMSGVHLEMMSPGGEGDLHTPMLKLSYSTSQEFSSREELLSCKEEDKSQISFDNLTPSGTLGKDYHKSVEVFPLKARKSMEREGYESSGNDDYRGSYNTVLSQPLFEKQDREGPASTGSKLTIQEHLYPAPSSPEKEQLLDRRPTECMMSRSVDHLERPTSFPRPGQLICCSSVDQVNDSVYRKVLPALVIPAHYMKLPGDHSYVSQPLVVPADQQLEIERLQAELSNPHAGIFPHPSSQIQPQPLSSQAISQQHLQDAGTREWSPQNASMSESLSIPASLNDAALAQMNSEVQLLTEKALMELGGGKPLPHPRAWFVSLDGRSNAHVRHSYIDLQRAGRNGSNDASLDSGVDMNEPKSARKGRGDALSLQQNYPPVQEHQQKEPRAPDSTAYTQLVYLDDVEQSGSECGTTVCTPEDSALRCLLEGSSRRSGGQLPSLQEETTRRTADAPSEPAASPHQRRSAHEEEEDDDDDDQGEDKKSPWQKREERPLMAFNIK

SEQ ID NO: 5021 - protein, 198 aa, Homo Sapiens
MSRSATLLLCLLGCHVWKAVTKTLREPGAGAQEVTLKVHISDASTHQPVADALIEIFTNQASIASGTSGTDGVAFIKFQYKLGSQLIVTASKHAYVPNSAPWKPIRLPVFSSLSLGLLPERSATLMVYEDVVQIVSGFQGNSTRHDLTPVTAVSVHLLSSNGTPVLVDGPIYVTVPLATQSSLRHNAYVAAWRFDQKL

SEQ ID NO: 5022 - protein, 826 aa, Homo Sapiens
MARLCRRVPCTLLLGLAVVLLKARLVPAAARAELSRSDLSLIQQQQQQQQQQQQQQKQLEEAEEERTEVPGATSTLTVPVSVFMLKVQVNDIISRQYLSQAVVEVFVNYTKTNSTVTKSNGAVLIKVPYKLGLSLTIIAYKDGYVLTPLPWKTRRMPIYSSVTLSLFPQSQANIWLFEDTVLITGKLADAKSQPSVQFSKALIKLPDNHHISNVTGYLTVLQQFLKVDNFLHTTGITLNKPGFENIELTPLAAICVKIYSGGKELKVNGSIQVSLPLLRLNDISAGDRIPAWTFDMNTGAWVNHGRGMVKEHNNHLIWTYDAPHLGYWIAAPLPGTRGSGINEDSKDITAYHTVFLTAILGGTIVIVIGFFAVLLCYCRDKCGTPQKRERNITKLEVLKRDQTTSTTHINHISTVKVALKAEDKSQLFNAKNSSYSPQKKEPSKAETEERVSMVKTRDDFKIYNEDVSFLSVNQNNYSRNPTQSLEPNVGSKQPKHINNNLSSSLGDAQDEKRYLTGNEEAYGRSHIPEQLMHIYSQPIAILQTSDLFSTPEQLHTAKSATLPRKGQLVYGQLMEPVNRENFTQTLPKMPIHSHAQPPDAREEDIILEGQQSLPSQASDWSRYSSSLLESVSVPGTLNEAVVMTPFSSELQGISEQTLLELSKGKPSPHPRAWFVSLDGKPVAQVRHSFIDLKKGKRTQSNDTSLDSGVDMNELHSSRKLEREKTFIKSMHQPKILYLEDLDLSSSESGTTVCSPEDPALRHILDGGSGVIMEHPGEESPGRKSTVEDFEANTSPTKRRGRPPLAKRDSKTNIWKKREERPLIPIN

SEQ ID NO: 5023 - protein, 238 aa, Homo Sapiens
MARLCRRVPCTLLLGLAVVLLKARLVPAAARAELSRSDLSLIQQQQQQQQQQQQQQKQLEEAEEERTEVPGATSTLTVPVSVFMLKVQVNDIISRQYLSQAVVEVFVNYTKTNSTVTKSNGAVLIKVPYKLGLSLTIIAYKDGYVLTPLPWKTRRMPIYSSVTLSLFPQSQANIWLFEDTVLITGKLADAKSQPSVQFSKALIKLPDNHHISNVTGYLTVLQQFLKVDNFLHTTGITQ

SEQ ID NO: 5024 - protein, 306 aa, Homo Sapiens
MKKDEPPLDFPDTLEGFEYAFNEKGQLRHIKTGEPFVFNYREDLHRWNQKRYEALGEIITKYVYELLEKDCNLKKVSIPEGYGVIVLNPNENYIEVEKPKIHVQSSSDSSDEPAEKRERKDKVSKETKKRRDFYEKYRNPQREKEMMQLYIRENGSPEEHAIYVWDHFIAQAAAENVFFVAHSYGGLAFVELMIQREADVKNKVTAVALTDSVHNVWHQEAGKTIREWMRENCCNWVSSSEPLDTSVESMLPDCPRVSAGTDRHELTSWKSFPSIFKFFTEASEAKTSSLKPAVTRRSHRIKHEEL

SEQ ID NO: 5025 - protein, 370 aa, Homo Sapiens
MKKDEPPLDFPDTLEGFEYAFNEKGQLRHIKTGEPFVFNYREDLHRWNQKRYEALGEIITKYVYELLEKDCNLKKVSIPVDATESEPKSFIFMSEDALTNPQKLMVLIHGSGVVRAGQWARRLIINEDLDSGTQIPFIKRAVAEGYGVIVLNPNENYIEVEKPKIHVQSSSDSSDEPAEKRERKDKVSKETKKRRDFYEKYRNPQREKEMMQLYIRENGSPEEHAIYVWDHFIAQAAAENVFFVAHSYGGLAFVELMIQREADVKNKVTAVALTDSVHNVWHQEAGKTIREWMRENCCNWVSSSEPLDTSVESMLPDCPRVSAGTDRHELTSWKSFPSIFKFFTEASEAKTSSLKPAVTRRSHRIKHEEL

SEQ ID NO: 5026 - protein, 269 aa, Homo Sapiens
MNRLLIFLIPWKDLNMLLMKIITKYVYELLEKDCNLKKVSIPEGYGVIVLNPNENYIEVEKPKIHVQSSSDSSDEPAEKRERKDKVSKETKKRRDFYEKYRNPQREKEMMQLYIRENGSPEEHAIYVWDHFIAQAAAENVFFVAHSYGGLAFVELMIQREADVKNKVTAVALTDSVHNVWHQEAGKTIREWMRENCCNWVSSSEPLDTSVESMLPDCPRVSAGTDRHELTSWKSFPSIFKFFTEASEAKTSSLKPAVTRRSHRIKHEEL

SEQ ID NO: 5027 - protein, 305 aa, Homo Sapiens
MNRLLIFLIPWKDLNMLLMKIITKYVYELLEKDCNLKKVSIPVDATESEPKSFIFMSEDALTNPQKLMVLIHGSGVVRAGQWARRLIINEDLDSGTQIPFIKRAVAEGYGVIVLNPNENYIEVEKPKIHVQSSSDSSDEPAEKRERKDKVSKETKKRRDFYEKYRNPQREKEMMQLYIRENGSPEEHAIYVWDHFIAQAAAENVFFVAHSYGGLAFVELMIQREADVKNKVTAVALTDSVHNVWHQEAGKTIREWMRENCCNWVSSSEPLDTSVESMLPDCPRVSAGFSCCQMQSHEDLLLCFLL

SEQ ID NO: 5028 - protein, 416 aa, Homo Sapiens
MSISLSSLILLPIWINMAQIQQGGPDEKEKTTALKDLLSRIDLDELMKKDEPPLDFPDTLEGFEYAFNEKGQLRHIKTGEPFVFNYREDLHRWNQKRYEALGEIITKYVYELLEKDCNLKKVSIPVDATESEPKSFIFMSEDALTNPQKLMVLIHGSGVVRAGQWARRLIINEDLDSGTQIPFIKRAVAEGYGVIVLNPNENYIEVEKPKIHVQSSSDSSDEPAEKRERKDKVSKETKKRRDFYEKYRNPQREKEMMQLYIRENGSPEEHAIYVWDHFIAQAAAENVFFVAHSYGGLAFVELMIQREADVKNKVTAVALTDSVHNVWHQEAGKTIREWMRENCCNWVSSSEPLDTSVESMLPDCPRVSAGTDRHELTSWKSFPSIFKFFTEASEAKTSSLKPAVTRRSHRIKHEEL

SEQ ID NO: 5029 - protein, 36 aa, Homo Sapiens
AAAAAFGESAGQVGGAAEADVRGAEPPPCLLRGPLF

SEQ ID NO: 5030 - protein, 76 aa, Homo Sapiens
MDQEPVGGVERGEAVAASGAAAAAAFGESAGQMSNERGFENVELGVIGKKKKVPRRVIHFVSGETMEEYSTDEDEV

SEQ ID NO: 5031 - protein, 213 aa, Homo Sapiens
MDQEPVGGVERGEAVAASGAAAAAAFGESAGQMSNERGFENVELGVIGKKKKVPRRVIHFVSGETMEEYSTDEDEVDGLEKKDVLPTVDPTKLTWGPYLWFYMLRAATSTLSVCDFLGEKIASVLGISTPKYQYAIDEYYRMKKEEEEEEEENRMSEEAEKQYQQNKLQTDSIVQTDQPETVISSSFVNVNFEMEGDSEVIMESKQNPVSVPP

SEQ ID NO: 5032 - protein, 213 aa, Homo Sapiens; identical to SEQ ID NO: 5031

SEQ ID NO: 5033 - protein, 236 aa, Homo Sapiens
MEVGLPAITLFLTSASSPVVATTMDQEPVGGVERGEAVAASGAAAAAAFGESAGQMSNERGFENVELGVIGKKKKVPRRVIHFVSGETMEEYSTDEDEVDGLEKKDVLPTVDPTKLTWGPYLWFYMLRAATSTLSVCDFLGEKIASVLGISTPKYQYAIDEYYRMKKEEEEEEEENRMSEEAEKQYQQNKLQTDSIVQTDQPETVISSSFVNVNFEMEGDSEVIMESKQNPVSVPP

SEQ ID NO: 5034 - protein, 89 aa, Homo Sapiens
MEVGLPAITLFLTSASSPVVATTMDQEPVGGVERGEAVAASGAAAAAAFGESAGQNLTLLPRLKFMARSRLAATSTSRVQAILLPQPPV

SEQ ID NO: 5035 - protein, 140 aa, Homo Sapiens
MSNERGFENVELGVIGKKKKVPRRVIHFVSGETMEEYSTDEDEVDGLEKKDVLPTVDPTKLTWGPYLWFYMLRAATSTLSVCDFLGEKIASVLGISTPKYQYAIDEYYRMKKEEEEEEEENRMSEEAEKQYQQNKLQTDS

SEQ ID NO: 5036 - protein, 39 aa, Homo Sapiens
  misc_feature (1)..(1): Xaa can be any naturally occurring amino acid
XAFGESAGQEIKGSKKLSHGPKGNVDVRTAIAKFYLKDE

SEQ ID NO: 5037 - protein, 7 aa, Homo Sapiens
  misc_feature (1)..(1): Xaa can be any naturally occurring amino acid
XLRGPLF

SEQ ID NO: 5038 - protein, 49 aa, Homo Sapiens
  misc_feature (1)..(1): Xaa can be any naturally occurring amino acid
XNKLQTDSIVQTDQPETVISSSFVNVNFEMEGDSEVIMESKQNPVSVPP

SEQ ID NO: 5039 - protein, 173 aa, Homo Sapiens
MHWKMLLLLLLYYNAEASMCHRWSRAVLFPAAHRPKRSSSLPLNPVLQTSLEEVELLYEFLLAELEISPDLQISIKDEELASLRKASDFRTVCNNVIPKSIPDIRRLSASLSSHPGILKKEDFERTVLTLAYTAYRTALSHGHQKDIWAQSLVSLFQALRHDLMRSSQPGVPP

SEQ ID NO: 5040 - protein, 173 aa, Homo Sapiens; identical to SEQ ID NO: 5039

SEQ ID NO: 5041 - protein, 173 aa, Homo Sapiens; identical to SEQ ID NO: 5039

SEQ ID NO: 5042 - protein, 78 aa, Homo Sapiens
MLLSAVCVMLNLAGSILSCQNAQLVNSLEGCQLIKFDSVEVCVCCELQHQSSGCSNLGETLKLNPLQENCNAVRLTLK

SEQ ID NO: 5043 - protein, 539 aa, Homo Sapiens
MPPAGGPRAPRPAALPRSLSRLRECPGRSRIVLALGATQMALGCLIVAVSFAALALTTSARVRHSCPFWAGFSVLLSGLIGVVSWKRPLSLVITFFMLLSAVCVMLNLAGSILSCQNAQLVNSLEGCQLIKFDSVEVCVCCELQHQSSGCSNLGETLKLNPLQENCNAVRLTLKDLLFSVCALNVLSTIVCALATAMCCMQMVSSDVLQMFLPQRSHPANPTCVTPHGTVLHQTLDFDEFIPPLPPPPYYPPEYTCTPSTEAQRGLHLDFAPSPFGTLYDVAINSPGLLYPAELPPPYEAVVGQPPASQVTSIGQQVAESSSGDPNTSAGFSTPVPADSTSLLVSEGTATPGSSPSPDGPVGAPAPSEPALPPGHVSPEDPGMGSQVQPGPGRVSRSTSDPTLCTSSMAGDASSHRPSCSQDLEAGLSEAVPGSASMSRSATAACRAQLSPAGDPDTWKTDQRPTPEPFPATSKERPRSLVDSKAYADARVLVAKFLEHSHCALPTEAQHMVGAMRLAVTNEERLEEEAVFGADVLDQV

SEQ ID NO: 5044 - protein, 575 aa, Homo Sapiens
MASWLRRKLRGKRRPVIAFCLLMILSAMAVTRFPPQRPSAGPDPGPMEPQGVTGAPATHIRQALSSSRRQRARNMGFWRSRALPRNSILVCAEEQGHRARVDRSRESPGGDLRHPGRVRRDITLSGHPRLSTQHVVLLREDEVGDPGTKDLGHPQHGSPIQETQSEVVTLVSPLPGSDMAALPAWRATSGLTLWPHTAEGRDLLGAENRALTGGQQAEDPTLASGAHQWPGSVEKLQGSVWCDAETLLSSSRTGGQAPPWLTDHDVQMLRLLAQGEVVDKARVPAHGQVLQVGFSTEAALQDLSSPRLSQLCSQGLCGLIKRPGDLPEVLSFHVDRVLGLRRSLPAVARRFHSPLLPYRYTDGGARPVIWWAPDVQHLSDPDEDQNSLALGWLQYQALLAHSCNWPGQAPCPGIHHTEWARLALFDFLLQVHDRLDRYCCGFEPEPSDPCVEERLREKCQNPAELRLVHILVRSSDPSHLVYIDNAGNLQHPEDKLNFRLLEGIDGFPESAVKVLASGCLQNMLLKSLQMDPVFWESQGGAQGLKQVLQTLEQRGQVLLGHIQKHNLTLFRDEDP

SEQ ID NO: 5045 - protein, 575 aa, Homo Sapiens; identical to SEQ ID NO: 5044

SEQ ID NO: 5046 - protein, 140 aa, Homo Sapiens
MVHDRLDRYCCGFEPEPSDPCVEERLREKCQNPAELRLVHILVRSSDPSHLVYIDNAGNLQHPEDKLNFRLLEGIDGFPESAVKVLASGCLQNMLLKSLQMDPVFWESQGGAQGLKQVLQTLEQRGQVLLGHIQKHNLTL

SEQ ID NO: 5047 - protein, 133 aa, Homo Sapiens [sequence omitted]

SEQ ID NO: 5048 - protein, 133 aa, Homo Sapiens [sequence omitted]

SEQ ID NO: 5049 - protein, 52 aa, Homo Sapiens [sequence omitted]

SEQ ID NO: 5050 - protein, 87 aa, Homo Sapiens
MMSKRYLQKATKGKLLIIIFIVTLWGKVVSSANHHKAHHVKTGTCEVVALHRCCNKNKIEERSQTVKCSCFPGQVAGTTRAAPSCVD

SEQ ID NO: 5051 - protein, 110 aa, Homo Sapiens
MMSKRYLQKATKGKLLIIIFIVTLWGKVVSSANHHKAHHVKTGTCEVVALHRCCNKNKIEERSQTVKCSCFPGQVAGTTRAAPSCVDASIVEQKWWCHMQPCLEGEECKV

SEQ ID NO: 5052 - protein, 34 aa, Homo Sapiens
MQPCLEGEECKVLPDRKGWSCSSGNKVKTTRVTH

SEQ ID NO: 5053 - protein, 131 aa, Homo Sapiens
MSKRYLQKATKGKLLIIIFIVTLWGKVVSSANHHKAHHVKTGTCEVVALHRCCNKNKIEERSQTVKCSCFPGQVAGTTRAAPSCVDASIVEQKWWCHMQPCLEGEECKVLPDRKGWSCSSGNKVKTTRANV

SEQ ID NO: 5054 - protein, 131 aa, Homo Sapiens
MSKRYLQKATKGKLLIIIFIVTLWGKVVSSANHHKAHHVKTGTCEVVALHRCCNKNKIEERSQTVKCSCFPGQVAGTTRAAPSCVDASIVEQKWWCHMQPCLEGEECKVLPDRKGWSCSSGNKVKTTRVTH

SEQ ID NO: 5055 - protein, 131 aa, Homo Sapiens; identical to SEQ ID NO: 5054

SEQ ID NO: 5056 - protein, 49 aa, Homo Sapiens
MSKRYLQKATKGKLLIIIFIVTLWGKVVSSANHHKGNPLTQEKSSDPQG

SEQ ID NO: 5057 - protein, 101 aa, Homo Sapiens
MVTPITRMSKRYLQKATKGKLLIIIFIVTLWGKVVSSANHHKAHHVKTGTCEVVALHRCCNKNKIEERSQTVKCSCFPGQVAGTTRAAPSCVDASIVEQKW

SEQ ID NO: 5058 - protein, 133 aa, Homo Sapiens
MSERVERNWSTGGWLLALCLAWLWTHLTLAALQPPTATVLVQQGTCEVIAAHRCCNRNRIEERSQTVKCSCFSGQVAGTTRAKPSCVDASIVLQRWWCQMEPCLPGEECKVLPDLSGWSCSSGHKVKTTKVTR

SEQ ID NO: 5059 - protein, 169 aa, Homo Sapiens
MSERVERNWSTGGWLLALCLAWLWTHLTLAALQPPTATVLVQQGTCEVIAAHRCCNRNRIEERSQTVKCSCFSGQVAGTTRAKPSCVDDLLLAAHCARRDPRAALRLLLPQPPSSCRDGGVRWSPACRGRSVRCSRTCRDGAAAVDTKSKPPRSHDSSWGSRPGQERLD

SEQ ID NO: 5060 - protein, 58 aa, Homo Sapiens
MRSPRMRVCAKSVLLSHWLFLAYVLMVCCKLMSASSQHLRGHAGHHQIKQGTCEVVAV

SEQ ID NO: 5061 - protein, 77 aa, Homo Sapiens
MRSPRMRVCAKSVLLSHWLFLAYVLMVCCKLMSASSQHLRGHAGHHQIKQGTCEVVAVHRCCNKNRIEERSQTVKCS

SEQ ID NO: 5062 - protein, 140 aa, Homo Sapiens
MRSPRMRVCAKSVLLSHWLFLAYVLMVCCKLMSASSQHLRGHAGHHQIKQGTCEVVAVHRCCNKNRIEERSQTVKCSCFPGQVAGTTRAQPSCVEASIVIQKWWCHMNPCLEGEDCKVLPDYSGWSCSSGNKVKTTKVTR

SEQ ID NO: 5063 - protein, 181 aa, Homo Sapiens
MAPSPRTGSRQDATALPSMSSTFWAFMILASLLIAYCSQLAAGTCEIVTLDRDSSQPRRTIARQTARCACRKGQIAGTTRARPACVDARIIKTKQWCDMLPCLEGEGCDLLINRSGWTCTQPGGRIKTTTSPSKPPKRAPPGIPSCRQRAGGSLGSRDLRTSLLCQGSHLADRRRWLRPSQ

SEQ ID NO: 5064 - protein, 132 aa, Homo Sapiens
MAPSPRTGSRQDATALPSMSSTFWAFMILASLLIAYCSQLAAGTCEIVTLDRDSSQPRRTIARQTARCACRKGQIAGTTRARPACVDARIIKTKQWCDMLPCLEGEGCDLLINRSGWTCTQPGGRIKTTTVS

SEQ ID NO: 5065 - protein, 125 aa, Homo Sapiens
MQLLKALWALAGAALCCFLVLVIHAQFLKEGQLAAGTCEIVTLDRDSSQPRRTIARQTARCACRKGQIAGTTRARPACVDARIIKTKQWCDMLPCLEGEGCDLLINRSGWTCTQPGGRIKTTTVS

SEQ ID NO: 5066 - protein, 53 aa, Homo Sapiens
MYHHREWPARIIKTKQWCDMLPCLEGEGCDLLINRSGWTCTQPGGRIKTTTVS

SEQ ID NO: 5067 - protein, 145 aa, Homo Sapiens
MFTSPSEGKPGNMDRHHYEMFTKFGDDGFLIHLDNARGFGRHSHDEISILSPLSQCCMIKKKTLLHLQLLAQADYRLSDVMRESLLEDQLSPVLTEPHLLALDRRLQTILRTVEGCIVAHGQQSVIVDGPVEQLAPDSGQANLTS

SEQ ID NO: 5068 - protein, 541 aa, Homo Sapiens
MPGLRRDRLLTLLLLGALLSADLYFHLWPQVQRQLRPRERPRGCPCTGRASSLARDSAAAASDPGTIVHNFSRTEPRTEPAGGSHSGSSSKLQALFAHPLYNVPEEPPLLGAEDSLLASQEALRYYRRKVARWNRRHKMYREQMNLTSLDPPLQLRLEASWVQFHLGINRHGLYSRSSPVVSKLLQDMRHFPTISADYSQDEKALLGACDCTQIVKPSGVHLKLVLRFSDFGKAMFKPMRQQRDEETPVDFFYFIDFQRHNAEIAAFHLDRILDFRRVPPTVGRIVNVTKEILEVTKNEILQSVFFVSPASNVCFFAKCPYMCKTEYAVCGNPHLLEGSLSAFLPSLNLAPRLSVPNPWIRSYTLAGKEEWEVNPLYCDTVKQIYPYNNSQRLLNVIDMAIFDFLIGNMDRHHYEMFTKFGDDGFLIHLDNARGFGRHSHDEISILSPLSQCCMIKKKTLLHLQLLAQADYRLSDVMRESLLEDQLSPVLTEPHLLALDRRLQTILRTVEGCIVAHGQQSVIVDGPVEQLAPDSGQANLTS

SEQ ID NO: 5069 - protein, 21 aa, Homo Sapiens
QRHNAEIAAFHLDREYGPAPL

SEQ ID NO: 5070 - protein, 127 aa, Homo Sapiens
  misc_feature (1)..(1): Xaa can be any naturally occurring amino acid
XFHLWPQVQRQLRPRERPRGCPCTGRASSLARDSAAAASDPGTIVHNFSRTEPRTEPAGGSHSGSSSKLQALFAHPLYNVPEEPPLLGAEDSLLASQEALRYYRRKVARWNRPQFLLLKGRGGVCDP

SEQ ID NO: 5071 - protein, 584 aa, Homo Sapiens
MKMMLVRRFRVLILMVFLVACALHIALDLLPRLERRGARPSGEPGCSCAQPAAEVAAPGWAQVRGRPGEPPAASSAAGDAGWPNKHTLRILQDFSSDPSSNLSSHSLEKLPPAAEPAERALRGRDPGALRPHDPAHRPLLRDPGPRRSESPPGPGGDASLLARLFEHPLYRVAVPPLTEEDVLFNVNSDTRLSPKAAENPDWPHAGAEGAEFLSPGEAAVDSYPNWLKFHIGINRYELYSRHNPAIEALLHDLSSQRITSVAMKSGGTQLKLIMTFQNYGQALFKPMKQTREQETPPDFFYFSDYERHNAEIAAFHLDRILDFRRVPPVAGRMVNMTKEIRDVTRDKKLWRTFFISPANNICFYGECSYYCSTEHALCGKPDQIEGSLAAFLPDLSLAKRKTWRNPWRRSYHKRKKAEWEVDPDYCEEVKQTPPYDSSHRILDVMDMTIFDFLMGNMDRHHYETFEKFGNETFIIHLDNGRGFGKYSHDELSILVPLQQCCRIRKSTYLRLQLLAKEEYKLSLLMAESLRGDQVAPVLYQPHLEALDRRLRVVLKAVRDCVERNGLHSVVDDDLDTEHRAASAR

SEQ ID NO: 5072 - protein, 218 aa, Homo Sapiens
MGMWSIGAGALGAAALALLLANTDVFLSKPQKAALEYLEDIDLKTLEKEPRTFKAKELWEKNGAVIMAVRRPGCFLCREEAADLSSLKSMLDQLGVPLYAVVKEHIRTEVKDFQPYFKGEIFLDEKKKFYGPQRRKMMFMGFIRLGVWYNFFRAWNGGFSGNLEGEGFILGGVFVVGSGKQGILLEHREKEFGDKVNLLSVLEAAKMIKPQTLASEKK

SEQ ID NO: 5073 - protein, 229 aa, Homo Sapiens
MSFLQDPSFFTMGMWSIGAGALGAAALALLLANTDVFLSKPQKAALEYLEDIDLKTLEKEPRTFKAKELWEKNGAVIMAVRRPGCFLCREEAADLSSLKSMLDQLGVPLYAVVKEHIRTEVKDFQPYFKGEIFLDEKKKFYGPQRRKMMFMGFIRLGVWYNFFRAWNGGFSGNLEGEGFILGGVFVVGSGKQGILLEHREKEFGDKVNLLSVLEAAKMIKPQTLASEKK

SEQ ID NO: 5074 - protein, 229 aa, Homo Sapiens; identical to SEQ ID NO: 5073

SEQ ID NO: 5075 - protein, 229 aa, Homo Sapiens; identical to SEQ ID NO: 5073

SEQ ID NO: 5076 - protein, 229 aa, Homo Sapiens; identical to SEQ ID NO: 5073

SEQ ID NO: 5077 - protein, 229 aa, Homo Sapiens; identical to SEQ ID NO: 5073

SEQ ID NO: 5078 - protein, 425 aa, Homo Sapiens
MMPSESGAERRDRAAAQVGTAAATAVATAAPAGGGPDPEALSAFPGRHLSGLSWPQVKRLDALLSEPIPIHGRGNFPTLSVQPRQIVQVVRSTLEEQGLHVHSVRLHGSAASHVLHPESGLGYKDLDLVFRVDLRSEASFQLTKAVVLACLLDFLPAGVSRAKITPLTLKEAYVQKLVKVCTDSDRWSLISLSNKSGKNVELKFVDSVRRQFEFSIDSFQIILDSLLLFGQCSSTPMSEAFHPTVTGESLYGDFTEALEHLRHRVIATRSPEEIRGGGLLKYCHLLVRGFRPRPSTDVRALQRYMCSRFFIDFPDLVEQRRTLERYLEAHFGGADAARRYACLVTLHRVVNESTVCLMNHERRQTLDLIAALALQALAEQGPAATAALAWRPPGTDGVVPATVNYYVTPVQPLLAHAYPTWLPCN

SEQ ID NO: 5079 - protein, 113 aa, Homo Sapiens
MISTRYRRRRDAPRGPGRCPPHPTRPRGPGRKRGAAGSPGAAPSASRRPEFPKPLRVLPWRERGRGGREWPMSLRSPLPTSACGWGESGRRAGPGSLRSSDRTERARCSLRPR

SEQ ID NO: 5080 - protein, 225 aa, Homo Sapiens
MLLTLAGGALFFPGLFALCTWALRRSQPGWSRTDCVMISTRLVSSVHAVLATGSGIVIIRSCDDVITGRHWLAREYVWFLIPYMIYDSYAMYLCEWCRTRDQNRAPSLTLRNFLSRNRLMITHHAVILFVLVPVAQLKQQHTLLYKVNGILTLATFLSCRILLFPFMYWSYGRQQGLSLLQVPFSIPFYCNVANAFLVAPQIYWFCLLCRKAVRLFDTPQAKKDG

SEQ ID NO: 5081 - protein, 257 aa, Homo Sapiens
MLLTLAGGALFFPGLFALCTWALRRSQPGWSRTDCVMISTRLVSSVHAVLATGSGIVIIRSCDDVITGRHWLAREYVWFLIPYMIYDSYAMYLCEWCRTRDQNRAPSLTLRNFLSRNRLMITHHAVILFVLVPVAQRLRGDLGDFFVGCIFTAELSTPFVSLGRVLIQLKQQHTLLYKVNGILTLATFLSCRILLFPFMYWSYGRQQGLSLLQVPFSIPFYCNVANAFLVAPQIYWFCLLCRKAVRLFDTPQAKKDG

SEQ ID NO: 5082 - protein, 69 aa, Homo Sapiens
MLLTLAGGALFFPGLFALCTWALRRSQPGWSRTDCVMISTRLVSSVHAVLATGSGIVIIRSCDDVITGS

SEQ ID NO: 5083 - protein, 149 aa, Homo Sapiens
MLLTLAGGALFFPGLFALCTWALRRSQPGWSRTDCVMISTRYRRRRDAPRGPGRCPPHPTRPRGPGRKRGAAGSPGAAPSASRRPEFPKPLRVLPWRERGRGGREWPMSLRSPLPTSACGWGESGRRAGPGSLRSSDRTERARCSLRPR

SEQ ID NO: 5084 - protein, 38 aa, Homo Sapiens
  misc_feature (1)..(1): Xaa can be any naturally occurring amino acid
XATGSGIVIIRSCDDVITGRGSGETLGTSLSAASSRQN

SEQ ID NO: 5085 - protein, 252 aa, Homo Sapiens
GQGIAAALIHLPSTGNKHWRPRSPEASTDCCWLHQATGSGSVTQAGVQWYDLGSLQPLPPRFKRFSCLSLPSSWDYRSSWELPDLQEGKIQAISDSDGVNYPWYGNTTETCTIVGPTKRDSKFIISMNDNFYPSVTWAVPVSESNVAKLTNIYRDQSFTTWLVATNTSTNDMIILQTLHWRMQLSIEVNPNRPLGQRARLREPIAQDQPKILSKNEPIPPSALVKPNANDAQVLMWRPKYGQPLVVIPPKHR

SEQ ID NO: 5086 - protein, 283 aa, Homo Sapiens
MPGFFCDCWPSLEIRALLYAMGCIQSIGGKARVFREGITVIDVKASIDPVPTSIDESSSVVLRYRTPHFRASAQVVMPPIPKKETWVVGWIQACSHMEFYNQYGEQGMSSWELPDLQEGKIQAISDSDGVNYPWYGNTTETCTIVGPTKRDSKFIISMNDNFYPSVTWAVPVSESNVAKLTNIYRDQSFTTWLVATNTSTNDMIILQTLHWRMQLSIEVNPNRPLGQRARLREPIAQDQPKILSKNEPIPPSALVKPNANDAQVLMWRPKYGQPLVVIPPKHR

SEQ ID NO: 5087 - protein, 280 aa, Homo Sapiens
MTSYILISFVLLIGVGCIEKDQSCPVFGGRKRLHLLFVGGQLRQVRMLRGSPEASTDCCWLHQATGSGSVTQAGVQWYDLGSLQPLPPRFKRFSCLSLPSSWDYRSSWELPDLQEGKIQAISDSDGVNYPWYGNTTETCTIVGPTKRDSKFIISMNDNFYPSVTWAVPVSESNVAKLTNIYRDQSFTTWLVATNTSTNDMIILQTLHWRMQLSIEVNPNRPLGQRARLREPIAQDQPKILSKNEPIPPSALVKPNANDAQVLMWRPKYGQPLVVIPPKHR

SEQ ID NO: 5088 - protein, 160 aa, Homo Sapiens
MQRVSGLLSWTLSRVLWLSGLSEPGAARQPRIMEEKALEVYDLIRTIRDPEKPNTLEELEVVSESCVEVQEINEEEYLVIIRFTPTVPHCSLATLIGLCLRVKLQRCLPFKHKLEIYISEGTHSTEEDINKQINDKERVAAAMENPNLREIVEQCVLEPD

SEQ ID NO: 5089 - protein, 130 aa, Homo Sapiens
MQRVSGLLSWTLSRVLWLSGLSEPGAARQPRIMEEKALEVYDLIRTIRDPEKPNTLEELEVVSESCVEVQEINEEEYLVIIRFTPTVPHCSLATLIGLCLRVKLQRCLPFKHKLEIYISEGTHSTEEDSK

SEQ ID NO: 5090 - protein, 102 aa, Homo Sapiens
MQRVSGLLSWTLSRVLWLSGLSEPGAARQPRIMEEKALEVYDLIRTIRDPEKPNTLEELEVVSESCVEVQEINEEEYLVIIRFTPTVPHCSLATLIVGNLHF

SEQ ID NO: 5091 - protein, 102 aa, Homo Sapiens; identical to SEQ ID NO: 5090

SEQ ID NO: 5092 - protein, 69 aa, Homo Sapiens
MQRVSGLLSWTLSRVLWLSGLSEPGAARQPRIMEEKALEVYGWNAMAGSRLTATSAFWFQVILLPQSPK

SEQ ID NO: 5093 - protein, 186 aa, Homo Sapiens
MAAWGKKHAGKDPVRDECEERNRFTETREEDVTDEHGEREPFAETDEHTGANTKKPEDTAEDLTAKRKRMKMDKTCSKTKNKSKHALRKKQLKRQKRDYIHSLKLLNVLEEYITDEQKEEEEEEGEEEELIRIFQEQQKKWQQYRSVRRERLKEMKLLRDQFVKALEDFEDLCDRVFSDEDSELDN

SEQ ID NO: 5094 - protein, 186 aa, Homo Sapiens; identical to SEQ ID NO: 5093

SEQ ID NO: 5095 - protein, 90 aa, Homo Sapiens
MKAKKAHPRVEYNKTSGNAFEEQFSLPTKVRGSPLASQDNQPRILWAGGLPRPSWRLNLWRPGGRSMQERIQSVMNVRKETVLQKQGRKM

SEQ ID NO: 5096 - protein, 226 aa, Homo Sapiens
MPGFLSFLSVSLRSPGSGIASSFPGQPATDPVGRRAAKAQLEAQFMAAWGKKHAGKDPVRDECEERNRFTETREEDVTDEHGEREPFAETDEHTGANTKKPEDTAVGANNFKNYPVHIGVSSEQHILLDCSLSRQKRDYIHSLKLLNVLEEYITDEQKEEEEEEGEEEELIRIFQEQQKKWQQYRSVRRERLKEMKLLRDQFVKALEDFEDLCDRVFSDEDSELDN

SEQ ID NO: 5097 - protein, 25 aa, Homo Sapiens
KERCQYYTASFSDYAKYYALVCYGE

SEQ ID NO: 5098 - protein, 155 aa, Homo Sapiens
MCIVLRPSRVHNSEENTMRALTLKDILNGTFSYKTFFPNWISGQEYLHQSADNNIVLYNIETGQSYTILSNRTMKSVNASNYGLSPDRQFVYLESDYSKLWRYSYTATYYIYDLSNGEFVRGNELPRPIQYLCWSPVGSKLAYVYQNNIYLKQRP

SEQ ID NO: 5099 - protein, 121 aa, Homo Sapiens
MCIVLRPSRVHNSEENTMRALTLKDILNGTFSYKTFFPNWISGQEYLHQSADNNIVLYNIETGQSYTILSNRTMKSVNASNYGLSPDRQFVYLESDYSKLWRYSYTATYYIYDLSNGKWQL

SEQ ID NO: 5100 - protein, 760 aa, Homo Sapiens
MKTWVKIVFGVATSAVLALLVMCIVLRPSRVHNSEENTMRALTLKDILNGTFSYKTFFPNWISGQEYLHQSADNNIVLYNIETGQSYTILSNRTMKSVNASNYGLSPDRQFVYLESDYSKLWRYSYTATYYIYDLSNGEFVRGNELPRPIQYLCWSPVGSKLAYVYQNNIYLKQRPGDPPFQITFNGRENKIFNGIPDWVYEEEMLATKYALWWSPNGKFLAYAEFNDTDIPVIAYSYYGDEQYPRTINIPYPKAGAKNPVVRIFIIDTTYPAYVGPQEVPVPAMIASSDYYFSWLTWVTDERVCLQWLKRVQNVSVLSICDFREDWQTWDCPKTQEHIEESRTGWAGGFFVSTPVFSYDAISYYKIFSDKDGYKHIHYIKDTVENAIQITSGKWEAINIFRVTQDSLFYSSNEFEEYPGRRNIYRISIGSYPPSKKCVTCHLRKERCQYYTASFSDYAKYYALVCYGPGIPISTLHDGRTDQEIKILEENKELENALKNIQLPKEEIKKLEVDEITLWYKMILPPQFDRSKKYPLLIQVYGGPCSQSVRSVFAVNWISYLASKEGMVIALVDGRGTAFQGDKLLYAVYRKLGVYEVEDQITAVRKFIEMGFIDEKRIAIWGWSYGGYVSSLALASGTGLFKCGIAVAPVSSWEYYASVYTERFMGLPTKDDNLEHYKNSTVMARAEYFRNVDYLLIHGTADDNVHFQNSAQIAKALVNAQVDFQAMWYSDQNHGLSGLSTNHLYTHMTHFLKQCFSLSD

SEQ ID NO: 5101 - protein, 735 aa, Homo Sapiens
MKTWVKIVFGVATSAVLALLVMCIVLRPSRVHNSEENTMRALTLKDILNGTFSYKTFFPNWISGQEYLHQSADNNIVLYNIETGQSYTILSNRTMLWRYSYTATYYIYDLSNGEFVRGNELPRPIQYLCWSPVGSKLAYVYQNNIYLKQRPGDPPFQITFNGRENKIFNGIPDWVYEEEMLATKYALWWSPNGKFLAYAEFNDTDIPVIAYSYYGDEQYPRTINIPYPKAGAKNPVVRIFIIDTTYPAYVGPQEVPVPAMIASSDYYFSWLTWVTDERVCLQWLKRVQNVSVLSICDFREDWQTWDCPKTQEHIEESRTGWAGGFFVSTPVFSYDAISYYKIFSDKDGYKHIHYIKDTVENAIQITSGKWEAINIFRVTQDSLFYSSNEFEEYPGRRNIYRISIGSYPPSKKCVTCHLRKERCQYYTASFSDYAKYYALVCYGPGIPISTLHDGRTDQEIKILEENKELENALKNIQLPKEEIKKLEVDEITLWYKMILPPQFDRSKKYPLLIQVYGGPCSQSVRSVFAVNWISYLASKEGMVIALVDGRGTAFQGDKLLYAVYRKLGVYEVEDQITAVRKFIEMGFIDEKRIAIWGWSYGGYVSSLALASGTGLFKCGIAVAPVSSWEYYASVYTERFMGLPTKDDNLEHYKNSTVMARAEYFRNVDYLLIHGTADDNVHFQNSAQIAKALVNAQVDFQAMWYSDQNHGLSGLSTNHLYTHMTHFLKQCFSLSD

SEQ ID NO: 5102 - protein, 759 aa, Homo Sapiens
MTWVKIVFGVATSAVLALLVMCIVLRPSRVHNSEENTMRALTLKDILNGTFSYKTFFPNWISGQEYLHQSADNNIVLYNIETGQSYTILSNRTMKSVNASNYGLSPDRQFVYLESDYSKLWRYSYTATYYIYDLSNGEFVRGNELPRPIQYLCWSPVGSKLAYVYQNNIYLKQRPGDPPFQITFNGRENKIFNGIPDWVYEEEMLATKYALWWSPNGKFLAYAEFNDTDIPVIAYSYYGDEQYPRTINIPYPKAGAKNPVVRIFIIDTTYPAYVGPQEVPVPAMIASSDYYFSWLTWVTDERVCLQWLKRVQNVSVLSICDFREDWQTWDCPKTQEHIEESRTGWAGGFFVSTPVFSYDAISYYKIFSDKDGYKHIHYIKDTVENAIQITSGKWEAINIFRVTQDSLFYSSNEFEEYPGRRNIYRISIGSYPPSKKCVTCHLRKERCQYYTASFSDYAKYYALVCYGPGIPISTLHDGRTDQEIKILEENKELENALKNIQLPKEEIKKLEVDEITLWYKMILPPQFDRSKKYPLLIQVYGGPCSQSVRSVFAVNWISYLASKEGMVIALVDGRGTAFQGDKLLYAVYRKLGVYEVEDQITAVRKFIEMGFIDEKRIAIWGWSYGGYVSSLALASGTGLFKCGIAVAPVSSWEYYASVYTERFMGLPTKDDNLEHYKNSTVMARAEYFRNVDYLLIHGTADDNVHFQNSAQIAKALVNAQVDFQAMWYSDQNHGLSGLSTNHLYTHMTHFLKQCFSLSD

SEQ ID NO: 5103 - protein, 47 aa, Homo Sapiens
  misc_feature (1)..(1): Xaa can be any naturally occurring amino acid
XYTERFMGLPTKDDNLEHYKNSTVMARAEYFRNVDYLLIHGTADGEV

SEQ ID NO: 5104 - protein, 86 aa, Homo Sapiens
MLGIWTLLPLVLTSVARLSSKSVNAQVTDINSKGLELRKTVTTVETQNLEGLHHDGQFCHKPCPPDVNMESSRNAHSPATPSAKRK

SEQ ID NO: 5105 - protein, 103 aa, Homo Sapiens
MLGIWTLLPLVLTSVARLSSKSVNAQVTDINSKGLELRKTVTTVETQNLEGLHHDGQFCHKPCPPDVNMESSRNAHSPATPSAKRKDPDLTWGGFVFFFCQFH

SEQ ID NO: 5106 - protein, 132 aa, Homo Sapiens
MLGIWTLLPLVLTSVARLSSKSVNAQVTDINSKGLELRKTVTTVETQNLEGLHHDGQFCHKPCPPGERKARDCTVNGDEPDCVPCQEGKEYTDKAHFSSKCRRCRLCDEGHDVNMESSRNAHSPATPSAKRK

SEQ ID NO: 5107 - protein, 149 aa, Homo Sapiens
MLGIWTLLPLVLTSVARLSSKSVNAQVTDINSKGLELRKTVTTVETQNLEGLHHDGQFCHKPCPPGERKARDCTVNGDEPDCVPCQEGKEYTDKAHFSSKCRRCRLCDEGHDVNMESSRNAHSPATPSAKRKDPDLTWGGFVFFFCQFH

SEQ ID NO: 5108 - protein, 149 aa, Homo Sapiens; identical to SEQ ID NO: 5107

SEQ ID NO: 5109 - protein, 335 aa, Homo Sapiens
MLGIWTLLPLVLTSVARLSSKSVNAQVTDINSKGLELRKTVTTVETQNLEGLHHDGQFCHKPCPPGERKARDCTVNGDEPDCVPCQEGKEYTDKAHFSSKCRRCRLCDEGHGLEVEINCTRTQNTKCRCKPNFFCNSTVCEHCDPCTKCEHGIIKECTLTSNTKCKEEGSRSNLGWLCLLLLPIPLIVWVKRKEVQKTCRKHRKENQGSHESPTLNPETVAINLSDVDLSKYITTIAGVMTLSQVKGFVRKNGVNEAKIDEIKNDNVQDTAEQKVQLLRNWHQLHGKKEAYDTLIKDLKKANLCTLAEKIQTIILKDITSDSENSNFRNEIQSLV

SEQ ID NO: 5110 - protein, 233 aa, Homo Sapiens [sequence omitted]

SEQ ID NO: 5111 - protein, 244 aa, Homo Sapiens
MLGIWTLLPLVLTSVARLSSKSVNAQVTDINSKGLELRKTVTTVETQNLEGLHHDGQFCHKPCPPGERKARDCTVNGDEPDCVPCQEGKEYTDKAHFSSKCRRCRLCDEGHGLEVEINCTRTQNTKCRCKPNFFCNSTVCEHCDPCTKCEHGIIKECTLTSNTKCKEEGSRSNLGWLCLLLLPIPLIVWVKRKEVQKTCRKHRKENQGSHESPTLNPMESCSIAQAGVQGCNHGSLQPQSPGLK

SEQ ID NO: 5112 - protein, 220 aa, Homo Sapiens
MLGIWTLLPLVLTSVARLSSKSVNAQVTDINSKGLELRKTVTTVETQNLEGLHHDGQFCHKPCPPGERKARDCTVNGDEPDCVPCQEGKEYTDKAHFSSKCRRCRLCDEGHGLEVEINCTRTQNTKCRCKPNFFCNSTVCEHCDPCTKCEHGIIKECTLTSNTKCKEEGSRSNLGWLCLLLLPIPLIVWVKRKEVQKTCRKHRKENQGSHESPTLNPMLT

SEQ ID NO: 5113 - protein, 314 aa, Homo Sapiens
MLGIWTLLPLVLTSVARLSSKSVNAQVTDINSKGLELRKTVTTVETQNLEGLHHDGQFCHKPCPPGERKARDCTVNGDEPDCVPCQEGKEYTDKAHFSSKCRRCRLCDEGHGLEVEINCTRTQNTKCRCKPNFFCNSTVCEHCDPCTKCEHGIIKECTLTSNTKCKEEVKRKEVQKTCRKHRKENQGSHESPTLNPETVAINLSDVDLSKYITTIAGVMTLSQVKGFVRKNGVNEAKIDEIKNDNVQDTAEQKVQLLRNWHQLHGKKEAYDTLIKDLKKANLCTLAEKIQTIILKDITSDSENSNFRNEIQSLV

SEQ ID NO: 5114 - protein, 119 aa, Homo Sapiens
LSKKPLEEKPSQPYSARESLSEVQSLSSFQSESCDDNASIVTVMHLVNAVVDTVSTEESLAAPDLSKPRGYHWDTSDWMPSVPLPDIQEFPNYEVIDEQTPLYSADPNAIDTDYYPGGY

SEQ ID NO: 5115 - protein, 4588 aa, Homo Sapiens
MGRHLALLLLLLLLFQHFGDSDGSQRLEQTPLQFTHLEYNVTVQENSAAKTYVGHPVKMGVYITHPAWEVRYKIVSGDSENLFKAEEYILGDFCFLRIRTKGGNTAILNREVKDHYTLIVKALEKNTNVEARTKVRVQVLDTNDLRPLFSPTSYSVSLPENTAIRTSIARVSATDADIGTNGEFYYSFKDRTDMFAIHPTSGVIVLTGRLDYLETKLYEMEILAADRGMKLYGSSGISSMAKLTVHIEQANECAPVITAVTLSPSELDRDPAYAIVTVDDCDQGANGDIASLSIVAGDLLQQFRTVRSFPGSKEYKVKAIGGIDWDSHPFGYNLTLQAKDKGTPPQFSSVKVIHVTSPQFKAGPVKFEKDVYRAEISEFAPPNTPVVMVKAIPAYSHLRYVFKSTPGKAKFSLNYNTGLISILEPVKRQQAAHFELEVTTSDRKASTKVLVKVLGANSNPPEFTQTAYKAAFDENVPIGTTVMSLSAVDPDEGENGYVTYSIANLNHVPFAIDHFTGAVSTSENLDYELMPRVYTLRIRASDWGLPYRREVEVLATITLNNLNDNTPLFEKINCEGTIPRDLGVGEQITTVSAIDADELQLVQYQIEAGNELDFFSLNPNSGVLSLKRSLMDGLGAKVSFHSLRITATDGENFATPLYINITVAASHKLVNLQCEETGVAKMLAEKLLQANKLHNQGEVEDIFFDSHSVNAHIPQFRSTLPTGIQVKENQPVGSSVIFMNSTDLDTGFNGKLVYAVSGGNEDSCFMIDMETGMLKILSPLDRETTDKYTLNITVYDLGIPQKAAWRLLHVVVVDANDNPPEFLQESYFVEVSEDKEVHSEIIQVEATDKDLGPNGHVTYSIVTDTDTFSIDSVTGVVNIARPLDRELQHEHSLKIEARDQAREEPQLFSTVVVKVSLEDVNDNPPTFIPPNYRVKVREDLPEGTVIMWLEAHDPDLGQSGQVRYSLLDHGEGNFDVDKLSGAVRIVQQLDFEKKQVYNLTVRAKDKGKPVSLSSTCYVEVEVVDVNENLHPPVFSSFVEKGTVKEDAPVGSLVMTVSAHDEDARRDGEIRYSIRDGSGVGVFKIGEETGVIETSDRLDRESTSHYWLTVFATDQGVVPLSSFIEIYIEVEDVNDNAPQTSEPVYYPEIMENSPKDVSVVQIEAFDPDSSSNDKLMYKITSGNPQGFFSIHPKTGLITTTSRKLDREQQDEHILEVTVTDNGSPPKSTIARVIVKILDENDNKPQFLQKFYKIRLPEREKPDRERNARREPLYHVIATDKDEGPNAEISYSIEDGNEHGKFFIEPKTGVVSSKRFSAAGEYDILSIKAVDNGRPQKSSTTRLHIEWISKPKPSLEPISFEESFFTFTVMESDPVAHMIGVISVEPPGIPLWFDITGGNYDSHFDVDKGTGTIIVAKPLDAEQKSNYNLTVEATDGTTTILTQVFIKVIDTNDHRPQFSTSKYEVVIPEDTAPETEILQISAVDQDEKNKLIYTLQSSRDPLSLKKFRLDPATGSLYTSEKLDHEAVHQHTLTVMVRDQDVPVKRNFARIVVNVSDTNDHAPWFTASSYKGRVYESAAVGSVVLQVTALDKDKGKNAEVLYSIESGNIGNSFMIDPVLGSIKTAKELDRSNQAEYDLMVKATDKGSPPMSEITSVRIFVTIADNASPKFTSKEYSVELSETVSIGSFVGMVTAHSQSSVVYEIKDGNTGDAFDINPHSGTIITQKALDFETLPIYTLIIQGTNMAGLSTNTTVLVHLQDENDNAPVFMQAEYTGLISESASINSVVLTDRNVPLVIRAADADKDSNALLVYHIVEPSVHTYFAIDSSTGAIHTVLSLDYEETSIFHFTVQVHDMGTPRLFAEYAANVTVHVIDINDCPPVFAKPLYEASLLLPTYKGVKVITVNATDADSSAFSQLIYSITEGNIGEKFSMDYKTGALTVQNTTQLRSRYELTVRASDGRFAGLTSVKINVKESKESHLKFTQDVYSAVVKENSTEAETLAVITAIGNPINEPLFYHILNPDRRFKISRTSGVLSTTGTPFDREQQEAFDVVVEVTEEHKPSAVAHVVVKVIVEDQNDNAPVFVNLPYYAVVKVDTEVGHVIRYVTAVDRDSGRNGEVHYYLKEHHEHFQIGPLGEISLKKQFELDTLNKEYLVTVVAKDGGNPAFSAEVIVPITVMNKAMPVFEKPFYSAEIAESIQVHSPVVHVQANSPEGLKVFYSITDGDPFSQFTINFNTGVINVIAPLDFEAHPAYKLSIRATDSLTGAHAEVFVDIIVDDINDNPPVFAQQSYAVTLSEASVIGTSVVQVRATDSDSEPNRGISYQMFGNHSKSHDHFHVDSSTGLISLLRTLDYEQSRQHTIFVRAVDGGMPTLSSDVIVTVDVTDLNDNPPLFEQQIYEARISEHAPHGHFVTCVKAYDADSSDIDKLQYSILSGNDHKHFVIDSATGIITLSNLHRHALKPFYSLNLSVSDGVFRSSTQVHVTVIGGNLHSPAFLQNEYEVELAENAPLHTLVMEVKTTDGDSGIYGHVTYHIVNDFAKDRFYINERGQIFTLEKLDRETPAEKVISVRLMAKDAGGKVAFCTVNVILTDDNDNAPQFRATKYEVNIGSSAAKGTSVVKVLASDADEGSNADITYAIEADSESVKENLEINKLSGVITTKESLIGLENEFFTFFVRAVDNGSPSKESVVLVYVKILPPEMQLPKFSEPFYTFTVSEDVPIGTEIDLIRAEHSGTVLYSLVKGNTPESNRDESFVIDRQSGRLKLEKSLDHETTKWYQFSILARCTQDDHEMVASVDVSIQVKDANDNSPVFESSPYEAFIVENLPGGSRVIQIRASDADSGTNGQVMYSLDQSQSVEVIESFAINMETGWITTLKELDHEKRDNYQIKVVASDHGEKIQLSSTAIVDVTVTDVNDSPPRFTAEIYKGTVSEDDPQGGVIAILSTTDADSEEINRQVTYFITGGDPLGQFAVETIQNEWKVYVKKPLDREKRDNYLLTITATDGTFSSKAIVEVKVLDANDNSPVCEKTLYSDTIPEDVLPGKLIMQISATDADIRSNAEITYTLLGSGAEKFKLNPDTGELKTSTPLDREEQAVYHLLVRATDGGGRFCQASIVLTLEDVNDNAPEFSADPYAITVFENTEPGTLLTRVQATDADAGLNRKILYSLIDSADGQFSINELSGIIQLEKPLDRELQAVYTLSLKAVDQGLPRRLTATGTVIVSVLDINDNPPVFEYREYGATVSEDILVGTEVLQVYAASRDIEANAEITYSIISGNEHGKFSIDSKTGAVFIIENLDYESSHEYYLTVEATDGGTPSLSDVATVNVNVTDINDNTPVFSQDTYTTVISEDAVLEQSVITVMADDADGPSNSHIHYSIIDGNQGSSFTIDPVRGEVKVTKLLDRETISGYTLTVQASDNGSPPRVNTTTVNIDVSDVNDNAPVFSRGNYSVIIQENKPVGFSVLQLVVTDEDSSHNGPPFFFTIVTGNDEKAFEVNPQGVLLTSSAIKRKEKDHYLLQVKVADNGKPQLSSLTYIDIRVIEESIYPPAILPLEIFITSSGEEYSGGVIGKIHATDQDVYDTLTYSLDPQMDNLFSVSSTGGKLIAHKKLDIGQYLLNVSVTDGKFTTVADITVHIRQVTQEMLNHTIAIRFANLTPEEFVGDYWRNFQRALRNILGVRRNDIQIVSLQSSEPHPHLDVLLFVEKPGSAQISTKQLLHKINSSVTDIEEIIGVRILNVFQKLCAGLDCPWKFCDEKVSVDESVMSTHSTARLSFVTPRHHRAAVCLCKEGRCPPVHHGCEDDPCPEGSECVSDPWEEKHTCVCPSGRFGQCPGSSSMTLTGNSYVKYRLTENENKLEMKLTMRLRTYSTHAVVMYARGTDYSILEIHHGRLQYKFDCGSGPGIVSVQSIQVNDGQWHAVALEVNGNYARLVLDQVHTASGTAPGTLKTLNLDNYVFFGGHIRQQGTRHGRSPQVGNGFRGCMDSIYLNGQELPLNSKPRSYAHIEESVDVSPGCFLTATEDCASNPCQNGGVCNPSPAGGYYCKCSALYIGTHCEISVNPCSSKPCLYGGTCVVDNGGFVCQCRGLYTGQRCQLSPYCKDEPCKNGGTCFDSLDGAVCQCDSGFRGERCQSDIDECSGNPCLHGALCENTHGSYHCNCSHEYRGRHCEDAAPNQYVSTPWNIGLAEGIGIVVFVAGIFLLVVVFVLCRKMISRKKKHQAEPKDKHLGPATAFLQRPYFDSKLNKNIYSDIPPQVPVRPISYTPSIPSDSRNNLDRNSFEGSAIPEHPEFSTFNPESVHGHRKAVAVCSVAPNLPPPPPSNSPSDSDSIQKPSWDFDYDTKVVDLDPCLSKKPLEEKPSQPYSARESLSEVQSLSSFQSESCDDNGYHWDTSDWMPSVPLPDIQEFPNYEVIDEQTPLYSADPNAIDTDYYPGGYDIESDFPPPPEDFPAADELPPLPPEFSNQFESIHPPRDMPAAGSLGSSSRNRQRFNLNQYLPNFYPLDMSEPQTKGTGENSTCREPHAPYPPGYQRHFEAPAVESMPMSVYASTASCSDVSACCEVESEVMMSDYESGDDGHFEEVTIPPLDSQQHTEV

SEQ ID NO: 5116 - protein, 488 aa, Homo Sapiens
MGRHLALLLLLLLLFQHFGDSDGSQRLEQTPLQFTHLEYNVTVQENSAAKTYVGHPVKMGVYITHPAWEVRYKIVSGDSENLFKAEEYILGDFCFLRIRTKGGNTAILNREVKDHYTLIVKALEKNTNVEARTKVRVQVLDTNDLRPLFSPTSYSVSLPENTAIRTSIARVSATDADIGTNGEFYYSFKDRTDMFAIHPTSGVIVLTGRLDYLETKLYEMEILAADRGMKLYGSSGISSMAKLTVHIEQANECAPVITAVTLSPSELDRDPAYAIVTVDDCDQGANGDIASLSIVAGDLLQQFRTVRSFPGSKEYKVKAIGGIDWDSHPFGYNLTLQAKDKGTPPQFSSVKVIHVTSPQFKAGPVKFEKDVYRAEISEFAPPNTPVVMVKAIPAYSHLRYVFKSTPGKAKFSLNYNTGLISILEPVKRQQAAHFELEVTTSDRKASTKVLVKVLGANSNPPEFTQTAYKAAFDENVPIGTTVMSLSAV

SEQ ID NO: 5117 - protein, 4590 aa, Homo Sapiens
MGRHLALLLLLLLLFQHFGDSDGSQRLEQTPLQFTHLEYNVTVQENSAAKTYVGHPVKMGVYITHPAWEVRYKIVSGDSENLFKAEEYILGDFCFLRIRTKGGNTAILNREVKDHYTLIVKALEKNTNVEARTKVRVQVLDTNDLRPLFSPTSYSVSLPENTAIRTSIARVSATDADIGTNGEFYYSFKDRTDMFAIHPTSGVIVLTGRLDYLETKLYEMEILAADRGMKLYGSSGISSMAKLTVHIEQANECAPVITAVTLSPSELDRDPAYAIVTVDDCDQGANGDIASLSIVAGDLLQQFRTVRSFPGSKEYKVKAIGGIDWDSHPFGYNLTLQAKDKGTPPQFSSVKVIHVTSPQFKAGPVKFEKDVYRAEISEFAPPNTPVVMVKAIPAYSHLRYVFKSTPGKAKFSLNYNTGLISILEPVKRQQAAHFELEVTTSDRKASTKVLVKVLGANSNPPEFTQTAYKAAFDENVPIGTTVMSLSAVDPDEGENGYVTYSIANLNHVPFAIDHFTGAVSTSENLDYELMPRVYTLRIRASDWGLPYRREVEVLATITLNNLNDNTPLFEKINCEGTIPRDLGVGEQITTVSAIDADELQLVQYQIEAGNELDFFSLNPNSGVLSLKRSLMDGLGAKVSFHSLRITATDGENFATPLYINITVAASHKLVNLQCEETGVAKMLAEKLLQANKLHNQGEVEDIFFDSHSVNAHIPQFRSTLPTGIQVKENQPVGSSVIFMNSTDLDTGFNGKLVYAVSGGNEDSCFMIDMETGMLKILSPLDRETTDKYTLNITVYDLGIPQKAAWRLLHVVVVDANDNPPEFLQESYFVEVSEDKEVHSEIIQVEATDKDLGPNGHVTYSIVTDTDTFSIDSVTGVVNIARPLDRELQHEHSLKIEARDQAREEPQLFSTVVVKVSLEDVNDNPPTFIPPNYRVKVREDLPEGTVIMWLEAHDPDLGQSGQVRYSLLDHGEGNFDVDKLSGAVRIVQQLDFEKKQVYNLTVRAKDKGKPVSLSSTCYVEVEVVDVNENLHPPVFSSFVEKGTVKEDAPVGSLVMTVSAHDEDARRDGEIRYSIRDGSGVGVFKIGEETGVIETSDRLDRESTSHYWLTVFATDQGVVPLSSFIEIYIEVEDVNDNAPQTSEPVYYPEIMENSPKDVSVVQIEAFDPDSSSNDKLMYKITSGNPQGFFSIHPKTGLITTTSRKLDREQQDEHILEVTVTDNGSPPKSTIARVIVKILDENDNKPQFLQKFYKIRLPEREKPDRERNARREPLYHVIATDKDEGPNAEISYSIEDGNEHGKFFIEPKTGVVSSKRFSAAGEYDILSIKAVDNGRPQKSSTTRLHIEWISKPKPSLEPISFEESFFTFTVMESDPVAHMIGVISVEPPGIPLWFDITGGNYDSHFDVDKGTGTIIVAKPLDAEQKSNYNLTVEATDGTTTILTQVFIKVIDTNDHRPQFSTSKYEVVIPEDTAPETEILQISAVDQDEKNKLIYTLQSSRDPLSLKKFRLDPATGSLYTSEKLDHEAVPAHLTVMVRDQDVPVKRNFARIVVNVSDTNDHAPWFTASSYKGRVYESAAVGSVVLQVTALDKDKGKNAEVLYSIESGTFGNIGNSFMIDPVLGSIKTAKELDRSNQAEYDLMVKATDKGSPPMSEITSVRIFVTIADNASPKFTSKEYSVELSETVSIGSFVGMVTAHSQSSVVYEIKDGNTGDAFDINPHSGTIITQKALDFETLPIYTLIIQGTNMAGLSTNTTVLVHLQDENDNAPVFMQAEYTGLISESASINSVVLTDRNVPLVIRAADADKDSNALLVYHIVEPSVHTYFAIDSSTGAIHTVLSLDYEETSIFHFTVQVHDMGTPRLFAEYAANVTVHVIDINDCPPVFAKPLYEASLLLPTYKGVKVITVNATDADSSAFSQLIYSITEGNIGEKFSMDYKTGALTVQNTTQLRSRYELTVRASDGRFAGLTSVKINVKESKESHLKFTQDVYSAVVKENSTEAETLAVITAIGNPINEPLFYHILNPDRRFKISRTSGVLSTTGTPFDREQQEAFDVVVEVTEEHKPSAVAHVVVKVIVEDQNDNAPVFVNLPYYAVVKVDTEVGHVIRYVTAVDRDSGRNGEVHYYLKEHHEHFQIGPLGEISLKKQFELDTLNKEYLVTVVAKDGGNPAFSAEVIVPITVMNKAMPVFEKPFYSAEIAESIQVHSPVVHVQANSPEGLKVFYSITDGDPFSQFTINFNTGVINVIAPLDFEAHPAYKLSIRATDSLTGAHAEVFVDIIVDDINDNPPVFAQQSYAVTLSEASVIGTSVVQVRATDSDSEPNRGISYQMFGNHSKSHDHFHVDSSTGLISLLRTLDYEQSRQHTIFVRAVDGGMPTLSSDVIVTVDVTDLNDNPPLFEQQIYEARISEHAPHGHFVTCVKAYDADSSDIDKLQYSILSGNDHKHFVIDSATGIITLSNLHRHALKPFYSLNLSVSDGVFRSSTQVHVTVIGGNLHSPAFLQNEYEVELAENAPLHTLVMEVKTTDGDSGIYGHVTYHIVNDFAKDRFYINERGQIFTLEKLDRETPAEKVISVRLMAKDAGGKVAFCTVNVILTDDNDNAPQFRATKYEVNIGSSAAKGTSVVKVLASDADEGSNADITYAIEADSESVKENLEINKLSGVITTKESLIGLENEFFTFFVRAVDNGSPSKESVVLVYVKILPPEMQLPKFSEPFYTFTVSEDVPIGTEIDLIRAEHSGTVLYSLVKGNTPESNRDESFVIDRQSGRLKLEKSLDHETTKWYQFSILARCTQDDHEMVASVDVSIQVKDANDNSPVFESSPYEAFIVENLPGGSRVIQIRASDADSGTNGQVMYSLDQSQSVEVIESFAINMETGWITTLKELDHEKRDNYQIKVVASDHGEKIQLSSTAIVDVTVTDVNDSPPRFTAEIYKGTVSEDDPQGGVIAILSTTDADSEEINRQVTYFITGGDPLGQFAVETIQNEWKVYVKKPLDREKRDNYLLTITATDGTFSSKAIVEVKVLDANDNSPVCEKTLYSDTIPEDVLPGKLIMQISATDADIRSNAEITYTLLGSGAEKFKLNPDTGELKTSTPLDREEQAVYHLLVRATDGGGRFCQASIVLTLEDVNDNAPEFSADPYAITVFENTEPGTLLTRVQATDADAGLNRKILYSLIDSADGQFSINELSGIIQLEKPLDRELQAVYTLSLKAVDQGLPRRLTATGTVIVSVLDINDNPPVFEYREYGATVSEDILVGTEVLQVYAASRDIEANAEITYSIISGNEHGKFSIDSKTGAVFIIENLDYESSHEYYLTVEATDGGTPSLSDVATVNVNVTDINDNTPVFSQDTYTTVISEDAVLEQSVITVMADDADGPSNSHIHYSIIDGNQGSSFTIDPVRGEVKVTKLLDRETISGYTLTVQASDNGSPPRVNTTTVNIDVSDVNDNAPVFSRGNYSVIIQENKPVGFSVLQLVVTDEDSSHNGPPFFFTIVTGNDEKAFEVNPQGVLLTSSAIKRKEKDHYLLQVKVADNGKPQLSSLTYIDIRVIEESIYPPAILPLEIFITSSGEEYSGGVIGKIHATDQDVYDTLTYSLDPQMDNLFSVSSTGGKLIAHKKLDIGQYLLNVSVTDGKFTTVADITVHIRQVTQEMLNHTIAIRFANLTPEEFVGDYWRNFQRALRNILGVRRNDIQIVSLQSSEPHPHLDVLLFVEKPGSAQISTKQLLHKINSSVTDIEEIIGVRILNVFQKLCAGLDCPWKFCDEKVSVDESVMSTHSTARLSFVTPRHHRAAVCLCKEGRCPPVHHGCEDDPCPEGSECVSDPWEEKHTCVCPSGRFGQCPGSSSMTLTGNSYVKYRLTENENKLEMKLTMRLRTYSTHAVVMYARGTDYSILEIHHGRLQYKFDCGSGPGIVSVQSIQVNDGQWHAVALEVNGNYARLVLDQVHTASGTAPGTLKTLNLDNYVFFGGHIRQQGTRHGRSPQVGNGFRGCMDSIYLNGQELPLNSKPRSYAHIEESVDVSPGCFLTATEDCASNPCQNGGVCNPSPAGGYYCKCSALYIGTHCEISVNPCSSKPCLYGGTCVVDNGGFVCQCRGLYTGQRCQLSPYCKDEPCKNGGTCFDSLDGAVCQCDSGFRGERCQSDIDECSGNPCLHGALCENTHGSYHCNCSHEYRGRHCEDAAPNQYVSTPWNIGLAEGIGIVVFVAGIFLLVVVFVLCRKMISRKKKHQAEPKDKHLGPATAFLQRPYFDSKLNKNIYSDIPPQVPVRPISYTPSIPSDSRNNLDRNSFEGSAIPEHPEFSTFNPESVHGHRKAVAVCSVAPNLPPPPPSNSPSDSDSIQKPSWDFDYDTKVVDLDPCLSKKPLEEKPSQPYSARESLSEVQSLSSFQSESCDDNGYHWDTSDWMPSVPLPDIQEFPNYEVIDEQTPLYSADPNAIDTDYYPGGYDIESDFPPPPEDFPAADELPPLPPEFSNQFESIHPPRDMPAAGSLGSSSRNRQRFNLNQYLPNFYPLDMSEPQTKGTGENSTCREPHAPYPPGYQRHFEAPAVESMPMSVYASTASCSDVSACCEVESEVMMSDYESGDDGHFEEVTIPPLDSQQHTEV

SEQ ID NO: 5118 - protein, 52 aa, Homo Sapiens
MTMAVIVRNKEKKVIFEFSGQISGSSFRSHFPPLPYSILFVVHTFLSHLELS

SEQ ID NO: 5119 - protein, 368 aa, Homo Sapiens
  misc_feature (1)..(1): Xaa can be any naturally occurring amino acid
XDSKLNKNIYSDIPPQVPVRPISYTPSIPSDSRNNLDRNSFEGSAIPEHPEFSTFNPESVHGHRKAVAVCSVAPNLPPPPPSNSPSDSDSIQKPSWDFDYDTKVVDLDPCLSKKPLEEKPSQPYSARESLSEVQSLSSFQSESCDDNESLAAPDLSKPRGYHWDTSDWMPSVPLPDIQEFPNYEVIDEQTPLYSADPNAIDTDYYPGGYDIESDFPPPPEDFPAADELPPLPPEFSNQFESIHPPRDMPAAGSLGSSSRNRQRFNLNQYLPNFYPLDMSEPQTKGTGENSTCREPHAPYPPGYQRHFEAPAVESMPMSVYASTASCSDVSACCEVESEVMMSDYESGDDGHFEEVTIPPLDSQQHTEV

SEQ ID NO: 5120 - protein, 285 aa, Homo Sapiens
  misc_feature (1)..(1): Xaa can be any naturally occurring amino acid
XSTTEALFASVEDYILVRGVSLVHTAKMNPVRMAEHALTVWMAPFVSVIRVLGEKGVRVISTSALETLACTGPSVRTRTAPITATAATSTGDVTARMLRPTTKVVDLDPCLSKKPLEEKPSQPYSARESLSEVQSLSSFQSESCDDNGYHWDTSDWMPSVPLPDIQEFPNYEVIDEQTPLYSADPNAIDTDYYPGGYDIESDFPPPPEDFPAADELPPLPPEFSNQFESIHPPRDMPAAGSLGSSSRNRQRFNLNQYLPNFYPLDMSEPQTKGTGENSTCREPHA

SEQ ID NO: 5121 - protein, 92 aa, Homo Sapiens
ALLAAGGRGVPGPPPQLRVPTPSASRSLRVSEPRGLGVRALPCAAPPDCQRRGLGDAPLPHGQLRSSSPPRPGDLFQNRIPPPLKHTVLPQS

SEQ ID NO: 5122 - protein, 181 aa, Homo Sapiens
CRMVQEQCCHSQLEELHCATGISLANEQDRCATPHGDNASLEATFVKRCCHCCLLGRAAQAQGQSCEYSLMVGYQCGQVFQACCVKSQETGDLDVGGLQETGGGPCKQQCRDTGDEVVCSCFVGYQLLSDGVSCEDVNECITGSHSCRLGESCINTVGSFRCQRDSSCGTGYELTEDNSCK

SEQ ID NO: 5123 - protein, 60 aa, Homo Sapiens
DITEGNLRDSFDIIKRYMDGMTVAPLLNCHILKDLQSWEMKTVASAILDSDLYSEHFQSS

SEQ ID NO: 5124 - protein, 65 aa, Homo Sapiens
MATHQKDCSLPYATESKECRMVQEQCCHSQLEELHCATGISLANEQDRCATPHGDNASLEATFVK

SEQ ID NO: 5125 - protein, 139 aa, Homo Sapiens
MATHQKDCSLPYATESKECRMVQEQCCHSQLEELHCATGISLANEQDRCATPHGDNASLEATFVKRCCHCCLLGRAAQAQGQSCEYSLMVGYQCGQVFQACCVKSQETGDLDVGGLQETDKIIEVEEEQEDPYLNDRCR

SEQ ID NO: 5126 - protein, 721 aa, Homo Sapiens
MERAAPSRRVPLPLLLLGGLALLAAGVDADVLLEACCADGHRMATHQKDCSLPYATESKECRAVGLASLCQDLNGAWAVWKVGRASQAEGTASARAQRRGMVQEQCCHSQLEELHCATGISLANEQDRCATPHGDNASLEATFVKRCCHCCLLGRAAQAQGQSCEYSLMVGYQCGQVFQACCVKSQETGDLDVGGLQETDKIIEVEEEQEDPYLNDRCRGGGPCKQQCRDTGDEVVCSCFVGYQLLSDGVSCEDVNECITGSHSCRLGESCINTVGSFRCQRDSSCGTGYELTEDNSCKDIDECESGIHNCLPDFICQNTLGSFRCRPKLQCKSGFIQDALGNCIDINECLSISAPCPIGHTCINTEGSYTCQKNVPNCGRGYHLNEEGTRCVDVDECAPPAEPCGKGHRCVNSPGSFRCECKTGYYFDGISRMCVDVNECQRYPGRLCGHKCENTLGSYLCSCSVGFRLSVDGRSCEDINECSSSPCSQECANVYGSYQCYCRRGYQLSDVDGVTCEDIDECALPTGGHICSYRCINIPGSFQCSCPSSGYRLAPNGRNCQDIDECVTGIHNCSINETCFNIQGGFRCLAFECPENYRRSAATRCERLPCHENRECSKLPLRITYYHLSFPTNIQAPAVVFRMGPSSAVPGDSMQLAITGGNEEGFFTTRKVSPHSGVVALTKPVPEPRDLLLTVKMDLSRHGTVSSFVAKLFIFVSAEL

SEQ ID NO: 5127 - protein, 683 aa, Homo Sapiens
MERAAPSRRVPLPLLLLGGLALLAAGVDADVLLEACCADGHRMATHQKDCSLPYATESKECRMVQEQCCHSQLEELHCATGISLANEQDRCATPHGDNASLEATFVKRCCHCCLLGRAAQAQGQSCEYSLMVGYQCGQVFQACCVKSQETGDLDVGGLQETDKIIEVEEEQEDPYLNDRCRGGGPCKQQCRDTGDEVVCSCFVGYQLLSDGVSCEDVNECITGSHSCRLGESCINTVGSFRCQRDSSCGTGYELTEDNSCKDIDECESGIHNCLPDFICQNTLGSFRCRPKLQCKSGFIQDALGNCIDINECLSISAPCPIGHTCINTEGSYTCQKNVPNCGRGYHLNEEGTRCVDVDECAPPAEPCGKGHRCVNSPGSFRCECKTGYYFDGISRMCVDVNECQRYPGRLCGHKCENTLGSYLCSCSVGFRLSVDGRSCEDINECSSSPCSQECANVYGSYQCYCRRGYQLSDVDGVTCEDIDECALPTGGHICSYRCINIPGSFQCSCPSSGYRLAPNGRNCQDIDECVTGIHNCSINETCFNIQGGFRCLAFECPENYRRSAATRCERLPCHENRECSKLPLRITYYHLSFPTNIQAPAVVFRMGPSSAVPGDSMQLAITGGNEEGFFTTRKVSPHSGVVALTKPVPEPRDLLLTVKMDLSRHGTVSSFVAKLFIFVSAEL

SEQ ID NO: 5128 - protein, 703 aa, Homo Sapiens
MERAAPSRRVPLPLLLLGGLALLAAGVDADVLLEACCADGHRMATHQKDCSLPYATESKECRMVQEQCCHSQLEELHCATGISLANEQDRCATPHGDNASLEATFVKRCCHCCLLGRAAQAQGQSCEYSLMVGYQCGQVFQACCVKSQETGDLDVGGLQETDKIIEVEEEQEDPYLNDRCRGGGPCKQQCRDTGDEVVCSCFVGYQLLSDGVSCEDVNECITGSHSCRLGESCINTVGSFRCQRDSSCGTGYELTEDNSCKDIDECESGIHNCLPDFICQNTLGSFRCRPKLQCKSGFIQDALGNCIDINECLSISAPCPIGHTCINTEGSYTCQKNVPNCGRGYHLNEEGTRCVDVDECAPPAEPCGKGHRCVNSPGSFRCECKTGYYFDGISRMCVDVNECQRYPGRLCGHKCENTLGSYLCSCSVGFRLSVDGRSCEDINECSSSPCSQECANVYGSYQCYCRRGYQLSDVDGVTCEDIDECALPTGGHICSYRCINIPGSFQCSCPSSGYRLAPNGRNCQDIDECVTGIHNCSINETCFNIQGGFRCLAFECPENYRRSAATLQQEKTDTVRCIKSCRPNDVTCVFDPVHTISHTVISLPTFREFTRPEEIIFLRAITPPHPASQANIIFDITEGNLRDSFDIIKRYMDGMTVGVVRQVRPIVGPFHAVLKLEMNYVVGGVVSHRNVVNVHIFVSEYWF

SEQ ID NO: 5129 - protein, 566 aa, Homo Sapiens
MERAAPSRRVPLPLLLLGGLALLAAGVDADVLLEACCADGHRMATHQKDCSLPYATESKECRMVQEQCCHSQLEELHCATGISLANEQDRCATPHGDNASLEATFVKRCCHCCLLGRAAQAQGQSCEYSLMVGYQCGQVFQACCVKSQETGDLDVGGLQETDKIIEVEEEQEDPYLNDRCRGGGPCKQQCRDTGDEVVCSCFVGYQLLSDGVSCEDVNECITGSHSCRLGESCINTVGSFRCQRDSSCGTGYELTEDNSCKDIDECESGIHNCLPDFICQNTLGSFRCRPKLQCKSGFIQDALGNCIDINECLSISAPCPIGHTCINTEGSYTCQKNVPNCGRGYHLNEEGTRCVDVDECAPPAEPCGKGHRCVNSPGSFRCECKTGYYFDGISRMCVDVNECQRYPGRLCGHKCENTLGSYLCSCSVGFRLSVDGRSCEDINECSSSPCSQECANVYGSYQCYCRRGYQLSDVDGVTCEDIDECALPTGGHICSYRCINIPGSFQCSCPSSGYRLAPNGRNCQDIDECVTGIHNCSINETCFNIQGGFRCLAFECPENYRRSAAT

SEQ ID NO: 5130 - protein, 601 aa, Homo Sapiens
MERAAPSRRVPLPLLLLGGLALLAAGVDADVLLEACCADGHRMATHQKDCSLPYATESKECRMVQEQCCHSQLEELHCATGISLANEQDRCATPHGDNASLEATFVKRCCHCCLLGRAAQAQGQSCEYSLMVGYQCGQVFQACCVKSQETGDLDVGGLQETDKIIEVEEEQEDPYLNDRCRGGGPCKQQCRDTGDEVVCSCFVGYQLLSDGVSCEDVNECITGSHSCRLGESCINTVGSFRCQRDSSCGTGYELTEDNSCKDIDECESGIHNCLPDFICQNTLGSFRCRPKLQCKSGFIQDALGNCIDINECLSISAPCPIGHTCINTEGSYTCQKNVPNCGRGYHLNEEGTRCVDVDECAPPAEPCGKGHRCVNSPGSFRCECKTGYYFDGISRMCVDVNECQRYPGRLCGHKCENTLGSYLCSCSVGFRLSVDGRSCEDINECSSSPCSQECANVYGSYQCYCRRGYQLSDVDGVTCEDIDECALPTGGHICSYRCINIPGSFQCSCPSSGYRLAPNGRNCQDIDECVTGIHNCSINETCFNIQGGFRCLAFECPENYRRSAATQKSKKGRQNTPAGSSKEDCRVLPWKQGLEDTHLDA

SEQ ID NO: 5131 - protein, 172 aa, Homo Sapiens
MERAAPSRRVPLPLLLLGGLALLAAGVDADVLLEACCADGHRMATHQKDCSLPYATESKECRMVQEQCCHSQLEELHCATGISLANEQDRCATPHGDNASLEATFVKRCCHCCLLGRAAQAQGQSCEYSLMVGYQCGQVFQACCVKSQETGDLDVGGLQETGGGPCKQQCRD

SEQ ID NO: 5132 - protein, 189 aa, Homo Sapiens
MNSYTRGSRRPSAKAASPAASVTSRVSPSGPGVPVDADVLLEACCADGHRMATHQKDCSLPYATESKECRMVQEQCCHSQLEELHCATGISLANEQDRCATPHGDNASLEATFVKRCCHCCLLGRAAQAQGQSCEYSLMVGYQCGQVFQACCVKSQETGDLDVGGLQETDKIIEVEEEQEDPYLNDRCR

SEQ ID NO: 5133 - protein, 183 aa, Homo Sapiens
  misc_feature (1)..(1): Xaa can be any naturally occurring amino acid
XKRCCHCCLLGRAAQAQGQSCEYSLMVGYQCGQVFQACCVKSQETGDLDVGGLQETDKIIEVEEEQEDPYLNDRCRGGGPCKQQCRDTGDEVVCSCFVGYQLLSDGVSCEDVNECITGSHSCRLGESCINTVGSFRCQRDSSCGTGYELTEDNSCKEYSGILPLPTQATVQEWLYTRCSRQLY

SEQ ID NO: 5134 - protein, 159 aa, Homo Sapiens
MVLLWEPAGAWLALGLALALGPSVAAAAPRQDCTGVECPPLENCIEEALEPGACCATCVQQGCACEGYQYYDCLQGGFVRGRVPAGQSYFVDFGSTECSCPPGGGKISCQFMLCPELPPNCIEAVVVADSCPQCGQVGCVHAGHKYAAGHTVHLPPCRA

SEQ ID NO: 5135 - protein, 1184 aa, Homo Sapiens
MVLLWEPAGAWLALGLALALGPSVAAAAPRQDCTGVECPPLENCIEEALEPGACCATCVQQGCACEGYQYYDCLQGGFVRGRVPAGQSYFVDFGSTECSCPPGGGKISCQFMLCPELPPNCIEAVVVADSCPQCGQVGCVHAGHKYAAGHTVHLPPCRACHCPDAGGELICYQLPGCHGNFSDAEEGDPERHYEDPYSYDQEVAEVEAATALGGEVQAGAVQAGAGGPPAALGGGSQPLSTIQAPPWPAVLPRPTAAAALGPPAPVQAKARRVTEDSEEEEEEEEEREEMAVTEQLAAGGHRGLDGLPTTAPAGPSLPIQEERAEAGARAEAGARPEENLILDAQATSRSTGPEGVTHAPSLGKAALVPTQAVPGSPRDPVKPSPHNILSTSLPDAAWIPPTREVPRKPQVLPHSHVEEDTDPNSVHSIPRSSPEGSTKDLIETCCAAGQQWAIDNDECLEIPESGTEDNVCRTAQRHCCVSYLQEKSCMAGVLGAKEGETCGAEDNDSCGISLYKQCCDCCGLGLRVRAEGQSCESNPNLGYPCNHVMLSCCEGEEPLIVPEVRRPPEPAAAPRRVSEAEMAGREALSLGTEAELPNSLPGDDQDECLLLPGELCQHLCINTVGSYHCACFPGFSLQDDGRTCRPEGHPPQPEAPQEPALKSEFSQVASNTIPLPLPQPNTCKDNGPCKQVCSTVGGSAICSCFPGYAIMADGVSCEDINECVTDLHTCSRGEHCVNTLGSFHCYKALTCEPGYALKDGECEDVDECAMGTHTCQPGFLCQNTKGSFYCQARQRCMDGFLQDPEGNCVDINECTSLSEPCRPGFSCINTVGSYTCQRNPLICARGYHASDDGTKCVDVNECETGVHRCGEGQVCHNLPGSYRCDCKAGFQRDAFGRGCIDVNECWASPGRLCQHTCENTLGSYRCSCASGFLLAADGKRCEDVNECEAQRCSQECANIYGSYQCYCRQGYQLAEDGHTCTDIDECAQGAGILCTFRCLNVPGSYQCACPEQGYTMTANGRSCKDVDECALGTHNCSEAETCHNIQGSFRCLRFECPPNYVQVSKTKCERTTCHDFLECQNSPARITHYQLNFQTGLLVPAHIFRIGPAPAFTGDTIALNIIKGNEEGYFGTRRLNAYTGVVYLQRAVLEPRDFALDVEMKLWRQGSVTTFLAKMHIFFTTFAL

SEQ ID NO: 5136 - protein, 1231 aa, Homo Sapiens
MVLLWEPAGAWLALGLALALGPSVAAAAPRQDCTGVECPPLENCIEEALEPGACCATCVQQGCACEGYQYYDCLQGGFVRGRVPAGQSYFVDFGSTECSCPPGGGKISCQFMLCPELPPNCIEAVVVADSCPQCGQVGCVHAGHKYAAGHTVHLPPCRACHCPDAGGELICYQLPGCHGNFSDAEEGDPERHYEDPYSYDQEVAEVEAATALGGEVQAGAVQAGAGGPPAALGGGSQPLSTIQAPPWPAVLPRPTAAAALGPPAPVQAKARRVTEDSEEEEEEEEEREEMAVTEQLAAGGHRGLDGLPTTAPAGPSLPIQEERAEAGARAEAGARPEENLILDAQATSRSTGPEGVTHAPSLGKAALVPTQAVPGSPRDPVKPSPHNILSTSLPDAAWIPPTREVPRKPQVLPHSHVEEDTDPNSVHSIPRSSPEGSTKDLIETCCAAGQQWAIDNDECLEIPESGTEDNVCRTAQRHCCVSYLQEKSCMAGVLGAKEGETCGAEDNDSCGISLYKQCCDCCGLGLRVRAEGQSCESNPNLGYPCNHVMLSCCEGEEPLIVPEVRRPPEPAAAPRRVSEAEMAGREALSLGTEAELPNSLPGDDQDECLLLPGELCQHLCINTVGSYHCACFPGFSLQDDGRTCRPEGHPPQPEAPQEPALKSEFSQVASNTIPLPLPQPNTCKDNGPCKQVCSTVGGSAICSCFPGYAIMADGVSCEDQDECLMGAHDCSRRQFCVNTLGSFYCVNHTVLCADGYILNAHRKCVDINECVTDLHTCSRGEHCVNTLGSFHCYKALTCEPGYALKDGECEDVDECAMGTHTCQPGFLCQNTKGSFYCQARQRCMDGFLQDPEGNCVDINECTSLSEPCRPGFSCINTVGSYTCQRNPLICARGYHASDDGTKCVDVNECETGVHRCGEGQVCHNLPGSYRCDCKAGFQRDAFGRGCIDVNECWASPGRLCQHTCENTLGSYRCSCASGFLLAADGKRCEDVNECEAQRCSQECANIYGSYQCYCRQGYQLAEDGHTCTDIDECAQGAGILCTFRCLNVPGSYQCACPEQGYTMTANGRSCKDVDECALGTHNCSEAETCHNIQGSFRCLRFECPPNYVQVSKTKCERTTCHDFLECQNSPARITHYQLNFQTGLLVPAHIFRIGPAPAFTGDTIALNIIKGNEEGYFGTRRLNAYTGVVYLQRAVLEPRDFALDVEMKLWRQGSVTTFLAKMHIFFTTFAL

SEQ ID NO: 5137 - protein, 1231 aa, Homo Sapiens; identical to SEQ ID NO: 5136

SEQ ID NO: 5138 - protein, 109 aa, Homo Sapiens
  misc_feature (1)..(1): Xaa can be any naturally occurring amino acid
XIDECAQGAGILCTFRCLNVPGSYQCACPEQGYTMTANGRSCKDVDECALGTHNCSEAETCHNIQGSFRCLRFECPPNYVQVSKTWCVPTQAPSGSLHGGPRPWRVPCG

SEQ ID NO: 5139 - protein, 101 aa, Homo Sapiens
  misc_feature (1)..(1): Xaa can be any naturally occurring amino acid
XVDECALGTHNCSEAETCHNIQGSFRCLRFECPPNYVQVSKTKCERTKWKLARWATAVAGALWVRLGDDLRTRDTRPCWGSWTPLDDPSPKLTFHFMFHCD

SEQ ID NO: 5140 - protein, 44 aa, Homo Sapiens
MPGIKRILTVTILALCLPSPGNAQAQCTNGFDLDRQSGQCLASL

SEQ ID NO: 5141 - protein, 489 aa, Homo Sapiens
MPGIKRILTVTILALCLPSPGNAQAQCTNGFDLDRQSGQCLDGVSLSSPRLECNGAISAHCNLCLPGSSDSSASASQVAGITDIDECRTIPEACRGDMMCVNQNGGYLCIPRTNPVYRGPYSNPYSTPYSGPYPAAAPPLSAPNYPTISRPLICRFGYQMDESNQCVDVDECATDSHQCNPTQICINTEGGYTCSCTDGYWLLEGQCLDIDECRYGYCQQLCANVPGSYSCTCNPGFTLNEDGRSCQDVNECATENPCVQTCVNTYGSFICRCDPGYELEEDGVHCSDMDECSFSEFLCQHECVNQPGTYFCSCPPGYILLDDNRSCQDINECEHRNHTCNLQQTCYNLQGGFKCIDPIRCEEPYLRISDNRCMCPAENPGCRDQPFTILYRDMDVVSGRSVPADIFQMQATTRYPGAYYIFQIKSGNEGREFYMRQTGPISATLVMTRPIKGPREIQLDLEMITVNTVINFRGSSVIRLRIYVSQYPF

SEQ ID NO: 5142 - protein, 91 aa, Homo Sapiens
MPGIKRILTVTILALCLPSPGNAQAQCTNGFDLDRQSGQCLDIDECRTIPEACRGDMMCVNQNGGYLCIPRTNPVYRGPYSNPYSTPYSGP

SEQ ID NO: 5143 - protein, 448 aa, Homo Sapiens
MPGIKRILTVTILALCLPSPGNAQAQCTNGFDLDRQSGQCLDIDECRTIPEACRGDMMCVNQNGGYLCIPRTNPVYRGPYSNPYSTPYSGPYPAAAPPLSAPNYPTISRPLICRFGYQMDESNQCVDVDECATDSHQCNPTQICINTEGGYTCSCTDGYWLLEGQCLDIDECRYGYCQQLCANVPGSYSCTCNPGFTLNEDGRSCQDVNECATENPCVQTCVNTYGSFICRCDPGYELEEDGVHCSDMDECSFSEFLCQHECVNQPGTYFCSCPPGYILLDDNRSCQDINECEHRNHTCNLQQTCYNLQGGFKCIDPIRCEEPYLRISDNRCMCPAENPGCRDQPFTILYRDMDVVSGRSVPADIFQMQATTRYPGAYYIFQIKSGNEGREFYMRQTGPISATLVMTRPIKGPREIQLDLEMITVNTVINFRGSSVIRLRIYVSQYPF

SEQ ID NO: 5144 - protein, 35 aa, Homo Sapiens
MPGIKRILTVTILALCLPSPGNAQQQERWTPVCQP

SEQ ID NO: 5145 - protein, 453 aa, Homo Sapiens
MRSGNCRQRYMILTVTILALCLPSPGNAQAQCTNGFDLDRQSGQCLDIDECRTIPEACRGDMMCVNQNGGYLCIPRTNPVYRGPYSNPYSTPYSGPYPAAAPPLSAPNYPTISRPLICRFGYQMDESNQCVDVDECATDSHQCNPTQICINTEGGYTCSCTDGYWLLEGQCLDIDECRYGYCQQLCANVPGSYSCTCNPGFTLNEDGRSCQDVNECATENPCVQTCVNTYGSFICRCDPGYELEEDGVHCSDMDECSFSEFLCQHECVNQPGTYFCSCPPGYILLDDNRSCQDINECEHRNHTCNLQQTCYNLQGGFKCIDPIRCEEPYLRISDNRCMCPAENPGCRDQPFTILYRDMDVVSGRSVPADIFQMQATTRYPGAYYIFQIKSGNEGREFYMRQTGPISATLVMTRPIKGPREIQLDLEMITVNTVINFRGSSVIRLRIYVSQYPF

SEQ ID NO: 5146 - protein, 261 aa, Homo Sapiens
AGSARTLGTARGGHGAGKGLSPTALLPARVASCARSQKAWPLCIIDVNECELYGQEGRPRLCMHACVNTPGSYRCTCPGGYRTLADGKSCEDVDECVGLQPVCPQGTTCINTGGSFQCVSPECPEGSGNVSYVKTSPFQCERNPCPMDSRPCRHLPKTISFHYLSLPSNLKTPITLFRMATASAPGRAGPNSLRFGIVGGNSRGHFVMQRSDRQTGDLILVQNLEGPQTLEVDVDMSEYLDRSFQANHVSKVTIFVSPYDF

SEQ ID NO: 5147 - protein, 305 aa, Homo Sapiens
MVPSSPRALFLLLLILACPEPRASQNCLSKQQLLSAIRQLQQLLKGQETRFAEGIRHMKSRLAALQNSVGRVGPDALPVSCPALNTPADGRKFGSKYLVDHEVHFTCNPGFRLVGPSSVVCLPNGTWTGEQPHCRDVDECVGLQPVCPQGTTCINTGGSFQCVSPECPEGSGNVSYVKTSPFQCERNPCPMDSRPCRHLPKTISFHYLSLPSNLKTPITLFRMATASAPGRAGPNSLRFGIVGGNSRGHFVMQRSDRQTGDLILVQNLEGPQTLEVDVDMSEYLDRSFQANHVSKVTIFVSPYDF

SEQ ID NO: 5148 - protein, 439 aa, Homo Sapiens
MVPSSPRALFLLLLILACPEPRASQNCLSKQQLLSAIRQLQQLLKGQETRFAEGIRHMKSRLAALQNSVGRVGPDALPVSCPALNTPADGRKFGSKYLVDHEVHFTCNPGFRLVGPSSVVCLPNGTWTGEQPHCRGISECSSQPCQNGGTCVEGVNQYRCICPPGRTGNRCQHQAQTAAPEGSVAGDSAFSRAPRCAQVERAQHCSCEAGFHLSGAAGDSVCQDVNECELYGQEGRPRLCMHACVNTPGSYRCTCPGGYRTLADGKSCEDVDECVGLQPVCPQGTTCINTGGSFQCVSPECPEGSGNVSYVKTSPFQCERNPCPMDSRPCRHLPKTISFHYLSLPSNLKTPITLFRMATASAPGRAGPNSLRFGIVGGNSRGHFVMQRSDRQTGDLILVQNLEGPQTLEVDVDMSEYLDRSFQANHVSKVTIFVSPYDF

SEQ ID NO: 5149 - protein, 366 aa, Homo Sapiens
MVPSSPRALFLLLLILACPEPRASQNCLSKQQLLSAIRQLQQLLKGQETRFAEGIRHMKSRLAALQNSVGRVGPDALPVSCPALNTPADGRKFGSKYLVDHEVHFTCNPGFRLVGPSSVVCLPNGTWTGEQPHCRGISECSSQPCQNGGTCVEGVNQYRCICPPGRTGNRCQHQAQTAAPEGSVAGDSAFSRAPRCAQVERAQHCSCEAGFHLSGAAGDSVCQDVNECELYGQEGRPRLCMHACVNTPGSYRCTCPGGYRTLADGKSCEDVDECVGLQPVCPQGTTCINTGGSFQCVSPECPEGSGNVSYVKTSPLTWRGLRRWRWTSTCRNTWTAPSRPTTCPRSPSLYPPMTSEGTQGHWGVES

SEQ ID NO: 5150 - protein, 393 aa, Homo Sapiens
MVPSSPRALFLLLLILACPEPRASQNCLSKQQLLSAIRQLQQLLKGQETRFAEGIRHMKSRLAALQNSVGRVGPDALPVSCPALNTPADGRKFGSKYLVDHEVHFTCNPGFRLVGPSSVVCLPNGTWTGEQPHCRGISECSSQPCQNGGTCVEGVNQYRCICPPGRTGNRCQHQAQTDVNECELYGQEGRPRLCMHACVNTPGSYRCTCPGGYRTLADGKSCEDVDECVGLQPVCPQGTTCINTGGSFQCVSPECPEGSGNVSYVKTSPFQCERNPCPMDSRPCRHLPKTISFHYLSLPSNLKTPITLFRMATASAPGRAGPNSLRFGIVGGNSRGHFVMQRSDRQTGDLILVQNLEGPQTLEVDVDMSEYLDRSFQANHVSKVTIFVSPYDF

SEQ ID NO: 5151 - protein, 273 aa, Homo Sapiens
RFAEGIRHMKSRLAALQNSVGRVGPDALPGISECSSQPCQNGGTCVEGVNQYRCICPPGRTGNRCQHQAQTAAPEGSVAGDSAFSRAPRCAQVERAQHCSCEAGFHLSGAAGDSVCQDVNECELYGQEGRPRLCMHACVNTPGSYRCTCPGGYRTLADGKSCEDVDECVGLQPVCPQGTTCINTGGSFQCVSPECPEGSGNVSYVKTSPFQCERNPCPMDSRPCRHLPKTISFHYLSLPSNLKTPITLFRMATASAPGRAGPNSLRFGIVGGN

SEQ ID NO: 5152 - protein, 55 aa, Homo Sapiens
MRRGRLLEIALGFTVLLASYTSHGADANLEAGNVKETRASRAKRRGGGGHDALKG

SEQ ID NO: 5153 - protein, 302 aa, Homo Sapiens
MRRGRLLEIALGFTVLLASYTSHGADANLEAGNVKETRASRAKRRGGGGHDALKGPNVCGSRYNAYCCPGWKTLPGGNQCIVPICRHSCGDGFCSRPNMCTCPSGQIAPSCGSRSIQHCNIRCMNGGSCSDDHCLCQKGYIGTHCGQPVCESGCLNGGRCVAPNRCACTYGFTGPQCERDYRTGPCFTVISNQMCQGQLSGIVCTKTLCCATTSMNVKLEHTTVANMLYVPIQQEASNVAAVPGGLEMALSALIWTNVPMEPICAASMQTARIPWDLTAVCARKDTQVMASLVQTLMSALRT

SEQ ID NO: 5154 - protein, 2871 aa, Homo Sapiens
MRRGRLLEIALGFTVLLASYTSHGADANLEAGNVKETRASRAKRRGGGGHDALKGPNVCGSRYNAYCCPGWKTLPGGNQCIVPICRHSCGDGFCSRPNMCTCPSGQIAPSCGSRSIQHCNIRCMNGGSCSDDHCLCQKGYIGTHCGQPVCESGCLNGGRCVAPNRCACTYGFTGPQCERDYRTGPCFTVISNQMCQGQLSGIVCTKTLCCATVGRAWGHPCEMCPAQPHPCRRGFIPNIRTGACQDVDECQAIPGLCQGGNCINTVGSFECKCPAGHKLNEVSQKCEDIDECSTIPGICEGGECTNTVSSYFCKCPPGFYTSPDGTRCIDVRPGYCYTALTNGRCSNQLPQSITKMQCCCDAGRCWSPGVTVAPEMCPIRATEDFNKLCSVPMVIPGRPEYPPPPLGPIPPVLPVPPGFPPGPQIPVPRPPVEYLYPSREPPRVLPVNVTDYCQLVRYLCQNGRCIPTPGSYRCECNKGFQLDLRGECIDVDECEKNPCAGGECINNQGSYTCQCRAGYQSTLTRTECRDIDECLQNGRICNNGRCINTDGSFHCVCNAGFHVTRDGKNCEDMDECSIRNMCLNGMCINEDGSFKCICKPGFQLASDGRYCKDINECETPGICMNGRCVNTDGSYRCECFPGLAVGLDGRVCVDTHMRSTCYGGYKRGQCIKPLFGAVTKSECCCASTEYAFGEPCQPCPAQNSAEYQALCSSGPGMTSAGSDINECALDPDICPNGICENLRGTYKCICNSGYEVDSTGKNCVDINECVLNSLLCDNGQCRNTPGSFVCTCPKGFIYKPDLKTCEDIDECESSPCINGVCKNSPGSFICECSSESTLDPTKTICIETIKGTCWQTVIDGRCEININGATLKSQCCSSLGAAWGSPCTLCQVDPICGKGYSRIKGTQCEDIDECEVFPGVCKNGLCVNTRGSFKCQCPSGMTLDATGRICLDIRLETCFLRYEDEECTLPIAGRHRMDACCCSVGAAWGTEECEECPMRNTPEYEELCPRGPGFATKEITNGKPFFKDINECKMIPSLCTHGKCRNTIGSFKCRCDSGFALDSEERNCTDIDECRISPDLCGRGQCVNTPGDFECKCDEGYESGFMMMKNCMDIDECQRDPLLCRGGVCHNTEGSYRCECPPGHQLSPNISACIDINECELSAHLCPNGRCVNLIGKYQCACNPGYHSTPDRLFCVDIDECSIMNGGCETFCTNSEGSYECSCQPGFALMPDQRSCTDIDECEDNPNICDGGQCTNIPGEYRCLCYDGFMASEDMKTCVDVNECDLNPNICLSGTCENTKGSFICHCDMGYSGKKGKTGCTDINECEIGAHNCGKHAVCTNTAGSFKCSCSPGWIGDGIKCTDLDECSNGTHMCSQHADCKNTMGSYRCLCKEGYTGDGFTCTDLDECSENLNLCGNGQCLNAPGGYRCECDMGFVPSADGKACEDIDECSLPNICVFGTCHNLPGLFRCECEIGYELDRSGGNCTDVNECLDPTTCISGNCVNTPGSYICDCPPDFELNPTRVGCVDTRSGNCYLDIRPRGDNGDTACSNEIGVGVSKASCCCSLGKAWGTPCEMCPAVNTSEYKILCPGGEGFRPNPITVILEDIDECQELPGLCQGGKCINTFGSFQCRCPTGYYLNEDTRVCDDVNECETPGICGPGTCYNTVGNYTCICPPDYMQVNGGNNCMDMRRSLCYRNYYADNQTCDGELLFNMTKKMCCCSYNIGRAWNKPCEQCPIPSTDEFATLCGSQRPGFVIDIYTGLPVDIDECREIPGVCENGVCINMVGSFRCECPVGFFYNDKLLVCEDIDECQNGPVCQRNAECINTAGSYRCDCKPGYRFTSTGQCNDRNECQEIPNICSHGQCIDTVGSFYCLCHTGFKTNDDQTMCLDINECERDACGNGTCRNTIGSFNCRCNHGFILSHNNDCIDVDECASGNGNLCRNGQCINTVGSFQCQCNEGYEVAPDGRTCVDINECLLEPRKCAPGTCQNLDGSYRCICPPGYSLQNEKCEDIDECVEEPEICALGTCSNTEGSFKCLCPEGFSLSSSGRRCQDLRMSYCYAKFEGGKCSSPKSRNHSKQECCCALKGEGWGDPCELCPTEPDEAFRQICPYGSGIIVGPDDSAVDMDECKEPDVCKHGQCINTDGSYRCECPFGYILAGNECVDTDECSVGNPCGNGTCKNVIGGFECTCEEGFEPGPMMTCEDINECAQNPLLCAFRCVNTYGSYECKCPVGYVLREDRRMCKDEDECEEGKHDCTEKQMECKNLIGTYMCICGPGYQRRPDGEGCVDENECQTKPGICENGRCLNTRGSYTCECNDGFTASPNQDECLDNREGYCFTEVLQNMCQIGSSNRNPVTKSECCCDGGRGWGPHCEICPFQGTVAFKKLCPHGRGFMTNGADIDECKVIHDVCRNGECVNDRGSYHCICKTGYTPDITGTSCVDLNECNQAPKPCNFICKNTEGSYQCSCPKGYILQEDGRSCKDLDECATKQHNCQFLCVNTIGGFTCKCPPGFTQHHTSCIDNNECTSDINLCGSKGICQNTPGSFTCECQRGFSLDQTGSSCEDVDECEGNHRCQHGCQNIIGGYRCSCPQGYLQHYQWNQCVDENECLSAHICGGASCHNTLGSYKCMCPAGFQYEQFSGGCQDINECGSAQAPCSYGCSNTEGGYLCGCPPGYFRIGQGHCVSGMGMGRGNPEPPVSGEMDDNSLSPEACYECKINGYPKRGRKRRSTNETDASNIEDQSETEANVSLASWDVEKTAIFAFNISHVSNKVRILELLPALTTLTNHNRYLIESGNEDGFFKINQKEGISYLHFTKKKPVAGTYSLQISSTPLYKKKELNQLEDKYDKDYLSGELGDNLKMKIQVLLH

SEQ ID NO: 5155 - protein, 853 aa, Homo Sapiens
  misc_feature (1)..(1): Xaa can be any naturally occurring amino acid
XLGKAWGTPCEMCPAVNTSEYKILCPGGEGFRPNPITVILEDIDECQELPGLCQGGKCINTFGSFQCRCPTGYYLNEDTRVCDDVNECETPGICGPGTCYNTVGNYTCICPPDYMQVNGGNNCMDMRRSLCYRNYYADNQTCDGELLFNMTKKMCCCSYNIGRAWNKPCEQCPIPSTDEFATLCGSQRPGFVIDIYTGLPVDIDECREIPGVCENGVCINMVGSFRCECPVGFFYNDKLLVCEDIDECQNGPVCQRNAECINTAGSYRCDCKPGYRFTSTGQCNDRNECQEIPNICSHGQCIDTVGSFYCLCHTGFKTNDDQTMCLDINECERDACGNGTCRNTIGSFNCRCNHGFILSHNNDCIDVDECASGNGNLCRNGQCINTVGSFQCQCNEGYEVAPDGRTCVDINECLLEPRKCAPGTCQNLDGSYRCICPPGYSLQNEKCEDIDECVEEPEICALGTCSNTEGSFKCLCPEGFSLSSSGRRCQDLRMSYCYAKFEGGKCSSPKSRNHSKQECCCALKGEGWGDPCELCPTEPDEAFRQICPYGSGIIVGPDDSAVDMDECKEPDVCKHGQCINTDGSYRCECPFGYILAGNECVDTDECSVGNPCGNGTCKNVIGGFECTCEEGFEPGPMMTCEDINECAQNPLLCAFRCVNTYGSYECKCPVGYVLREDRRMCKDEDECEEGKHDCTEKQMECKNLIGTYMCICGPGYQRRPDGEGCVDENECQTKPGICENGRCLNTRGSYTCECNDGFTASPNQDECLDVILSLLLLSPAFPSCFFSPRTIGKGTASQRCYKTCVRSAPATGTPSPNRNAAVTEGEAGVPTVRSALSRGLWLSRNSVPMAEDS

SEQ ID NO: 5156 - protein, 1473 aa, Homo Sapiens
MGRRRRLCLQLYFLWLGCVVLWAQGTAGQPQPPPPKPPRPQPPPQQVRSATAGSEGGFLAPEYREEGAAVASRVRRRGQQDVLRGPNVCGSRFHSYCCPGWKTLPGGNQCIVLQQCSVRCMNGGTCADDHCQCQKGYIGTYCGQPVCENGCQNGGRCIGPNRCACVYGFTGPQCERDYRTGPCFTQVNNQMCQGQLTGIVCTKTLCCATIGRAWGHPCEMCPAQPQPCRRGFIPNIRTGACQDVDECQAIPGICQGGNCINTVGSFECRCPAGHKQSETTQKCEDIDECSIIPGICETGECSNTVGSYFCVCPRGYVTSTDGSRCIDQRTGMCFSGLVNGRCAQELPGRMTKMQCCCEPGRCWGIGTIPEACPVRGSEEYRRLCMDGLPMGGIPGSAGSRPGGTGGNGFAPSGNGNGYGPGGTGFIPIPGGNGFSPGVGGAGVGAGGQGPIITGLTILNQTIDICKHHANLCLNGRCIPTVSSYRCECNMGYKQDANGDCIDVDECTSNPCTNGDCVNTPGSYYCKCHAGFQRTPTKQACIDIDECIQNGVLCKNGRCVNTDGSFQCICNAGFELTTDGKNCVDHDECTTTNMCLNGMCINEDGSFKCICKPGFVLAPNGRYCTDVDECQTPGICMNGHCINSEGSFRCDCPPGLAVGMDGRVCVDTHMRSTCYGGIKKGVCVRPFPGAVTKSECCCANPDYGFGEPCQPCPAKNSAEFHGLCSSGVGITVDGRDINECALDPDICANGICENLRGSYRCNCNSGYEPDASGRNCIDIDECLVNRLLCDNGLCRNTPGSYSCTCPPGYVFRTETETCEDINECESNPCVNGACRNNLGSFNCECSPGSKLSSTGLICIDSLKGTCWLNIQDSRCEVNINGATLKSECCATLGAAWGSPCERCELDTACPRGLARIKGVTCEDVNECEVFPGVCPNGRCVNSKGSFHCECPEGLTLDGTGRVCLDIRMEQCYLKWDEDECIHPVPGKFRMDACCCAVGAAWGTECEECPKPGTKEYETLCPRGAGFANRGDVLTGRPFYKDINECKAFPGMCTYGKCRNTIGSFKCRCNSGFALDMEERNCTDIDECRISPDLCGSGICVNTPGSFECECFEGYESGFMMMKNCMDIDECERNPLLCRGGTCVNTEGSFQCDCPLGHELSPSREDCVDINECSLSDNLCRNGKCVNMIGTYQCSCNPGYQATPDRQGCTDIDECMIMNGGCDTQCTNSEGSYECSCSEGYALMPDGRSCADIDECENNPDICDGGQCTNIPGEYRCLCYDGFMASMDMKTCIDVNECDLNSNICMFGECENTKGSFICHCQLGYSVKKGTTGCTDVDECEIGAHNCDMHASCLNIPGSFKCSCREGWIGNGIKCIDLDECSNGTHQCSINAQCVNTPGSYRCACSEGFTGDGFTCSDVDECAENINLCENGQCLNVPGAYRCECEMGFTPASDSRSCQGGSPGFQLIFKLDQPQ

SEQ ID NO: 5157 - protein, 2912 aa, Homo Sapiens
MGRRRRLCLQLYFLWLGCVVLWAQGTAGQPQPPPPKPPRPQPPPQQVRSATAGSEGGFLAPEYREEGAAVASRVRRRGQQDVLRGPNVCGSRFHSYCCPGWKTLPGGNQCIVPICRNSCGDGFCSRPNMCTCSSGQISSTCGSKSIQQCSVRCMNGGTCADDHCQCQKGYIGTYCGQPVCENGCQNGGRCIGPNRCACVYGFTGPQCERDYRTGPCFTQVNNQMCQGQLTGIVCTKTLCCATIGRAWGHPCEMCPAQPQPCRRGFIPNIRTGACQDVDECQAIPGICQGGNCINTVGSFECRCPAGHKQSETTQKCEDIDECSIIPGICETGECSNTVGSYFCVCPRGYVTSTDGSRCIDQRTGMCFSGLVNGRCAQELPGRMTKMQCCCEPGRCWGIGTIPEACPVRGSEEYRRLCMDGLPMGGIPGSAGSRPGGTGGNGFAPSGNGNGYGPGGTGFIPIPGGNGFSPGVGGAGVGAGGQGPIITGLTILNQTIDICKHHANLCLNGRCIPTVSSYRCECNMGYKQDANGDCIDVDECTSNPCTNGDCVNTPGSYYCKCHAGFQRTPTKQACIDIDECIQNGVLCKNGRCVNTDGSFQCICNAGFELTTDGKNCVDHDECTTTNMCLNGMCINEDGSFKCICKPGFVLAPNGRYCTDVDECQTPGICMNGHCINSEGSFRCDCPPGLAVGMDGRVCVDTHMRSTCYGGIKKGVCVRPFPGAVTKSECCCANPDYGFGEPCQPCPAKNSAEFHGLCSSGVGITVDGRDINECALDPDICANGICENLRGSYRCNCNSGYEPDASGRNCIDIDECLVNRLLCDNGLCRNTPGSYSCTCPPGYVFRTETETCEDINECESNPCVNGACRNNLGSFNCECSPGSKLSSTGLICIDSLKGTCWLNIQDSRCEVNINGATLKSECCATLGAAWGSPCERCELDTACPRGLARIKGVTCEDVNECEVFPGVCPNGRCVNSKGSFHCECPEGLTLDGTGRVCLDIRMEQCYLKWDEDECIHPVPGKFRMDACCCAVGAAWGTECEECPKPGTKEYETLCPRGAGFANRGDVLTGRPFYKDINECKAFPGMCTYGKCRNTIGSFKCRCNSGFALDMEERNCTDIDECRISPDLCGSGICVNTPGSFECECFEGYESGFMMMKNCMDIDECERNPLLCRGGTCVNTEGSFQCDCPLGHELSPSREDCVDINECSLSDNLCRNGKCVNMIGTYQCSCNPGYQATPDRQGCTDIDECMIMNGGCDTQCTNSEGSYECSCSEGYALMPDGRSCADIDECENNPDICDGGQCTNIPGEYRCLCYDGFMASMDMKTCIDVNECDLNSNICMFGECENTKGSFICHCQLGYSVKKGTTGCTDVDECEIGAHNCDMHASCLNIPGSFKCSCREGWIGNGIKCIDLDECSNGTHQCSINAQCVNTPGSYRCACSEGFTGDGFTCSDVDECAENINLCENGQCLNVPGAYRCECEMGFTPASDSRSCQDIDECSFQNICVFGTCNNLPGMFHCICDDGYELDRTGGNCTDIDECADPINCVNGLCVNTPGRYECNCPPDFQLNPTGVGCVDNRVGNCYLKFGPRGDGSLSCNTEIGVGVSRSSCCCSLGKAWGNPCETCPPVNSTEYYTLCPGGEGFRPNPITIILEDIDECQELPGLCQGGNCINTFGSFQCECPQGYYLSEDTRICEDIDECFAHPGVCGPGTCYNTLGNYTCICPPEYMQVNGGHNCMDMRKSFCYRSYNGTTCENELPFNVTKRMCCCTYNVGKAWNKPCEPCPTPGTADFKTICGNIPGFTFDIHTGKAVDIDECKEIPGICANGVCINQIGSFRCECPTGFSYNDLLLVCEDIDECSNGDNLCQRNADCINSPGSYRCECAAGFKLSPNGACVDRNECLEIPNVCSHGLCVDLQGSYQCICHNGFKASQDQTMCMDVDECERHPCGNGTCKNTVGSYNCLCYPGFELTHNNDCLDIDECSSFFGQVCRNGRCFNEIGSFKCLCNEGYELTPDGKNCIDTNECVALPGSCSPGTCQNLEGSFRCICPPGYEVKSENCIDINECDEDPNICLFGSCTNTPGGFQCLCPPGFVLSDNGRRCFDTRQSFCFTNFENGKCSVPKAFNTTKAKCCCSKMPGEGWGDPCELCPKDDEVAFQDLCPYGHGTVPSLHDTREDVNECLESPGICSNGQCINTDGSFRCECPMGYNLDYTGVRCVDTDECSIGNPCGNGTCTNVIGSFECNCNEGFEPGPMMNCEDINECAQNPLLCAFRCMNTFGSYECTCPIGYALREDQKMCKDLDECAEGLHDCESRGMMCKNLIGTFMCICPPGMARRPDGEGCVDENECRTKPGICENGRCVNIIGSYRCECNEGFQSSSSGTECLDNRQGLCFAEVLQTICQMASSSRNLVTKSECCCDGGRGWGHQCELCPLPGTAQYKKICPHGPGYTTDGRDIDECKVMPNLCTNGQCINTMGSFRCFCKVGYTTDISGTSCIDLDECSQSPKPCNYICKNTEGSYQCSCPRGYVLQEDGKTCKDLDECQTKQHNCQFLCVNTLGGFTCKCPPGFTQHHTACIDNNECGSQPSLCGAKGICQNTPGSFSCECQRGFSLDATGLNCEDVDECDGNHRCQHGCQNILGGYRCGCPQGYIQHYQWNQCVDENECSNPNACGSASCYNTLGSYKCACPSGFSFDQFSSACHDVNECSSSKNPCNYGCSNTEGGYLCGCPPGYYRVGQGHCVSGMGFNKGQYLSLDTEVDEENALSPEACYECKINGYSKKDSRQKRSIHEPDPTAVEQISLESVDMDSPVNMKFNLSHLGSKEHILELRPAIQPLNNHIRYVISQGNDDSVFRIHQRNGLSYLHTAKKKLMPGTYTLEITSIPLYKKKELKKLEESNEDDYLLGELGEALRMRLQIQLY

SEQ ID NO: 5158 - protein, 341 aa, Homo Sapiens
MGRRRRLCLQLYFLWLGCVVLWAQGTAGQPQPPPPKPPRPQPPPQQVRSATAGSEGGFLAPEYREEGAAVASRVRRRGQQDVLRGPNVCGSRFHSYCCPGWKTLPGGNQCIVPICRNSCGDGFCSRPNMCTCSSGQISSTCGSKSIQQCSVRCMNGGTCADDHCQCQKGYIGTYCGQPVCENGCQNGGRCIGPNRCACVYGFTGPQCERDYRTGPCFTQVNNQMCQGQLTGIVCTKTLCCATIGRAWGHPCEMCPAQPQPCRRGFIPNIRTGACQDVDECQAIPGICQGGNCINTVGSFECRCPAGHKQSETTQKCEVHVDKAQAGARCPCVILPSRLYLR

SEQ ID NO: 5159 - protein, 2912 aa, Homo Sapiens; identical to SEQ ID NO: 5157

SEQ ID NO: 5160 - protein, 2911 aa, Homo Sapiens
MGRRRRLCLQLYFLWLGCVVLWAQGTAGQPQPPPPKPPRPQPPPQQVRSATAGSEGGFLAPEYREEGAAVASRVRRRGQQDVLRGPNVCGSRFHSYCCPGWKTLPGGNQCIVPICRNSCGDGFCSRPNMCTCSSGQISSTCGSKSIQQCSVRCMNGGTCADDHCQCQKGYIGTYCGQPVCENGCQNGGRCITQPCACVYGFTGPQCERDYRTGPCFTQVNNQMCQGQLTGIVCTKTLCCATIGRAWGHPCEMCPAQPQPCRRGFIPNIRTGACQDVDECQAIPGICQGGNCINTVGSFECRCPAGHKQSETTQKCEDIDECSIIPGICETGECSNTVGSYFCVCPRGYVTSTDGSRCIDQRTGMCFSGLVNGRCAQELPGRMTKMQCCCEPGRCWGIGTIPEACPVRGSEEYRRLCMDGLPMGGIPGSAGSRPGGTGGNGFAPSGNGNGYGPGGTGFIPIPGGNGFSPGVGGAGVGAGGQGPIITGLTILNQTIDICKHHANLCLNGRCIPTVSSYRCECNMGYKQDANGDCIDVDECTSNPCTNGDCVNTPGSYYCKCHAGFQRTPTKQACIDIDECIQNGVLCKNGRCVNTDGSFQCICNAGFELTTDGKNCVDHDECTTTNMCLNGMCINEDGSFKCICKPGFVLAPNGRYCTDVDECQTPGICMNGHCINSEGSFRCDCPPGLAVGMDGRVCVDTHMRSTCYGGIKKGVCVRPFPGAVTKSECCCANPDYGFGEPCQPCPAKNSAEFHGLCSSGVGITVDGRDINECALDPDICANGICENLRGSYRCNCNSGYEPDASGRNCIDIDECLVNRLLCDNGLCRNTPGSYSCTCPPGYVFRTETETCEDINECESNPCVNGACRNNLGSFNCECSPGSKLSSTGLICIDSLKGTCWLNIQDSRCEVNINGATLKSECCATLGAAWGSPCERCELDTACPRGLARIKGVTCEDVNECEVFPGVCPNGRCVNSKGSFHCECPEGLTLDGTGRVCLDIRMEQCYLKWDEDECIHPVPGKFRMDACCCAVGAAWGTECEECPKPGTKEYETLCPRGAGFANRGDVLTGRPFYKDINECKAFPGMCTYGKCRNTIGSFKCRCNSGFALDMEERNCTDIDECRISPDLCGSGICVNTPGSFECECFEGYESGFMMMKNCMDIDECERNPLLCRGGTCVNTEGSFQCDCPLGHELSPSREDCVDINECSLSDNLCRNGKCVNMIGTYQCSCNPGYQATPDRQGCTDIDECMIMNGGCDTQCTNSEGSYECSCSEGYALMPDGRSCADIDECENNPDICDGGQCTNIPGEYRCLCYDGFMASMDMKTCIDVNECDLNSNICMFGECENTKGSFICHCQLGYSVKKGTTGCTDVDECEIGAHNCDMHASCLNIPGSFKCSCREGWIGNGIKCIDLDECSNGTHQCSINAQCVNTPGSYRCACSEGFTGDGFTCSDVDECAENINLCENGQCLNVPGAYRCECEMGFTPASDSRSCQDIDECSFQNICVFGTCNNLPGMFHCICDDGYELDRTGGNCTDIDECADPINCVNGLCVNTPGRYECNCPPDFQLNPTGVGCVDNRVGNCYLKFGPRGDGSLSCNTEIGVGVSRSSCCCSLGKAWGNPCETCPPVNSTEYYTLCPGGEGFRPNPITIILEDIDECQELPGLCQGGNCINTFGSFQCECPQGYYLSEDTRICEDIDECFAHPGVCGPGTCYNTLGNYTCICPPEYMQVNGGHNCMDMRKSFCYRSYNGTTCENELPFNVTKRMCCCTYNVGKAWNKPCEPCPTPGTADFKTICGNIPGFTFDIHTGKAVDIDECKEIPGICANGVCINQIGSFRCECPTGFSYNDLLLVCEDIDECSNGDNLCQRNADCINSPGSYRCECAAGFKLSPNGACVDRNECLEIPNVCSHGLCVDLQGSYQCICHNGFKASQDQTMCMDVDECERHPCGNGTCKNTVGSYNCLCYPGFELTHNNDCLDIDECSSFFGQVCRNGRCFNEIGSFKCLCNEGYELTPDGKNCIDTNECVALPGSCSPGTCQNLEGSFRCICPPGYEVKSENCIDINECDEDPNICLFGSCTNTPGGFQCLCPPGFVLSDNGRRCFDTRQSFCFTNFENGKCSVPKAFNTTKAKCCCSKMPGEGWGDPCELCPKDDEVAFQDLCPYGHGTVPSLHDTREDVNECLESPGICSNGQCINTDGSFRCECPMGYNLDYTGVRCVDTDECSIGNPCGNGTCTNVIGSFECNCNEGFEPGPMMNCEDINECAQNPLLCAFRCMNTFGSYECTCPIGYALREDQKMCKDLDECAEGLHDCESRGMMCKNLIGTFMCICPPGMARRPDGEGCVDENECRTKPGICENGRCVNIIGSYRCECNEGFQSSSSGTECLDNRQGLCFAEVLQTICQMASSSRNLVTKSECCCDGGRGWGHQCELCPLPGTAQYKKICPHGPGYTTDGRDIDECKVMPNLCTNGQCINTMGSFRCFCKVGYTTDISGTSCIDLDECSQSPKPCNYICKNTEGSYQCSCPRGYVLQEDGKTCKDLDECQTKQHNCQFLCVNTLGGFTCKCPPGFTQHHTACIDNNECGSQPSLCGAKGICQNTPGSFSCECQRGFSLDATGLNCEDVDECDGNHRCQHGCQNILGGYRCGCPQGYIQHYQWNQCVDENECSNPNACGSASCYNTLGSYKCACPSGFSFDQFSSACHDVNECSSSKNPCNYGCSNTEGGYLCGCPPGYYRVGQGHCVSGMGFNKGQYLSLDTEVDEENALSPEACYECKINGYSKKDSRQKRSIHEPDPTAVEQISLESVDMDSPVNMKFNLSHLGSKEHILELRPAIQPLNNHIRYVISQGNDDSVFRIHQRNGLSYLHTAKKKLMPGTYTLEITSIPLYKKKELKKLEESNEDDYLLGELGEALRMRLQIQLY

SEQ ID NO: 5161 - protein, 356 aa, Homo Sapiens
MMMKNCMDIDECERNPLLCRGGTCVNTEGSFQCDCPLGHELSPSREDCVDINECSLSDNLCRNGKCVNMIGTYQCSCNPGYQATPDRQGCTDIDECMIMNGGCDTQCTNSEGSYECSCSEGYALMPDGRSCADIDECENNPDICDGGQCTNIPGEYRCLCYDGFMASMDMKTCIDVNECDLNSNICMFGECENTKGSFICHCQLGYSVKKGTTGCTDVDECEIGAHNCDMHASCLNIPGSFKCSCREGWIGNGIKCIDLDECSNGTHQCSINAQCVNTPGSYRCACSEGFTGDGFTCSDVDECAENINLCENGQCLNVPGAYRCECEMGFTPASDSRSCQGGSPGFQLIFKLDQPQ

SEQ ID NO: 5162 - protein, 2809 aa, Homo Sapiens
MTLEGLYLARGPLARLLLAWSALLCMAGGQGRWDGALEAAGPGRVRRRGSPGILQGPNVCGSRFHAYCCPGWRTFPGRSQCVVPICRRACGEGFCSQPNLCTCADGTLAPSCGVSRGSGCSVSCMNGGTCRGASCLCQKGYTGTVCGQPICDRGCHNGGRCIGPNRCACVYGFMGPQCERDYRTGPCFGQVGPEGCQHQLTGLVCTKALCCATVGRAWGLPCELCPAQPHPCRRGFIPNIHTGACQDVDECQAVPGLCQGGSCVNMVGSFHCRCPVGHRLSDSSAACEDYRAGACFSVLFGGRCAGDLAGHYTRRQCCCDRGRCWAAGPVPELCPPRGSNEFQQLCAQRLPLLPGHPGLFPGLLGFGSNGMGPPLGPARLNPHGSDARGIPSLGPGNSNIGTATLNQTIDICRHFTNLCLNGRCLPTPSSYRCECNVGYTQDVRGECIDVDECTSSPCHHGDCVNIPGTYHCRCYPGFQATPTRQACVDVDECIVSGGLCHLGRCVNTEGSFQCVCNAGFELSPDGKNCVDHNECATSTMCVNGVCLNEDGSFSCLCKPGFLLAPGGHYCMDIDECQTPGICVNGHCTNTEGSFRCQCLGGLAVGTDGRVCVDTHVRSTCYGAIEKGSCARPFPGTVTKSECCCANPDHGFGEPCQLCPAKDSAEFQALCSSGLGITTDGRDINECALDPEVCANGVCENLRGSYRCVCNLGYEAGASGKDCTDVDECALNSLLCDNGWCQNSPGSYSCSCPPGFHFWQDTEICKDVDECLSSPCVSGVCRNLAGSYTCKCGPGSRLDPSGTFCLDSTKGTCWLKIQESRCEVNLQGASLRSECCATLGAAWGSPCERCEIDPACARGFARMTGVTCDDVNECESFPGVCPNGRCVNTAGSFRCECPEGLMLDASGRLCVDVRLEPCFLRWDEDECGVTLPGKYRMDVCCCSIGAVWGVECEACPDPESLEFASLCPRGLGFASRDFLSGRPFYKDVNECKVFPGLCTHGTCRNTVGSFHCACAGGFALDAQERNCTDIDECRISPDLCGQGTCVNTPGSFECECFPGYESGFMLMKNCMDVDECARDPLLCRGGTCTNTDGSYKCQCPPGHELTAKGTACEDIDECSLSDGLCPHGQCVNVIGAFQCSCHAGFQSTPDRQGCVDINECRVQNGGCDVHCINTEGSYRCSCGQGYSLMPDGRACADVDECEENPRVCDQGHCTNMPGGHRCLCYDGFMATPDMRTCVDVDECDLNPHICLHGDCENTKGSFVCHCQLGYMVRKGATGCSDVDECEVGGHNCDSHASCLNIPGSFSCRCLPGWVGDGFECHDLDECVSQEHRCSPRGDCLNVPGSYRCTCRQGFAGDGFFCEDRDECAENVDLCDNGQCLNAPGGYRCECEMGFDPTEDHRACQDVDECAQGNLCAFGSCENLPGMFRCICNGGYELDRGGGNCTDINECADPVNCINGVCINTPGSYLCSCPQDFELNPSGVGCVDTRAGNCFLETHDRGDSGISCSAEIGVGVTRASCCCSLGRAWGNPCELCPMANTTEYRTLCPGGEGFQPNRITVILEDIDECQELPGLCQGGDCVNTFGSFQCECPPGYHLSEHTRICEDIDECSTHSGICGPGTCYNTLGNYTCVCPAEYLQVNGGNNCMDMRKSVCFRHYNGTCQNELAFNVTRKMCCCSYNIGQAWNRPCEACPTPISPDYQILCGNQAPGFLTDIHTGKPLDIDECGEIPAICANGICINQIGSFRCECPAGFNYNSILLACEDVDECGSRESPCQQNADCINIPGSYRCKCTRGYKLSPGGACVGRNECREIPNVCSHGDCMDTEGSYMCLCHRGFQASADQTLCMDIDECDRQPCGNGTCKNIIGSYNCLCFPGFVVTHNGDCVDFDECTTLVGQVCRFGHCLNTAGSFHCLCQDGFELTADGKNCVDTNECLSLAGTCLPGTCQNLEGSFRCICPPGFQVQSDHCIDIDECSEEPNLCLFGTCTNSPGSFQCLCPPGFVLSDNGHRCFDTRQSFCFTRFEAGKCSVPKAFNTTKTRCCCSKRPGEGWGDPCELCPQEGSAAFQELCPFGHGAVPGPDDSREDVNECAENPGVCTNGVCVNTDGSFRCECPFGYSLDFTGINCVDTDECSVGHPCGQGTCTNVIGGFECACADGFEPGLMMTCEDIDECSLNPLLCAFRCHNTEGSYLCTCPAGYTLREDGAMCRDVDECADGQQDCHARGMECKNLIGTFACVCPPGMRPLPGSGEGCTDDNECHAQPDLCVNGRCVNTAGSFRCDCDEGFQPSPTLTECHDIRQGPCFAEVLQTMCRSLSSSSEAVTRAECCCGGGRGWGPRCELCPLPGTSAYRKLCPHGSGYTAEGRDVDECRMLAHLCAHGECINSLGSFRCHCQAGYTPDATATTCLDMDECSQVPKPCTFLCKNTKGSFLCSCPRGYLLEEDGRTCKDLDECTSRQHNCQFLCVNTVGAFTCRCPPGFTQHHQACFDNDECSAQPGPCGAHGHCHNTPGSFRCECHQGFTLVSSGHGCEDVNECDGPHRCQHGCQNQLGGYRCSCPQGFTQHSQWAQCVDENECALSPPTCGSASCRNTLGGFRCVCPSGFDFDQALGGCQEVDECAGRRGPCSYSCANTPGGFLCGCPQGYFRAGQGHCVSGLGFSPGPQDTPDKEELLSSEACYECKINGLSPRDRPRRSAHRDHQVNLATLDSEALLTLGLNLSHLGRAERILELRPALEGLEGRIRYVIVRGNEQGFFRMHHLRGVSSLQLGRRRPGPGTYRLEVVSHMAGPWGVQPEGQPGPWGQALRLKVQLQLL

SEQ ID NO: 5163 - protein, 2809 aa, Homo Sapiens; identical to SEQ ID NO: 5162

SEQ ID NO: 5164 - protein, 2809 aa, Homo Sapiens; identical to SEQ ID NO: 5162

SEQ ID NO: 5165 - protein, 171 aa, Homo Sapiens
  misc_feature (1)..(1): Xaa can be any naturally occurring amino acid
XFTRFEAGKCSVPKAFNTTKTRCCCSKRPGEGWGDPCELCPQEGSDVNECAENPGVCTNGVCVNTDGSFRCECPFGYSLDFTGINCVDTDECSVGHPCGQGTCTNVIGGFECACADGFEPGLMMTCEDIDECSLNPLLCAFRCHNTEGSYLCTCPAGYTLREDGAMCRDVD

SEQ ID NO: 5166 - protein, 188 aa, Homo Sapiens
  misc_feature (1)..(1): Xaa can be any naturally occurring amino acid
XYQILCGNQAPGFLTDIHTGKPLDVDECGSRESPCQQNADCINIPGSYRCKCTRGYKLSPGGACVGRNECREIPNVCSHGDCMDTEGSYMCLCHRGFQASADQTLCMDIDECDRQPCGNGTCKNIIGSYNCLCFPGFVVTHNGDCVDFDECTTLVGQVCRFGHCLNTAGSFHCLCQDGFELTADGKNC

SEQ ID NO: 5167 - protein, 627 aa, Homo Sapiens
MCVPRSGLILSCICLYCGVLLPVLLPNLPFLTCLSMSTLESVTYLPEKGLYCQRLPSSRTHGGTESLKGKNTENMGFYGTLKMIFYKMKRKLDHGSEVRSFSLGKKPCKVSEYTSTTGLVPCSATPTTFGDLRAANGQGQQRRRITSVQPPTGLQEWLKMFQSWSGPEKLLALDELIDSCEPTQVKHMMQVIEPQFQRDFISLLPKELALYVLSFLEPKDLLQAAQTCRYWRILAEDNLLWREKCKEEGIDEPLHIKRRKVIKPGFIHSPWKSAYIRQHRIDTNWRRGELKSPKVLKGHDDHVITCLQFCGNRIVSGSDDNTLKVWSAVTGKCLRTLVGHTGGVWSSQMRDNIIISGSTDRTLKVWNAETGECIHTLYGHTSTVRCMHLHEKRVVSGSRDATLRVWDIETGQCLHVLMGHVAAVRCVQYDGRRVVSGAYDFMVKVWDPETETCLHTLQGHTNRVYSLQFDGIHVVSGSLDTSIRVWDVETGNCIHTLTGHQSLTSGMELKDNILVSGNADSTVKIWDIKTGQCLQTLQGPNKHQSAVTCLQFNKNFVITSSDDGTVKLWDLKTGEFIRNLVTLESGGSGGVVWRIRASNTKLVCAVGSRNGTEETKLLVLDFDVDMK

SEQ ID NO: 5168 - protein, 627 aa, Homo Sapiens; identical to SEQ ID NO: 5167

SEQ ID NO: 5169 - protein, 70 aa, Homo Sapiens
MNQELLSVGSKRRRTGGSLRGNPSSSQVDEEQMNRVVEEEQQQQLRQQEEEHTARNGEVVGVEPRPGGQN

SEQ ID NO: 5170 - protein, 70 aa, Homo Sapiens; identical to SEQ ID NO: 5169

SEQ ID NO: 5171 - protein, 70 aa, Homo Sapiens; identical to SEQ ID NO: 5169

SEQ ID NO: 5172 - protein, 158 aa, Homo Sapiens
MNQELLSVGSKRRRTGGSLRGNPSSSQVDEEQMNRVVEEEQQQQLRQQEEEHTARNGEVVGVEPRPGGQNDSQQGQLEENNNRFISVDEDSSGNQEEQEEDEEHAGEQDEEDEEEEEMDQESDDFDQSDDSSREDEHTHTNSVTNSSSIVDLPVHQLS

SEQ ID NO: 5173 - protein, 707 aa, Homo Sapiens
MNQELLSVGSKRRRTGGSLRGNPSSSQVDEEQMNRVVEEEQQQQLRQQEEEHTARNGEVVGVEPRPGGQNDSQQGQLEENNNRFISVDEDSSGNQEEQEEDEEHAGEQDEEDEEEEEMDQESDDFDQSDDSSREDEHTHTNSVTNSSSIVDLPVHQLSSPFYTKTTKMKRKLDHGSEVRSFSLGKKPCKVSEYTSTTGLVPCSATPTTFGDLRAANGQGQQRRRITSVQPPTGLQEWLKMFQSWSGPEKLLALDELIDSCEPTQVKHMMQVIEPQFQRDFISLLPKELALYVLSFLEPKDLLQAAQTCRYWRILAEDNLLWREKCKEEGIDEPLHIKRRKVIKPGFIHSPWKSAYIRQHRIDTNWRRGELKSPKVLKGHDDHVITCLQFCGNRIVSGSDDNTLKVWSAVTGKCLRTLVGHTGGVWSSQMRDNIIISGSTDRTLKVWNAETGECIHTLYGHTSTVRCMHLHEKRVVSGSRDATLRVWDIETGQCLHVLMGHVAAVRCVQYDGRRVVSGAYDFMVKVWDPETETCLHTLQGHTNRVYSLQFDGIHVVSGSLDTSIRVWDVETGNCIHTLTGHQSLTSGMELKDNILVSGNADSTVKIWDIKTGQCLQTLQGPNKHQSAVTCLQFNKNFVITSSDDGTVKLWDLKTGEFIRNLVTLESGGSGGVVWRIRASNTKLVCAVGSRNGTEETKLLVLDFDVDMK

SEQ ID NO: 5174 - protein, 707 aa, Homo Sapiens; identical to SEQ ID NO: 5173

SEQ ID NO: 5175 - protein, 707 aa, Homo Sapiens; identical to SEQ ID NO: 5173

SEQ ID NO: 5176 - protein, 176 aa, Homo Sapiens
MNQELLSVGSKRRRTGGSLRGNPSSSQVDEEQMNRVVEEEQQQQLRQQEEEHTARNGEVVGVEPRPGGQNDSQQGQLEENNNRFISVDEDSSGNQEEQEEDEEHAGEQDEEDEEEEEMDQESDDFDQSDDSSREDEHTHTNSVTNSSSIVDLPVHQLSSPFYTKTTKVSIFNILLT

SEQ ID NO: 5177 - protein, 589 aa, Homo Sapiens
MSKPGKPTLNHGLVPVDLKSAKEPLPHQTVMKIFSISIIAQGLPFCRRRMKRKLDHGSEVRSFSLGKKPCKVSEYTSTTGLVPCSATPTTFGDLRAANGQGQQRRRITSVQPPTGLQEWLKMFQSWSGPEKLLALDELIDSCEPTQVKHMMQVIEPQFQRDFISLLPKELALYVLSFLEPKDLLQAAQTCRYWRILAEDNLLWREKCKEEGIDEPLHIKRRKVIKPGFIHSPWKSAYIRQHRIDTNWRRGELKSPKVLKGHDDHVITCLQFCGNRIVSGSDDNTLKVWSAVTGKCLRTLVGHTGGVWSSQMRDNIIISGSTDRTLKVWNAETGECIHTLYGHTSTVRCMHLHEKRVVSGSRDATLRVWDIETGQCLHVLMGHVAAVRCVQYDGRRVVSGAYDFMVKVWDPETETCLHTLQGHTNRVYSLQFDGIHVVSGSLDTSIRVWDVETGNCIHTLTGHQSLTSGMELKDNILVSGNADSTVKIWDIKTGQCLQTLQGPNKHQSAVTCLQFNKNFVITSSDDGTVKLWDLKTGEFIRNLVTLESGGSGGVVWRIRASNTKLVCAVGSRNGTEETKLLVLDFDVDMK

SEQ ID NO: 5178 - protein, 179 aa, Homo Sapiens
MDPKQTTLLCLGDFPMPFISAKSSPVIPLDGSVKIQCQAIREAYLTQLMIIKNSTYREIGRRLKFWNETDPEFVIDHMDANKAGRYQCQYRIGHYRFRYSDTLELVVTDSIHQDYTTQNLIRMAVAGLVLVALLAILVENWHSHTALNKEASADVAEPSWSQQMCQPGLTFARTPSVCK

SEQ ID NO: 5179 - protein, 253 aa, Homo Sapiens
MDPKQTTLLCLGDFPMPFISAKSSPVIPLDGSVKIQCQAIREAYLTQLMIIKNSTYREIGRRLKFWNETDPEFVIDHMDANKAGRYQCQYRIGHYRFRYSDTLELVVTGLYGKPFLSADRGLVLMPGENISLTCSSAHIPFDRFSLAKEGELSLPQHQSGEHPANFSLGPVDLNVSGIYRCYDSIHQDYTTQNLIRMAVAGLVLVALLAILVENWHSHTALNKEASADVAEPSWSQQMCQPGLTFARTPSVCK

SEQ ID NO: 5180 - protein, 275 aa, Homo Sapiens
MDPKQTTLLCLGDFPMPFISAKSSPVIPLDGSVKIQCQAIREAYLTQLMIIKNSTYREIGRRLKFWNETDPEFVIDHMDANKAGRYQCQYRIGHYRFRYSDTLELVVTGLYGKPFLSADRGLVLMPGENISLTCSSAHIPFDRFSLAKEGELSLPQHQSGEHPANFSLGPVDLNVSGIYRCYGWYNRSPYLWSFPSNALELVVTDSIHQDYTTQNLIRMAVAGLVLVALLAILVENWHSHTALNKEASADVAEPSWSQQMCQPGLTFARTPSVCK

SEQ ID NO: 5181 - protein, 227 aa, Homo Sapiens
MDPKQTTLLCLGDFPMPFISAKSSPVIPLDGSVKIQCQAIREAYLTQLMIIKNSTYREIGRRLKFWNETDPEFVIDHMDANKAGRYQCQYRIGHYRFRYSDTLELVVTGLYGKPFLSADRGLVLMPGENISLTCSSAHIPFDRFSLAKEGELSLPQHQSGEHPANFSLGPVDLNVSGIYRCYGWYNRSPYLWSFPSNALELVVTGRYRPVQPCVWVGCPGPCHRAGI

SEQ ID NO: 5182 - protein, 209 aa, Homo Sapiens
MDPKQTTLLCLGDFPMPFISAKSSPVIPLDGSVKIQCQAIREAYLTQLMIIKNSTYREIGRRLKFWNETDPEFVIDHMDANKAGRYQCQYRIGHYRFRYSDTLELVVTGLYGKPFLSADRGLVLMPGENISLTCSSAHIPFDRFSLAKEGELSLPQHQSGEHPANFSLGPVDLNVSGIYRLHPPRLHDAELDPHGRGRTGPRGSLGHTG

SEQ ID NO: 5183 - protein, 178 aa, Homo Sapiens
MDPKQTTLLCLGLYGKPFLSADRGLVLMPGENISLTCSSAHIPFDRFSLAKEGELSLPQHQSGEHPANFSLGPVDLNVSGIYRCYGWYNRSPYLWSFPSNALELVVTDSIHQDYTTQNLIRMAVAGLVLVALLAILVENWHSHTALNKEASADVAEPSWSQQMCQPGLTFARTPSVCK

SEQ ID NO: 5184 - protein, 191 aa, Homo Sapiens
MDPKQTTLLCLVLCLGQRIQAQEGDFPMPFISAKSSPVIPLDGSVKIQCQAIREAYLTQLMIIKNSTYREIGRRLKFWNETDPEFVIDHMDANKAGRYQCQYRIGHYRFRYSDTLELVVTDSIHQDYTTQNLIRMAVAGLVLVALLAILVENWHSHTALNKEASADVAEPSWSQQMCQPGLTFARTPSVCK

SEQ ID NO: 5185 - protein, 265 aa, Homo Sapiens
MDPKQTTLLCLVLCLGQRIQAQEGDFPMPFISAKSSPVIPLDGSVKIQCQAIREAYLTQLMIIKNSTYREIGRRLKFWNETDPEFVIDHMDANKAGRYQCQYRIGHYRFRYSDTLELVVTGLYGKPFLSADRGLVLMPGENISLTCSSAHIPFDRFSLAKEGELSLPQHQSGEHPANFSLGPVDLNVSGIYRCYDSIHQDYTTQNLIRMAVAGLVLVALLAILVENWHSHTALNKEASADVAEPSWSQQMCQPGLTFARTPSVCK

SEQ ID NO: 5186 - protein, 287 aa, Homo Sapiens
MDPKQTTLLCLVLCLGQRIQAQEGDFPMPFISAKSSPVIPLDGSVKIQCQAIREAYLTQLMIIKNSTYREIGRRLKFWNETDPEFVIDHMDANKAGRYQCQYRIGHYRFRYSDTLELVVTGLYGKPFLSADRGLVLMPGENISLTCSSAHIPFDRFSLAKEGELSLPQHQSGEHPANFSLGPVDLNVSGIYRCYGWYNRSPYLWSFPSNALELVVTDSIHQDYTTQNLIRMAVAGLVLVALLAILVENWHSHTALNKEASADVAEPSWSQQMCQPGLTFARTPSVCK

SEQ ID NO: 5187 - protein, 239 aa, Homo Sapiens
MDPKQTTLLCLVLCLGQRIQAQEGDFPMPFISAKSSPVIPLDGSVKIQCQAIREAYLTQLMIIKNSTYREIGRRLKFWNETDPEFVIDHMDANKAGRYQCQYRIGHYRFRYSDTLELVVTGLYGKPFLSADRGLVLMPGENISLTCSSAHIPFDRFSLAKEGELSLPQHQSGEHPANFSLGPVDLNVSGIYRCYGWYNRSPYLWSFPSNALELVVTGRYRPVQPCVWVGCPGPCHRAGI

SEQ ID NO: 5188 - protein, 1642 aa, Homo Sapiens
CPPHSHYEACSYGCPLSCGDLPVPEGCESACREGCVCDAGFVLSGDTCVPVGQCGCLHDDRYYPLGQTFYPGPGCDSLCRCREGGEVSCEPSSCGPHETCRPSGGSLGCVAVGSTTCQASGDPHYTTFDGHRFDFMGTCVYVLAQTCGTRPGLHRFAVLQENVAWGNGRVSVTRVITVQVANFTLRLEQRQWKVTVNGVDMKLPVVLANGQIRASQHGSDVVIETDFGLRVAYDLVYYVRVTVPGNYYQLMCGLCGNYNGDPKDDFQKPNGSQAGNANEFGNSWEEVVSDSPCLPPPTCPPGSEGCIPSEECPPELEKKYQKEEFCGLLSSPTGPLSSCHKLVDPQGPLKDCIFDLCLGGGNLSILCSNIHAYVSACQVAGGHVEPWRNETFCPMECPQNSHYELCADTCSLGCSALSAPLQCPDGCAEGCQCDSGFLYNGQACVPIQQCGCYHNGAYYEPEQTVLIDNCRQQCTCHAGKVVVCQEHSCKPGQVCQPSGGILSCVTKDPCHGVTCRPQETCKEQGGQGVCLPNYEATCWLWGDPHYHSFDGRKFDFQGTCNYVLATTGCPGVSTQGLTPFTVTTKNQNRGNPAVSYVRVVTVAALGTNISIHKDEIGKVRVNGVLTALPVSVADGRISVTQGASKALLVADFGLQVSYDWNWRVDVTLPSSYHGAVCGLCGNMDRNPNNDQVFPNGTLAPSIPIWGGSWRAPGWDPLCWDECRGSCPTCPEDRLEQYEGPGFCGPLAPGTGGPFTTCHAHVPPESFFKGCVLDVCMGGGDRDILCKALASYVAACQAAGVVIEDWRAQVGCEITCPENSHYEVCGPPCPASCPSPAPLTTPAVCEGPCVEGCQCDAGFVLSADRCVPLNNGCGCWANGTYHEAGSEFWADGTCSQWCRCGPGGGSLVCTPASCGLGEVCGLLPSGQHGCQPVSTAECQAWGDPHYVTLDGHRFDFQGTCEYLLSAPCHGPPLGAENFTVTVANEHRGSQAVSYTRSVTLQIYNHSLTLSARWPRKLQVDGVFVTLPFQLDSLLHAHLSGADVVVTTTSGLSLAFDGDSFVRLRVPAAYAGSLCGLCGNYNQDPADDLKAVGGKPAGWQVGGAQGCGECVSKPCPSPCTPEQQESFGGPDACGVISATDGPLAPCHGLVPPAQYFQGCLLDACQVQGHPGGLCPAVATYVAACQAAGAQLREWRRPDFCPFQCPAHSHYELCGDSCPGSCPSLSAPEGCESACREGCVCDAGFVLSGDTCVPVGQCGCLHDDRYYPLGQTFYPGPGCDSLCRCREGGEVSCEPSSCGPHETCRPSGGSLGCVAVGSTTCQASGDPHYTTFDGHRFDFMGTCVYVLAQTCGTRPGLHRFAVLQENVAWGNGRVSVTRVITVQVANFTLRLEQRQWKVTVNGVDMKLPVVLANGQIRASQHGSDVVIETDFGLRVAYDLVYYVRVTVPGNYYQLMCGLCGNYNGDPKDDFQKPNGSQAGNANEFGNSWEEVVPDSPCLPPPTCPPGSAGCIPSDKCPPELEKKYQKEEFCGLLSSPTGPLSSCHKLVDPQGPLKDCIFDLCLGGGNLSILCSNIHAYVSACQAAGGHVEPWRNETFCPMECPQNSHYELCADTCSLGCSALSAPLQCPDGCAEGCQCDSGFLYNG

SEQ ID NO: 5189 - protein, 1132 aa, Homo Sapiens
MGALWSWWILWAGATLLWGLTQEASVDLKNTGREEFLTAFLQNYQLAYSKAYPRLLISSLSESPASVSILSQADNTSKKVTVRPGESVMVNISAKAEMIGSKIFQHAVVIHSDYAISVQALNAKPDTAELTLLRPIQALGTEYFVLTPPGTSARNVKEFAVVAGAAGASVSVTLKGSVTFNGKFYPAGDVLRVTLQPYNVAQLQSSVDLSGSKVTASSPVAVLSGHSCAQKHTTCNHVVEQLLPTSAWGTHYVVPTLASQSRYDLAFVVASQATKLTYNHGGITGSRGLQAGDVVEFEVRPSWPLYLSANVGIQVLLFGTGAIRNEVTYDPYLVLIPDVAAYCPAYVVKSVPGCEGVALVVAQTKAISGLTIDGHAVGAKLTWEAVPGSEFSYAEVELGTADMIHTAEATTNLGLLTFGLAKAIGYATAADCGRTVLSPVEPSCEGMQCAAGQRCQVVGGKAGCVAESTAVCRAQGDPHYTTFDGRRYDMMGTCSYTMVELCSEDDTLPAFSVEAKNEHRGSRRVSYVGLVTVRAYSHSVSLTRGEVGFVLVDNQRSRLPVSLSEGRLRVYQSGPRAVVELVFGLVVTYDWDCQLALSLPARFQDQVCGLCGNYNGDPADDFLTPDGALAPDAVEFASSWKLDDGDYLCEDGCQNNCPACTPGQAQHYEGDRLCGMLTKLDGPFAVCHDTLDPRPFLEQCVYDLCVVGGERLSLCRGLSAYAQACLELGISVGDWRSPANCPLSCPANSRYELCGPACPTSCNGAAAPSNCSGRPCVEGCVCLPGFVASGGACVPASSCGCTFQGLQLAPGQEVWADELCQRRCTCNGATHQVTCRDKQSCPAGERCSVQNGLLGCYPDRFGTCQGSGDPHYVSFDGRRFDFMGTCTYLLVGSCGQNAALPAFRVLVENEHRGSQTVSYTRAVRVEARGVKVAVRREYPGQVLVDDVLQYLPFQAADGQVQVFRQGRDAVVRTDFGLTVTYDWNARVTAKVPSSYAEALCGLCGNFNGDPADDLALRGGGQAANALAFGNSWQEETRPGCGATEPGDCPKLDSLVAQQLQSKNECGILADPKGPFRECHSKLDPQGAVRDCVYDRCLLPGQSGPLCDALATYAAACQAAGATVHPWRSEELC

SEQ ID NO: 5190 - protein, 3072 aa, Homo Sapiens
  misc_feature (1)..(1): Xaa can be any naturally occurring amino acid
XLSCPPHSHYEACSYGCPLSCGDLPVPEGCESACREGCVCDAGFVLSGDTCVPVGQCGCLHDDRYYPLGQTFYPGPGCDSLCRCREGGEVSCEPSSCGPHETCRPSGGSLGCVAVGSTTCQASGDPHYTTFDGHRFDFMGTCVYVLAQTCGTRPGLHRFAVLQENVAWGNGRVSVTRVITVQVANFTLRLEQRQWKVTVNGVDMKLPVVLANGQIRASQHGSDVVIETDFGLRVAYDLVYYVRVTVPGNYYQLMCGLCGNYNGDPKDDFQKPNGSQAGNANEFGNSWEEVVSDSPCLPPPTCPPGSEGCIPSEECPPELEKKYQKEEFCGLLSSPTGPLSSCHKLVDPQGPLKDCIFDLCLGGGNLSILCSNIHAYVSACQVAGGHVEPWRNETFCPMECPQNSHYELCADTCSLGCSALSAPLQCPDGCAEGCQCDSGFLYNGQACVPIQQCGCYHNGAYYEPEQTVLIDNCRQQCTCHAGKVVVCQEHSCKPGQVCQPSGGILSCVTKDPCHGVTCRPQETCKEQGGQGVCLPNYEATCWLWGDPHYHSFDGRKFDFQGTCNYVLATTGCPGVSTQGLTPFTVTTKNQNRGNPAVSYVRVVTVAALGTNISIHKDEIGKVRVNGVLTALPVSVADGRISVTQGASKALLVADFGLQVSYDWNWRVDVTLPSSYHGAVCGLCGNMDRNPNNDQVFPNGTLAPSIPIWGGSWRAPGWDPLCWDECRGSCPTCPEDRLEQYEGPGFCGPLAPGTGGPFTTCHAHVPPESFFKGCVLDVCMGGGDRDILCKALASYVAACQAAGVVIEDWRAQVGCEITCPENSHYEVCGPPCPASCPSPAPLTTPAVCEGPCVEGCQCDAGFVLSADRCVPLNNGCGCWANGTYHEAGSEFWADGTCSQWCRCGPGGGSLVCTPASCGLGEVCGLLPSGQHGCQPVSTAECQAWGDPHYVTLDGHRFDFQGTCEYLLSAPCHGPPLGAENFTVTVANEHRGSQAVSYTRSVTLQIYNHSLTLSARWPRKLQVDGVFVTLPFQLDSLLHAHLSGADVVVTTTSGLSLAFDGDSFVRLRVPAAYAGSLCGLCGNYNQDPADDLKAVGGKPAGWQVGGAQGCGECVSKPCPSPCTPEQQESFGGPDACGVISATDGPLAPCHGLVPPAQYFQGCLLDACQVQGHPGGLCPAVATYVAACQAAGAQLREWRRPDFCPFQCPAHSHYELCGDSCPGSCPSLSAPEGCESACREGCVCDAGFVLSGDTCVPVGQCGCLHDDRYYPLGQTFYPGPGCDSLCRCREGGEVSCEPSSCGPHETCRPSGGSLGCVAVGSTTCQASGDPHYTTFDGHRFDFMGTCVYVLAQTCGTRPGLHRFAVLQENVAWGNGRVSVTRVITVQVANFTLRLEQRQWKVTVNGVDMKLPVVLANGQIRASQHGSDVVIETDFGLRVAYDLVYYVRVTVPGNYYQLMCGLCGNYNGDPKDDFQKPNGSQAGNANEFGNSWEEVVPDSPCLPPPTCPPGSAGCIPSDKCPPELEKKYQKEEFCGLLSSPTGPLSSCHKLVDPQGPLKDCIFDLCLGGGNLSILCSNIHAYVSACQAAGGHVEPWRNETFCPMECPQNSHYELCADTCSLGCSALSAPLQCPDGCAEGCQCDSGFLYNGQACVPIQQCGCYHNGVYYEPEQTVLIDNCRQQCTCHVGKVVVCQEHSCKPGQVCQPSGGILSCVTKDPCHGVTCRPQETCKEQGGQGVCLPNYEATCWLWGDPHYHSFDGRKFDFQGTCNYVLATTGCPGVSTQGLTPFTVTTKNQNRGNPAVSYVRVVTVAALGTNISIHKDEIGKVRVNGVLTALPVSVADGRISVAQGASKALLVADFGLQVSYDWNWRVDVTLPSSYHGAVCGLCGNMDRNPNNDQVFPNGTLAPSIPIWGGSWRAPGWDPLCWDECRGSCPTCPEDRLEQYEGPGFCGPLSSGTGGPFTTCHAHVPPESFFKGCVLDVCMGGGDRDILCKALASYVAACQAAGVVIEDWRAQVGCEITCPENSHYEVCGPPCPASCPSPAPLTTPAVCEGPCVEGCQCDAGFVLSADRCVPLNNGCGCWANGTYHEAGSEFWADGTCSQWCRCGPGGGSLVCTPASCGLGEVCGLLPSGQHGCQPVSTAECQAWGDPHYVTLDGHRFDFQGTCEYLLSAPCHGPPLGAENFTVTVANEHRGSQAVSYTRSVTLQIYNHSLTLSARWPRKLQVDGVFVALPFQLDSLLHAHLSGADVVVTTTSGLSLAFDGDSFVRLRVPAAYAASLCGLCGNYNQDPADDLKAVGGKPAGWQVGGAQGCGECVSKPCPSPCTPEQQESFGGPDACGVISATDGPLAPCHGLVPPAQYFQGCLLDACQVQGHPGGLCPAVATYVAACQAAGAQLGEWRRPDFCPLQCPAHSHYELCGDSCPVSCPSLSAPEGCESACREGCVCDAGFVLSGDTCVPVGQCGCLHDGRYYPLGEVFYPGPECERRCECGPGGHVTCQEGAACGPHEECRLEDGVQACHATGCGRCLANGGIHYITLDGRVYDLHGSCSYVLAQVCHPKPGDEDFSIVLEKNAAGDLQRLLVTVAGQVVSLAQGQQVTVDGEAVALPVAVGRVRVTAEGRNMVLQTTKGLRLLFDGDAHLLMSIPSPFRGRLCGLCGNFNGNWSDDFVLPNGSAASSVETFGAAWRAPGSSKGCGEGCGPQGCPVCLAEETAPYESNEACGQLRNPQGPFATCQAVLSPSEYFRQCVYDLCAQKGDKAFLCRSLAAYTAACQAAGVAVKPWRTDSFCPLHCPAHSHYSICTRTCQGSCAALSGLTGCTTRCFEGCECDDRFLLSQGVCIPVQDCGCTHNGRYLPVNSSLLTSDCSERCSCSSSSGLTCQAAGCPPGRVCEVKAEARNCWATRGLCVLSVGANLTTFDGARGATTSPGVYELSSRCPGLQNTIPWYRVVAEVQICHGKTEAVGQVHIFFQDGMVTLTPNKGVWVNGLRVDLPAEKLASVSVSRTPDGSLLVRQKAGVQVWLGANGKVAVIVSNDHAGKLCGACGNFDGDQTNDWHDSQEKPAMEKWRAQDFSPCYG

SEQ ID NO: 5191 - protein, 250 aa, Homo Sapiens
MGKWPPWVSVFQEETITLHCEVLHLPGSSSTQWFLNGTATQTSTPSYRITSASVNDSGEYRCQRGLSGRSDPIQLEIHRGWLLLQVSSRVFMEGEPLALRCHAWKDKLVYNVLYYRNGKAFKFFHWNSNLTILKTNISHNGTYHCSGMGKHRYTSAGISQYTVKGLQLPTPVWFHVLFYLAVGIMFLVNTVLWVTIRKELKRKKKWNLEISLDSGHEKKVISSLQEDRHLEEELKCQEQKEEQLQEGVHR

SEQ ID NO: 5192 - protein, 188 aa, Homo Sapiens
MWFLTTLLLWGWLLLQVSSRVFMEGEPLALRCHAWKDKLVYNVLYYRNGKAFKFFHWNSNLTILKTNISHNGTYHCSGMGKHRYTSAGISQYTVKGLQLPTPVWFHVLFYLAVGIMFLVNTVLWVTIRKELKRKKKWNLEISLDSGHEKKVISSLQEDRHLEEELKCQEQKEEQLQEGVHRKEPQGAT

SEQ ID NO: 5193 - protein, 224 aa, Homo Sapiens
MWFLTTLLLWVPVDGQVDTTKAVITLQPPWVSVFQEETITLHCEVLHLPGSSSTQWFLNGTATQTSTPSYRITSASVNDSGEYRCQRGLSGRSDPIQLEIHRGWLLLQVSSRVFMEGEPLALRCHAWKDKLVYNVLYYRNGKAFKFFHWNSNLTILKTNISHNGTYHCSGMGKHRYTSAGISQYTVKELFPAPVLNASVTSPLLEGNLVTLSCETKLLLQRPGL

SEQ ID NO: 5194 - protein, 224 aa, Homo Sapiens; identical to SEQ ID NO: 5193

SEQ ID NO: 5195 - protein, 280 aa, Homo Sapiens
MWFLTTLLLWVPVDGQVDTTKAVITLQPPWVSVFQEETITLHCEVLHLPGSSSTQWFLNGTATQTSTPSYRITSASVNDSGEYRCQRGLSGRSDPIQLEIHRGWLLLQVSSRVFMEGEPLALRCHAWKDKLVYNVLYYRNGKAFKFFHWNSNLTILKTNISHNGTYHCSGMGKHRYTSAGISQYTVKGLQLPTPVWFHVLFYLAVGIMFLVNTVLWVTIRKELKRKKKWNLEISLDSGHEKKVISSLQEDRHLEEELKCQEQKEEQLQEGVHRKEPQGAT

SEQ ID NO: 5196 - protein, 225 aa, Homo Sapiens
MWFLTTLLLWVPVDGQVVDTTKAVITLQPPWVSVFQEETITLHCEVLHLPGSSSTQWFLNGTATQTSTPSYRITSASVNDSGEYRCQRGLSGRSDPIQLEIHRGWLLLQVSSRVFMEGEPLALRCHAWKDKLVYNVLYYRNGKAFKFFHWNSNLTILKTNISHNGTYHCSGMGKHRYTSAGISQYTVKELFPAPVLNASVTSPLLEGNLVTLSCETKLLLQRPGL

SEQ ID NO: 5197 - protein, 359 aa, Homo Sapiens
MAEGTLWQILCVSSDAQPQTFEGVKGADPPTLPPGSFLPGPVLWWGSLARLQTEKSDEVSRKGNWWVTEMGGGAGERLFTSSCLVGLVPLGLRISLVTCPLQCGIMWQLLLPTALLLLVSAGMRTEDLPKAVVFLEPQWYRVLEKDSVTLKCQGAYSPEDNSTQWFHNESLISSQASSYFIDAATVDDSGEYRCQTNLSTLSDPVQLEVHIGWLLLQAPRWVFKEEDPIHLRCHSWKNTALHKVTYLQNGKGRKYFHHNSDFYIPKATLKDSGSYFCRGLFGSKNVSSETVNITITQGLAVSTISSFFPPGYQVSFCLVMVLLFAVDTGLYFSVKTNIRSSTRDWKDHKFKWRKDPQDK

SEQ ID NO: 5198 - protein, 290 aa, Homo Sapiens
MGGGAGERLFTSSCLVGLVPLGLRISLVTCPLQCGIMWQLLLPTALLLLVSAGMRTEDLPKAVVFLEPQWYRVLEKDSVTLKCQGAYSPEDNSTQWFHNESLISSQASSYFIDAATVDDSGEYRCQTNLSTLSDPVQLEVHIGWLLLQAPRWVFKEEDPIHLRCHSWKNTALHKVTYLQNGKGRKYFHHNSDFYIPKATLKDSGSYFCRGLFGSKNVSSETVNITITQGLAVSTISSFFPPGYQVSFCLVMVLLFAVDTGLYFSVKTNIRSSTRDWKDHKFKWRKDPQDK

SEQ ID NO: 5199 - protein, 105 aa, Homo Sapiens
MWQLLLPTALLLLVSAGMRTDLPKAVVFLEPQWYRVLEKDSVTLKCQGAYSPEDNSTQWFHNESLISSQASSYFIDAATVDDSGEYRCQTNLSTLSDPVQLEVHI

SEQ ID NO: 5200 - protein, 254 aa, Homo Sapiens
MWQLLLPTALLLLVSAGMRTEDLPKAVVFLEPQWYRVLEKDSVTLKCQGAYSPEDNSTQWFHNESLISSQASSYFIDAATVDDSGEYRCQTNLSTLSDPVQLEVHIGWLLLQAPRWVFKEEDPIHLRCHSWKNTALHKVTYLQNGKGRKYFHHNSDFYIPKATLKDSGSYFCRGLFGSKNVSSETVNITITQGLAVSTISSFFPPGYQVSFCLVMVLLFAVDTGLYFSVKTNIRSSTRDWKDHKFKWRKDPQDK

SEQ ID NO: 5201 - protein, 254 aa, Homo Sapiens; identical to SEQ ID NO: 5200

SEQ ID NO: 5202 - protein, 254 aa, Homo Sapiens; identical to SEQ ID NO: 5200

SEQ ID NO: 5203 - protein, 307 aa, Homo Sapiens
QTEKSDEVSRKGNWWVTEMGGGAGERLFTSSCLVGLVPLGLRISLVTCPLQCGIMWQLLLPTALLLLVSAGMRTDLPKAVVFLEPQWYRVLEKDSVTLKCQGAYSPEDNSTQWFHNESLISSQASSYFIDAATVDDSGEYRCQTNLSTLSDPVQLEVHIGWLLLQAPRWVFKEEDPIHLRCHSWKNTALHKVTYLQNGKGRKYFHHNSDFYIPKATLKDSGSYFCRGLFGSKNVSSETVNITITQGLAVSTISSFFPPGYQVSFCLVMVLLFAVDTGLYFSVKTNIRSSTRDWKDHKFKWRKDPQDK

SEQ ID NO: 5204 - protein, 211 aa, Homo Sapiens
GVPRPQPWALGLLLFLLPGSLGAESHLSLLYHLTAVSSPAPGTPAFWVSGWLGPQQYLSYNSLRGEAEPCGAWVWENQVSWYWEKETTDLRIKEKLFLEAFKALGGKGPYTLQGLLGCELGPDNTSVPTAKFALNGEEFMNFDLKQGTWGGDWPEALAISQRWQQQDKAANKELTFLLFSCPHRLREHLERGRGNLEWKEPKARQIFCAWI

SEQ ID NO: 5205 - protein, 273 aa, Homo Sapiens
MGVPRPQPWALGLLLFLLPGSLGAESHLSLLYHLTAVSSPAPGTPAFWVSGWLGPQQYLSYNSLRGEAEPCGAWVWENQVSWYWEKETTDLRIKEKLFLEAFKALGGKEPPSMRLKARPSSPGFSVLTCSAFSFYPPELQLRFLRNGLAAGTGQGDFGPNSDGSFHASSSLTVKSGDEHHYCCIVQHAGLAQPLRVELESPAKSSVLVVGIVIGVLLLTAAAVGGALLWRRMRSGLPAPWISLRGDDTGVLLPTPGEAQDADLKDVNVIPATA

SEQ ID NO: 5206 - protein, 141 aa, Homo Sapiens
MGVPRPQPWALGLLLFLLPGSLGAESHLSLLYHLTAVSSPAPGTPAFWVSGWLGPQQYLSYNSLRGEAEPCGAWVWENQVSWYWEKETTDLRIKEKLFLEAFKALGGKGPYTLQGLLGCELGPDNTSVPTAKFALNGEEFM

SEQ ID NO: 5207 - protein, 167 aa, Homo Sapiens
MGVPRPQPWALGLLLFLLPGSLGAESHLSLLYHLTAVSSPAPGTPAFWVSGWLGPQQYLSYNSLRGEAEPCGAWVWENQVSWYWEKETTDLRIKEKLFLEAFKALGGKGPYTLQGLLGCELGPDNTSVPTAKFALNGEEFMNFDLKQGTWGGDWPEALAISQRWQQQ

SEQ ID NO: 5208 - protein, 225 aa, Homo Sapiens
MGVPRPQPWALGLLLFLLPGSLGAESHLSLLYHLTAVSSPAPGTPAFWVSGWLGPQQYLSYNSLRGEAEPCGAWVWENQVSWYWEKETTDLRIKEKLFLEAFKALGGKGPYTLQGLLGCELGPDNTSVPTAKFALNGEEFMNFDLKQGTWGGDWPEALAISQRWQQQDKAANKELTFLLFSCPHRLREHLERGRGNLEWKDTVSHYVAQAGLELLGSSDSPALVS

SEQ ID NO: 5209 - protein, 365 aa, Homo Sapiens
MGVPRPQPWALGLLLFLLPGSLGAESHLSLLYHLTAVSSPAPGTPAFWVSGWLGPQQYLSYNSLRGEAEPCGAWVWENQVSWYWEKETTDLRIKEKLFLEAFKALGGKGPYTLQGLLGCELGPDNTSVPTAKFALNGEEFMNFDLKQGTWGGDWPEALAISQRWQQQDKAANKELTFLLFSCPHRLREHLERGRGNLEWKEPPSMRLKARPSSPGFSVLTCSAFSFYPPELQLRFLRNGLAAGTGQGDFGPNSDGSFHASSSLTVKSGDEHHYCCIVQHAGLAQPLRVELESPAKSSVLVVGIVIGVLLLTAAAVGGALLWRRMRSGLPAPWISLRGDDTGVLLPTPGEAQDADLKDVNVIPATA

SEQ ID NO: 5210 - protein, 365 aa, Homo Sapiens; identical to SEQ ID NO: 5209

SEQ ID NO: 5211 - protein, 99 aa, Homo Sapiens
MGVPRPQPWALGLLLFLLPGSLGAESPAKSSVLVVGIVIGVLLLTAAAVGGALLWRRMRSGLPAPWISLRGDDTGVLLPTPGEAQDADLKDVNVIPATA

SEQ ID NO: 5212 - protein, 39 aa, Homo Sapiens
MNFDLKQGTWGGDWPEALAISQRWQQQDKAANKELTFLL

SEQ ID NO: 5213 - protein, 153 aa, Homo Sapiens
WEKETTDLRIKEKLFLEAFKALGGKGPYTLQGLLGCELGPDNTSVPTAKFALNGEEFMNFDLKQGTWGGDWPEALAISQRWQQQDKAANKELTFLLFSCPHRLREHLERGRGNLEWKAPWISLRGDDTGVLLPTPGEAQDADLKDVNVIPATA

SEQ ID NO: 5214 - protein, 189 aa, Homo Sapiens
  misc_feature (1)..(1): Xaa can be any naturally occurring amino acid
XSSPAPGTPAFWVSGWLGPQQYLSYNSLRGEAEPCGAWVWENQVSWYWEKETTDLRIKEKLFLEAFKALGGKGPYTLQGLLGCELGPDNTSVPTAKFALNGEEFMNFDLKQGTWGGDWPEALAISQRWQQQDKAANKELTFLLFSCPHRLREHLERGRGNLEWKAPSPSTLRSCNFGSCGMGWPLAPAR

SEQ ID NO: 5215 - protein, 141 aa, Homo Sapiens
MDFWLWPLYFLPEMESCCVAQDGLELVALSDPPGSASQSAGITVSGALRILPEVKVEGELGGSVTIKCPLPEMHVRIYLCREMAGSGTCGTVVSTTNFIKAEYKGRVTLKQYPRKNLFLVEVTQLTESDSGVYACGAGMNT

SEQ ID NO: 5216 - protein, 278 aa, Homo Sapiens
MDFWLWPLYFLPEYEPSWEEQPMPETPKWFHLPYLFQMPAYASSSKFVTRVTTPAQRGKVPPVHHSSPTTQITHRPRVSRASSVAGDKPRTFLPSTTASKISALEGLLKPQTPSYNHHTRLHRQRALDYGSQSGREGQGFHILIPTILGLFLLALLGLVVKRAVERRKALSRRARRLAVRMRALESSQRPRGSPRPRSQNNIYSACPRRARGADAAGTGEAPVPGPGAPLPPAPLQVSESPWLHAPSLKTSCEYVSLYHQPAAMMEDSDSDDYINVPA

SEQ ID NO: 5217 - protein, 125 aa, Homo Sapiens
MDFWLWPLYFLPVSGALRILPEVKVEGELGGSVTIKCPLPEMHVRIYLCREMAGSGTCGTVVSTTNFIKAEYKGRVTLKQYPRKNLFLVENTSHHGKSSQCLRLQNGFICPICSRCLHMPVLPNS

SEQ ID NO: 5218 - protein, 147 aa, Homo Sapiens
MDFWLWPLYFLPVSGALRILPEVKVEGELGGSVTIKCPLPEMHVRIYLCREMAGSGTCGTVVSTTNFIKAEYKGRVTLKQYPRKNLFLVEVTQLTESDSGVYACGAGMNTDRGKTQKVTLNVHSEYEPSWEEQPMPETPKWFHLPYL

SEQ ID NO: 5219 - protein, 151 aa, Homo Sapiens
MDFWLWPLYFLPVSGALRILPEVKVEGELGGSVTIKCPLPEMHVRIYLCREMAGSGTCGTVVSTTNFIKAEYKGRVTLKQYPRKNLFLVEVTQLTESDSGVYACGAGMNTDRGKTQKVTLNVHSEYEPSWEEQPMPETPKWFHLPYLFQMP

SEQ ID NO: 5220 - protein, 390 aa, Homo Sapiens
MDFWLWPLYFLPVSGALRILPEVKVEGELGGSVTIKCPLPEMHVRIYLCREMAGSGTCGTVVSTTNFIKAEYKGRVTLKQYPRKNLFLVEVTQLTESDSGVYACGAGMNTDRGKTQKVTLNVHSEYEPSWEEQPMPETPKWFHLPYLFQMPAYASSSKFVTRVTTPAQRGKVPPVHHSSPTTQITHRPRVSRASSVAGDKPRTFLPSTTASKISALEGLLKPQTPSYNHHTRLHRQRALDYGSQSGREGQGFHILIPTILGLFLLALLGLVVKRAVERRKALSRRARRLAVRMRALESSQRPRGSPRPRSQNNIYSACPRRARGADAAGTGEAPVPGPGAPLPPAPLQVSESPWLHAPSLKTSCEYVSLYHQPAAMMEDSDSDDYINVPA

SEQ ID NO: 5221 - protein, 306 aa, Homo Sapiens
MDFWLWPLYFLPVSGALRILPEVKVEGELGGSVTIKCPLPEMHVRIYLCREMAGSGTCGTVVSTTNFIKAEYKGRVTLKQYPRKNLFLVEVTQLTESDSGVYACGAGMNTDRGKTQKVTLNVHSEYEPSWEEQPMPETPKWFHLPYLFQMPAYASSSKFVTRVTTPAQRGKVPPVHHSSPTTQITHRPRVSRASSVAGDKPRTFLPSTTASKISALEGLLKPQTPSYNHHTRLHRQSPLQAGPPTGREDARPGELPEAPRVAATALPKQHLQRLPAARSWSGRCRHRGGPRSRPRSAVAPRPAAGV

SEQ ID NO: 5222 - protein, 326 aa, Homo Sapiens
MELSGATMARGLAVLLVLFLHIKNLPAQAADTCPEVKVVGLEGSDKLTILRGCPGLPGAPGPKGEAGVIGERGERGLPGAPGKAGPVGPKGDRGEKGMRGEKGDAGQSQSCATGPRNCKDLLDRGYFLSGWHTIYLPDCRPLTVLCDMDTDGGGWTVFQRRMDGSVDFYRDWAAYKQGFGSQLGEFWLGNDNIHALTAQGSSELRVDLVDFEGNHQFAKYKSFKVADEAEKYKLVLGAFVGGSAGNSLTGHNNNFFSTKDQDNDVSSSNCAEKFQGAWWYADCHASNLNGLYLMGPHESYANGINWSAAKGYKYSYKVSEMKVRPA

SEQ ID NO: 5223 - protein, 360 aa, Homo Sapiens
MELSGATMARGLAVLLVLFLHIKNLPAQAADTCPEVKVVGLEGSDKLTILRGCPGLPGAPGPKGEAGVIGERGERGLPGAPGKAGPVGPKGDRGEKGMRGEKGDAGQSQSCATGPRNCKDLLDRGYFLSGWHTIYLPDCRPLTVLCDMDTDGGGWTVFQRRMDGSVDFYRDWAAYKQGFGSQTHSHDAHSCPFAPSSVKPPHAHNLTRGRIMFLNMFTLGQKSFTSFNVCFLNTSGFDHFPVSVARQVFPWNLVSREESGPLFSRWHYRCSGRLSDFCEDFPPPVIDTGRSSPPPPSLPHPPMPHSQHFTLLEKGHFGVQKTLTKKGESLVGTFLLPTTAEFMLWAGWLLGRDKHLALTK

SEQ ID NO: 5224 - protein, 313 aa, Homo Sapiens
MELDRAVGVLGAATLLLSFLGMAWALQAADTCPEVKMVGLEGSDKLTILRGCPGLPGAPGPKGEAGTNGKRGERGPPGPPGKAGPPGPNGAPGEPQPCLTGPRTCKDLLDRGHFLSGWHTIYLPDCRPLTVLCDMDTDGGGWTVFQRRVDGSVDFYRDWATYKQGFGSRLGEFWLGNDNIHALTAQGTSELRVDLVDFEDNYQFAKYRSFKVADEAEKYNLVLGAFVEGSAGDSLTFHNNQSFSTKDQDNDLNTGNCAVMFQGAWWYKNCHVSNLNGRYLRGTHGSFANGINWKSGKGYNYSYKVSEMKVRPA

SEQ ID NO: 5225 - protein, 275 aa, Homo Sapiens
MELDRAVGVLGAATLLLSFLGMAWALQAADTCPGERGPPGPPGKAGPPGPNGAPGEPQPCLTGPRTCKDLLDRGHFLSGWHTIYLPDCRPLTVLCDMDTDGGGWTVFQRRVDGSVDFYRDWATYKQGFGSRLGEFWLGNDNIHALTAQGTSELRVDLVDFEDNYQFAKYRSFKVADEAEKYNLVLGAFVEGSAGDSLTFHNNQSFSTKDQDNDLNTGNCAVMFQGAWWYKNCHVSNLNGRYLRGTHGSFANGINWKSGKGYNYSYKVSEMKVRPA

SEQ ID NO: 5226 - protein, 299 aa, Homo Sapiens
MDLLWILPSLWLLLLGGPACLKTQEHPSCPGPRELEASKVVLLPSCPGAPGSPGEKGAPGPQGPPGPPGKMGPKGEPGDPVNLLRCQEGPRNCRELLSQGATLSGWYHLCLPEGRALPVFCDMDTEGGGWLVFQRRQDGSVDFFRSWSSYRAGFGNQESEFWLGNENLHQLTLQGNWELRVELEDFNGNRTFAHYATFRLLGEVDHYQLALGKFSEGTAGDSLSLHSGRPFTTYDADHDSSNSNCAVIVHGAWWYASCYRSNLNGRYAVSEAAAHKYGIDWASGRGVGHPYRRVRMMLR

SEQ ID NO: 5227 - protein, 288 aa, Homo Sapiens
MDLLWILPSLWLLLLGGPACLKTQEHPSCPGPRELEASKVVLLPSCPGAPGSPGEKGAPGPQGPPGPPGKMGPKGEPGPRNCRELLSQGATLSGWYHLCLPEGRALPVFCDMDTEGGGWLVFQRRQDGSVDFFRSWSSYRAGFGNQESEFWLGNENLHQLTLQGNWELRVELEDFNGNRTFAHYATFRLLGEVDHYQLALGKFSEGTAGDSLSLHSGRPFTTYDADHDSSNSNCAVIVHGAWWYASCYRSNLNGRYAVSEAAAHKYGIDWASGRGVGHPYRRVRMMLR

SEQ ID NO: 5228 - protein, 429 aa, Homo Sapiens
MLPRLLLLICAPLCEPAELFLIASPSHPTEGSPVTLTCKMPFLQSSDAQFQFCFFRDTRALGPGWSSSPKLQIAAMWKEDTGSYWCEAQTMASKVLRSRRSQINVHRVPVADVSLETQPPGGQVMEGDRLVLICSVAMGTGDITFLWYKGAVGLNLQSKTQRSLTAEYEIPSVRESDAEQYYCVAENGYGPSPSGLVSITVRIPVSRPILMLRAPRAQAAVEDVLELHCEALRGSPPILYWFYHEDITLGSRSAPSGGGASFNLSLTEEHSGNYSCEANNGLGAQRSEAVTLNFTVPTGARSNHLTSGVIEGLLSTLGPATVALLFCYGLKRKIGRRSARDPLRSLPSPLPQEFTYLNSPTPGQLQPIYENVNVVSGDEVYSLAYYNQPEQESVAAETLGTHMEDKVSLDIYSRLRKANITDVDYEDAM

SEQ ID NO: 5229 - protein, 366 aa, Homo Sapiens
MLPRLLLLICAPLCEPAELFLIASPSHPTEGSPVTLTCKMPFLQSSDAQFQFCFFRDTRALGPGWSSSPKLQIAAMWKEDTGSYWCEAQTMASKVLRSRRSQINVHRVPVADVSLETQPPGGQVMEGDRLVLICSVAMGTGDITFLWYKGAVGLNLQSKTQRSLTAEYEIPSVRESDAEQYYCVAENGYGPSPSGLVSITVRIPVSRPILMLRAPRAQAAVEDVLELHCEALRGSPPILYWFYHEDITLGSRSAPSGGGASFNLSLTEEHSGNYSCEANNGLGAQRSEAVTLNFTGRRSARDPLRSLPSPLPQEFTYLNSPTPGQLQPIYENEPREQSVAVHGRQQHSSEQKAQKPWGHIWRTRFP

SEQ ID NO: 5230 - protein, 428 aa, Homo Sapiens
MLPRLLLLICAPLCEPAELFLIASPSHPTEGSPVTLTCKMPFLQSSDAQFQFCFFRDTRALGPGWSSSPKLQIAAMWKEDTGSYWCEAQTMASKVLRSRRSQINVHRVPVADVSLETQPPGGQVMEGDRLVLICSVAMGTGDITFLWYKGAVGLNLQSKTQRSLTAEYEIPSVRESDAEQYYCVAENGYGPSPSGLVSITVRIPVSRPILMLRAPRAQAAVEDVLELHCEALRGSPPILYWFYHEDITLGSRSAPSGGGASFNLSLTEEHSGNYSCEANNGLGAQRSEAVTLNFTVPTGARSNHLTSGVIEGLLSTLGPATVALLFCYGLKRKIGRRSARDPLRSLPSPLPQEFTYLNSPTPGQLQPIYENVNVVSGDEVYSLAYYNQPEQESVAETLGTHMEDKVSLDIYSRLRKANITDVDYEDAM

SEQ ID NO: 5231 - protein, 742 aa, Homo Sapiens
MLLWLLLLILTPGREQSGVAPKAVLLLNPPWSTAFKGEKVALICSSISHSLAQGDTYWYHDEKLLKIKHDKIQITEPGNYQCKTRGSSLSDAVHVEFSPDWLILQALHPVFEGDNVILRCQGKDNKNTHQKVYYKDGKQLPNSYNLEKITVNSVSRDNSKYHCTAYRKFYILDIEVTSKPLNIQVQELFLHPVLRASSSTPIEGSPMTLTCETQLSPQRPDVQLQFSLFRDSQTLGLGWSRSPRLQIPAMWTEDSGSYWCEVETVTHSIKKRSLRSQIRVQRVPVSNVNLEIRPTGGQLIEGENMVLICSVAQGSGTVTFSWHKEGRVRSLGRKTQRSLLAELHVLTVKESDAGRYYCAADNVHSPILSTWIRVTVRIPVSHPVLTFRAPRAHTVVGDLLELHCESLRGSPPILYRFYHEDVTLGNSSAPSGGGASFNLSLTAEHSGNYSCDADNGLGAQHSHGVSLRVTVPVSRPVLTLRAPGAQAVVGDLLELHCESLRGSFPILYWFYHEDDTLGNISAHSGGGASFNLSLTTEHSGNYSCEADNGLGAQHSKVVTLNVTGTSRNRTGLTAAGITGLVLSILVLAAAAALLHYARARRKPGGLSATGTSSHSPSECQEPSSSRPSRIDPQEPTHSKPLAPMELEPMYSNVNPGDSNPIYSQIWSIQHTKENSANCPMMHQEHEELTVLYSELKKTHPDDSAGEASSRGRAHEEDDEENYENILNPRKNKVQDFPCLCNT

SEQ ID NO: 5232 - protein, 734 aa, Homo Sapiens
MLLWLLLLILTPGREQSGVAPKAVLLLNPPWSTAFKGEKVALICSSISHSLAQGDTYWYHDEKLLKIKHDKIQITEPGNYQCKTRGSSLSDAVHVEFSPDWLILQALHPVFEGDNVILRCQGKDNKNTHQKVYYKDGKQLPNSYNLEKITVNSVSRDNSKYHCTAYRKFYILDIEVTSKPLNIQVQELFLHPVLRASSSTPIEGSPMTLTCETQLSPQRPDVQLQFSLFRDSQTLGLGWSRSPRLQIPAMWTEDSGSYWCEVETVTHSIKKRSLRSQIRVQRVPVSNVNLEIRPTGGQLIEGENMVLICSVAQGSGTVTFSWHKEGRVRSLGRKTQRSLLAELHVLTVKESDAGRYYCAADNVHSPILSTWIRVTVRIPVSHPVLTFRAPRAHTVVGDLLELHCESLRGSPPILYRFYHEDVTLGNSSAPSGGGASFNLSLTAEHSGNYSCDADNGLGAQHSHGVSLRVTVPVSRPVLTLRAPGAQAVVGDLLELHCESLRGSFPILYWFYHEDDTLGNISAHSGGGASFNLSLTTEHSGNYSCEADNGLGAQHSKVVTLNVTGTSRNRTGLTAAGITGLVLSILVLAAAAALLHYARARRKPGGLSATGTSSHSPSECQEPSSSRPSRIDPQEPTHSKPLAPMELEPMYSNVNPGDSNPIYSQIWSIQHTKENSANCPMMHQEHEELTVLYSELKKTHPDDSAGEASSRGRAHEEDDEENYENVPRVLLASDH

SEQ ID NO: 5233 - protein, 256 aa, Homo Sapiens
MLLWLLLLILTPGREQSGVAPKAVLLLNPPWSTAFKGEKVALICSSISHSLAQGDTYWYHDEKLLKIKHDKIQITEPGNYQCKTRGSSLSDAVHVEFSPDWLILQALHPVFEGDNVILRCQGKDNKNTHQKVYYKDGKQLPNSYNLEKITVNSVSRDNSKYHCTAYRKFYILDIEVTSKPLNIQVQELFLHPVLRASSSTPIEGSPMTLTCETQLSPQRPDVQLQFSLFRDSQTLGLGWSRSPRLQIPAMWTEDSG

SEQ ID NO: 5234 - protein, 740 aa, Homo Sapiens
MLLWLLLLILTPGREQSGVAPKAVLLLNPPWSTAFKGEKVALICSSISHSLAQGDTYWYHDEKLLKIKHDKIQITEPGNYQCKTRGSSLSDAVHVEFSPDWLILQALHPVFEGDNVILRCQGKDNKNTHQKVYYKDGKQLPNSYNLEKITVNSVSRDNSKYHCTAYRKFYILDIEVTSKPLNIQVQELFLHPVLRASSSTPIEGSPMTLTCETQLSPQRPDVQLQFSLFRDSQTLGLGWSRSPRLQIPAMWTEDSGSYWCEVETVTHSIKKRSLRSQIRVQRVPVSNVNLEIRPTGGQLIEGENMVLICSVAQGSGTVTFSWHKEGRVRSLGRKTQRSLLAELHVLTVKESDAGRYYCAADNVHSPILSTWIRVTVRTLLSPSVPVSHPVLTFRAPRAHTVVGDLLELHCESLRGSPPILYRFYHEDVTLGNSSAPSGGGASFNLSLTAEHSGNYSCDADNGLGAQHSHGVSLRVTVPVSRPVLTLRAPGAQAVVGDLLELHCESLRGSFPILYWFYHEDDTLGNISAHSGGGASFNLSLTTEHSGNYSCEADNGLGAQHSKVVTLNVTGTSRNRTGLTAAGITGLVLSILVLAAAAALLHYARARRKPGGLSATGTSSHSPSECQEPSSSRPSRIDPQEPTHSKPLAPMELEPMYSNVNPGDSNPIYSQIWSIQHTKENSANCPMMHQEHEELTVLYSELKKTHPDDSAGEASSRGRAHEEDDEENYENVPRVLLASDH

SEQ ID NO: 5235 - protein, 734 aa, Homo Sapiens; identical to SEQ ID NO: 5232

SEQ ID NO: 5236 - protein, 639 aa, Homo Sapiens
MLLWLLLLILTPGREQSGVAPKAVLLLNPPWSTAFKGEKVALICSSISHSLAQGDTYWYHDEKLLKIKHDKIQITEPGNYQCKTRGSSLSDAVHVEFSPDWLILQALHPVFEGDNVILRCQGKDNKNTHQKVYYKDGKQLPNSYNLEKITVNSVSRDNSKYHCTAYRKFYILDIEVTSKPLNIQVQGVPVSNVNLEIRPTGGQLIEGENMVLICSVAQGSGTVTFSWHKEGRVRSLGRKTQRSLLAELHVLTVKESDAGRYYCAADNVHSPILSTWIRVTVRIPVSHPVLTFRAPRAHTVVGDLLELHCESLRGSPPILYRFYHEDVTLGNSSAPSGGGASFNLSLTAEHSGNYSCDADNGLGAQHSHGVSLRVTVPVSRPVLTLRAPGAQAVVGDLLELHCESLRGSFPILYWFYHEDDTLGNISAHSGGGASFNLSLTTEHSGNYSCEADNGLGAQHSKVVTLNVTGTSRNRTGLTAAGITGLVLSILVLAAAAALLHYARARRKPGGLSATGTSSHSPSECQEPSSSRPSRIDPQEPTHSKPLAPMELEPMYSNVNPGDSNPIYSQIWSIQHTKENSANCPMMHQEHEELTVLYSELKKTHPDDSAGEASSRGRAHEEDDEENYENVPRVLLASDH

SEQ ID NO: 5237 - protein, 592 aa, Homo Sapiens
MLLWVILLVLAPVSGQFARTPRPIIFLQPPWTTVFQGERVTLTCKGFRFYSPQKTKWYHRYLGKEILRETPDNILEVQESGEYRCQAQGSPLSSPVHLDFSSASLILQAPLSVFEGDSVVLRCRAKAEVTLNNTIYKNDNVLAFLNKRTDFHIPHACLKDNGAYRCTGYKESCCPVSSNTVKIQVQEPFTRPVLRASSFQPISGNPVTLTCETQLSLERSDVPLRFRFFRDDQTLGLGWSLSPNFQITAMWSKDSGFYWCKAATMPYSVISDSPRSWIQVQIPASHPVLTLSPEKALNFEGTKVTLHCETQEDSLRTLYRFYHEGVPLRHKSVRCERGASISFSLTTENSGNYYCTADNGLGAKPSKAVSLSVTVPVSHPVLNLSSPEDLIFEGAKVTLHCEAQRGSLPILYQFHHEGAALERRSANSAGGVAISFSLTAEHSGNYYCTADNGFGPQRSKAVSLSVTVPVSHPVLTLSSAEALTFEGATVTLHCEVQRGSPQILYQFYHEDMPLWSSSTPSVGRVSFSFSLTEGHSGNYYCTADNGFGPQRSEVVSLFVTGKCWVLASHPPLAEFSLTHSFKNLFALSSFLP

SEQ ID NO: 5238 - protein, 977 aa, Homo Sapiens
MLLWVILLVLAPVSGQFARTPRPIIFLQPPWTTVFQGERVTLTCKGFRFYSPQKTKWYHRYLGKEILRETPDNILEVQESGEYRCQAQGSPLSSPVHLDFSSASLILQAPLSVFEGDSVVLRCRAKAEVTLNNTIYKNDNVLAFLNKRTDFHIPHACLKDNGAYRCTGYKESCCPVSSNTVKIQVQEPFTRPVLRASSFQPISGNPVTLTCETQLSLERSDVPLRFRFFRDDQTLGLGWSLSPNFQITAMWSKDSGFYWCKAATMPYSVISDSPRSWIQVQIPASHPVLTLSPEKALNFEGTKVTLHCETQEDSLRTLYRFYHEGVPLRHKSVRCERGASISFSLTTENSGNYYCTADNGLGAKPSKAVSLSVTVPVSHPVLNLSSPEDLIFEGAKVTLHCEAQRGSLPILYQFHHEGAALERRSANSAGGVAISFSLTAEHSGNYYCTADNGFGPQRSKAVSLSVTVPVSHPVLTLSSAEALTFEGATVTLHCEVQRGSPQILYQFYHEDMPLWSSSTPSVGRVSFSFSLTEGHSGNYYCTADNGFGPQRSEVVSLFVTVPVSRPILTLRVPRAQAVVGDLLELHCEAPRGSPPILYWFYHEDVTLGSSSAPSGGEASFNLSLTAEHSGNYSCEANNGLVAQHSDTISLSVIVPVSRPILTFRAPRAQAVVGDLLELHCEALRGSSPILYWFYHEDVTLGKISAPSGGGASFNLSLTTEHSGIYSCEADNGLEAQRSEMVTLKVAVPVSRPVLTLRAPGTHAAVGDLLELHCEALRGSPLILYRFFHEDVTLGNRSSPSGGASLNLSLTAEHSGNYSCEADNGLGAQRSETVTLYITGLTANRSGPFATGVAGGLLSIAGLAAGALLLYCWLSRKAGRKPASDPARSPSDSDSQEPTYHNVPAWEELQPVYTNANPRGENVVYSEVRIIQEKKKHAVASDPRHLRNKGSPIIYSEVKVASTPVSGSLFLASSAPHR

SEQ ID NO: 5239 - protein, 759 aa, Homo Sapiens
MLLWVILLVLAPVSGQFARTPRPIIFLQPPWTTVFQGERVTLTCKGFRFYSPQKTKWYHRYLGKEILRETPDNILEVQESGEYRCQAQGSPLSSPVHLDFSSASLILQAPLSVFEGDSVVLRCRAKAEVTLNNTIYKNDNVLAFLNKRTDFHIPHACLKDNGAYRCTGYKESCCPVSSNTVKIQVQEPFTRPVLRASSFQPISGNPVTLTCETQLSLERSDVPLRFRFFRDDQTLGLGWSLSPNFQITAMWSKDSGFYWCKAATMPYSVISDSPRSWIQVQIPASHPVLTLSPEKALNFEGTKVTLHCETQEDSLRTLYRFYHEGVPLRHKSVRCERGASISFSLTTENSGNYYCTADNGLGAKPSKAVSLSVTVPVSHPVLNLSSPEDLIFEGAKVTLHCEAQRGSLPILYQFHHEGAALERRSANSAGGVAISFSLTAEHSGNYYCTADNGFGPQRSKAVSLSVTVPVSHPVLTLSSAEALTFEGATVTLHCEVQRGSPQILYQFYHEDMPLWSSSTPSVGRVSFSFSLTEGHSGNYYCTADNGFGPQRSEVVSLFVTVPVSRPILTLRVPRAQAVVGDLLELHCEAPRGSPPILYWFYHEDVTLGSSSAPSGGEASFNLSLTAEHSGNYSCEANNGLVAQHSDTISLSVIVPVSRPILTFRAPRAQAVVGDLLELHCEALRGSSPILYWFYHEDVTLGKISAPSGGGASFNLSLTTEHSGIYSCEADNGLEAQRSEMVTLKVAGEWALPTSSTSEN

SEQ ID NO: 5240 - protein, 365 aa, Homo Sapiens
MKLGCVLMAWALYLSLGVLWVAQMLLAAGCHAAASFETLQCEGPVCTEESSCHTEDDLTDAREAGFQVKAYTFSEPFHLIVSYDWLILQGPAKPVFEGDLLVLRCQAWQDWPLTQVTFYRDGSALGPPGPNREFSITVVQKADSGHYHCSGIFQSPGPGIPETASVVAITVQELFPAPILRAVPSAEPQAGSPMTLSCQTKLPLQRSAARLLFSFYKDGRIVQSRGLSSEFQIPTASEDHSGSYWCEAATEDNQVWKQSPQLEIRVQGASSSAAPPTLNPAPQKSAAPGTAPEEAPGPLPPPPTPSSEDPGFSSPLGMPDPHLYHQMGLLLKHMQDVRVLLGHLLMELRELSGHRKPGTTKATAE

SEQ ID NO: 5241 - protein, 225 aa, Homo Sapiens
MKLGCVLMAWALYLSLGVLWVAQMLLAAGCHAELFPAPILRAVPSAEPQAGSPMTLSCQTKLPLQRSAARLLFSFYKDGRIVQSRGLSSEFQIPTASEDHSGSYWCEAATEDNQVWKQSPQLEIRVQGASSSAAPPTLNPAPQKSAAPGTAPEEAPGPLPPPPTPSSEDPGFSSPLGMPDPHLYHQMGLLLKHMQDVRVLLGHLLMELRELSGHRKPGTTKATAE

SEQ ID NO: 5242 - protein, 264 aa, Homo Sapiens
MKLGCVLMAWALYLSLGVLWVAQMLLAASFETLQCEGPVCTEESSCHTEDDLTDAREAGFQVKAYTFSEPFHLIVSYDWLILQGPAKPVFEGDLLVLRCQAWQDWPLTQVTFYRDGSALGPPGPNREFSITVVQKADSGHYHCSGIFQSPGPGIPETASVVAITVQGASSSAAPPTLNPAPQKSAAPGTAPEEAPGPLPPPPTPSSEDPGFSSPLGMPDPHLYHQMGLLLKHMQDVRVLLGHLLMELRELSGHRKPGTTKATAE

SEQ ID NO: 5243 - protein, 270 aa, Homo Sapiens
MKLGCVLMAWALYLSLGVLWVAQMLLAASFETLQCEGPVCTEESSCHTEDDLTDAREAGFQVKAYTFSEPFHLIVSYELFPAPILRAVPSAEPQAGSPMTLSCQTKLPLQRSAARLLFSFYKDGRIVQSRGLSSEFQIPTASEDHSGSYWCEAATEDNQVWKQSPQLEIRVQGASSSAAPPTLNPAPQKSAAPGTAPEEAPGPLPPPPTPSSEDPGFSSPLGMPDPHLYHQMGLLLKHMQDVRVLLGHLLMELRELSGHRKPGTTKATAE

SEQ ID NO: 5244 - protein, 382 aa, Homo Sapiens
MLKKISVGVAGDLNTVTMKLGCVLMAWALYLSLGVLWVAQMLLAAGCHAAASFETLQCEGPVCTEESSCHTEDDLTDAREAGFQVKAYTFSEPFHLIVSYDWLILQGPAKPVFEGDLLVLRCQAWQDWPLTQVTFYRDGSALGPPGPNREFSITVVQKADSGHYHCSGIFQSPGPGIPETASVVAITVQELFPAPILRAVPSAEPQAGSPMTLSCQTKLPLQRSAARLLFSFYKDGRIVQSRGLSSEFQIPTASEDHSGSYWCEAATEDNQVWKQSPQLEIRVQGASSSAAPPTLNPAPQKSAAPGTAPEEAPGPLPPPPTPSSEDPGFSSPLGMPDPHLYHQMGLLLKHMQDVRVLLGHLLMELRELSGHRKPGTTKATAE

SEQ ID NO: 5245 - protein, 242 aa, Homo Sapiens
MLKKISVGVAGDLNTVTMKLGCVLMAWALYLSLGVLWVAQMLLAAGCHAELFPAPILRAVPSAEPQAGSPMTLSCQTKLPLQRSAARLLFSFYKDGRIVQSRGLSSEFQIPTASEDHSGSYWCEAATEDNQVWKQSPQLEIRVQGASSSAAPPTLNPAPQKSAAPGTAPEEAPGPLPPPPTPSSEDPGFSSPLGMPDPHLYHQMGLLLKHMQDVRVLLGHLLMELRELSGHRKPGTTKATAE

SEQ ID NO: 5246 - protein, 376 aa, Homo Sapiens
MLKKISVGVAGDLNTVTMKLGCVLMAWALYLSLGVLWVAQMLLAASFETLQCEGPVCTEESSCHTEDDLTDAREAGFQVKAYTFSEPFHLIVSYDWLILQGPAKPVFEGDLLVLRCQAWQDWPLTQVTFYRDGSALGPPGPNREFSITVVQKADSGHYHCSGIFQSPGPGIPETASVVAITVQELFPAPILRAVPSAEPQAGSPMTLSCQTKLPLQRSAARLLFSFYKDGRIVQSRGLSSEFQIPTASEDHSGSYWCEAATEDNQVWKQSPQLEIRVQGASSSAAPPTLNPAPQKSAAPGTAPEEAPGPLPPPPTPSSEDPGFSSPLGMPDPHLYHQMGLLLKHMQDVRVLLGHLLMELRELSGHRKPGTTKATAE

SEQ ID NO: 5247 - protein, 287 aa, Homo Sapiens
MLKKISVGVAGDLNTVTMKLGCVLMAWALYLSLGVLWVAQMLLAASFETLQCEGPVCTEESSCHTEDDLTDAREAGFQVKAYTFSEPFHLIVSYELFPAPILRAVPSAEPQAGSPMTLSCQTKLPLQRSAARLLFSFYKDGRIVQSRGLSSEFQIPTASEDHSGSYWCEAATEDNQVWKQSPQLEIRVQGASSSAAPPTLNPAPQKSAAPGTAPEEAPGPLPPPPTPSSEDPGFSSPLGMPDPHLYHQMGLLLKHMQDVRVLLGHLLMELRELSGHRKPGTTKATAE

SEQ ID NO: 5248 - protein, 192 aa, Homo Sapiens
MLKKISVGVAGDLNTVTMKLGCVLMAWALYLSLGVLWVAQMLLAASFETLQCEGPVCTEESSCHTEDDLTDAREAGFQVKAYTFSEPFHLIVSYGASSSAAPPTLNPAPQKSAAPGTAPEEAPGPLPPPPTPSSEDPGFSSPLGMPDPHLYHQMGLLLKHMQDVRVLLGHLLMELRELSGHRKPGTTKATAE

SEQ ID NO: 5249 - protein, 236 aa, Homo Sapiens
MLKKISVGVAGDLNTVTMKLGCVLMAWALYLSLGVLWVAQMLLELFPAPILRAVPSAEPQAGSPMTLSCQTKLPLQRSAARLLFSFYKDGRIVQSRGLSSEFQIPTASEDHSGSYWCEAATEDNQVWKQSPQLEIRVQGASSSAAPPTLNPAPQKSAAPGTAPEEAPGPLPPPPTPSSEDPGFSSPLGMPDPHLYHQMGLLLKHMQDVRVLLGHLLMELRELSGHRKPGTTKATAE

SEQ ID NO: 5250 - protein, 141 aa, Homo Sapiens
MLKKISVGVAGDLNTVTMKLGCVLMAWALYLSLGVLWVAQMLLGASSSAAPPTLNPAPQKSAAPGTAPEEAPGPLPPPPTPSSEDPGFSSPLGMPDPHLYHQMGLLLKHMQDVRVLLGHLLMELRELSGHRKPGTTKATAE

SEQ ID NO: 5251 - protein, 152 aa, Homo Sapiens
MLLAASFETLQCEGPVCTEESSCHTEDDLTDAREAGFQVKAYTFSEPFHLIVSYGASSSAAPPTLNPAPQKSAAPGTAPEEAPGPLPPPPTPSSEDPGFSSPLGMPDPHLYHQMGLLLKHMQDVRVLLGHLLMELRELSGHRKPGTTKATAE

SEQ ID NO: 5252 - protein, 311 aa, Homo Sapiens
MWPLTALLLLATLEKPILSLHPPWTTIFKGERVTLKCDGYHPLLLELQPISTLWYLGHLLLPSHKKSIEVQTPGVYRCQTRGAPVSDPIHLSVSNDWLILQVPYAPVFEGEPLVLRCRGWYDKVVYKLHYYHDGQAVRYFHSSANYTVLQARASDSGRYQCSGTMRIPVESAPMFSAKVAVTVQAARCAASTGAPSTQSRSPRSRSSNRTGARRLPPPAVSGNAVRGCSSRGRVLPWTRPPPPPQLHGPQPWLLVIGRFPSESPRCPDRSRWSPPSGTPPPPGCSSRRAAPRLRGHPPALRRRPWNNRLEP

SEQ ID NO: 5253 - protein, 268 aa, Homo Sapiens
MWPLTALLLLATLEKPILSLHPPWTTIFKGERVTLKCDGYHPLLLELQPISTLWYLGHLLLPSHKKSIEVQTPGVYRCQTRGAPVSDPIHLSVSNDWLILQVPYAPVFEGEPLVLRCRGWYDKVVYKLHYYHDGQAVRYFHSSANYTVLQARASDSGRYQCSGTMRIPVESAPMFSAKVAVTVQEARHAAAVRVLQVQPRGAPLRLGRRVHSPGARGRGARIVLVRGGYRHPQCPETQSVAAAPGAGFSPGPGLHHRPSSMGRSLGSW

SEQ ID NO: 5254 - protein, 318 aa, Homo Sapiens
MWPLTALLLLVPSSGQAATLEKPILSLHPPWTTIFKGERVTLKCDGYHPLLLELQPISTLWYLGHLLLPSHKKSIEVQTPGVYRCQTRGAPVSDPIHLSVSNDWLILQVPYAPVFEGEPLVLRCRGWYDKVVYKLHYYHDGQAVRYFHSSANYTVLQARASDSGRYQCSGTMRIPVESAPMFSAKVAVTVQAARCAASTGAPSTQSRSPRSRSSNRTGARRLPPPAVSGNAVRGCSSRGRVLPWTRPPPPPQLHGPQPWLLVIGRFPSESPRCPDRSRWSPPSGTPPPPGCSSRRAAPRLRGHPPALRRRPWNNRLEP

SEQ ID NO: 5255 - protein, 275 aa, Homo Sapiens
MWPLTALLLLVPSSGQAATLEKPILSLHPPWTTIFKGERVTLKCDGYHPLLLELQPISTLWYLGHLLLPSHKKSIEVQTPGVYRCQTRGAPVSDPIHLSVSNDWLILQVPYAPVFEGEPLVLRCRGWYDKVVYKLHYYHDGQAVRYFHSSANYTVLQARASDSGRYQCSGTMRIPVESAPMFSAKVAVTVQEARHAAAVRVLQVQPRGAPLRLGRRVHSPGARGRGARIVLVRGGYRHPQCPETQSVAAAPGAGFSPGPGLHHRPSSMGRSLGSW

SEQ ID NO: 5256 - protein, 426 aa, Homo Sapiens
MWPLTALLLLVPSSGQAATLEKPILSLHPPWTTIFKGERVTLKCDGYHPLLLELQPISTLWYLGHLLLPSHKKSIEVQTPGVYRCQTRGAPVSDPIHLSVSNDWLILQVPYAPVFEGEPLVLRCRGWYDKVVYKLHYYHDGQAVRYFHSSANYTVLQARASDSGRYQCSGTMRIPVESAPMFSAKVAVTVQELFRAPVLRVMGPREARGAALGGVVLRCDTRLHPQKRDTPLQFAFYKYSRAVRRFDWGAEYTVPEPEVEELESYWCEAATATRSVRKRSPWLQLPGPGSPLDPASTTAPAPWAAALAPGNRPLSFRKPPVSRSVPLVTSVRNTTSTGLQFPASGAPTAGPPACAPPTPLEQSAGALKPDVDLLLREMQLLKGLLSRVVLELKEPQALRELRGTPETPTSHFAVSPGTPETTPVES

SEQ ID NO: 5257 - protein, 85 aa, Homo Sapiens
MKKVLLLITAILAVAVGFPVSQDQEREKRSISDSDELASGFFVFPYPYPFRPLPPIPFPRFPWFRRNFPIPIPESAPTTPLPSEK

SEQ ID NO: 5258 - protein, 317 aa, Homo Sapiens
MGLLLPLALCILVLCCGAMSPPQLALNPSALLSRGCNDSDVLAVAGFALRDINKDRKDGYVLRLNRVNDAQEYRRAISKKKIYMTCPDCPSSIPTDSSNHQVLEAATESLAKYNNENTSKQYSLFKVTRASSQWVVGPSYFVEYLIKESPCTKSQASSCSLQSSDSVPVGLCKGSLTRTHWEKFVSVTCDFFESQAPATGSENSAVNQKPTNLPKVEESQQKNTPPTDSPSKAGPRGSVQYLPDLDDKNSQEKGPQEAFPVHLDLTTNPQGETLDISFLFLEPMEEKLVVLPFPKEKARTAECPGPAQNASPLVLPP

SEQ ID NO: 5259 - protein, 92 aa, Homo Sapiens
MGLLLPLALCILVLCCGAMSPPQLALNPSALLSRGCNDSDVLAVAGFALRDINKDRKDGYVLRLNRVNDAQEYRRARWPGISVLSYTGCARD

SEQ ID NO: 5260 - protein, 119 aa, Homo Sapiens
MGLLLPLALCILVLCCGAMSPPQLALNPSALLSRGCNDSDVLAVAGFALRDINKDRKDGYVLRLNRVNDAQEYRRGGLGSLFYLTLDVLETDCHVLRKKAWQDCGMRIFFESFQKKRFT

SEQ ID NO: 5261 - protein, 382 aa, Homo Sapiens
MGLLLPLALCILVLCCGAMSPPQLALNPSALLSRGCNDSDVLAVAGFALRDINKDRKDGYVLRLNRVNDAQEYRRGGLGSLFYLTLDVLETDCHVLRKKAWQDCGMRIFFESVYGQCKAIFYMNNPSRVLYLAAYNCTLRPVSKKKIYMTCPDCPSSIPTDSSNHQVLEAATESLAKYNNENTSKQYSLFKVTRASSQWVVGPSYFVEYLIKESPCTKSQASSCSLQSSDSVPVGLCKGSLTRTHWEKFVSVTCDFFESQAPATGSENSAVNQKPTNLPKVEESQQKNTPPTDSPSKAGPRGSVQYLPDLDDKNSQEKGPQEAFPVHLDLTTNPQGETLDISFLFLEPMEEKLVVLPFPKEKARTAECPGPAQNASPLVLPP

SEQ ID NO: 5262 - protein, 382 aa, Homo Sapiens; identical to SEQ ID NO: 5261

SEQ ID NO: 5263 - protein, 345 aa, Homo Sapiens
MGLLLPLALCILVLCCGAMSPPQLALNPSALLSRGCNDSDVLAVAGFALRDINKDRKDGYVLRLNRVNDAQEYRRVYGQCKAIFYMNNPSRVLYLAAYNCTLRPVSKKKIYMTCPDCPSSIPTDSSNHQVLEAATESLAKYNNENTSKQYSLFKVTRASSQWVVGPSYFVEYLIKESPCTKSQASSCSLQSSDSVPVGLCKGSLTRTHWEKFVSVTCDFFESQAPATGSENSAVNQKPTNLPKVEESQQKNTPPTDSPSKAGPRGSVQYLPDLDDKNSQEKGPQEAFPVHLDLTTNPQGETLDISFLFLEPMEEKLVVLPFPKEKARTAECPGPAQNASPLVLPP

SEQ ID NO: 5264 - protein, 104 aa, Homo Sapiens
MTCPDCPSSIPTDSSNHQVLEAATESLAKYNNENTSKQYSLFKVTRASSQWVVGPSYFVEYLIKESPCTKSQASSCSLQSSDSVPVGLCKGSLTRTHWEKFVSV

SEQ ID NO: 5265 - protein, 289 aa, Homo Sapiens [sequence omitted]

SEQ ID NO: 5266 - protein, 866 aa, Homo Sapiens
MFSMRIVCLVLSVVGTAWTADSGEGDFLAEGGGVRGPRVVERHQSACKDSDWPFCSDEDWNYKCPSGCRMKGLIDEVNQDFTNRINKLKNSLFEYQKNNKDSHSLTTNIMEILRGDFSSANNRDNTYNRVSEDLRSRIEVLKRKVIEKVQHIQLLQKNVRAQLVDMKRLEVDIDIKIRSCRGSCSRALAREVDLKDYEDQQKQLEQVIAKDLLPSRDRQHLPLIKMKPVPDLVPGNFKSQLQKVPPEWKALTDMPQMRMELERPGGNEITRGGSTSYGTGSETESPRNPSSAGSWNSGSSGPGSTGNRNPGSSGTGGTATWKPGSSGPGSTGSWNSGSSGTGSTGNQNPGSPRPGSTGTWNPGSSERGSAGHWTSESSVSGSTGQWHSESGSFRPDSPGSGNARPNNPDWGTFEEVSGNVSPGTRREYHTEKLVTSKGDKELRTGKEKVTSGSTTTTRRSCSKTVTKTVIGPDGHKEVTKEVVTSEDGSDCPEAMDLGTLSGIGTLDGFRHRHPDEAAFFDTASTGKTFPGFFSPMLGEFVSETESRGSESGIFTNTKESSSHHPGIAEFPSRGKSSSYSKQFTSSTSYNRGDSTFESKSYKMADEAGSEADHEGTHSTKRGHAKSRPVRDCDDVLQTHPSGTQSGIFNIKLPGSSKIFSVYCDQETSLGGWLLIQQRMDGSLNFNRTWQDYKRGFGSLNDEGEGEFWLGNDYLHLLTQRGSVLRVELEDWAGNEAYAEYHFRVGSEAEGYALQVSSYEGTAGDALIEGSVEEGAEYTSHNNMQFSTFDRDADQWEENCAEVYGGGWWYNNCQAANLNGIYYPGGSYDPRNNSPYEIENGVVWVSFRGADYSLRAVRMKIRPLVTQ

SEQ ID NO: 5267 - protein, 644 aa, Homo Sapiens
MFSMRIVCLVLSVVGTAWTADSGEGDFLAEGGGVRGPRVVERHQSACKDSDWPFCSDEDWNYKCPSGCRMKGLIDEVNQDFTNRINKLKNSLFEYQKNNKDSHSLTTNIMEILRGDFSSANNRDNTYNRVSEDLRSRIEVLKRKVIEKVQHIQLLQKNVRAQLVDMKRLEVDIDIKIRSCRGSCSRALAREVDLKDYEDQQKQLEQVIAKDLLPSRDRQHLPLIKMKPVPDLVPGNFKSQLQKVPPEWKALTDMPQMRMELERPGGNEITRGGSTSYGTGSETESPRNPSSAGSWNSGSSGPGSTGNRNPGSSGTGGTATWKPGSSGPGSTGSWNSGSSGTGSTGNQNPGSPRPGSTGTWNPGSSERGSAGHWTSESSVSGSTGQWHSESGSFRPDSPGSGNARPNNPDWGTFEEVSGNVSPGTRREYHTEKLVTSKGDKELRTGKEKVTSGSTTTTRRSCSKTVTKTVIGPDGHKEVTKEVVTSEDGSDCPEAMDLGTLSGIGTLDGFRHRHPDEAAFFDTASTGKTFPGFFSPMLGEFVSETESRGSESGIFTNTKESSSHHPGIAEFPSRGKSSSYSKQFTSSTSYNRGDSTFESKSYKMADEAGSEADHEGTHSTKRGHAKSRPVRGIHTSPLGKPSLSP

SEQ ID NO: 5268 - protein, 272 aa, Homo Sapiens
MEYCRTPCTVSCNIPVVSGKECEEIIRKGGETSEMYLIQPDSSVKPYRVYCDMNTENGGWTVIQNRQDGSVDFGRKWDPYKQGFGNVATNTDGKNYCGLPGEYWLGNDKISQLTRMGPTELLIEMEDWKGDKVKAHYGGFTVQNEANKYQISVNKYRGTAGNALMDGASQLMGENRTMTIHNGMFFSTYDRDNDGWLTSDPRKQCSKEDGGGWWYNRCHAANPNGRYYWGGQYTWDMAKHGTDDGVVWMNWKGSWYSMRKMSMKIRPFFPQQ

SEQ ID NO: 5269 - protein, 491 aa, Homo Sapiens
MKRMVSWSFHKLKTMKHLLLLLLCVFLVKSQGVNDNEEGFFSARGHRPLDKKREEAPSLRPAPPPISGGGYRARPAKAAATQKKVERKAPDAGGCLHADPDLGVLCPTGCQLQEALLQQERPIRNSVDELNNNVEAVSQTSSSSFQYMYLLKDLWQKRQKQVKDNENVVNEYSSELEKHQLYIDETVNSNIPTNLRVLRSILENLRSKIQKLESDVSAQMEYCRTPCTVSCNIPVVSGKECEEIIRKGGETSEMYLIQPDSSVKPYRVYCDMNTENGGWTVIQNRQDGSVDFGRKWDPYKQGFGNVATNTDGKNYCGLPGEYWLGNDKISQLTRMGPTELLIEMEDWKGDKVKAHYGGFTVQNEANKYQISVNKYRGTAGNALMDGASQLMGENRTMTIHNGMFFSTYDRDNDGWLTSDPRKQCSKEDGGGWWYNRCHAANPNGRYYWGGQYTWDMAKHGTDDGVVWMNWKGSWYSMRKMSMKIRPFFPQQ

SEQ ID NO: 5270 - protein, 45 aa, Homo Sapiens
MKRMVSWSFHKLKTMKHLLLLLLCVFLVKSQGVNDNEEMRKLGHR

SEQ ID NO: 5271 - protein, 66 aa, Homo Sapiens
MWKWILTHCASAFPHLPGCCCCCFLLLFLVSSVPVTCQALGQDMVSPEATNSSSSSFSSPSSAGRH

SEQ ID NO: 5272 - protein, 208 aa, Homo Sapiens
MWKWILTHCASAFPHLPGCCCCCFLLLFLVSSVPVTCQALGQDMVSPEATNSSSSSFSSPSSAGRHVRSYNHLQGDVRWRKLFSFTKYFLKIEKNGKVSGTKKENCPYSILEITSVEIGVVAVKAINSNYYLAMNKKGKLYGSKEFNNDCKLKERIEENGYNTYASFNWQHNGRQMYVALNGKGAPRRGQKTRRKNTSAHFLPMVVHS

SEQ ID NO: 5273 - protein, 216 aa, Homo Sapiens
MGAARLLPNLTLCLQLLILCCQTQGENHPSPNFNQYVRDQGAMTDQLSRRQIREYQLYSRTSGKHVQVTGRRISATAEDGNKFAKLIVETDTFGSRVRIKGAESEKYICMNKRGKLIGKPSGKSKDCVFTEIVLENNYTAFQNARHEGWFMAFTRQGRPRQASRSRQNQREAHFIKRLYQGQLPFPNHAEKQKQFEFVGSAPTRRTKRTRRPQPLT

SEQ ID NO: 5274 - protein, 205 aa, Homo Sapiens
MGAARLLPNLTLCLQLLILCCQTQYVRDQGAMTDQLSRRQIREYQLYSRTSGKHVQVTGRRISATAEDGNKFAKLIVETDTFGSRVRIKGAESEKYICMNKRGKLIGKPSGKSKDCVFTEIVLENNYTAFQNARHEGWFMAFTRQGRPRQASRSRQNQREAHFIKRLYQGQLPFPNHAEKQKQFEFVGSAPTRRTKRTRRPQPLT

SEQ ID NO: 5275 - protein, 207 aa, Homo Sapiens
MYSAPSACTCLCLHFLLLCFQVQVLVAEENVDFRIHVENQTRARDDVSRKQLRLYQLYSRTSGKHIQVLGRRISARGEDGDKYAQLLVETDTFGSQVRIKGKETEFYLCMNRKGKLVGKPDGTSKECVFIEKVLENNYTALMSAKYSGWYVGFTKKGRPRKGPKTRENQQDVHFMKRYPKGQPELQKPFKYTTVTKRSRRIRPTHPA

SEQ ID NO: 5276 - protein, 216 aa, Homo Sapiens
MRSGCVVVHVWILAGLWLAVAGRPLAFSDAGPHVHYGWGDPIRLRHLYTSGPHGLSSCFLRIRADGVVDCARGQSAHSLLEIKAVALRTVAIKGVHSVRYLCMGADGKMQGLLQYSEEDCAFEEEIRPDGYNVYRSEKHRLPVSLSSAKQRQLYKNRGFLPLSHFLPMLPMVPEEPEDLRGHLESDMFSSPLETDSMDPFGLVTGLEAVRSPSFEK

SEQ ID NO: 5277 - protein, 209 aa, Homo Sapiens
MDSDETGFEHSGLWVSVLAGLLLGACQAHPIPDSSPLLQFGGQVRQRYLYTDDAQQTEAHLEIREDGTVGGAADQSPESLLQLKALKPGVIQILGVKTSRFLCQRPDGALYGSLHFDPEACSFRELLLEDGYNVYQSEAHGLPLHLPGNKSPHRDPAPRGPARFLPLPGLPPALPEPPGILAPQPPDVGSSDPLSMVGPSQGRSPSYAS

SEQ ID NO: 5278 - protein, 209 aa, Homo Sapiens; identical to SEQ ID NO: 5277

SEQ ID NO: 5279 - protein, 170 aa, Homo Sapiens
MRRRLWLGLAWLLLARAPDAAGTPSASRGPRSYPHLEGDVRWRRLFSSTHFFLRVDPGGRVQGTRWRHGQDSILEIRSVHVGVVVIKAVSSGFYVAMNRRGRLYGSRLYTVDCRFRERIEENGHNTYASQRWRRRGQPMFLALDRRGGPRPGGRTRRYHLSAHFLPVLVS

SEQ ID NO: 5280 - protein, 165 aa, Homo Sapiens
MRRRLWLGLAWLLLARAPDAAGTPSASRGPRSYPHLEGDVRWRRLFSSTHFFLRVDPGGRVQGTRWRHGQDSILEIRSVHVGVVVIKAVSSGFYVAMNRRGRLYGSVPGAHRRERPQHLRLTALAPPRPAHVPGAGQEGGAPARRPDAAVPPVRPLPARPGLLRP

SEQ ID NO: 5281 - protein, 251 aa, Homo Sapiens
MLGARLRLWVCALCSVCSMSVLRAYPNASPLLGSSWGGLIHLYTATARNSYHLQIHKNGHVDGAPHQTIYSALMIRSEDAGFVVITGVMSRRYLCMDFRGNIFGSHYFDPENCRFQHQTLENGYDVYHSPQYHFLVSLGRAKRAFLPGMNPPPYSQFLSRRNEIPLIHFNTPIPRRHTRSAEDDSERDPLNVLKPRARMTPAPASCSQELPSAEDNSPMASDPLGVVRGGRVNTHAGGTGPEGCRPFAKFI

SEQ ID NO: 5282 - protein, 239 aa, Homo Sapiens
MGLIWLLLLSLLEPGWPAAGPGARLRRDAGGRGGVYEHLGGAPRRRKLYCATKYHLQLHPSGRVNGSLENSAYSILEITAVEVGIVAIRGLFSGRYLAMNKRGRLYASEHYSAECEFVERIHELGYNTYASRLYRTVSSTPGARRQPSAERLWYVSVNGKGRPRRGFKTRRTQKSSLFLPRVLDHRDHEMVRQLQSGLPRPPGKGVQPRRRRQKQSPDNLEPSHVQASRLGSQLEASAH

SEQ ID NO: 5283 - protein, 206 aa, Homo Sapiens
MSGPGTAAVALLPAVLLALLAPWAGRGGAAAPTAPNGTLEAELERRWESLVALSLARLPVAAQPKEAAVQSGAGDYLLGIKRLRRLYCNVGIGFHLQALPDGRIGGAHADTRDSLLELSPVERGVVSIFGVASRFFVAMSSKGKLYGSPFFTDECTFKEILLPNNYNAYESYKYPGMFIALSKNGKTKKGNRVSPTMKVTHFLPRL

SEQ ID NO: 5284 - protein, 123 aa, Homo Sapiens
MSLSFLLLLFFSHLILSAWAHGEKRLAPKGQPGPAATDRNPRGSSSRQSSSSAMSSSSASSSPAASLGSQGSGLEQSSFQWSPSGRRTGSLYCRVGIGFHLQIYPDGKVNGSHEANMLSQVHR

SEQ ID NO: 5285 - protein, 268 aa, Homo Sapiens
MSLSFLLLLFFSHLILSAWAHGEKRLAPKGQPGPAATDRNPRGSSSRQSSSSAMSSSSASSSPAASLGSQGSGLEQSSFQWSPSGRRTGSLYCRVGIGFHLQIYPDGKVNGSHEANMLSVLEIFAVSQGIVGIRGVFSNKFLAMSKKGKLHASAKFTDDCKFRERFQENSYNTYASAIHRTEKTGREWYVALNKRGKAKRGCSPRVKPQHISTHFLPRFKQSEQPELSFTVTVPEKKKPPSPIKPKIPLSAPRKNTNSVKYRLKFRFG

SEQ ID NO: 5286 - protein, 119 aa, Homo Sapiens
NPRGSSSRQSSSSAMSSSSASSSPAASLGSQGSGLEQSSFQWSPSGRRTGSLYCRVGIGFHLQIYPDGKVNGSHEANMLSVLEIFAVSQGIVGIRGVFSNKFLAMSKKGKLHASNTLET

SEQ ID NO: 5287 - protein, 122 aa, Homo Sapiens
MEGGDIRVRRLFCRTQWYLRIDKRGKVKGTQEMKNNYNIMEIRTVAVGIVAIKGVESEFYLAMNKEGKLYAKKECNEDCNFKELILENHYNTYASAKWTHNGGEMFVALNQKGIPVRGKKTK

SEQ ID NO: 5288 - protein, 194 aa, Homo Sapiens
MHKWILTWILPTLLYRSCFHIICLVGTISLACNDMTPEQMATNVNCSSPERHTRSYDYMEGGDIRVRRLFCRTQWYLRIDKRGKVKGTQEMKNNYNIMEIRTVAVGIVAIKGVESEFYLAMNKEGKLYAKKECNEDCNFKELILENHYNTYASAKWTHNGGEMFVALNQKGIPVRGKKTKKEQKTAHFLPMAIT

SEQ ID NO: 5289 - protein, 194 aa, Homo Sapiens; identical to SEQ ID NO: 5288

SEQ ID NO: 5290 - protein, 194 aa, Homo Sapiens; identical to SEQ ID NO: 5288

SEQ ID NO: 5291 - protein, 97 aa, Homo Sapiens
MHKWILTWILPTLLYRSCFHIICLVGTISLACNDMTPEQMATNVNCSSPERHTRSYDYMEGGDIRVRRLFCRTQWYLRIDKRGKVKGTQEMKNNYSK

SEQ ID NO: 5292 - protein, 140 aa, Homo Sapiens
MAEDGDPFAKLIVETDTFGSRVRVRGAETGLYICMNKKGKLIAKSNGKGKDCVFTEIVLENNYTALQNAKYEGWYMAFTRKGRPRKGSKTRQHQREVHFMKRLPRGHHTTEQSLRFEFLNYPPFTRSLRGSQRTWAPEPR

SEQ ID NO: 5293 - protein, 233 aa, Homo Sapiens
MGSPRSALSCLLLHLLVLCLQAQEGPGRGPALGRELASLFRAGREPQGVSQQHVREQSLVTDQLSRRLIRTYQLYSRTSGKHVQVLANKRINAMAEDGDPFAKLIVETDTFGSRVRVRGAETGLYICMNKKGKLIAKSNGKGKDCVFTEIVLENNYTALQNAKYEGWYMAFTRKGRPRKGSKTRQHQREVHFMKRLPRGHHTTEQSLRFEFLNYPPFTRSLRGSQRTWAPEPR

SEQ ID NO: 5294 - protein, 244 aa, Homo Sapiens
MGSPRSALSCLLLHLLVLCLQAQEGPGRGPALGRELASLFRAGREPQGVSQQVTVQSSPNFTQHVREQSLVTDQLSRRLIRTYQLYSRTSGKHVQVLANKRINAMAEDGDPFAKLIVETDTFGSRVRVRGAETGLYICMNKKGKLIAKSNGKGKDCVFTEIVLENNYTALQNAKYEGWYMAFTRKGRPRKGSKTRQHQREVHFMKRLPRGHHTTEQSLRFEFLNYPPFTRSLRGSQRTWAPEPR

SEQ ID NO: 5295 - protein, 204 aa, Homo Sapiens
MGSPRSALSCLLLHLLVLCLQAQHVREQSLVTDQLSRRLIRTYQLYSRTSGKHVQVLANKRINAMAEDGDPFAKLIVETDTFGSRVRVRGAETGLYICMNKKGKLIAKSNGKGKDCVFTEIVLENNYTALQNAKYEGWYMAFTRKGRPRKGSKTRQHQREVHFMKRLPRGHHTTEQSLRFEFLNYPPFTRSLRGSQRTWAPEPR

SEQ ID NO: 5296 - protein, 37 aa, Homo Sapiens
MGSPRSALSCLLLHLLVLCLQAQVRRGARRRGPGAPV

SEQ ID NO: 5297 - protein, 215 aa, Homo Sapiens
MGSPRSALSCLLLHLLVLCLQAQVTVQSSPNFTQHVREQSLVTDQLSRRLIRTYQLYSRTSGKHVQVLANKRINAMAEDGDPFAKLIVETDTFGSRVRVRGAETGLYICMNKKGKLIAKSNGKGKDCVFTEIVLENNYTALQNAKYEGWYMAFTRKGRPRKGSKTRQHQREVHFMKRLPRGHHTTEQSLRFEFLNYPPFTRSLRGSQRTWAPEPR

SEQ ID NO: 5298 - protein, 234 aa, Homo Sapiens [sequence omitted]

SEQ ID NO: 5299 - protein, 223 aa, Homo Sapiens
MKFVPCLLLVTLSCLGTLGQAPRQKQGSTGEEFHFQTGGRDSCTMRPSSLGQGAGEVWLRVDCRNTDQTYWCEYRGQPSMCQAFAADPKPYWNQALQELRRLHHACQGAPVLRPSVCREAGPQAHMQQVTSSLKGSPEPNQQPEAGTPSLRPKATVKLTEATQLGKDSMEELGKAKPTTRPTAKPTQPGPRPGGNEEAKKKAWEHCWKPFQALCAFLISFFRG

SEQ ID NO: 5300 - protein, 258 aa, Homo Sapiens
MTPPKLRASLSPSLLLLLSGCLLAAARREKGAASNVAEPVPGPTGGSSGRFLSPEQHACSWQLLLPAPEAAAGSELALRCQSPDGARHQCAYRGHPERCAAYAARRAHFWKQVLGGLRKKRRPCHDPAPLQARLCAGKKGHGAELRLVPRASPPARPTVAGFAGESKPRARNRGRTRERASGPAAGTPPPQSAPPKENPSERKTNEGKRKAALVPNEERPMGTGPDPDGLDGNAELTETYCAEKWHSLCNFFVNFWNG

SEQ ID NO: 5301 - protein, 812 aa, Homo Sapiens
MAAVTRDFGEMLLHSGRVLPAEAQPWGAPVEVESFLVHPGDLLQLRCRLRDDVQSINWLRDGVQLAESNRTRITGEEVEVQDSVPADSGLYACVTSSPSGSDTTYFSVNVSDALPSSEDDDDDDDSSSEEKETDNTKPNRMPVAPYWTSPEKMEKKLHAVPAAKTVKFKCPSSGTPNPTLRWLKNGKEFKPDHRIGGYKVRYATWSIIMDSVVPSDKGNYTCIVENEYGSINHTYQLDVVERSPHRPILQAGLPANKTVALGSNVEFMCKVYSDPQPHIQWLKHIEVNGSKIGPDNLPYVQILKTAGVNTTDKEMEVLHLRNVSFEDAGEYTCLAGNSIGLSHHSAWLTVLEALEERPAVMTSPLYLEIIIYCTGAFLISCMVGSVIVYKMKSGTKKSDFHSQMAVHKLAKSIPLRRQVSADSSASMNSGVLLVRPSRLSSSGTPMLAGVSEYELPEDPRWELPRDRLVLGKPLGEGCFGQVVLAEAIGLDKDKPNRVTKVAVKMLKSDATEKDLSDLISEMEMMKMIGKHKNIINLLGACTQDGPLYVIVEYASKGNLREYLQARRPPGLEYCYNPSHNPEEQLSSKDLVSCAYQVARGMEYLASKKCIHRDLAARNVLVTEDNVMKIADFGLARDIHHIDYYKKTTNGRLPVKWMAPEALFDRIYTHQSDVWSFGVLLWEIFTLGGSPYPGVPVEELFKLLKEGHRMDKPSNCTNELYMMMRDCWHAVPSQRPTFKQLVEDLDRIVALTSNQEYLDLSMPLDQYSPSFPDTRSSTCSSGEDSVFSHEPLPEEPCLPRHPAQLANGGLKRR

SEQ ID NO: 5302 - protein, 853 aa, Homo Sapiens
MEARVSLKRRIELTVEYPWRCGALSPTSNCRTGMWSWKCLLFWAVLVTATLCTARPSPTLPEQAQPWGAPVEVESFLVHPGDLLQLRCRLRDDVQSINWLRDGVQLAESNRTRITGEEVEVQDSVPADSGLYACVTSSPSGSDTTYFSVNVSDALPSSEDDDDDDDSSSEEKETDNTKPNPVAPYWTSPEKMEKKLHAVPAAKTVKFKCPSSGTPNPTLRWLKNGKEFKPDHRIGGYKVRYATWSIIMDSVVPSDKGNYTCIVENEYGSINHTYQLDVVERSPHRPILQAGLPANKTVALGSNVEFMCKVYSDPQPHIQWLKHIEVNGSKIGPDNLPYVQILKTAGVNTTDKEMEVLHLRNVSFEDAGEYTCLAGNSIGLSHHSAWLTVLEALEERPAVMTSPLYLEIIIYCTGAFLISCMVGSVIVYKMKSGTKKSDFHSQMAVHKLAKSIPLRRQVTVSADSSASMNSGVLLVRPSRLSSSGTPMLAGVSEYELPEDPRWELPRDRLVLGKPLGEGCFGQVVLAEAIGLDKDKPNRVTKVAVKMLKSDATEKDLSDLISEMEMMKMIGKHKNIINLLGACTQDGPLYVIVEYASKGNLREYLQARRPPGLEYCYNPSHNPEEQLSSKDLVSCAYQVARGMEYLASKKCIHRDLAARNVLVTEDNVMKIADFGLARDIHHIDYYKKTTNGRLPVKWMAPEALFDRIYTHQSDVWSFGVLLWEIFTLGGSPYPGVPVEELFKLLKEGHRMDKPSNCTNELYMMMRDCWHAVPSQRPTFKQLVEDLDRIVALTSNQEYLDLSMPLDQYSPSFPDTRSSTCSSGEDSVFSHEPLPEEPCLPRHPAQLANGGLKRR

SEQ ID NO: 5303 - protein, 139 aa, Homo Sapiens
MEKKLHAVPAAKTVKFKCPSSGTPNPTLRWLKNGKEFKPDHRIGGYKVRYATWSIIMDSVVPSDKGNYTCIVENEYGSINHTYQLDVVERSPHRPILQAGLPANKTVALGSNVEFMCKVYSDPQPHIQWLKHIEVNGSK

SEQ ID NO: 5304 - protein, 61 aa, Homo Sapiens
MWSWKCLLFWAVLVTATLCTARPSPTLPEQACPDLQEAKWCSASFHSITPLPFGLGTRLSD

SEQ ID NO: 5305 - protein, 107 aa, Homo Sapiens
MWSWKCLLFWAVLVTATLCTARPSPTLPEQAQPWGAPVEVESFLVHPGDLLQLRCRLRDDVQSINWLRDGVQLAESNRTRITGEEVEVQDSVPADSGLYACVTSSPS

SEQ ID NO: 5306 - protein, 150 aa, Homo Sapiens
MWSWKCLLFWAVLVTATLCTARPSPTLPEQAQPWGAPVEVESFLVHPGDLLQLRCRLRDDVQSINWLRDGVQLAESNRTRITGEEVEVQDSVPADSGLYACVTSSPSGSDTTYFSVNVSACPDLQEAKWCSASFHSITPLPFGLGTRLSD

SEQ ID NO: 5307 - protein, 820 aa, Homo Sapiens
MWSWKCLLFWAVLVTATLCTARPSPTLPEQAQPWGAPVEVESFLVHPGDLLQLRCRLRDDVQSINWLRDGVQLAESNRTRITGEEVEVQDSVPADSGLYACVTSSPSGSDTTYFSVNVSDALPSSEDDDDDDDSSSEEKETDNTKPNPVAPYWTSPEKMEKKLHAVPAAKTVKFKCPSSGTPNPTLRWLKNGKEFKPDHRIGGYKVRYATWSIIMDSVVPSDKGNYTCIVENEYGSINHTYQLDVVERSPHRPILQAGLPANKTVALGSNVEFMCKVYSDPQPHIQWLKHIEVNGSKIGPDNLPYVQILKTAGVNTTDKEMEVLHLRNVSFEDAGEYTCLAGNSIGLSHHSAWLTVLEALEERPAVMTSPLYLEIIIYCTGAFLISCMVGSVIVYKMKSGTKKSDFHSQMAVHKLAKSIPLRRQVTVSADSSASMNSGVLLVRPSRLSSSGTPMLAGVSEYELPEDPRWELPRDRLVLGKPLGEGCFGQVVLAEAIGLDKDKPNRVTKVAVKMLKSDATEKDLSDLISEMEMMKMIGKHKNIINLLGACTQDGPLYVIVEYASKGNLREYLQARRPPGLEYCYNPSHNPEEQLSSKDLVSCAYQVARGMEYLASKKCIHRDLAARNVLVTEDNVMKIADFGLARDIHHIDYYKKTTNGRLPVKWMAPEALFDRIYTHQSDVWSFGVLLWEIFTLGGSPYPGVPVEELFKLLKEGHRMDKPSNCTNELYMMMRDCWHAVPSQRPTFKQLVEDLDRIVALTSNQEYLDLSMPLDQYSPSFPDTRSSTCSSGEDSVFSHEPLPEEPCLPRHPAQLANGGLKRR

SEQ ID NO: 5308 - protein, 820 aa, Homo Sapiens; identical to SEQ ID NO: 5307

SEQ ID NO: 5309 - protein, 820 aa, Homo Sapiens; identical to SEQ ID NO: 5307

SEQ ID NO: 5310 - protein, 822 aa, Homo Sapiens [sequence omitted]

SEQ ID NO: 5311 - protein, 298 aa, Homo Sapiens
MWSWKCLLFWAVLVTATLCTARPSPTLPEQAQPWGAPVEVESFLVHPGDLLQLRCRLRDDVQSINWLRDGVQLAESNRTRITGEEVEVQDSVPADSGLYACVTSSPSGSDTTYFSVNVSDALPSSEDDDDDDDSSSEEKETDNTKPNRMPVAPYWTSPEKMEKKLHAVPAAKTVKFKCPSSGTPNPTLRWLKNGKEFKPDHRIGGYKVRYATWSIIMDSVVPSDKGNYTCIVENEYGSINHTYQLDVVERSPHRPILQAGLPANKTVALGSNVEFMCKVYSDPQPHIQWLKHIEVNGS

SEQ ID NO: 5312 - protein, 820 aa, Homo Sapiens
MWSWKCLLFWAVLVTATLCTARPSPTLPEQAQPWGAPVEVESFLVHPGDLLQLRCRLRDDVQSINWLRDGVQLAESNRTRITGEEVEVQDSVPADSGLYACVTSSPSGSDTTYFSVNVSDALPSSEDDDDDDDSSSEEKETDNTKPNRMPVAPYWTSPEKMEKKLHAVPAAKTVKFKCPSSGTPNPTLRWLKNGKEFKPDHRIGGYKVRYATWSIIMDSVVPSDKGNYTCIVENEYGSINHTYQLDVVERSPHRPILQAGLPANKTVALGSNVEFMCKVYSDPQPHIQWLKHIEVNGSKIGPDNLPYVQILKTAGVNTTDKEMEVLHLRNVSFEDAGEYTCLAGNSIGLSHHSAWLTVLEALEERPAVMTSPLYLEIIIYCTGAFLISCMVGSVIVYKMKSGTKKSDFHSQMAVHKLAKSIPLRRQVSADSSASMNSGVLLVRPSRLSSSGTPMLAGVSEYELPEDPRWELPRDRLVLGKPLGEGCFGQVVLAEAIGLDKDKPNRVTKVAVKMLKSDATEKDLSDLISEMEMMKMIGKHKNIINLLGACTQDGPLYVIVEYASKGNLREYLQARRPPGLEYCYNPSHNPEEQLSSKDLVSCAYQVARGMEYLASKKCIHRDLAARNVLVTEDNVMKIADFGLARDIHHIDYYKKTTNGRLPVKWMAPEALFDRIYTHQSDVWSFGVLLWEIFTLGGSPYPGVPVEELFKLLKEGHRMDKPSNCTNELYMMMRDCWHAVPSQRPTFKQLVEDLDRIVALTSNQEYLDLSMPLDQYSPSFPDTRSSTCSSGEDSVFSHEPLPEEPCLPRHPAQLANGGLKRR

SEQ ID NO: 5313 - protein, 367 aa, Homo Sapiens
MWSWKCLLFWAVLVTATLCTARPSPTLPEQAQPWGAPVEVESFLVHPGDLLQLRCRLRDDVQSINWLRDGVQLAESNRTRITGEEVEVQDSVPADSGLYACVTSSPSGSDTTYFSVNVSVPIDALPSSEDDDDDDDSSSEEKETDNTKPNPVAPYWTSPEKMEKKLHAVPAAKTVKFKCPSSGTPNPTLRWLKNGKEFKPDHRIGGYKVRYATWSIIMDSVVPSDKGNYTCIVENEYGSINHTYQLDVVERSPHRPILQAGLPANKTVALGSNVEFMCKVYSDPQPHIQWLKHIEVNGSKIGPDNLPYVQILKHSGINSSDAEVLTLFNVTEAQSGEYVCKVSNYIGEANQSAWLTVTRPVAKDCWS

SEQ ID NO: 5314 - protein, 55 aa, Homo Sapiens
MWSWKCLLFWAVLVTATLCTARPSPTLPEQDALPSSEDDDDDDDSSSEEKETDNT

SEQ ID NO: 5315 - protein, 85 aa, Homo Sapiens
MWSWKCLLFWAVLVTATLCTARPSPTLPEQDALPSSEDDDDDDDSSSEEKETDNTKPNPVAPYWTSPEKMEKKLHAVPAAKTVKF

SEQ ID NO: 5316 - protein, 145 aa, Homo Sapiens
MWSWKCLLFWAVLVTATLCTARPSPTLPEQDALPSSEDDDDDDDSSSEEKETDNTKPNPVAPYWTSPEKMEKKLHAVPAAKTVKFKCPSSGTPNPTLRWLKNGKEFKPDHRIGGYKVRYATWSIIMDSVVPSDKGNYTCIVENEY

SEQ ID NO: 5317 - protein, 733 aa, Homo Sapiens
MWSWKCLLFWAVLVTATLCTARPSPTLPEQDALPSSEDDDDDDDSSSEEKETDNTKPNPVAPYWTSPEKMEKKLHAVPAAKTVKFKCPSSGTPNPTLRWLKNGKEFKPDHRIGGYKVRYATWSIIMDSVVPSDKGNYTCIVENEYGSINHTYQLDVVERSPHRPILQAGLPANKTVALGSNVEFMCKVYSDPQPHIQWLKHIEVNGSKIGPDNLPYVQILKHSGINSSDAEVLTLFNVTEAQSGEYVCKVSNYIGEANQSAWLTVTRPVAKALEERPAVMTSPLYLEIIIYCTGAFLISCMVGSVIVYKMKSGTKKSDFHSQMAVHKLAKSIPLRRQVTVSADSSASMNSGVLLVRPSRLSSSGTPMLAGVSEYELPEDPRWELPRDRLVLGKPLGEGCFGQVVLAEAIGLDKDKPNRVTKVAVKMLKSDATEKDLSDLISEMEMMKMIGKHKNIINLLGACTQDGPLYVIVEYASKGNLREYLQARRPPGLEYCYNPSHNPEEQLSSKDLVSCAYQVARGMEYLASKKCIHRDLAARNVLVTEDNVMKIADFGLARDIHHIDYYKKTTNGRLPVKWMAPEALFDRIYTHQSDVWSFGVLLWEIFTLGGSPYPGVPVEELFKLLKEGHRMDKPSNCTNELYMMMRDCWHAVPSQRPTFKQLVEDLDRIVALTSNQEYLDLSMPLDQYSPSFPDTRSSTCSSGEDSVFSHEPLPEEPCLPRHPAQLANGGLKRR

SEQ ID NO: 5318 - protein, 228 aa, Homo Sapiens
MWSWKCLLFWAVLVTATLCTARPSPTLPEQDALPSSEDDDDDDDSSSEEKETDNTKPNPVAPYWTSPEKMEKKLHAVPAAKTVKFKCPSSGTPNPTLRWLKNGKEFKPDHRIGGYKVRYATWSIIMDSVVPSDKGNYTCIVENEYGSINHTYQLDVVERSPHRPILQAGLPANKTVALGSNVEFMCKVYSDPQPHIQWLKHIEVNGSKIGPDNLPYVQILKPWKRGRQ

SEQ ID NO: 5319 - protein, 731 aa, Homo Sapiens
MWSWKCLLFWAVLVTATLCTARPSPTLPEQDALPSSEDDDDDDDSSSEEKETDNTKPNPVAPYWTSPEKMEKKLHAVPAAKTVKFKCPSSGTPNPTLRWLKNGKEFKPDHRIGGYKVRYATWSIIMDSVVPSDKGNYTCIVENEYGSINHTYQLDVVERSPHRPILQAGLPANKTVALGSNVEFMCKVYSDPQPHIQWLKHIEVNGSKIGPDNLPYVQILKTAGVNTTDKEMEVLHLRNVSFEDAGEYTCLAGNSIGLSHHSAWLTVLEALEERPAVMTSPLYLEIIIYCTGAFLISCMVGSVIVYKMKSGTKKSDFHSQMAVHKLAKSIPLRRQVTVSADSSASMNSGVLLVRPSRLSSSGTPMLAGVSEYELPEDPRWELPRDRLVLGKPLGEGCFGQVVLAEAIGLDKDKPNRVTKVAVKMLKSDATEKDLSDLISEMEMMKMIGKHKNIINLLGACTQDGPLYVIVEYASKGNLREYLQARRPPGLEYCYNPSHNPEEQLSSKDLVSCAYQVARGMEYLASKKCIHRDLAARNVLVTEDNVMKIADFGLARDIHHIDYYKKTTNGRLPVKWMAPEALFDRIYTHQSDVWSFGVLLWEIFTLGGSPYPGVPVEELFKLLKEGHRMDKPSNCTNELYMMMRDCWHAVPSQRPTFKQLVEDLDRIVALTSNQEYLDLSMPLDQYSPSFPDTRSSTCSSGEDSVFSHEPLPEEPCLPRHPAQLANGGLKRR

SEQ ID NO: 5320 - protein, 142 aa, Homo Sapiens
MWSWKCLLFWAVLVTATLCTARPSPTLPEQDALPSSEDDDDDDDSSSEEKETDNTKPNRMPVAPYWTSPEKMEKKLHAVPAAKTVKFKCPSSGTPNPTLRWLKNGKEFKPDHRIGGYKVRYATWSIIMDSVVPSDKGNYTCI

SEQ ID NO: 5321 - protein, 733 aa, Homo Sapiens
MWSWKCLLFWAVLVTATLCTARPSPTLPEQDALPSSEDDDDDDDSSSEEKETDNTKPNRMPVAPYWTSPEKMEKKLHAVPAAKTVKFKCPSSGTPNPTLRWLKNGKEFKPDHRIGGYKVRYATWSIIMDSVVPSDKGNYTCIVENEYGSINHTYQLDVVERSPHRPILQAGLPANKTVALGSNVEFMCKVYSDPQPHIQWLKHIEVNGSKIGPDNLPYVQILKTAGVNTTDKEMEVLHLRNVSFEDAGEYTCLAGNSIGLSHHSAWLTVLEALEERPAVMTSPLYLEIIIYCTGAFLISCMVGSVIVYKMKSGTKKSDFHSQMAVHKLAKSIPLRRQVTVSADSSASMNSGVLLVRPSRLSSSGTPMLAGVSEYELPEDPRWELPRDRLVLGKPLGEGCFGQVVLAEAIGLDKDKPNRVTKVAVKMLKSDATEKDLSDLISEMEMMKMIGKHKNIINLLGACTQDGPLYVIVEYASKGNLREYLQARRPPGLEYCYNPSHNPEEQLSSKDLVSCAYQVARGMEYLASKKCIHRDLAARNVLVTEDNVMKIADFGLARDIHHIDYYKKTTNGRLPVKWMAPEALFDRIYTHQSDVWSFGVLLWEIFTLGGSPYPGVPVEELFKLLKEGHRMDKPSNCTNELYMMMRDCWHAVPSQRPTFKQLVEDLDRIVALTSNQEYLDLSMPLDQYSPSFPDTRSSTCSSGEDSVFSHEPLPEEPCLPRHPAQLANGGLKRR

SEQ ID NO: 5322 - protein, 134 aa, Homo Sapiens
VSCAYQVARGMEYLASKKCIHRDLAARNVLVTEDNVMKIADFGLARDIHHIDYYKKTTNGRLPVKWMAPEALFDRIYTHQSDVWSFGVLLWEIFTLGGSPYPGVPVEELFKLLKEGHRMDKPSNCTNELPAAGT

SEQ ID NO: 5323 - protein, 371 aa, Homo Sapiens
FSSQPAVHKLTKRIPLRRQVTVSAESSSSMNSNTPLVRITTRLSSTADTPMLAGVSEYELPEDPKWEFPRDKLTLGKPLGEGCFGQVVMAEAVGIDKDKPKEAVTVAVKMLKDDATEKDLSDLVSEMEMMKMIGKHKNIINLLGACTQDGPLYVIVEYASKGNLREYLRARRPPGMEYSYDINRVPEEQMTFKDLVSCTYQLARGMEYLASQKCIHRDLAARNVLVTENNVMKIADFGLARDINNIDYYKKTTNGRLPVKWMAPEALFDRVYTHQSDVWSFGVLMWEIFTLGGSPYPGIPVEELFKLLKEGHRMDKPANCTNELNTWTSANLSNSIHLVTLTQEVLVLQEMILFFLQTPCLTNHAFLSIHT

SEQ ID NO: 5324 - protein, 593 aa, Homo Sapiens
MCLNKTKQLFGVAKRLPFWRKERSPHRPILQAGLPANASTVVGGDVEFVCKVYSDAQPHIQWIKHVEKNGSKYGPDGLPYLKVLKAAGVNTTDKEIEVLYIRNVTFEDAGEYTCLAGNSIGISFHSAWLTVLPAPGREKEITASPDYLEIAIYCIGVFLIACMVVTVILCRMKNTTKKPDFSSQPAVHKLTKRIPLRRQVTVSAESSSSMNSNTPLVRITTRLSSTADTPMLAGVSEYELPEDPKWEFPRDKLTLGKPLGEGCFGQVVMAEAVGIDKDKPKEAVTVAVKMLKDDATEKDLSDLVSEMEMMKMIGKHKNIINLLGACTQDGPLYVIVEYASKGNLREYLRARRPPGMEYSYDINRVPEEQMTFKDLVSCTYQLARGMEYLASQKCIHRDLAARNVLVTENNVMKIADFGLARDINNIDYYKKTTNGRLPVKWMAPEALFDRVYTHQSDVWSFGVLMWEIFTLGGSPYPGIPVEELFKLLKEGHRMDKPANCTNELYMMMRDCWHAVPSQRPTFKQLVEDLDRILTLTTNEEYLDLSQPLEQYSPSYPDTRSSCSSGDDSVFSPDPMPYEPCLPQYPHINGSVKT

SEQ ID NO: 5325 - protein, 669 aa, Homo Sapiens
MVSWGRFICLVVVTMATLSLARPSFSLVEDTTLEPEDAISSGDDEDDTDGAEDFVSENSNNKRAPYWTNTEKMEKRLHAVPAANTVKFRCPAGGNPMPTMRWLKNGKEFKQEHRIGGYKVRNQHWSLIMESVVPSDKGNYTCVVENEYGSINHTYHLDVVERSPHRPILQAGLPANASTVVGGDVEFVCKVYSDAQPHIQWIKHVEKNGSKYGPDGLPYLKVLKAAGVNTTDKEIEVLYIRNVTFEDAGEYTCLAGNSIGISFHSAWLTVLPAPGREKEITASPDYLEIAIYCIGVFLIACMVVTVILCRMKNTTKKPDFSSQPAVHKLTKRIPLRRQVSAESSSSMNSNTPLVRITTRLSSTADTPMLAGVSEYELPEDPKWEFPRDKLTLGKPLGEGCFGQVVMAEAVGIDKDKPKEAVTVAVKMLKDDATEKDLSDLVSEMEMMKMIGKHKNIINLLGACTQDGPLYVIVEYASKGNLREYLRARRPPGMEYSYDINRVPEEQMTFKDLVSCTYQLARGMEYLASQKCIHRDLAARNVLVTENNVMKIADFGLARDINNIDYYKKTTNGRLPVKWMAPEALFDRVYTHQSDVWSFGVLMWEIFTLGGSPYPGIPVEELFKLLKEGHRMDKPANCTNELYMMMRDCWHAVPSQRPTFKQLVEDLDRI

SEQ ID NO: 5326 - protein, 707 aa, Homo Sapiens
MVSWGRFICLVVVTMATLSLARPSFSLVEDTTLEPEDAISSGDDEDDTDGAEDFVSENSNNKRAPYWTNTEKMEKRLHAVPAANTVKFRCPAGGNPMPTMRWLKNGKEFKQEHRIGGYKVRNQHWSLIMESVVPSDKGNYTCVVENEYGSINHTYHLDVVERSPHRPILQAGLPANASTVVGGDVEFVCKVYSDAQPHIQWIKHVEKNGSKYGPDGLPYLKVLKAAGVNTTDKEIEVLYIRNVTFEDAGEYTCLAGNSIGISFHSAWLTVLPAPGREKEITASPDYLEIAIYCIGVFLIACMVVTVILCRMKNTTKKPDFSSQPAVHKLTKRIPLRRQVTVSAESSSSMNSNTPLVRITTRLSSTADTPMLAGVSEYELPEDPKWEFPRDKLTLGKPLGEGCFGQVVMAEAVGIDKDKPKEAVTVAVKMLKDDATEKDLSDLVSEMEMMKMIGKHKNIINLLGACTQDGPLYVIVEYASKGNLREYLRARRPPGMEYSYDINRVPEEQMTFKDLVSCTYQLARGMEYLASQKCIHRDLAARNVLVTENNVMKIADFGLARDINNIDYYKKTTNGRLPVKWMAPEALFDRVYTHQSDVWSFGVLMWEIFTLGGSPYPGIPVEELFKLLKEGHRMDKPANCTNELYMMMRDCWHAVPSQRPTFKQLVEDLDRILTLTTNEEEKKVSGAVDCHKPPCNPSHLPCVLAVDQ

SEQ ID NO: 5327 - protein, 732 aa, Homo Sapiens
MVSWGRFICLVVVTMATLSLARPSFSLVEDTTLEPEDAISSGDDEDDTDGAEDFVSENSNNKRAPYWTNTEKMEKRLHAVPAANTVKFRCPAGGNPMPTMRWLKNGKEFKQEHRIGGYKVRNQHWSLIMESVVPSDKGNYTCVVENEYGSINHTYHLDVVERSPHRPILQAGLPANASTVVGGDVEFVCKVYSDAQPHIQWIKHVEKNGSKYGPDGLPYLKVLKAAGVNTTDKEIEVLYIRNVTFEDAGEYTCLAGNSIGISFHSAWLTVLPAPGREKEITASPDYLEIAIYCIGVFLIACMVVTVILCRMKNTTKKPDFSSQPAVHKLTKRIPLRRQVTVSAESSSSMNSNTPLVRITTRLSSTADTPMLAGVSEYELPEDPKWEFPRDKLTLGKPLGEGCFGQVVMAEAVGIDKDKPKEAVTVAVKMLKDDATEKDLSDLVSEMEMMKMIGKHKNIINLLGACTQDGPLYVIVEYASKGNLREYLRARRPPGMEYSYDINRVPEEQMTFKDLVSCTYQLARGMEYLASQKCIHRDLAARNVLVTENNVMKIADFGLARDINNIDYYKKTTNGRLPVKWMAPEALFDRVYTHQSDVWSFGVLMWEIFTLGGSPYPGIPVEELFKLLKEGHRMDKPANCTNELYMMMRDCWHAVPSQRPTFKQLVEDLDRILTLTTNEEYLDLSQPLEQYSPSYPDTRSSCSSGDDSVFSPDPMPYEPCLPQYPHINGSVKT

SEQ ID NO: 5328 - protein, 680 aa, Homo Sapiens
MVSWGRFICLVVVTMATLSLARPSFSLVEDTTLEPEDAISSGDDEDDTDGAEDFVSENSNNKRAPYWTNTEKMEKRLHAVPAANTVKFRCPAGGNPMPTMRWLKNGKEFKQEHRIGGYKVRNQHWSLIMESVVPSDKGNYTCVVENEYGSINHTYHLDVVERSPHRPILQAGLPANASTVVGGDVEFVCKVYSDAQPHIQWIKHVEKNGSKYGPDGLPYLKVLKHSGINSSNAEVLALFNVTEADAGEYICKVSNYIGQANQSAWLTVLPKQQAPGREKEITASPDYLEIAIYCIGVFLIACMVVTVILCRMKNTTKKPDFSSQPAVHKLTKRIPLRRQVTVSAESSSSMNSNTPLVRITTRLSSTADTPMLAGVSEYELPEDPKWEFPRDKLTLGKPLGEGCFGQVVMAEAVGIDKDKPKEAVTVAVKMLKDDATEKDLSDLVSEMEMMKMIGKHKNIINLLGACTQDGPLYVIVEYASKGNLREYLRARRPPGMEYSYDINRVPEEQMTFKDLVSCTYQLARGMEYLASQKCIHRDLAARNVLVTENNVMKIADFGLARDINNIDYYKKTTNGRLPVKWMAPEALFDRVYTHQSDVWSFGVLMWEIFTLGGSPYPGIPVEELFKLLKEGHRMDKPANCTNELYMMMRDCWHAVPSQRPTFKQLVEDLDRILTLTTNEI

SEQ ID NO: 5329 - protein, 64 aa, Homo Sapiens
MVSWGRFICLVVVTMATLSLARPSFSLVEDTTLEPEDAISSGDDEDDTDGAEDFVSENSNNKSK

SEQ ID NO: 5330 - protein, 144 aa, Homo Sapiens
MVSWGRFICLVVVTMATLSLARPSFSLVEDTTLEPEEPPTKYQISQPEVYVAAPGESLEMPSHPEMMRMTPMVRKILSVRTVTTRVSNCPAPMVPERGAWREVLPVTCLLVDSSAPCCVPRPLPFPAVSTFLTFKPENKPVLLH

SEQ ID NO: 5331 - protein, 709 aa, Homo Sapiens
MVSWGRFICLVVVTMATLSLARPSFSLVEDTTLEPEEPPTKYQISQPEVYVAAPGESLEVRCLLKDAAVISWTKDGVHLGPNNRTVLIGEYLQIKGATPRDSGLYACTASRTVDSETWYFMVNVTDAISSGDDEDDTDGAEDFVSENSNNKRAPYWTNTEKMEKRLHAVPAANTVKFRCPAGGNPMPTMRWLKNGKEFKQEHRIGGYKVRNQHWSLIMESVVPSDKGNYTCVVENEYGSINHTYHLDVVAPGREKEITASPDYLEIAIYCIGVFLIACMVVTVILCRMKNTTKKPDFSSQPAVHKLTKRIPLRRQVTVSAESSSSMNSNTPLVRITTRLSSTADTPMLAGVSEYELPEDPKWEFPRDKLTLGKPLGEGCFGQVVMAEAVGIDKDKPKEAVTVAVKMLKDDATEKDLSDLVSEMEMMKMIGKHKNIINLLGACTQDGPLYVIVEYASKGNLREYLRARRPPGMEYSYDINRVPEEQMTFKDLVSCTYQLARGMEYLASQKCIHRDLAARNVLVTENNVMKIADFGLARDINNIDYYKKTTNGRLPVKWMAPEALFDRVYTHQSDVWSFGVLMWEIFTLGGSPYPGIPVEELFKLLKEGHRMDKPANCTNELYMMMRDCWHAVPSQRPTFKQLVEDLDRILTLTTNEEYLDLSQPLEQYSPSYPDTRSSCSSGDDSVFSPDPMPYEPCLPQYPHINGSVKT

SEQ ID NO: 5332 - protein, 821 aa, Homo Sapiens
MVSWGRFICLVVVTMATLSLARPSFSLVEDTTLEPEEPPTKYQISQPEVYVAAPGESLEVRCLLKDAAVISWTKDGVHLGPNNRTVLIGEYLQIKGATPRDSGLYACTASRTVDSETWYFMVNVTDAISSGDDEDDTDGAEDFVSENSNNKRAPYWTNTEKMEKRLHAVPAANTVKFRCPAGGNPMPTMRWLKNGKEFKQEHRIGGYKVRNQHWSLIMESVVPSDKGNYTCVVENEYGSINHTYHLDVVERSPHRPILQAGLPANASTVVGGDVEFVCKVYSDAQPHIQWIKHVEKNGSKYGPDGLPYLKVLKAAGVNTTDKEIEVLYIRNVTFEDAGEYTCLAGNSIGISFHSAWLTVLPAPGREKEITASPDYLEIAIYCIGVFLIACMVVTVILCRMKNTTKKPDFSSQPAVHKLTKRIPLRRQVTVSAESSSSMNSNTPLVRITTRLSSTADTPMLAGVSEYELPEDPKWEFPRDKLTLGKPLGEGCFGQVVMAEAVGIDKDKPKEAVTVAVKMLKDDATEKDLSDLVSEMEMMKMIGKHKNIINLLGACTQDGPLYVIVEYASKGNLREYLRARRPPGMEYSYDINRVPEEQMTFKDLVSCTYQLARGMEYLASQKCIHRDLAARNVLVTENNVMKIADFGLARDINNIDYYKKTTNGRLPVKWMAPEALFDRVYTHQSDVWSFGVLMWEIFTLGGSPYPGIPVEELFKLLKEGHRMDKPANCTNELYMMMRDCWHAVPSQRPTFKQLVEDLDRILTLTTNEEYLDLSQPLEQYSPSYPDTRSSCSSGDDSVFSPDPMPYEPCLPQYPHINGSVKT

SEQ ID NO: 5333 - protein, 821 aa, Homo Sapiens
MVSWGRFICLVVVTMATLSLARPSFSLVEDTTLEPEEPPTKYQISQPEVYVAAPGESLEVRCLLKDAAVISWTKDGVHLGPNNRTVLIGEYLQIKGATPRDSGLYACTASRTVDSETWYFMVNVTDAISSGDDEDDTDGAEDFVSENSNNKRAPYWTNTEKMEKRLHAVPAANTVKFRCPAGGNPMPTMRWLKNGKEFKQEHRIGGYKVRNQHWSLIMESVVPSDKGNYTCVVENEYGSINHTYHLDVVERSPHRPILQAGLPANASTVVGGDVEFVCKVYSDAQPHIQWIKHVEKNGSKYGPDGLPYLKVLKVFAAGVNTTDKEIEVLYIRNVTFEDAGEYTCLAGNSIGISFHSAWLTVLPAPGREKEITASPDYLEIAIYCIGVFLIACMVVTVILCRMKNTTKKPDFSSQPAVHKLTKRIPLRRQVSAESSSSMNSNTPLVRITTRLSSTADTPMLAGVSEYELPEDPKWEFPRDKLTLGKPLGEGCFGQVVMAEAVGIDKDKPKEAVTVAVKMLKDDATEKDLSDLVSEMEMMKMIGKHKNIINLLGACTQDGPLYVIVEYASKGNLREYLRARRPPGMEYSYDINRVPEEQMTFKDLVSCTYQLARGMEYLASQKCIHRDLAARNVLVTENNVMKIADFGLARDINNIDYYKKTTNGRLPVKWMAPEALFDRVYTHQSDVWSFGVLMWEIFTLGGSPYPGIPVEELFKLLKEGHRMDKPANCTNELYMMMRDCWHAVPSQRPTFKQLVEDLDRILTLTTNEEYLDLSQPLEQYSPSYPDTRSSCSSGDDSVFSPDPMPYEPCLPQYPHINGSVKT

SEQ ID NO: 5334 - protein, 819 aa, Homo Sapiens
MVSWGRFICLVVVTMATLSLARPSFSLVEDTTLEPEEPPTKYQISQPEVYVAAPGESLEVRCLLKDAAVISWTKDGVHLGPNNRTVLIGEYLQIKGATPRDSGLYACTASRTVDSETWYFMVNVTDAISSGDDEDDTDGAEDFVSENSNNKRAPYWTNTEKMEKRLHAVPAANTVKFRCPAGGNPMPTMRWLKNGKEFKQEHRIGGYKVRNQHWSLIMESVVPSDKGNYTCVVENEYGSINHTYHLDVVERSPHRPILQAGLPANASTVVGGDVEFVCKVYSDAQPHIQWIKHVEKNGSKYGPDGLPYLKVLKAAGVNTTDKEIEVLYIRNVTFEDAGEYTCLAGNSIGISFHSAWLTVLPAPGREKEITASPDYLEIAIYCIGVFLIACMVVTVILCRMKNTTKKPDFSSQPAVHKLTKRIPLRRQVSAESSSSMNSNTPLVRITTRLSSTADTPMLAGVSEYELPEDPKWEFPRDKLTLGKPLGEGCFGQVVMAEAVGIDKDKPKEAVTVAVKMLKDDATEKDLSDLVSEMEMMKMIGKHKNIINLLGACTQDGPLYVIVEYASKGNLREYLRARRPPGMEYSYDINRVPEEQMTFKDLVSCTYQLARGMEYLASQKCIHRDLAARNVLVTENNVMKIADFGLARDINNIDYYKKTTNGRLPVKWMAPEALFDRVYTHQSDVWSFGVLMWEIFTLGGSPYPGIPVEELFKLLKEGHRMDKPANCTNELYMMMRDCWHAVPSQRPTFKQLVEDLDRILTLTTNEEYLDLSQPLEQYSPSYPDTRSSCSSGDDSVFSPDPMPYEPCLPQYPHINGSVKT

SEQ ID NO: 5335 - protein, 768 aa, Homo Sapiens
MVSWGRFICLVVVTMATLSLARPSFSLVEDTTLEPEEPPTKYQISQPEVYVAAPGESLEVRCLLKDAAVISWTKDGVHLGPNNRTVLIGEYLQIKGATPRDSGLYACTASRTVDSETWYFMVNVTDAISSGDDEDDTDGAEDFVSENSNNKRAPYWTNTEKMEKRLHAVPAANTVKFRCPAGGNPMPTMRWLKNGKEFKQEHRIGGYKVRNQHWSLIMESVVPSDKGNYTCVVENEYGSINHTYHLDVVERSPHRPILQAGLPANASTVVGGDVEFVCKVYSDAQPHIQWIKHVEKNGSKYGPDGLPYLKVLKHSGINSSNAEVLALFNVTEADAGEYICKVSNYIGQANQSAWLTVLPKQQAPGREKEITASPDYLEIAIYCIGVFLIACMVVTVILCRMKNTTKKPDFSSQPAVHKLTKRIPLRRQVTVSAESSSSMNSNTPLVRITTRLSSTADTPMLAGVSEYELPEDPKWEFPRDKLTLGKPLGEGCFGQVVMAEAVGIDKDKPKEAVTVAVKMLKDDATEKDLSDLVSEMEMMKMIGKHKNIINLLGACTQDGPLYVIVEYASKGNLREYLRARRPPGMEYSYDINRVPEEQMTFKDLVSCTYQLARGMEYLASQKCIHRDLAARNVLVTENNVMKIADFGLARDINNIDYYKKTTNGRLPVKWMAPEALFDRVYTHQSDVWSFGVLMWEIFTLGGSPYPGIPVEELFKLLKEGHRMDKPANCTNELYMMMRDCWHAVPSQRPTFKQLVEDLDRILTLTTNE

SEQ ID NO: 5336 - protein, 769 aa, Homo Sapiens
MVSWGRFICLVVVTMATLSLARPSFSLVEDTTLEPEEPPTKYQISQPEVYVAAPGESLEVRCLLKDAAVISWTKDGVHLGPNNRTVLIGEYLQIKGATPRDSGLYACTASRTVDSETWYFMVNVTDAISSGDDEDDTDGAEDFVSENSNNKRAPYWTNTEKMEKRLHAVPAANTVKFRCPAGGNPMPTMRWLKNGKEFKQEHRIGGYKVRNQHWSLIMESVVPSDKGNYTCVVENEYGSINHTYHLDVVERSPHRPILQAGLPANASTVVGGDVEFVCKVYSDAQPHIQWIKHVEKNGSKYGPDGLPYLKVLKHSGINSSNAEVLALFNVTEADAGEYICKVSNYIGQANQSAWLTVLPKQQAPGREKEITASPDYLEIAIYCIGVFLIACMVVTVILCRMKNTTKKPDFSSQPAVHKLTKRIPLRRQVTVSAESSSSMNSNTPLVRITTRLSSTADTPMLAGVSEYELPEDPKWEFPRDKLTLGKPLGEGCFGQVVMAEAVGIDKDKPKEAVTVAVKMLKDDATEKDLSDLVSEMEMMKMIGKHKNIINLLGACTQDGPLYVIVEYASKGNLREYLRARRPPGMEYSYDINRVPEEQMTFKDLVSCTYQLARGMEYLASQKCIHRDLAARNVLVTENNVMKIADFGLARDINNIDYYKKTTNGRLPVKWMAPEALFDRVYTHQSDVWSFGVLMWEIFTLGGSPYPGIPVEELFKLLKEGHRMDKPANCTNELYMMMRDCWHAVPSQRPTFKQLVEDLDRILTLTTNEI

SEQ ID NO: 5337 - protein, 705 aa, Homo Sapiens
MVSWGRFICLVVVTMATLSLARPSFSLVEDTTLEPEEPPTKYQISQPEVYVAAPGESLEVRCLLKDAAVISWTKDGVHLGPNNRTVLIGEYLQIKGATPRDSGLYACTASRTVDSETWYFMVNVTDAISSGDDEDDTDGAEDFVSENSNNKRAPYWTNTEKMEKRLHAVPAANTVKFRCPAGGNPMPTMRWLKNGKEFKQEHRIGGYKVRNQHWSLIMESVVPSDKGNYTCVVENEYGSINHTYHLDVVERSPHRPILQAGLPANASTVVGGDVEFVCKVYSDAQPHIQWIKHVEKNGSKYGPDGLPYLKVLKVSAESSSSMNSNTPLVRITTRLSSTADTPMLAGVSEYELPEDPKWEFPRDKLTLGKPLGEGCFGQVVMAEAVGIDKDKPKEAVTVAVKMLKDDATEKDLSDLVSEMEMMKMIGKHKNIINLLGACTQDGPLYVIVEYASKGNLREYLRARRPPGMEYSYDINRVPEEQMTFKDLVSCTYQLARGMEYLASQKCIHRDLAARNVLVTENNVMKIADFGLARDINNIDYYKKTTNGRLPVKWMAPEALFDRVYTHQSDVWSFGVLMWEIFTLGGSPYPGIPVEELFKLLKEGHRMDKPANCTNELYMMMRDCWHAVPSQRPTFKQLVEDLDRILTLTTNEEYLDLSQPLEQYSPSYPDTRSSCSSGDDSVFSPDPMPYEPCLPQYPHINGSVKT

SEQ ID NO: 5338 - protein, 822 aa, Homo Sapiens
MVSWGRFICLVVVTMATLSLARPSFSLVEDTTLEPEEPPTKYQISQPEVYVAAPGESLEVRCLLKDAAVISWTKDGVHLGPNNRTVLIGEYLQIKGATPRDSGLYACTASRTVDSETWYFMVNVTDAISSGDDEDDTDGAEDFVSENSNNKRAPYWTNTEKMEKRLHAVPAANTVKFRCPAGGNPMPTMRWLKNGKEFKQEHRIGGYKVRNQHWSLIMESVVPSDKGNYTCVVENEYGSINHTYHLDVVERSPHRPILQAGLPANASTVVGGDVEFVCKVYSDAQPHIQWIKHVEKNGSKYGPDGLPYLKVLKHSGINSSNAEVLALFNVTEADAGEYICKVSNYIGQANQSAWLTVLPKQQAPGREKEITASPDYLEIAIYCIGVFLIACMVVTVILCRMKNTTKKPDFSSQPAVHKLTKRIPLRRQVTVSAESSSSMNSNTPLVRITTRLSSTADTPMLAGVSEYELPEDPKWEFPRDKLTLGKPLGEGCFGQVVMAEAVGIDKDKPKEAVTVAVKMLKDDATEKDLSDLVSEMEMMKMIGKHKNIINLLGACTQDGPLYVIVEYASKGNLREYLRARRPPGMEYSYDINRVPEEQMTFKDLVSCTYQLARGMEYLASQKCIHRDLAARNVLVTENNVMKIADFGLARDINNIDYYKKTTNGRLPVKWMAPEALFDRVYTHQSDVWSFGVLMWEIFTLGGSPYPGIPVEELFKLLKEGHRMDKPANCTNELYMMMRDCWHAVPSQRPTFKQLVEDLDRILTLTTNEEYLDLSQPLEQYSPSYPDTRSSCSSGDDSVFSPDPMPYEPCLPQYPHINGSVKT

SEQ ID NO: 5339 - protein, 254 aa, Homo Sapiens
MVSWGRFICLVVVTMATLSLARPSFSLVEDTTLEPEEPPTKYQISQPEVYVAAPGESLEVRCLLKDAAVISWTKDGVHLGPNNRTVLIGEYLQIKGATPRDSGLYACTASRTVDSETWYFMVNVTDAISSGDDEDDTDGAEDFVSENSNNKRAPYWTNTEKMEKRLHAVPAANTVKFRCPAGGNPMPTMRWLKNGKEFKQEHRIGGYKVRNQHWSLIMESVVPSDKGNYTCVVENEYGSINHTYHLDVVGSQGL

SEQ ID NO: 5340 - protein, 704 aa, Homo Sapiens
MVSWGRFICLVVVTMATLSLARPSFSLVEDTTLEPEGAPYWTNTEKMEKRLHAVPAANTVKFRCPAGGNPMPTMRWLKNGKEFKQEHRIGGYKVRNQHWSLIMESVVPSDKGNYTCVVENEYGSINHTYHLDVVERSPHRPILQAGLPANASTVVGGDVEFVCKVYSDAQPHIQWIKHVEKNGSKYGPDGLPYLKVLKAAGVNTTDKEIEVLYIRNVTFEDAGEYTCLAGNSIGISFHSAWLTVLPAPGREKEITASPDYLEIAIYCIGVFLIACMVVTVILCRMKNTTKKPDFSSQPAVHKLTKRIPLRRQVSAESSSSMNSNTPLVRITTRLSSTADTPMLAGVSEYELPEDPKWEFPRDKLTLGKPLGEGCFGQVVMAEAVGIDKDKPKEAVTVAVKMLKDDATEKDLSDLVSEMEMMKMIGKHKNIINLLGACTQDGPLYVIVEYASKGNLREYLRARRPPGMEYSYDINRVPEEQMTFKDLVSCTYQLARGMEYLASQKCIHRDLAARNVLVTENNVMKIADFGLARDINNIDYYKKTTNGRLPVKWMAPEALFDRVYTHQSDVWSFGVLMWEIFTLGGSPYPGIPVEELFKLLKEGHRMDKPANCTNELYMMMRDCWHAVPSQRPTFKQLVEDLDRILTLTTNEEYLDLSQPLEQYSPSYPDTRSSCSSGDDSVFSPDPMPYEPCLPQYPHINGSVKT

SEQ ID NO: 5341 - protein, 707 aa, Homo Sapiens
MVSWGRFICLVVVTMATLSLARPSFSLVEDTTLEPEGAPYWTNTEKMEKRLHAVPAANTVKFRCPAGGNPMPTMRWLKNGKEFKQEHRIGGYKVRNQHWSLIMESVVPSDKGNYTCVVENEYGSINHTYHLDVVERSPHRPILQAGLPANASTVVGGDVEFVCKVYSDAQPHIQWIKHVEKNGSKYGPDGLPYLKVLKHSGINSSNAEVLALFNVTEADAGEYICKVSNYIGQANQSAWLTVLPKQQAPGREKEITASPDYLEIAIYCIGVFLIACMVVTVILCRMKNTTKKPDFSSQPAVHKLTKRIPLRRQVTVSAESSSSMNSNTPLVRITTRLSSTADTPMLAGVSEYELPEDPKWEFPRDKLTLGKPLGEGCFGQVVMAEAVGIDKDKPKEAVTVAVKMLKDDATEKDLSDLVSEMEMMKMIGKHKNIINLLGACTQDGPLYVIVEYASKGNLREYLRARRPPGMEYSYDINRVPEEQMTFKDLVSCTYQLARGMEYLASQKCIHRDLAARNVLVTENNVMKIADFGLARDINNIDYYKKTTNGRLPVKWMAPEALFDRVYTHQSDVWSFGVLMWEIFTLGGSPYPGIPVEELFKLLKEGHRMDKPANCTNELYMMMRDCWHAVPSQRPTFKQLVEDLDRILTLTTNEEYLDLSQPLEQYSPSYPDTRSSCSSGDDSVFSPDPMPYEPCLPQYPHINGSVKT

SEQ ID NO: 5342 - protein, 251 aa, Homo Sapiens
MVSWGRFICLVVVTMATLSLARPSFSLVEDTTLEPEGAPYWTNTEKMEKRLHAVPAANTVKFRCPAGGNPMPTMRWLKNGKEFKQEHRIGGYKVRNQHWSLIMESVVPSDKGNYTCVVENEYGSINHTYHLDVVERSPHRPILQAGLPANASTVVGGDVEFVCKVYSDAQPHIQWIKHVEKNGSKYGPDGLPYLKVLKHSGINSSNAEVLALFNVTEADAGEYICKVSNYIGQANQSAWLTVLPKQQGRRC

SEQ ID NO: 5343 - protein, 86 aa, Homo Sapiens
  misc_feature (1)..(1): Xaa can be any naturally occurring amino acid
XPYPGIPVEELFKLLKEGHRMDKPANCTNELYMMMRDCWHAVPSQRPTFKQLVEDLDRILTLTTNEEYLDLSQPLEPYSPCYPDPR

SEQ ID NO: 5344 - protein, 136 aa, Homo Sapiens
  misc_feature (1)..(1): Xaa can be any naturally occurring amino acid
XSLARPSFSLVEDTTLEPEEPPTKYQISQPEVYVAAPGESLEVRCLLKDAAVISWTKDGVHLGPNNRTVLIGEYLQIKGATPRDSGLYACTASRTVDSETWYFMVNVTDAISSGDDEDDTDGAEDFVSENSNNKSK

SEQ ID NO: 5345 - protein, 364 aa, Homo Sapiens
MGAPACALALCVAVAIVAGASSESLGTEQRVVGRAAEVPGPEPGQQEQLVFGSGDAVELSCPPPGGGPMGPTVWVKDGTGLVPSERVLVGPQRLQVLNASHEDSGAYSCRQRLTQRVLCHFSVRVTDAPSSGDDEDGEDEAEDTGVDTGAPYWTRPERMDKKLLAVPAANTVRFRCPAAGNPTPSISWLKNGREFRGEHRIGGIKLRHQQWSLVMESVVPSDRGNYTCVVENKFGSIRQTYTLDVLERSPHRPILQAGLPANQTAVLGSDVEFHCKVYSDAQPHIQWLKHVEVNGSKVGPDGTPYVTVLKSWISESVEADVRLRLANVSERDGGEYLCRATNFIGVAEKAFWLSVHGPRADGGR

SEQ ID NO: 5346 - protein, 694 aa, Homo Sapiens
MGAPACALALCVAVAIVAGASSESLGTEQRVVGRAAEVPGPEPGQQEQLVFGSGDAVELSCPPPGGGPMGPTVWVKDGTGLVPSERVLVGPQRLQVLNASHEDSGAYSCRQRLTQRVLCHFSVRVTDAPSSGDDEDGEDEAEDTGVDTGAPYWTRPERMDKKLLAVPAANTVRFRCPAAGNPTPSISWLKNGREFRGEHRIGGIKLRHQQWSLVMESVVPSDRGNYTCVVENKFGSIRQTYTLDVLERSPHRPILQAGLPANQTAVLGSDVEFHCKVYSDAQPHIQWLKHVEVNGSKVGPDGTPYVTVLKVSLESNASMSSNTPLVRIARLSSGEGPTLANVSELELPADPKWELSRARLTLGKPLGEGCFGQVVMAEAIGIDKDRAAKPVTVAVKMLKDDATDKDLSDLVSEMEMMKMIGKHKNIINLLGACTQGGPLYVLVEYAAKGNLREFLRARRPPGLDYSFDTCKPPEEQLTFKDLVSCAYQVARGMEYLASQKCIHRDLAARNVLVTEDNVMKIADFGLARDVHNLDYYKKTTNGRLPVKWMAPEALFDRVYTHQSDVWSFGVLLWEIFTLGGSPYPGIPVEELFKLLKEGHRMDKPANCTHDLYMIMRECWHAAPSQRPTFKQLVEDLDRVLTVTSTDEYLDLSAPFEQYSPGGQDTPSSSSSGDDSVFAHDLLPPAPPSSGGSRT

SEQ ID NO: 5347 - protein, 808 aa, Homo Sapiens
MGAPACALALCVAVAIVAGASSESLGTEQRVVGRAAEVPGPEPGQQEQLVFGSGDAVELSCPPPGGGPMGPTVWVKDGTGLVPSERVLVGPQRLQVLNASHEDSGAYSCRQRLTQRVLCHFSVRVTDAPSSGDDEDGEDEAEDTGVDTGAPYWTRPERMDKKLLAVPAANTVRFRCPAAGNPTPSISWLKNGREFRGEHRIGGIKLRHQQWSLVMESVVPSDRGNYTCVVENKFGSIRQTYTLDVLERSPHRPILQAGLPANQTAVLGSDVEFHCKVYSDAQPHIQWLKHVEVNGSKVGPDGTPYVTVLKSWISESVEADVRLRLANVSERDGGEYLCRATNFIGVAEKAFWLSVHGPRAAEEELVEADEAGSVYAGILSYGVGFFLFILVVAAVTLCRLRSPPKKGLGSPTVHKISRFPLKRQVSLESNASMSSNTPLVRIARLSSGEGPTLANVSELELPADPKWELSRARLTLGKPLGEGCFGQVVMAEAIGIDKDRAAKPVTVAVKMLKDDATDKDLSDLVSEMEMMKMIGKHKNIINLLGACTQGGPLYVLVEYAAKGNLREFLRARRPPGLDYSFDTCKPPEEQLTFKDLVSCAYQVARGMEYLASQKCIHRDLAARNVLVTEDNVMKIADFGLARDVHNLDYYKKTTNGRLPVKWMAPEALFDRVYTHQSDVWSFGVLLWEIFTLGGSPYPGIPVEELFKLLKEGHRMDKPANCTHDLYMIMRECWHAAPSQRPTFKQLVEDLDRVLTVTSTDEYLDLSAPFEQYSPGGQDTPSSSSSGDDSVFAHDLLPPAPPSSGGSRT

SEQ ID NO: 5348 - protein, 806 aa, Homo Sapiens
MGAPACALALCVAVAIVAGASSESLGTEQRVVGRAAEVPGPEPGQQEQLVFGSGDAVELSCPPPGGGPMGPTVWVKDGTGLVPSERVLVGPQRLQVLNASHEDSGAYSCRQRLTQRVLCHFSVRVTDAPSSGDDEDGEDEAEDTGVDTGAPYWTRPERMDKKLLAVPAANTVRFRCPAAGNPTPSISWLKNGREFRGEHRIGGIKLRHQQWSLVMESVVPSDRGNYTCVVENKFGSIRQTYTLDVLERSPHRPILQAGLPANQTAVLGSDVEFHCKVYSDAQPHIQWLKHVEVNGSKVGPDGTPYVTVLKTAGANTTDKELEVLSLHNVTFEDAGEYTCLAGNSIGFSHHSAWLVVLPAEEELVEADEAGSVYAGILSYGVGFFLFILVVAAVTLCRLRSPPKKGLGSPTVHKISRFPLKRQVSLESNASMSSNTPLVRIARLSSGEGPTLANVSELELPADPKWELSRARLTLGKPLGEGCFGQVVMAEAIGIDKDRAAKPVTVAVKMLKDDATDKDLSDLVSEMEMMKMIGKHKNIINLLGACTQGGPLYVLVEYAAKGNLREFLRARRPPGLDYSFDTCKPPEEQLTFKDLVSCAYQVARGMEYLASQKCIHRDLAARNVLVTEDNVMKIADFGLARDVHNLDYYKKTTNGRLPVKWMAPEALFDRVYTHQSDVWSFGVLLWEIFTLGGSPYPGIPVEELFKLLKEGHRMDKPANCTHDLYMIMRECWHAAPSQRPTFKQLVEDLDRVLTVTSTDEYLDLSAPFEQYSPGGQDTPSSSSSGDDSVFAHDLLPPAPPSSGGSRT

SEQ ID NO: 5349 - protein, 694 aa, Homo Sapiens; identical to SEQ ID NO: 5346

SEQ ID NO: 5350 - protein, 792 aa, Homo Sapiens
MGAPACALALCVAVAIVAGASSESLGTEQRVVGRAAEVPGPEPGQQEQLVFGSGDAVELSCPPPGGGPMGPTVWVKDGTGLVPSERVLVGPQRLQVLNASHEDSGAYSCRQRLTQRVLCHFSVRVTDAPSSGDDEDGEDEAEDTGVDTGAPYWTRPERMDKKLLAVPAANTVRFRCPAAGNPTPSISWLKNGREFRGEHRIGGIKLRHQQWSLVMESVVPSDRGNYTCVVENKFGSIRQTYTLDVLERSPHRPILQAGLPANQTAVLGSDVEFHCKVYSDAQPHIQWLKHVEVNGSKVGPDGTPYVTVLKTAGANTTDKELEVLSLHNVTFEDAGEYTCLAGNSIGFSHHSAWLVVLPAEEELVEADEAGSVYAGILSYGVGFFLFILVVAAVTLCRLRSPPKKGLGSPTVHKISRFPLKRQQVSLESNASMSSNTPLVRIARLSSGEGPTLANVSELELPADPKWELSRARLTLGKPLGEGCFGQVVMAEAIGIDKDRAAKPVTVAVKMLKDDATDKDLSDLVSEMEMMKMIGKHKNIINLLGACTQGGPLYVLVEYAAKGNLREFLRARRPPGLDYSFDTCKPPEEQLTFKDLVSCAYQVARGMEYLASQKCIHRDLAARNVLVTEDNVMKIADFGLARDVHNLDYYKKTTNLVLWGPALGDLHAGGLPVPRHPCGGALQAAEGGPPHGQARQLHTRPVHDHAGVLACRALPEAHLQAAGGGPGPCPYRDVHRRVPGPVGAFRAVLPGWPGHPQLQLLRGRLRVCPRPAAPGPTQQWGLADVKGHWSPTM

SEQ ID NO: 5351 - protein, 364 aa, Homo Sapiens; identical to SEQ ID NO: 5345

SEQ ID NO: 5352 - protein, 112 aa, Homo Sapiens
NPTPSISWLKNGREFRGEHRIGGIKLRHQQWSLVMESVVPSDRGNYTCVVENKFGSIRQTYTLDVLERSPHRPILQAGLPANQTAVLGSDVEFHCKTAGANTTDKELEVLSL

SEQ ID NO: 5353 - protein, 72 aa, Homo Sapiens
MRLLLALLGVLLSVPGPPVLSLEASEEVELASIHLSLCLRERTGLAGRRALSWAAELVSPAWLPAWSSKSRS

SEQ ID NO: 5354 - protein, 87 aa, Homo Sapiens
MRLLLALLGVLLSVPGPPVLSLEASEEVELEPCLAPSLEQQEQELTVALGQPVRLCCGRAERGGHWYKEGSRLAPAGRVRGWRGRLE

SEQ ID NO: 5355 - protein, 108 aa, Homo Sapiens
MRLLLALLGVLLSVPGPPVLSLEASEEVELEPCLAPSLEQQEQELTVALGQPVRLCCGRAERGGHWYKEGSRLAPAGRVRGWRGRLEIASFLPEDAGRYLCLARGSMI

SEQ ID NO: 5356 - protein, 114 aa, Homo Sapiens
MRLLLALLGVLLSVPGPPVLSLEASEEVELEPCLAPSLEQQEQELTVALGQPVRLCCGRAERGGHWYKEGSRLAPAGRVRGWRGRLEIASFLPEDAGRYLCLARGSMIVLQNLT

SEQ ID NO: 5357 - protein, 201 aa, Homo Sapiens
MRLLLALLGVLLSVPGPPVLSLEASEEVELEPCLAPSLEQQEQELTVALGQPVRLCCGRAERGGHWYKEGSRLAPAGRVRGWRGRLEIASFLPEDAGRYLCLARGSMIVLQNLTLITGDSLTSSNDDEDPKSHRDPSNRHSYPQQAPYWTHPQRMEKKLHAVPAGNTVKFRCPAAGNPTPTIRWLKDGQAFHGENRIGGIR

SEQ ID NO: 5358 - protein, 802 aa, Homo Sapiens
MRLLLALLGVLLSVPGPPVLSLEASEEVELEPCLAPSLEQQEQELTVALGQPVRLCCGRAERGGHWYKEGSRLAPAGRVRGWRGRLEIASFLPEDAGRYLCLARGSMIVLQNLTLITGDSLTSSNDDEDPKSHRDPSNRHSYPQQAPYWTHPQRMEKKLHAVPAGNTVKFRCPAAGNPTPTIRWLKDGQAFHGENRIGGIRLRHQHWSLVMESVVPSDRGTYTCLVENAVGSIRYNYLLDVLERSPHRPILQAGLPANTTAVVGSDVELLCKVYSDAQPHIQWLKHIVINGSSFGADGFPYVQVLKTADINSSEVEVLYLRNVSAEDAGEYTCLAGNSIGLSYQSAWLTVLPEEDPTWTAAAPEARYTDIILYASGSLALAVLLLLAGLYRGQALHGRHPRPPATVQKLSRFPLARQFSLESGSSGKSSSSLVRGVRLSSSGPALLAGLVSLDLPLDPLWEFPRDRLVLGKPLGEGCFGQVVRAEAFGMDPARPDQASTVAVKMLKDNASDKDLADLVSEMEVMKLIGRHKNIINLLGVCTQEGPLYVIVECAAKGNLREFLRARRPPGPDLSPDGPRSSEGPLSFPVLVSCAYQVARGMQYLESRKCIHRDLAARNVLVTEDNVMKIADFGLARGVHHIDYYKKTSNGRLPVKWMAPEALFDRVYTHQSDVWSFGILLWEIFTLGGSPYPGIPVEELFSLLREGHRMDRPPHCPPELYGLMRECWHAAPSQRPTFKQLVEALDKVLLAVSEEYLDLRLTFGPYSPSGGDASSTCSSSDSVFSHDPLPLGSSSFPFGSGVQT

SEQ ID NO: 5359 - protein, 762 aa, Homo Sapiens
MRLLLALLGVLLSVPGPPVLSLEASEEVELEPCLAPSLEQQEQELTVALGQPVRLCCGRAERGGHWYKEGSRLAPAGRVRGWRGRLEIASFLPEDAGRYLCLARGSMIVLQNLTLITGDSLTSSNDDEDPKSHRDPSNRHSYPQQAPYWTHPQRMEKKLHAVPAGNTVKFRCPAAGNPTPTIRWLKDGQAFHGENRIGGIRLRHQHWSLVMESVVPSDRGTYTCLVENAVGSIRYNYLLDVLERSPHRPILQAGLPANTTAVVGSDVELLCKVYSDAQPHIQWLKHIVINGSSFGADGFPYVQVLKTADINSSEVEVLYLRNVSAEDAGEYTCLAGNSIGLSYQSAWLTVLPGTGRIPHLTCDSLTPAGRTKSPTLQFSLESGSSGKSSSSLVRGVRLSSSGPALLAGLVSLDLPLDPLWEFPRDRLVLGKPLGEGCFGQVVRAEAFGMDPARPDQASTVAVKMLKDNASDKDLADLVSEMEVMKLIGRHKNIINLLGVCTQEGPLYVIVECAAKGNLREFLRARRPPGPDLSPDGPRSSEGPLSFPVLVSCAYQVARGMQYLESRKCIHRDLAARNVLVTEDNVMKIADFGLARGVHHIDYYKKTSNGRLPVKWMAPEALFDRVYTHQSDVWSFGILLWEIFTLGGSPYPGIPVEELFSLLREGHRMDRPPHCPPELYGLMRECWHAAPSQRPTFKQLVEALDKVLLAVSEEYLDLRLTFGPYSPSGGDASSTCSSSDSVFSHDPLPLGSSSFPFGSGVQT

SEQ ID NO: 5360 - protein, 734 aa, Homo Sapiens
MRLLLALLGVLLSVPGPPVLSLEASEEVELEPCLAPSLEQQEQELTVALGQPVRLCCGRAERGGHWYKEGSRLAPAGRVRGWRGRLEIASFLPEDAGRYLCLARGSMIVLQNLTLITGDSLTSSNDDEDPKSHRDPSNRHSYPQQAPYWTHPQRMEKKLHAVPAGNTVKFRCPAAGNPTPTIRWLKDGQAFHGENRIGGIRLRHQHWSLVMESVVPSDRGTYTCLVENAVGSIRYNYLLDVLERSPHRPILQAGLPANTTAVVGSDVELLCKVYSDAQPHIQWLKHIVINGSSFGADGFPYVQVLKTADINSSEVEVLYLRNVSAEDAGEYTCLAGNSIGLSYQSAWLTVLPEEDPTWTAAAPEASSPWSQALPASQAHPWYEACVSPPAAPPCSPASLVLGKPLGEGCFGQVVRAEAFGMDPARPDQASTVAVKMLKDNASDKDLADLVSEMEVMKLIGRHKNIINLLGVCTQEGPLYVIVECAAKGNLREFLRARRPPGPDLSPDGPRSSEGPLSFPVLVSCAYQVARGMQYLESRKCIHRDLAARNVLVTEDNVMKIADFGLARGVHHIDYYKKTSNGRLPVKWMAPEALFDRVYTHQSDVWSFGILLWEIFTLGGSPYPGIPVEELFSLLREGHRMDRPPHCPPELYGLMRECWHAAPSQRPTFKQLVEALDKVLLAVSEEYLDLRLTFGPYSPSGGDASSTCSSSDSVFSHDPLPLGSSSFPFGSGVQT

SEQ ID NO: 5361 - protein, 802 aa, Homo Sapiens; identical to SEQ ID NO: 5358

SEQ ID NO: 5362 - protein, 280 aa, Homo Sapiens
  misc_feature (1)..(1): Xaa can be any naturally occurring amino acid
XRYTDIILYASGSLALAVLLLLAGLYRGQALHGRHPRPPATVQKLSRFPLARQSGSSGKSSSSLVRGVRLSSSGPALLAGLVSLDLPLDPLWEFPRDRLVLGKPLGEGCFGQVVRAEAFGMDPARPDQASTVAVKMLKDNASDKDLADLVSEMEVMKLIGRHKNIINLLGVCTQEGPLYVIVECAAKGNLREFLRARRPPGPDLSPDGPRSSEGPLSFPVLVSCAYQVARGMQYLESRKCIHRDLAARNVLVTEDNVMKIADFGLARGVHHIDYYKKTSN

SEQ ID NO: 5363 - protein, 80 aa, Homo Sapiens
MTPSPLLLLLLPPLLLGAFPPAAAARGPPKMADKVVPRQVARLGRTVRLQCPVEGDPPPLTMWTKDGRTIHSGWSRFRVL

SEQ ID NO: 5364 - protein, 152 aa, Homo Sapiens
MTPSPLLLLLLPPLLLGAFPPAAAARGPPKMADKVVPRQVARLGRTVRLQCPVEGDPPPLTMWTKDGRTIHSGWSRFRVLPQGLKVKQVEREDAGVYVCKATNGFGSLSVNYTLVVLDDISPGKESLGPDSSSGGQEDPASQQWARPRFTQP

SEQ ID NO: 5365 - protein, 504 aa, Homo Sapiens
MTPSPLLLLLLPPLLLGAFPPAAAARGPPKMADKVVPRQVARLGRTVRLQCPVEGDPPPLTMWTKDGRTIHSGWSRFRVLPQGLKVKQVEREDAGVYVCKATNGFGSLSVNYTLVVLDDISPGKESLGPDSSSGGQEDPASQQWARPRFTQPSKMRRRVIARPVGSSVRLKCVASGHPRPDITWMKDDQALTRPEAAEPRKKKWTLSLKNLRPEDSGKYTCRVSNRAGAINATYKVDVIQRTRSKPVLTGTHPVNTTVDFGGTTSFQCKVRSDVKPVIQWLKRVEYGAEGRHNSTIDVGGQKFVVLPTGDVWSRPDGSYLNKLLITRARQDDAGMYICLGANTMGYSFRSAFLTVLPDPKPPGPPVASSSSATSLPWPVVIGIPAGAVFILGTLLLWLCQAQKKPCTPAPAPPLPGHRPPGTARDRSGDKDLPSLAALSAGPGVGLCEEHGSPAAPQHLLGPGPVAGPKLYPKLYTDIHTHTHTHSHTHSHVEGKVHQHIHYQC

SEQ ID NO: 5366 - protein, 504 aa, Homo Sapiens; identical to SEQ ID NO: 5365

SEQ ID NO: 5367 - protein, 504 aa, Homo Sapiens; identical to SEQ ID NO: 5365

SEQ ID NO: 5368 - protein, 504 aa, Homo Sapiens; identical to SEQ ID NO: 5365

SEQ ID NO: 5369 - protein, 119 aa, Homo Sapiens
MIDAATLKSRKMLEEIMKYEASILTHDSSIRYLQEIYNSNNQKIVNLKEKVAQLEAQCQEPCKDTVQIHDITGKDCQDIANKGAKQSGLYFIKPLKANQQFLVYCEIDGSGNGWTVFQK

SEQ ID NO: 5370 - protein, 123 aa, Homo Sapiens
MIDAATLKSRKMLEEIMKYEASILTHDSSIRYLQEIYNSNNQKIVNLKEKVAQLEAQCQEPCKDTVQIHDITGKDCQDIANKGAKQSGLYFIKPLKANQQFLVYCEIDGSGNGWTVFQKRLDG

SEQ ID NO: 5371 - protein, 453 aa, Homo Sapiens
MSWSLHPRNLILYFYALLFLSSTCVAYVATRDNCCILDERFGSYCPTTCGIADFLSTYQTKVDKDLQSLEDILHQVENKTSEVKQLIKAIQLTYNPDESSKPNMIDAATLKSRKMLEEIMKYEASILTHDSSIRYLQEIYNSNNQKIVNLKEKVAQLEAQCQEPCKDTVQIHDITGKDCQDIANKGAKQSGLYFIKPLKANQQFLVYCEIDGSGNGWTVFQKRLDGSVDFKKNWIQYKEGFGHLSPTGTTEFWLGNEKIHLISTQSAIPYALRVELEDWNGRTSTADYAMFKVGPEADKYRLTYAYFAGGDAGDAFDGFDFGDDPSDKFFTSHNGMQFSTWDNDNDKFEGNCAEQDGSGWWMNKCHAGHLNGVYYQGGTYSKASTPNGYDNGIIWATWKTRWYSMKKTTMKIIPFNRLTIGEGQQHHLGGAKQVRPEHPAETEYDSLYPEDDL

SEQ ID NO: 5372 - protein, 437 aa, Homo Sapiens
MSWSLHPRNLILYFYALLFLSSTCVAYVATRDNCCILDERFGSYCPTTCGIADFLSTYQTKVDKDLQSLEDILHQVENKTSEVKQLIKAIQLTYNPDESSKPNMIDAATLKSRKMLEEIMKYEASILTHDSSIRYLQEIYNSNNQKIVNLKEKVAQLEAQCQEPCKDTVQIHDITGKDCQDIANKGAKQSGLYFIKPLKANQQFLVYCEIDGSGNGWTVFQKRLDGSVDFKKNWIQYKEGFGHLSPTGTTEFWLGNEKIHLISTQSAIPYALRVELEDWNGRTSTADYAMFKVGPEADKYRLTYAYFAGGDAGDAFDGFDFGDDPSDKFFTSHNGMQFSTWDNDNDKFEGNCAEQDGSGWWMNKCHAGHLNGVYYQGGTYSKASTPNGYDNGIIWATWKTRWYSMKKTTMKIIPFNRLTIGEGQQHHLGGAKQAGDV

SEQ ID NO: 5373 - protein, 461 aa, Homo Sapiens
MSWSLHPRNLILYFYALLFLSSTCVAYVATRDNCCILDERFGSYCPTTCGIADFLSTYQTKVDKDLQSLEDILHQVENKTSEVKQLIKAIQLTYNPDESSKPNMIDAATLKSRKMLEEIMKYEASILTHDSSIRYLQEIYNSNNQKIVNLKEKVAQLEAQCQEPCKDTVQIHDITGKVKVDSPSLDCQDIANKGAKQSGLYFIKPLKANQQFLVYCEIDGSGNGWTVFQKRLDGSVDFKKNWIQYKEGFGHLSPTGTTEFWLGNEKIHLISTQSAIPYALRVELEDWNGRTSTADYAMFKVGPEADKYRLTYAYFAGGDAGDAFDGFDFGDDPSDKFFTSHNGMQFSTWDNDNDKFEGNCAEQDGSGWWMNKCHAGHLNGVYYQGGTYSKASTPNGYDNGIIWATWKTRWYSMKKTTMKIIPFNRLTIGEGQQHHLGGAKQVRPEHPAETEYDSLYPEDDL

SEQ ID NO: 5374 - protein, 445 aa, Homo Sapiens
MSWSLHPRNLILYFYALLFLSSTCVAYVATRDNCCILDERFGSYCPTTCGIADFLSTYQTKVDKDLQSLEDILHQVENKTSEVKQLIKAIQLTYNPDESSKPNMIDAATLKSRKMLEEIMKYEASILTHDSSIRYLQEIYNSNNQKIVNLKEKVAQLEAQCQEPCKDTVQIHDITGKVKVDSPSLDCQDIANKGAKQSGLYFIKPLKANQQFLVYCEIDGSGNGWTVFQKRLDGSVDFKKNWIQYKEGFGHLSPTGTTEFWLGNEKIHLISTQSAIPYALRVELEDWNGRTSTADYAMFKVGPEADKYRLTYAYFAGGDAGDAFDGFDFGDDPSDKFFTSHNGMQFSTWDNDNDKFEGNCAEQDGSGWWMNKCHAGHLNGVYYQGGTYSKASTPNGYDNGIIWATWKTRWYSMKKTTMKIIPFNRLTIGEGQQHHLGGAKQAGDV

SEQ ID NO: 5375 - protein, 312 aa, Homo Sapiens
MAKVFSFILVTTALTMGREISALEDCAQEQMRLRAQVRLLETRVKQQQVKIKQLLQENEVQFLDKGDENTVIDLGSKRQYADCSEIFNDGYKLSGFYKIKPLQSPAEFSVYCDMSDGGGWTVIQRRSDGSENFNRGWKDYENGFGNFVQKHGEYWLGNKNLHFLTTQEDYTLKIDLADFEKNSRYAQYKNFKVGDEKNFYELNIGEYSGTAGDSLAGNFHPEVQWWASHQRMKFSTWDRDHDNYEGNCAEEDQSGWWFNRCHSANLNGVYYSGPYTAKTDNGIVWYTWHGWWYSLKSVVMKIRPNDFIPNVI

SEQ ID NO: 5376 - protein, 312 aa, Homo Sapiens; identical to SEQ ID NO: 5375

SEQ ID NO: 5377 - protein, 312 aa, Homo Sapiens; identical to SEQ ID NO: 5375

SEQ ID NO: 5378 - protein, 312 aa, Homo Sapiens; identical to SEQ ID NO: 5375

SEQ ID NO: 5379 - protein, 312 aa, Homo Sapiens; identical to SEQ ID NO: 5375

SEQ ID NO: 5380 - protein, 312 aa, Homo Sapiens; identical to SEQ ID NO: 5375

SEQ ID NO: 5381 - protein, 312 aa, Homo Sapiens; identical to SEQ ID NO: 5375

SEQ ID NO: 5382 - protein, 225 aa, Homo Sapiens
MKLANWYWLSSAVLATYGFLVVANNETEEIKDERAKDVCPVRLESRGKCEEAGECPYQVSLPPLTIQLPKQFSRIEEVFKEVQNLKEIVNSLKKSCQDCKLQADDNGDPGRNGLLLPSTGAPGEVGDNRVRELESEVNKLSSELKNAKEEINVLHGRLEKLNLVNMNNIENYVDSKVANLTFVVNSLDGKCSKCPSQEQIQSRPGMYNNVFLSYVHKCYTAREYL

SEQ ID NO: 5383 - protein, 439 aa, Homo Sapiens
MKLANWYWLSSAVLATYGFLVVANNETEEIKDERAKDVCPVRLESRGKCEEAGECPYQVSLPPLTIQLPKQFSRIEEVFKEVQNLKEIVNSLKKSCQDCKLQADDNGDPGRNGLLLPSTGAPGEVGDNRVRELESEVNKLSSELKNAKEEINVLHGRLEKLNLVNMNNIENYVDSKVANLTFVVNSLDGKCSKCPSQEQIQSRPVQHLIYKDCSDYYAIGKRSSETYRVTPDPKNSSFEVYCDMETMGGGWTVLQARLDGSTNFTRTWQDYKAGFGNLRREFWLGNDKIHLLTKSKEMILRIDLEDFNGVELYALYDQFYVANEFLKYRLHVGNYNGTAGDALRFNKHYNHDLKFFTTPDKDNDRYPSGNCGLYYSSGWWFDACLSANLNGKYYHQKYRGVRNGIFWGTWPGVSEAHPGGYKSSFKEAKMMIRPKHFKP

SEQ ID NO: 5384 - protein, 18 aa, Homo Sapiens
MAEKFDCHYCRDPLQGKK

SEQ ID NO: 5385 - protein, 66 aa, Homo Sapiens
MAEKFDCHYCRDPLQGKKYVQKDGHHCCLKCFDKFCANTCVECRKPIGADSKEVHYKNRFWHDTCF

SEQ ID NO: 5386 - protein, 78 aa, Homo Sapiens
MAEKFDCHYCRDPLQGKKYVQKDGHHCCLKCFDKFCANTCVECRKPIGADSKEVHYKNRFWHDTCFRCAKCLHPLANE

SEQ ID NO: 5387 - protein, 130 aa, Homo Sapiens
MAEKFDCHYCRDPLQGKKYVQKDGHHCCLKCFDKFCANTCVECRKPIGADSKEVHYKNRFWHDTCFRCAKCLHPLANETFVAKDNKILCNKCTTREDSPKCKGCFKAIVAGDQNVEYKGTVWHKDCFTCS

SEQ ID NO: 5388 - protein, 138 aa, Homo Sapiens
MAEKFDCHYCRDPLQGKKYVQKDGHHCCLKCFDKFCANTCVECRKPIGADSKEVHYKNRFWHDTCFRCAKCLHPLANETFVAKDNKILCNKCTTREDSPKCKGCFKAIVAGDQNVEYKGTVWHKDCFTCSNCKQVIGT

SEQ ID NO: 5389 - protein, 141 aa, Homo Sapiens
MAEKFDCHYCRDPLQGKKYVQKDGHHCCLKCFDKFCANTCVECRKPIGADSKEVHYKNRFWHDTCFRCAKCLHPLANETFVAKDNKILCNKCTTREDSPKCKGCFKAIVAGDQNVEYKGTVWHKDCFTCSNCKQVIGTGSF

SEQ ID NO: 5390 - protein, 147 aa, Homo Sapiens
MAEKFDCHYCRDPLQGKKYVQKDGHHCCLKCFDKFCANTCVECRKPIGADSKEVHYKNRFWHDTCFRCAKCLHPLANETFVAKDNKILCNKCTTREDSPKCKGCFKAIVAGDQNVEYKGTVWHKDCFTCSNCKQVIGTGSFFPKGED

SEQ ID NO: 5391 - protein, 152 aa, Homo Sapiens
MAEKFDCHYCRDPLQGKKYVQKDGHHCCLKCFDKFCANTCVECRKPIGADSKEVHYKNRFWHDTCFRCAKCLHPLANETFVAKDNKILCNKCTTREDSPKCKGCFKAIVAGDQNVEYKGTVWHKDCFTCSNCKQVIGTGSFFPKGEDFYCVT

SEQ ID NO: 5392 - protein, 155 aa, Homo Sapiens
MAEKFDCHYCRDPLQGKKYVQKDGHHCCLKCFDKFCANTCVECRKPIGADSKEVHYKNRFWHDTCFRCAKCLHPLANETFVAKDNKILCNKCTTREDSPKCKGCFKAIVAGDQNVEYKGTVWHKDCFTCSNCKQVIGTGSFFPKGEDFYCVTCHE

SEQ ID NO: 5393 - protein, 175 aa, Homo Sapiens
MAEKFDCHYCRDPLQGKKYVQKDGHHCCLKCFDKFCANTCVECRKPIGADSKEVHYKNRFWHDTCFRCAKCLHPLANETFVAKDNKILCNKCTTREDSPKCKGCFKAIVAGDQNVEYKGTVWHKDCFTCSNCKQVIGTGSFFPKGEDFYCVTCHETKFAKHCVKCNKAITSGGIT

SEQ ID NO: 5394 - protein, 204 aa, Homo Sapiens
MAEKFDCHYCRDPLQGKKYVQKDGHHCCLKCFDKFCANTCVECRKPIGADSKEVHYKNRFWHDTCFRCAKCLHPLANETFVAKDNKILCNKCTTREDSPKCKGCFKAIVAGDQNVEYKGTVWHKDCFTCSNCKQVIGTGSFFPKGEDFYCVTCHETKFAKHCVKCNKAITSGGITYQDQPWHADCFVCVTCSKKLAGQRFTAVE

SEQ ID NO: 5395 - protein, 205 aa, Homo Sapiens
MAEKFDCHYCRDPLQGKKYVQKDGHHCCLKCFDKFCANTCVECRKPIGADSKEVHYKNRFWHDTCFRCAKCLHPLANETFVAKDNKILCNKCTTREDSPKCKGCFKAIVAGDQNVEYKGTVWHKDCFTCSNCKQVIGTGSFFPKGEDFYCVTCHETKFAKHCVKCNKAITSGGITYQDQPWHADCFVCVTCSKKLAGQRFTAVED

SEQ ID NO: 5396 - protein, 207 aa, Homo Sapiens
MAEKFDCHYCRDPLQGKKYVQKDGHHCCLKCFDKFCANTCVECRKPIGADSKEVHYKNRFWHDTCFRCAKCLHPLANETFVAKDNKILCNKCTTREDSPKCKGCFKAIVAGDQNVEYKGTVWHKDCFTCSNCKQVIGTGSFFPKGEDFYCVTCHETKFAKHCVKCNKAITSGGITYQDQPWHADCFVCVTCSKKLAGQRFTAVEDQY

SEQ ID NO: 5397 - protein, 207 aa, Homo Sapiens; identical to SEQ ID NO: 5396

SEQ ID NO: 5398 - protein, 280 aa, Homo Sapiens
MAEKFDCHYCRDPLQGKKYVQKDGHHCCLKCFDKFCANTCVECRKPIGADSKEVHYKNRFWHDTCFRCAKCLHPLANETFVAKDNKILCNKCTTREDSPKCKGCFKAIVAGDQNVEYKGTVWHKDCFTCSNCKQVIGTGSFFPKGEDFYCVTCHETKFAKHCVKCNKAITSGGITYQDQPWHADCFVCVTCSKKLAGQRFTAVEDQYYCVDCYKNFVAKKCAGCKNPITGFGKGSSVVAYEGQSWHDYCFHCKKCSVNLANKRFVFHQEQVYCPDCAKKL

SEQ ID NO: 5399 - protein, 280 aa, Homo Sapiens; identical to SEQ ID NO: 5398

SEQ ID NO: 5400 - protein, 257 aa, Homo Sapiens
MAEKFDCHYCRDPLQGKKYVQKDGHHCCLKCFDKFCANTCVECRKPIGADSKEVHYKNRFWHDTCFRCAKCLHPLANETFVAKDNKILCNKCTTREDSPKCKGCFKAIVAGDQNVEYKGTVWHKDCFTCSNCKQVIGTGSFFPKGEDFYCVTCHETKFAKHCVKCNKAITSGGITYQDQPWHADCFVCVTCSKKLAGQRFTAVEDQYYCVDCYKNFVAKKCAGCKNPITGFGKGSSVVAYEGQSWHDYCFHCKKCSV

SEQ ID NO: 5401 - protein, 280 aa, Homo Sapiens; identical to SEQ ID NO: 5398

SEQ ID NO: 5402 - protein, 280 aa, Homo Sapiens; identical to SEQ ID NO: 5398

SEQ ID NO: 5403 - protein, 280 aa, Homo Sapiens; identical to SEQ ID NO: 5398

SEQ ID NO: 5404 - protein, 280 aa, Homo Sapiens; identical to SEQ ID NO: 5398

SEQ ID NO: 5405 - protein, 280 aa, Homo Sapiens; identical to SEQ ID NO: 5398

SEQ ID NO: 5406 - protein, 323 aa, Homo Sapiens
MAEKFDCHYCRDPLQGKKYVQKDGHHCCLKCFDKFCANTCVECRKPIGADSKEVHYKNRFWHDTCFRCAKCLHPLANETFVAKDNKILCNKCTTREDSPKCKGCFKAIVAGDQNVEYKGTVWHKDCFTCSNCKQVIGTGSFFPKGEDFYCVTCHETKFAKHCVKCNKAITSGGITYQDQPWHADCFVCVTCSKKLAGQRFTAVEDQYYCVDCYKNFVAKKCAGCKNPITGKRTVSRVSHPVSKARKPPVCHGKRLPLTLFPSANLRGRHPGGERTCPSWVVVLYRKNRSLAAPRGPGLVKAPVWWPMKDNPGTTTASTAKNAP

SEQ ID NO: 5407 - protein, 323 aa, Homo Sapiens; identical to SEQ ID NO: 5406

SEQ ID NO: 5408 - protein, 194 aa, Homo Sapiens
MAEKFDCHYCRDPLQGKKYVQKDGHHCCLKCFDKFCANTCVECRKPIGADSKEVHYKNRFWHDTCFRCAKCLHPLANETFVAKDNKILCNKCTTREDSPKCKGCFKAIVAGDQNVEYKGTVWHKDCFTCSNCKQVIGTGSFFPKGEDFYCVTCHETKFAKHCVKCNKGLVKAPVWWPMKDNPGTTTASTAKNAP

SEQ ID NO: 5409 - protein, 296 aa, Homo Sapiens
MASHRHSGPSSYKVGTMAEKFDCHYCRDPLQGKKYVQKDGHHCCLKCFDKFCANTCVECRKPIGADSKEVHYKNRFWHDTCFRCAKCLHPLANETFVAKDNKILCNKCTTREDSPKCKGCFKAIVAGDQNVEYKGTVWHKDCFTCSNCKQVIGTGSFFPKGEDFYCVTCHETKFAKHCVKCNKAITSGGITYQDQPWHADCFVCVTCSKKLAGQRFTAVEDQYYCVDCYKNFVAKKCAGCKNPITGFGKGSSVVAYEGQSWHDYCFHCKKCSVNLANKRFVFHQEQVYCPDCAKKL

SEQ ID NO: 5410 - protein, 210 aa, Homo Sapiens
MASHRHSGPSSYKVGTMAEKFDCHYCRDPLQGKKYVQKDGHHCCLKCFDKFCANTCVECRKPIGADSKEVHYKNRFWHDTCFRCAKCLHPLANETFVAKDNKILCNKCTTREDSPKCKGCFKAIVAGDQNVEYKGTVWHKDCFTCSNCKQVIGTGSFFPKGEDFYCVTCHETKFAKHCVKCNKGLVKAPVWWPMKDNPGTTTASTAKNAP

SEQ ID NO: 5411 - protein, 309 aa, Homo Sapiens
MTFYVASLALELIWMLSSPAGPSSYKVGTMAEKFDCHYCRDPLQGKKYVQKDGHHCCLKCFDKFCANTCVECRKPIGADSKEVHYKNRFWHDTCFRCAKCLHPLANETFVAKDNKILCNKCTTREDSPKCKGCFKAIVAGDQNVEYKGTVWHKDCFTCSNCKQVIGTGSFFPKGEDFYCVTCHETKFAKHCVKCNKAITSGGITYQDQPWHADCFVCVTCSKKLAGQRFTAVEDQYYCVDCYKNFVAKKCAGCKNPITGFGKGSSVVAYEGQSWHDYCFHCKKCSVNLANKRFVFHQEQVYCPDCAKKL

SEQ ID NO: 5412 - protein, 635 aa, Homo Sapiens
MAMRPRSHPPVGAGTGGGPACVPVAEASTGAWTAEGAAGTRCRASRAPCRPPPVPAPSQLPASSPTKCEICVKNTAILAITLITPQDPHLDPVPRGQPTFTKKKKTIRLFWNEVRPFDWPCKNNRRCREFLWSKLEPIKVDTSRLEHLFESKSKELSVSKKTAADGKRQEIIVLDSKRSNAINIGLTVLPPPRTIKIAILNFDEYALNKEGIEKILTMIPTDEEKQKIQEAQLANPEIPLGSAEQFLLTLSSISELSARLHLWAFKMDYETTEKEVAEPLLDLKEGIDQLENNKTLGFILSTLLAIGNFLNGTNAKAFELSYLEKVPEVKDTVHKQSLLHHVCTMVVENFPDSSDLYSEIGAITRSAKVDFDQLQDNLCQMERRCKASWDHLKAIAKHEMKPVLKQRMSEFLKDCAERIIILKIVHRRIINRFHSFLLFMGHPPYAIREVNINKFCRIISEFALEYRTTRERVLQQKQKRANHRERNKTRGKMITDSGKFSGSSPAPPSQPQGLSYAEDAAEHENMKAVLKTSSPSVEDATPALGVRTRSRASRGSTSSWTMGTDDSPNVTDDAADEIMDRIVKSATQVPSQRVVPRERKRSRANRKSLRRTLKSGLTPEEARALGLVGTSELQL

SEQ ID NO: 5413 - protein, 1439 aa, Homo Sapiens
MATLACRVQFLDDTDPFNSTNFPEPSRPPLFTFREDLALGTQLAGVHRLLQAPHKLDDCTLQLSHNGAYLDLEATLAEQRDELEGFQDDAGRGKKHSIILRTQLSVRVHACIEKLYNSSGRDLRRALFSLKQIFQDDKDLVHEFVVAEGLTCLIKVGAEADQNYQNYILRALGQIMLYVDGMNGVINRNETIQWLYTLIGSKFRLVVKTALKLLLVFVEYSESNAPLLIQAVTAVDTKRGVKPWSNIMEILEEKDGVDTELLVYAMTLVNKTLSGLPDQDTFYDVVDCLEELGIAAVSQRHLNKKGTDLDLVEQLNIYEVALRHEDGDETTEPPPSGCRDRRRASVCSSGGGEHRGLDRRRSRRHSVQSIKSTLSAPTSPCSQSAPSFKPNQVRDLREKYSNFGNNSYHSSRPSSGSSVPTTPTSSVSPPQEARLERSSPSGLLTSSFRQHQESLAAERERRRQEREERLQRIEREERNKFSRDYLDKREEQRQAREERYKYLEQLAAEEHEKELRSRSVSRGRADLSLDLTSPAAPACLAPLSHSPSSSDSQEALTVSASSPGTPHHPQASAGDPEPESEAEPEAEAGAGQVADEAGQDIASAHEGAETEVEQALEQEPEERASLSEKERQNEGVNERDNCSASSVSSSSSTLEREEKEDKLSRDRTTGLWPAGVQDAGVNGQCGDILTNKRFMLDMLYAHNRKSPDDEEKGDGEAGRTQQEAEAVASLATRISTLQANSQTQDESVRRVDVGCLDNRGSVKAFAEKFNSGDLGRGSISPDAEPNDKVPETAPVQPKTESDYIWDQLMANPRELRIQDMDFTDLGEEDDIDVLDVDLGHREAPGPPPPPPPTFLGLPPPPPPPLLDSIPPPPVPGNLLVPPPPVFNAPQGLGWSQVPRGQPTFTKKKKTIRLFWNEVRPFDWPCKNNRRCREFLWSKLEPIKVDTSRLEHLFESKSKELSVSKKTAADGKRQEIIVLDSKRSNAINIGLTVLPPPRTIKIAILNFDEYALNKEGIEKILTMIPTDEEKQKIQEAQLANPEIPLGSAEQFLLTLSSISELSARLHLWAFKMDYETTEKEVAEPLLDLKEGIDQLENNKTLGFILSTLLAIGNFLNGTNAKAFELSYLEKVPEVKDTVHKQSLLHHVCTMVVENFPDSSDLYSEIGAITRSAKVDFDQLQDNLCQMERRCKASWDHLKAIAKHEMKPVLKQRMSEFLKDCAERIIILKIVHRRIINRFHSFLLFMGHPPYAIREVNINKFCRIISEFALEYRTTRERVLQQKQKRANHRERNKTRGKMITDSGKFSGSSPAPPSQPQGLSYAEDAAEHENMKAVLKTSSPSVEDATPALGVRTRSRASRGSTSSWTMGTDDSPNVTDDAADEIMDRIVKSATQVPSQRVVPRERKRSRANRKSLRRTLKSGLTPEEARALGLVGTSELQL

SEQ ID NO: 5414 - protein, 1422 aa, Homo Sapiens
MATLACRVQFLDDTDPFNSTNFPEPSRPPLFTFREDLALGTQLAGVHRLLQAPHKLDDCTLQLSHNGAYLDLEATLAEQRDELEGFQDDAGRGKKHSIILRTQLSVRVHACIEKLYNSSGRDLRRALFSLKQIFQDDKDLVHEFVVAEGLTCLIKVGAEADQNYQNYILRALGQIMLYVDGMNGVINRNETIQWLYTLIGSKFRLVVKTALKLLLVFVEYSESNAPLLIQAVTAVDTKRGVKPWSNIMEILEEKDGVDTELLVYAMTLVNKTLSGLPDQDTFYDVVDCLEELGIAAVSQRHLNKKGTDLDLVEQLNIYEVALRHEDGDETTEPPPSGCRDRRRASVCSSGGGEHRGLDRRRSRRHSVQSIKSTLSAPTSPCSQSAPSFKPNQVRDLREKYSNFGNNSYHSSRPSSGSSVPTTPTSSVSPPQEARLERSSPSGLLTSSFRQHQESLAAERERRRQEREERLQRIEREERNKFRYKYLEQLAAEEHEKELRSRSVSRGRADLSLDLTSPAAPACLAPLSHSPSSSDSQEALTVSASSPGTPHHPQASAGDPEPESEAEPEAEAGAGQVADEAGQDIASAHEGAETEVEQALEQEPEERASLSEKERQNEGVNERDNCSASSVSSSSSTLEREEKEDKLSRDRTTGLWPAGVQDAGVNGQCGDILTNKRFMLDMLYAHNRKSPDDEEKGDGEAGRTQQEAEAVASLATRISTLQANSQTQDESVRRVDVGCLDNRGSVKAFAEKFNSGDLGRGSISPDAEPNDKVPETAPVQPKTESDYIWDQLMANPRELRIQDMDFTDLGEEDDIDVLDVDLGHREAPGPPPPPPPTFLGLPPPPPPPLLDSIPPPPVPGNLLVPPPPVFNAPQGLGWSQVPRGQPTFTKKKKTIRLFWNEVRPFDWPCKNNRRCREFLWSKLEPIKVDTSRLEHLFESKSKELSVSKKTAADGKRQEIIVLDSKRSNAINIGLTVLPPPRTIKIAILNFDEYALNKEGIEKILTMIPTDEEKQKIQEAQLANPEIPLGSAEQFLLTLSSISELSARLHLWAFKMDYETTEKEVAEPLLDLKEGIDQLENNKTLGFILSTLLAIGNFLNGTNAKAFELSYLEKVPEVKDTVHKQSLLHHVCTMVVENFPDSSDLYSEIGAITRSAKVDFDQLQDNLCQMERRCKASWDHLKAIAKHEMKPVLKQRMSEFLKDCAERIIILKIVHRRIINRFHSFLLFMGHPPYAIREVNINKFCRIISEFALEYRTTRERVLQQKQKRANHRERNKTRGKMITDSGKFSGSSPAPPSQPQGLSYAEDAAEHENMKAVLKTSSPSVEDATPALGVRTRSRASRGSTSSWTMGTDDSPNVTDDAADEIMDRIVKSATQVPSQRVVPRERKRSRANRKSLRRTLKSGLTPEEARALGLVGTSELQL

SEQ ID NO: 5415 - protein, 1622 aa, Homo Sapiens
MATLACRVQFLDDTDPFNSTNFPEPSRPPLFTFREDLALGTQLAGVHRLLQAPHKLDDCTLQLSHNGAYLDLEATLAEQRDELEGFQDDAGRGKKHSIILRTQLSVRVHACIEKLYNSSGRDLRRALFSLKQIFQDDKDLVHEFVVAEGLTCLIKVGAEADQNYQNYILRALGQIMLYVDGMNGVINRNETIQWLYTLIGSKFRLVVKTALKLLLVFVEYSESNAPLLIQAVTAVDTKRGVKPWSNIMEILEEKDGVDTELLVYAMTLVNKTLSGLPDQDTFYDVVDCLEELGIAAVSQRHLNKKGTDLDLVEQLNIYEVALRHEDGDETTEPPPSGCRDRRRASVCSSGGGEHRGLDRRRSRRHSVQSIKSTLSAPTSPCSQSAPSFKPNQVRDLREKEEEEEEEQPITEPSSEEEREDDASCQGKDSKVGAASGQSPTGRDAAPKSSALPAVSNASSQGKPLLVGTAGGTTWHSGSSGSEATPSALLSPPASAARPSSATPGSLKVSPTIDKLPYVPHSPFHLFSYDFEDSSLSTKEKEAESQKENSSSDSFSLSTYSASEPYHFRSFSSNRYSNFGNNSYHSSRPSSGSSVPTTPTSSVSPPQEARLERSSPSGLLTSSFRQHQESLAAERERRRQEREERLQRIEREERNKFSRDYLDKREEQRQAREERYKYLEQLAAEEHEKELRSRSVSRGRADLSLDLTSPAAPACLAPLSHSPSSSDSQEALTVSASSPGTPHHPQASAGDPEPESEAEPEAEAGAGQVADEAGQDIASAHEGAETEVEQALEQEPEERASLSEKERQNEGVNERDNCSASSVSSSSSTLEREEKEDKLSRDRTTGLWPAGVQDAGVNGQCGDILTNKRFMLDMLYAHNRKSPDDEEKGDGEAGRTQQEAEAVASLATRISTLQANSQTQDESVRRVDVGCLDNRGSVKAFAEKFNSGDLGRGSISPDAEPNDKVPETAPVQPKTESDYIWDQLMANPRELRIQDMDFTDLGEEDDIDVLDVDLGHREAPGPPPPPPPTFLGLPPPPPPPLLDSIPPPPVPGNLLVPPPPVFNAPQGLGWSQVPRGQPTFTKKKKTIRLFWNEVRPFDWPCKNNRRCREFLWSKLEPIKVDTSRLEHLFESKSKELSVSKKTAADGKRQEIIVLDSKRSNAINIGLTVLPPPRTIKIAILNFDEYALNKEGIEKILTMIPTDEEKQKIQEAQLANPEIPLGSAEQFLLTLSSISELSARLHLWAFKMDYETTEKEVAEPLLDLKEGIDQLENNKTLGFILSTLLAIGNFLNGTNAKAFELSYLEKVPEVKDTVHKQSLLHHVCTMVVENFPDSSDLYSEIGAITRSAKVDFDQLQDNLCQMERRCKASWDHLKAIAKHEMKPVLKQRMSEFLKDCAERIIILKIVHRRIINRFHSFLLFMGHPPYAIREVNINKFCRIISEFALEYRTTRERVLQQKQKRANHRERNKTRGKMITDTDEEEEVESGKFSGSSPAPPSQPQGLSYAEDAAEHENMKAVLKTSSPSVEDATPALGVRTRSRASRGSTSSWTMGTDDSPNVTDDAADEIMDRIVKSATQVPSQRVVPRERKRSRANRKSLRRTLKSGLTPEEARALGLVGTSELQL

SEQ ID NO: 5416 - protein, 528 aa, Homo Sapiens
RLFWNEVRPFDWPCKNNRRCREFLWSKLEPIKVDTSRLEHLFESKSKELSVSKKTAADGKRQEIIVLDSKRSNAINIGLTVLPPPRTIKIAILNFDEYALNKEGIEKILTMIPTDEEKQKIQEAQLANPEIPLGSAEQFLLTLSSISELSARLHLWAFKMDYETTEKEVAEPLLDLKEGIDQLENNKTLGFILSTLLAIGNFLNGTNAKAFELSYLEKVPEVKDTVHKQSLLHHVCTMVVENFPDSSDLYSEIGAITRSAKVDFDQLQDNLCQMERRCKASWDHLKAIAKHEMKPVLKQRMSEFLKDCAERIIILKIVHRRIINRFHSFLLFMGHPPYAIREVNINKFCRIISEFALEYRTTRERVLQQKQKRANHRERNKTRGKMITDSGKFSGSSPAPPSQPQGLSYAEDAAEHENMKAVLKTSSPSVEDATPALGVRTRSRASRGSTSSWTMGTDDSPNVTDDAADEIMDRIVKSATQVPSQRVVPRERKRSRANRKSLRRTLKSGLTPEEARALGLVGTSELQL

SEQ ID NO: 5417 - protein, 375 aa, Homo Sapiens
  misc_feature (1)..(1): Xaa can be any naturally occurring amino acid
XAINIGLTVLPPPRTIKIAILNFDEYALNKEGIEKILTMIPTDEEKQKIQEAQLANPEIPLGSAEQFLLTLSSISELSARLHLWAFKMDYETTEKEVAEPLLDLKEGIDQLENNKTLGFILSTLLAIGNFLNGTNAKAFELSYLEKVPEVKDTVHKQSLLHHVCTMVVENFPDSSDLYSEIGAITRSAKVDFDQLQDNLCQMERRCKASWDHLKAIAKHEMKPVLKQRMSEFLKDCAERIIILKIVHRRIINRFHSFLLFMGHPPYAIREVNINKFCRIISEFALEYRTTRERVLQQKQKRANHRERNKTRGKMITDDPLVPGLWELMTRPMSQMMQLMRSWTASSSQPPKCPVSEWCRGRGNDPGPTGNLCEEP

SEQ ID NO: 5418 - protein, 1200 aa, Homo Sapiens
  misc_feature (1)..(1): Xaa can be any naturally occurring amino acid
XFRLVVKTALKLLLVFVEYSESNAPLLIQAVTAVDTKRGVKPWSNIMEILEEKDGVDTELLVYAMTLVNKTLSGLPDQDTFYDVVDCLEELGIAAVSQRHLNKKGTDLDLVEQLNIYEVALRHEDGDETTEPPPSGCRDRRRASVCSSGGGEHRGLDRRRSRRHSVQSIKSTLSAPTSPCSQSAPSFKPNQVRDLREKSSPSGLLTSSFRQHQESLAAERERRRQEREERLQRIEREERNKFSRDYLDKREEQRQAREERYKYLEQLAAEEHEKELRSRSVSRGRADLSLDLTSPAAPACLAPLSHSPSSSDSQEALTVSASSPGTPHHPQASAGDPEPESEAEPEAEAGAGQVADEAGQDIASAHEGAETEVEQALEQEPEERASLSEKERQNEGVNERDNCSASSVSSSSSTLEREEKEDKLSRDRTTGLWPAGVQDAGVNGQCGDILTNKRFMLDMLYAHNRKSPDDEEKGDGEAGRTQQEAEAVASLATRISTLQANSQTQDESVRRVDVGCLDNRGSVKAFAEKFNSGDLGRGSISPDAEPNDKVPETAPVQPKTESDYIWDQLMANPRELRIQDMDFTDLGEEDDIDVLDVDLGHREAPGPPPPPPPTFLGLPPPPPPPLLDSIPPPPVPGNLLVPPPPVFNAPQGLGWSQVPRGQPTFTKKKKTIRLFWNEVRPFDWPCKNNRRCREFLWSKLEPIKVDTSRLEHLFESKSKELSVSKKTAADGKRQEIIVLDSKRSNAINIGLTVLPPPRTIKIAILNFDEYALNKEGIEKILTMIPTDEEKQKIQEAQLANPEIPLGSAEQFLLTLSSISELSARLHLWAFKMDYETTEKEVAEPLLDLKEGIDQLENNKTLGFILSTLLAIGNFLNGTNAKAFELSYLEKVPEVKDTVHKQSLLHHVCTMVVENFPDSSDLYSEIGAITRSAKVDFDQLQDNLCQMERRCKASWDHLKAIAKHEMKPVLKQRMSEFLKDCAERIIILKIVHRRIINRFHSFLLFMGHPPYAIREVNINKFCRIISEFALEYRTTRERVLQQKQKRANHRERNKTRGKMITDSGKFSGSSPAPPSQPQGLSYAEDAAEHENMKAVLKTSSPSVEDATPALGVRTRSRASRGSTSSWTMGTDDSPNVTDDAADEIMDRIVKSATQVPSQRVVPRERKRSRANRKSLRRTLKSGLTPEEARALGLVGTSELQL

SEQ ID NO: 5419 - protein, 211 aa, Homo Sapiens
MVFLKFFCMSFFCHLCQGYFDGPLYPEMSNGTLHHYFVPDGDYEENDDPEKCQLLFRVSDHRRCSQGEGSQVGSLLSLTLREEFTVLGRQVEDAGRVLEGISKSISYDLDGEESYGKYLRRESHQIGDAYSNSDKSLTELESKFKQGQEQDSRQESRLNEDFLGMLVHTRSLLKETLDISVGLRDKYELLALTIRSHGTRLGRLKNDYLKV

SEQ ID NO: 5420 - protein, 458 aa, Homo Sapiens
MMLIPMASVMAVTEPKWVSVWSRFLWVTLLSMVLGSLLALLLPLGAVEEQCLAVLKGLYLLRSKPDRAQHAATKCTSPSTELSITSRGATLLVAKTKASPAGKLEARAALNQALEMKRQGKREKAQKLFMHALKMDPDFVDALTEFGIFSEEDKDIIQADYLYTRALTISPYHEKALVNRDRTLPLVEEIDQRYFSIIDSKVKKVMSIPKGNSALRRVMEETYYHHIYHTVAIEGNTLTLSEIRHILETRYAVPGKSLEEQNEVIGMHAAMKYINTTLVSRIGSVTISDVLEIHRRVLGYVDPVEAGRFRTTQVLVGHHIPPHPQDVEKQMQEFVQWLNSEEAMNLHPVEFAALAHYKLVYIHPFIDGNGRTSRLLMNLILMQAGYPPITIRKEQRSDYYHVLEAANEGDVRPFIRFIAKCTETTLDTLLFATTEYSVALPEAQPNHSGFKETLPVKP

SEQ ID NO: 5421 - protein, 180 aa, Homo Sapiens
MMLIPMASVMAVTEPKWVSVWSRFLWVTLLSMVLGSLLALLLPLGAVEEQCLAVLKGLYLLRSKPDRAQHAATKCTSPSTELSITSRGATLLVAKTKASPESRRLGSQGGASQNTREWLWGHTDSDCIPPHGWGNRVVPGMLSTHDAAATSSSRPGTQAGHHGFLRRPAQGTAPRMSSAP

SEQ ID NO: 5422 - protein, 139 aa, Homo Sapiens
MMLIPMASVMAVTEPKWVSVWSRFLWVTLLSMVLGSLLALLLPLGAVEEQCLAVLKGLYLLRSKPDRAQHAATKCTSPSTELSITSRGATLLVAKTKASPGKTDWPSSSMLVNWIDRHRMCHVLYVGHRGIVNKSALSS

SEQ ID NO: 5423 - protein, 56 aa, Homo Sapiens
  misc_feature (1)..(1): Xaa can be any naturally occurring amino acid
XCLAVLKGLYLLRSKPDRAQHAATKCTSPSTELSITSRGATLLVAKTKASPGKCCT

SEQ ID NO: 5424 - protein, 437 aa, Homo Sapiens
MGRRMRGAAATAGLWLLALGSLLALWGGLLPPRTELPASRPPEDRLPRRPARSGGPAPAPRFPLPPPLAWDARGGSLKTFRALLTLAAGADGPPRQSRSEPRWHVSARQPRPEESAAVHGGVFWSRGLEEQVPPGFSEAQAAAWLEAARGARMVALERGGCGRSSNRLARFADGTRACVRYGINPEQIQGEALSYYLARLLGLQRHVPPLALARVEARGAQWAQVQEELRAAHWTEGSVVSLTRWLPNLTDVVVPAPWRSEDGRLRPLRDAGGELANLSQAELVDLVQWTDLILFDYLTANFDRLVSNLFSLQWDPRVMQRATSNLHRGPGGALVFLDNEAGLVHGYRVAGMWDKYNEPLLQSVCVFRERTARRVLELHRGQDAAARLLRLYRRHEPRFPELAALADPHAQLLQRRLDFLAKHILHCKAKYGRRSGT

SEQ ID NO: 5425 - protein, 147 aa, Homo Sapiens
MFPAGPPSHSLLRLPLLQLLLLVVQAVGRGLGRASPAGGPLEDVVIERYHIPRACPREVQMGDFVRYHYNGTFEDGKKFDSSGAHSTGCHPLLRCGSAGCVEQGRHRAGEHIAAPAPLPPHGPGRRLCPLPLQWHPAGRHLLRHQLQ

SEQ ID NO: 5426 - protein, 171 aa, Homo Sapiens
MFPAGPPSHSLLRLPLLQLLLLVVQAVGRGLGRASPAGGPLEDVVIERYHIPRACPREVQMGDFVRYHYNGTFEDGKKFDSSYDRNTLVAIVVGVGRLITGMDRGLMGMCVNERRRLIVPPHLGYGSIGLAGLIPPDATLYFDVVLLDVWNKEDTVQVSTLLRPPHCPRMV

SEQ ID NO: 5427 - protein, 582 aa, Homo Sapiens
MFPAGPPSHSLLRLPLLQLLLLVVQAVGRGLGRASPAGGPLEDVVIERYHIPRACPREVQMGDFVRYHYNGTFEDGKKFDSSYDRNTLVAIVVGVGRLITGMDRGLMGMCVNERRRLIVPPHLGYGSIGLAGLIPPDATLYFDVVLLDVWNKEDTVQVSTLLRPPHCPRMVQDGDFVRYHYNGTLLDGTSFDTSYSKGGTYDTYVGSGWLIKGMDQGLLGMCPGERRKIIIPPFLAYGEKGYGTVIPPQASLVFHVLLIDVHNPKDAVQLETLELPPGCVRRAGAGDFMRYHYNGSLMDGTLFDSSYSRNHTYNTYIGQGYIIPGMDQGLQGACMGERRRITIPPHLAYGENGTGDKIPGSAVLIFNVHVIDFHNPADVVEIRTLSRPSETCNETTKLGDFVRYHYNCSLLDGTQLFTSHDYGAPQEATLGANKVIEGLDTGLQGMCVGERRQLIVPPHLAHGESGARGVPGSAVLLFEVELVSREDGLPTGYLFVWHKDPPANLFEDMDLNKDGEVPPEEFSTFIKAQVSEGKGRLMPGQDPEKTIGDMFQNQDRNQDGKITVDELKLKSDEDEERVHEEL

SEQ ID NO: 5428 - protein, 81 aa, Homo Sapiens
MGDFVRYHYNGTFEDGKKFDSSYDRNTLVAIVVGVGRLITGMDRGLMGMCVNERRRLIVPPHLGYGSIGLAGLIPPDATLY

SEQ ID NO: 5429 - protein, 172 aa, Homo Sapiens
MGDFVRYHYNGTFEDGKKFDSSYDRNTLVAIVVGVGRLITGMDRGLMGMCVNERRRLIVPPHLGYGSIGLAGLIPPDATLYFDVVLLDVWNKEDTVQVSTLLRPPHCPRMVQDGDFVRYHYNGTLLDGTSFDTSYSKGGTYDTYVGSGWLIKGMDQGLLGMCPGERRKIIIP

SEQ ID NO: 5430 - protein, 386 aa, Homo Sapiens
  misc_feature (1)..(1): Xaa can be any naturally occurring amino acid
XIDVHNPKDAVQLETLELPPGCVRRAGAGDFMRYHYNGSLMDGTLFDSSYSRNHTYNTYIGQGYIIPGMDQGLQGACMGERRRITIPPHLAYGENGTDSIGFLQGSAPLRPFRSGEGQPSLGREGGYGKTEPAYPQDPAVLGASVSSPVKWASHADPQGDKIPGSAVLIFNVHVIDFHNPADVVEIRTLSRPSETCNETTKLGDFVRYHYNCSLLDGTQLFTSHDYGAPQEATLGANKVIEGLDTGLQGMCVGERRQLIVPPHLAHGESGARGVPGSAVLLFEVELVSREDGLPTGYLFVWHKDPPANLFEDMDLNKDGEVPPEEFSTFIKAQVSEGKGRLMPGQDPEKTIGDMFQNQDRNQDGKITVDELKLKSDEDEERVHEEL

SEQ ID NO: 5431 - protein, 99 aa, Homo Sapiens
MCVGEKRRAIIPSHLAYGKRGFPPSVPADAVVQYDVELIALIRANYWLKLVKGILPLVGMAMVPALLGLIGYHLYRKANRPKVSKKKLKEEKRNKSKKK

SEQ ID NO: 5432 - protein, 92 aa, Homo Sapiens
MTLRPSLLPLHLLLLLLLSAAVCRAEAGLETESPVRTLQVETLGRERDLWKSIRDPCSPIVGGAPRTMCRARCFWRHASHTLHGKLGRWTYY

SEQ ID NO: 5433 - protein, 72 aa, Homo Sapiens
MTLRPSLLPLHLLLLLLLSAAVCRAEAGLETESPVRTLQVETLSDRRWSPQNHVPSPLLLETRFTYTTREAW

SEQ ID NO: 5434 - protein, 201 aa, Homo Sapiens
MTLRPSLLPLHLLLLLLLSAAVCRAEAGLETESPVRTLQVETLVEPPEPCAEPAAFGDTLHIHYTGSLVDGRIIDTSLTRDPLVIELGQKQVIPGLEQSLLDMCVGEKRRAIIPSHLAYGKRGFPPSVPADAVVQYDVELIALIRANYWLKLVKGILPLVGMAMVPALLGLIGYHLYRKANRPKVSKKKLKEEKRNKSKKK

SEQ ID NO: 5435 - protein, 182 aa, Homo Sapiens
MTLRPSLLPLHLLLLLLLSAAVCRAEAGLETESPVRTLQVETLVEPPEPCAEPAAFGDTLHIHYTGSLVDGRIIDTSLTRDPLVIELGQKQVIPGLEQSLLDMCVGEKRRAIIPSHLAYGKRGFPPSVPDGVSLLLPRLECNSAIFTHHNLRHPGSSNSPVSASRVAGITGMRHHDRLILYF

SEQ ID NO: 5436 - protein, 146 aa, Homo Sapiens
MTLRPSLLPLHLLLLLLLSAAVCRAEAGLETESPVRTLQVETLVEPPEPCAEPAAFGDTLHIHYTGSLVDGRIIDTSLTRDPLVIELGQKQVIPGLEQSLLDMCVGEKRRAIIPSHLAYGKRGFPPSVPGTKDNLMRPPGMTSSSQ

SEQ ID NO: 5437 - protein, 63 aa, Homo Sapiens
SLTRDPLVIELGQKQVIPGLEQSLLDMCVGWKNSCFGCEDSGGFAEGASAGLRLLAYLSCLWL

SEQ ID NO: 5438 - protein, 66 aa, Homo Sapiens
MRLFLWNAVLTLFVTSLIGALIPEPEVKIEVLQKPFICHRKTKGGDLMLVHYEGYLEKDGSLFHST

SEQ ID NO: 5439 - protein, 211 aa, Homo Sapiens
MRLFLWNAVLTLFVTSLIGALIPEPEVKIEVLQKPFICHRKTKGGDLMLVHYEGYLEKDGSLFHSTHKHNNGQPIWFTLGILEALKGWDQGLKGMCVGEKRKLIIPPALGYGKEGKGKIPPESTLIFNIDLLEIRNGPRSHESFQEMDLNDDWKLSKDEVKAYLKKEFEKHGAVVNESHHDALVEDIFDKEDEDKDGFISAREFTYKHDEL

SEQ ID NO: 5440 - protein, 89 aa, Homo Sapiens
  misc_feature (1)..(1): Xaa can be any naturally occurring amino acid
XVLQKPFICHRKTKGGDLMLVHYEGYLEKDGSLFHSTHKHNNGQPIWFTLGILEALKGWDQGLKGMCVGEKRKLIIPPALGYGKEGKVF

SEQ ID NO: 5441 - protein, 102 aa, Homo Sapiens
MRLSWFRVLTVLSICLSAVATATGAEGKRKLQIGVKKRVDHCPIKSRKGDVLHMHYTGKLEDGTEFDSSLPQNQPFVFSLGTGQVIKGWDQGLLGMCEGEKR

SEQ ID NO: 5442 - protein, 142 aa, Homo Sapiens
MRLSWFRVLTVLSICLSAVATATGAEGKRKLQIGVKKRVDHCPIKSRKGDVLHMHYTGKLEDGTEFDSSLPQNQPFVFSLGTGQVIKGWDQGLLGMCEGEKRKLVIPSELGYGERGAPPKIPGGATLVFEVELLKIERRTEL

SEQ ID NO: 5443 - protein, 142 aa, Homo Sapiens; identical to SEQ ID NO: 5442

SEQ ID NO: 5444 - protein, 142 aa, Homo Sapiens; identical to SEQ ID NO: 5442

SEQ ID NO: 5445 - protein, 74 aa, Homo Sapiens
MPKTMHFLFRFIVFFYLWGLFTAQRQKKEESTEEVKIEVLHRPENCSKTSKKGDLLNAHYDGYLAKDGSKFYCR

SEQ ID NO: 5446 - protein, 86 aa, Homo Sapiens
MPKTMHFLFRFIVFFYLWGLFTAQRQKKEESTEEVKIEVLHRPENCSKTSKKGDLLNAHYDGYLAKDGSKFYCSRRQDSTGCYIDF

SEQ ID NO: 5447 - protein, 222 aa, Homo Sapiens
MPKTMHFLFRFIVFFYLWGLFTAQRQKKEESTEEVKIEVLHRPENCSKTSKKGDLLNAHYDGYLAKDGSKFYCSRTQNEGHPKWFVLGVGQVIKGLDIAMTDMCPGEKRKVVIPPSFAYGKEGYAEGKIPPDATLIFEIELYAVTKGPRSIETFKQIDMDNDRQLSKAEINLYLQREFEKDEKPRDKSYQDAVLEDIFKKNDHDGDGFISPKEYNVYQHDEL

SEQ ID NO: 5448 - protein, 221 aa, Homo Sapiens
MPKTMHFLFRFIVFFYLWGLFTAQRQKKEESTEEVKIEVLHRPENCSKTSKKGDLLNAHYDGYLAKDGSKFYCSRTQNEGHPKWFVLGVGQVIKGLDIAMTDMCPGEKRKVVIPPSFAYGKEGYEGKIPPDATLIFEIELYAVTKGPRSIETFKQIDMDNDRQLSKAEINLYLQREFEKDEKPRDKSYQDAVLEDIFKKNDHDGDGFISPKEYNVYQHDEL

SEQ ID NO: 5449 - protein, 127 aa, Homo Sapiens
MPKTMHFLFRFIVFFYLWGLFTAQRQKKEESTEEVKIEVLHRPENCSKTSKKGDLLNAHYDGYLAKDGSKFYCSRTQNEGHPKWFVLGVGQVIKGLDIAMTDMCPGEKRKVVIPPSFAYGKEGYGST

SEQ ID NO: 5450 - protein, 67 aa, Homo Sapiens
  misc_feature (1)..(1): Xaa can be any naturally occurring amino acid
XGYLAKDGSKFYCSRTQNEGHPKWFVLGVGQVIKGLDIAMTDMCPGEKRKVVIPPSFAYGKEGYGST

SEQ ID NO: 5451 - protein, 623 aa, Homo Sapiens
MAFRGWRPPPPPLLLLLLWVTGQAAPVAGLGSDAELQIERRFVPDECPRTVRSGDFVRYHYVGTFPDGQKFDSRYWDTAEDKADKSPCPQVRVGVNTSPSCRLKQKGVGIYWKDLQFLVRVQNHGLSYDRDSTFNVFVGKGQLITGMDQALVGMCVNERRFVKIPPKLAYGNEGVSGVIPPNSVLHFDVLLMDIWNSEDQVQIHTYFKPPSCPRTIQVSDFVRYHYNGTFLDGTLFDSSHNRMKTYDTYVGIGWLIPGMDKGLLGMCVGEKRIITIPPFLAYGEDGDGKDIPGQASLVFDVALLDLHNPKDSISIENKVVPENCERISQSGDFLRYHYNGTLLDGTLFDSSYSRNRTFDTYIGQGYVIPGMDEGLLGVCIGEKRRIVVPPHLGYGEEGRGNIPGSAVLVFDIHVIDFHNPSDSISITSHYKPPDCSVLSKKGDYLKYHYNASLLDGTLLDSTWNLGKTYNIVLGSGQVVLGMDMGLREMCVGEKRTVIIPPHLGYGEAGVDGEVPGSAVLVFDIELLELVAGLPEGYMFIWNGEVSPNLFEEIDKDGNGEVLLEEFSEYIHAQVASGKGKLAPGFDAELIVKNMFTNQDRNGDGKVTAEEFKLKDQEAKHDEL

SEQ ID NO: 5452 - protein, 570 aa, Homo Sapiens
MAFRGWRPPPPPLLLLLLWVTGQAAPVAGLGSDAELQIERRFVPDECPRTVRSGDFVRYHYVGTFPDGQKFDSSYDRDSTFNVFVGKGQLITGMDQALVGMCVNERRFVKIPPKLAYGNEGVSGVIPPNSVLHFDVLLMDIWNSEDQVQIHTYFKPPSCPRTIQVSDFVRYHYNGTFLDGTLFDSSHNRMKTYDTYVGIGWLIPGMDKGLLGMCVGEKRIITIPPFLAYGEDGDGKDIPGQASLVFDVALLDLHNPKDSISIENKVVPENCERISQSGDFLRYHYNGTLLDGTLFDSSYSRNRTFDTYIGQGYVIPGMDEGLLGVCIGEKRRIVVPPHLGYGEEGRGNIPGSAVLVFDIHVIDFHNPSDSISITSHYKPPDCSVLSKKGDYLKYHYNASLLDGTLLDSTWNLGKTYNIVLGSGQVVLGMDMGLREMCVGEKRTVIIPPHLGYGEAGVDGEVPGSAVLVFDIELLELVAGLPEGYMFIWNGEVSPNLFEEIDKDGNGEVLLEEFSEYIHAQVASGKGKLAPGFDAELIVKNMFTNQDRNGDGKVTAEEFKLKDQEAKHDEL

SEQ ID NO: 5453 - protein, 338 aa, Homo Sapiens
MAGKDIPGQASLVFDVALLDLHNPKDSISIENKVVPENCERISQSGDFLRYHYNGTLLDGTLFDSSYSRNRTFDTYIGQGYVIPGMDEGLLGVCIGEKRRIVVPPHLGYGEEGRGNIPGSAVLVFDIHVIDFHNPSDSISITSHYKPPDCSVLSKKGDYLKYHYNASLLDGTLLDSTWNLGKTYNIVLGSGQVVLGMDMGLREMCVGEKRTVIIPPHLGYGEAGVDGEVPGSAVLVFDIELLELVAGLPEGYMFIWNGEVSPNLFEEIDKDGNGEVLLEEFSEYIHAQVASGKGKLAPGFDAELIVKNMFTNQDRNGDGKVTAEEFKLKDQEAKHDEL

SEQ ID NO: 5454 - protein, 226 aa, Homo Sapiens [sequence omitted]

SEQ ID NO: 5455 - protein, 85 aa, Homo Sapiens
MLKRFTWTDSKPKASLKIDLRVTSKSKESGLSDVSRPSFCHSSCGHVSEGKRRFTYDHAELERKIACCSPPPDYNSVVLYSTPPI

SEQ ID NO: 5456 - protein, 85 aa, Homo Sapiens; identical to SEQ ID NO: 5455

SEQ ID NO: 5457 - protein, 361 aa, Homo Sapiens
MNSDLLVDSDGFYKEPITMEDLISYSFQVARGMEFLSSRKCIHRDLAARNILLSENNVVKICDFGLARDIYKNPDYVRKGDTRLPLKWMAPESIFDKIYSTKSDVWSYGVLLWEIFSLGGSPYPGVQMDEDFCSRLREGMRMRAPEYSTPEIYQIMLDCWHRDPKERPRFAELVEKLGDLLQANVQQDGKDYIPINAILTGNSGFTYSTPAFSEDFFKESISAPKFNSGSSDDVRYVNAFKFMSLERIKTFEELLPNATSMFDDYQGDSSTLLASPMLKRFTWTDSKPKASLKIDLRVTSKSKESGLSDVSRPSFCHSSCGHVSEGKRRFTYDHAELERKIACCSPPPDYNSVVLYSTPPI

SEQ ID NO: 5458 - protein, 433 aa, Homo Sapiens
MVIVEYCKYGNLSNYLKSKRDLFFLNKDAALHMEPKKEKMEPGLEQGKKPRLDSVTSSESFASSGFQEDKSLSDVEEEEDSDGFYKEPITMEDLISYSFQVARGMEFLSSRKCIHRDLAARNILLSENNVVKICDFGLARDIYKNPDYVRKGDTRLPLKWMAPESIFDKIYSTKSDVWSYGVLLWEIFSLGGSPYPGVQMDEDFCSRLREGMRMRAPEYSTPEIYQIMLDCWHRDPKERPRFAELVEKLGDLLQANVQQDGKDYIPINAILTGNSGFTYSTPAFSEDFFKESISAPKFNSGSSDDVRYVNAFKFMSLERIKTFEELLPNATSMFDDYQGDSSTLLASPMLKRFTWTDSKPKASLKIDLRVTSKSKESGLSDVSRPSFCHSSCGHVSEGKRRFTYDHAELERKIACCSPPPDYNSVVLYSTPPI

SEQ ID NO: 5459 - protein, 1338 aa, Homo Sapiens
MVSYWDTGVLLCALLSCLLLTGSSSGSKLKDPELSLKGTQHIMQAGQTLHLQCRGEAAHKWSLPEMVSKESERLSITKSACGRNGKQFCSTLTLNTAQANHTGFYSCKYLAVPTSKKKETESAIYIFISDTGRPFVEMYSEIPEIIHMTEGRELVIPCRVTSPNITVTLKKFPLDTLIPDGKRIIWDSRKGFIISNATYKEIGLLTCEATVNGHLYKTNYLTHRQTNTIIDVQISTPRPVKLLRGHTLVLNCTATTPLNTRVQMTWSYPDEKNKRASVRRRIDQSNSHANIFYSVLTIDKMQNKDKGLYTCRVRSGPSFKSVNTSVHIYDKAFITVKHRKQQVLETVAGKRSYRLSMKVKAFPSPEVVWLKDGLPATEKSARYLTRGYSLIIKDVTEEDAGNYTILLSIKQSNVFKNLTATLIVNVKPQIYEKAVSSFPDPALYPLGSRQILTCTAYGIPQPTIKWFWHPCNHNHSEARCDFCSNNEESFILDADSNMGNRIESITQRMAIIEGKNKMASTLVVADSRISGIYICIASNKVGTVGRNISFYITDVPNGFHVNLEKMPTEGEDLKLSCTVNKFLYRDVTWILLRTVNNRTMHYSISKQKMAITKEHSITLNLTIMNVSLQDSGTYACRARNVYTGEEILQKKEITIRDQEAPYLLRNLSDHTVAISSSTTLDCHANGVPEPQITWFKNNHKIQQEPGIILGPGSSTLFIERVTEEDEGVYHCKATNQKGSVESSAYLTVQGTSDKSNLELITLTCTCVAATLFWLLLTLFIRKMKRSSSEIKTDYLSIIMDPDEVPLDEQCERLPYDASKWEFARERLKLGKSLGRGAFGKVVQASAFGIKKSPTCRTVAVKMLKEGATASEYKALMTELKILTHIGHHLNVVNLLGACTKQGGPLMVIVEYCKYGNLSNYLKSKRDLFFLNKDAALHMEPKKEKMEPGLEQGKKPRLDSVTSSESFASSGFQEDKSLSDVEEEEDSDGFYKEPITMEDLISYSFQVARGMEFLSSRKCIHRDLAARNILLSENNVVKICDFGLARDIYKNPDYVRKGDTRLPLKWMAPESIFDKIYSTKSDVWSYGVLLWEIFSLGGSPYPGVQMDEDFCSRLREGMRMRAPEYSTPEIYQIMLDCWHRDPKERPRFAELVEKLGDLLQANVQQDGKDYIPINAILTGNSGFTYSTPAFSEDFFKESISAPKFNSGSSDDVRYVNAFKFMSLERIKTFEELLPNATSMFDDYQGDSSTLLASPMLKRFTWTDSKPKASLKIDLRVTSKSKESGLSDVSRPSFCHSSCGHVSEGKRRFTYDHAELERKIACCSPPPDYNSVVLYSTPPI

SEQ ID NO: 5460 - protein, 541 aa, Homo Sapiens
MVSYWDTGVLLCALLSCLLLTGSSSGSKLKDPELSLKGTQHIMQAGQTLHLQCRGEAAHKWSLPEMVSKESERLSITKSACGRNGKQFCSTLTLNTAQANHTGFYSCKYLAVPTSKKKETESAIYIFISDTGRPFVEMYSEIPEIIHMTEGRELVIPCRVTSPNITVTLKKFPLDTLIPDGKRIIWDSRKGFIISNATYKEIGLLTCEATVNGHLYKTNYLTHRQTNTIIDVQISTPRPVKLLRGHTLVLNCTATTPLNTRVQMTWSYPDEKNKRASVRRRIDQSNSHANIFYSVLTIDKMQNKDKGLYTCRVRSGPSFKSVNTSVHIYDKAFITVKHRKQQVLETVAGKRSYRLSMKVKAFPSPEVVWLKDGLPATEKSARYLTRGYSLIIKDVTEEDAGNYTILLSIKQSNVFKNLTATLIVNVKPQIYEKAVSSFPDPALYPLGSRQILTCTAYGIPQPTIKWFWHPCNHNHSEARCDFCSNNEESFILDADSNMGNRIESITQRMAIIEGKNKLPPANSSFMLPPTSFSSNYFHFLP

SEQ ID NO: 5461 - protein, 733 aa, Homo Sapiens
MVSYWDTGVLLCALLSCLLLTGSSSGSKLKDPELSLKGTQHIMQAGQTLHLQCRGEAAHKWSLPEMVSKESERLSITKSACGRNGKQFCSTLTLNTAQANHTGFYSCKYLAVPTSKKKETESAIYIFISDTGRPFVEMYSEIPEIIHMTEGRELVIPCRVTSPNITVTLKKFPLDTLIPDGKRIIWDSRKGFIISNATYKEIGLLTCEATVNGHLYKTNYLTHRQTNTIIDVQISTPRPVKLLRGHTLVLNCTATTPLNTRVQMTWSYPDEKNKRASVRRRIDQSNSHANIFYSVLTIDKMQNKDKGLYTCRVRSGPSFKSVNTSVHIYDKAFITVKHRKQQVLETVAGKRSYRLSMKVKAFPSPEVVWLKDGLPATEKSARYLTRGYSLIIKDVTEEDAGNYTILLSIKQSNVFKNLTATLIVNVKPQIYEKAVSSFPDPALYPLGSRQILTCTAYGIPQPTIKWFWHPCNHNHSEARCDFCSNNEESFILDADSNMGNRIESITQRMAIIEGKNKMASTLVVADSRISGIYICIASNKVGTVGRNISFYITDVPNGFHVNLEKMPTEGEDLKLSCTVNKFLYRDVTWILLRTVNNRTMHYSISKQKMAITKEHSITLNLTIMNVSLQDSGTYACRARNVYTGEEILQKKEITIRDQEAPYLLRNLSDHTVAISSSTTLDCHANGVPEPQITWFKNNHKIQQEPELYTSTSPSSSSSSPLSSSSSSSSSSSS

SEQ ID NO: 5462 - protein, 687 aa, Homo Sapiens
MVSYWDTGVLLCALLSCLLLTGSSSGSKLKDPELSLKGTQHIMQAGQTLHLQCRGEAAHKWSLPEMVSKESERLSITKSACGRNGKQFCSTLTLNTAQANHTGFYSCKYLAVPTSKKKETESAIYIFISDTGRPFVEMYSEIPEIIHMTEGRELVIPCRVTSPNITVTLKKFPLDTLIPDGKRIIWDSRKGFIISNATYKEIGLLTCEATVNGHLYKTNYLTHRQTNTIIDVQISTPRPVKLLRGHTLVLNCTATTPLNTRVQMTWSYPDEKNKRASVRRRIDQSNSHANIFYSVLTIDKMQNKDKGLYTCRVRSGPSFKSVNTSVHIYDKAFITVKHRKQQVLETVAGKRSYRLSMKVKAFPSPEVVWLKDGLPATEKSARYLTRGYSLIIKDVTEEDAGNYTILLSIKQSNVFKNLTATLIVNVKPQIYEKAVSSFPDPALYPLGSRQILTCTAYGIPQPTIKWFWHPCNHNHSEARCDFCSNNEESFILDADSNMGNRIESITQRMAIIEGKNKMASTLVVADSRISGIYICIASNKVGTVGRNISFYITDVPNGFHVNLEKMPTEGEDLKLSCTVNKFLYRDVTWILLRTVNNRTMHYSISKQKMAITKEHSITLNLTIMNVSLQDSGTYACRARNVYTGEEILQKKEITIRGEHCNKKAVFSRISKFKSTRNDCTTQSNVKH

SEQ ID NO: 5463 - protein, 665 aa, Homo Sapiens
MVSYWDTGVLLCALLSCLLLTGSSSGSKLKDPELSLKGTQHIMQAGQTLHLQCRGEAAHKWSLPEMVSKESERLSITKSACGRNGKQFCSTLTLNTAQANHTGFYSCKYLAVPTSKKKETESAIYIFISDTGRPFVEMYSEIPEIIHMTEGRELVIPCRVTSPNITVTLKKFPLDTLIPDGKRIIWDSRKGFIISNATYKEIGLLTCEATVNGHLYKTNYLTHRQTNTIIDVQISTPRPVKLLRGHTLVLNCTATTPLNTRVQMTWSYPDEKNKRASVRRRIDQSNSHANIFYSVLTIDKMQNKDKGLYTCRVRSGPSFKSVNTSVHIYDKAFITVKHRKQQVLETVAGKRSYRLSMKVKAFPSPEVVWLKDGLPATEKSARYLTRGYSLIIKDVTEEDAGNYTILLSIKQSNVFKNLTATLIVNVKPQIYEKAVSSFPDPALYPLGSRQILTCTAYGIPQPTIKWFWHPCNHNHSEARCDFCSNNEESFILDADSNMGNRIESITQRMAIIEGKNKMASTLVVADSRISGIYICIASNKVGTVGRNISFYITDVPNGFHVNLEKMPTEGEDLKLSCTVNKFLYRDVTWILLRTVNNRTMHYSISKQKMAITKEHSITLNLTIMNVSLQDSGTYACRARNVYTGEEILQKKEITIRGSEEMLLPK

SEQ ID NO: 5464 - protein, 1363 aa, Homo Sapiens
MQRGAALCLRLWLCLGLLDGLVSGYSMTPPTLNITEESHVIDTGDSLSISCRGQHPLEWAWPGAQEAPATGDKDSEDTGVVRDCEGTDARPYCKVLLLHEVHANDTGSYVCYYKYIKARIEGTTAASSYVFVRDFEQPFINKPDTLLVNRKDAMWVPCLVSIPGLNVTLRSQSSVLWPDGQEVVWDDRRGMLVSTPLLHDALYLQCETTWGDQDFLSNPFLVHITGNELYDIQLLPRKSLELLVGEKLVLNCTVWAEFNSGVTFDWDYPGKQAERGKWVPERRSQQTHTELSSILTIHNVSQHDLGSYVCKANNGIQRFRESTEVIVHENPFISVEWLKGPILEATAGDELVKLPVKLAAYPPPEFQWYKDGKALSGRHSPHALVLKEVTEASTGTYTLALWNSAAGLRRNISLELVVNVPPQIHEKEASSPSIYSRHSRQALTCTAYGVPLPLSIQWHWRPWTPCKMFAQRSLRRRQQQDLMPQCRDWRAVTTQDAVNPIESLDTWTEFVEGKNKTVSKLVIQNANVSAMYKCVVSNKVGQDERLIYFYVTTIPDGFTIESKPSEELLEGQPVLLSCQADSYKYEHLRWYRLNLSTLHDAHGNPLLLDCKNVHLFATPLAASLEEVAPGARHATLSLSIPRVAPEHEGHYVCEVQDRRSHDKHCHKKYLSVQALEAPRLTQNLTDLLVNVSDSLEMQCLVAGAHAPSIVWYKDERLLEEKSGVDLADSNQKLSIQRVREEDAGRYLCSVCNAKGCVNSSASVAVEGSEDKGSMEIVILVGTGVIAVFFWVLLLLIFCNMRRPAHADIKTGYLSIIMDPGEVPLEEQCEYLSYDASQWEFPRERLHLGRVLGYGAFGKVVEASAFGIHKGSSCDTVAVKMLKEGATASEHRALMSELKILIHIGNHLNVVNLLGACTKPQGPLMVIVEFCKYGNLSNFLRAKRDAFSPCAEKSPEQRGRFRAMVELARLDRRRPGSSDRVLFARFSKTEGGARRASPDQEAEDLWLSPLTMEDLVCYSFQVARGMEFLASRKCIHRDLAARNILLSESDVVKICDFGLARDIYKDPDYVRKGSARLPLKWMAPESIFDKVYTTQSDVWSFGVLLWEIFSLGASPYPGVQINEEFCQRLRDGTRMRAPELATPAIRRIMLNCWSGDPKARPAFSELVEILGDLLQGRGLQEEEEVCMAPRSSQSSEEGSFSQVSTMALHIAQADAEDSPPSLQRHSLAARYYNWVSFPGCLARGAETRGSSRMKTFEEFPMTPTTYKGSVDNQTDSGMVLASEEFEQIESRHRQESGFSCKGPGQNVAVTRAHPDSQGRRRRPERGARGGQVFYNSEYGELSEPSEEDHCSPSARVTFFTDNSY

SEQ ID NO: 5465 - protein, 1298 aa, Homo Sapiens
MQRGAALCLRLWLCLGLLDGLVSGYSMTPPTLNITEESHVIDTGDSLSISCRGQHPLEWAWPGAQEAPATGDKDSEDTGVVRDCEGTDARPYCKVLLLHEVHANDTGSYVCYYKYIKARIEGTTAASSYVFVRDFEQPFINKPDTLLVNRKDAMWVPCLVSIPGLNVTLRSQSSVLWPDGQEVVWDDRRGMLVSTPLLHDALYLQCETTWGDQDFLSNPFLVHITGNELYDIQLLPRKSLELLVGEKLVLNCTVWAEFNSGVTFDWDYPGKQAERGKWVPERRSQQTHTELSSILTIHNVSQHDLGSYVCKANNGIQRFRESTEVIVHENPFISVEWLKGPILEATAGDELVKLPVKLAAYPPPEFQWYKDGKALSGRHSPHALVLKEVTEASTGTYTLALWNSAAGLRRNISLELVVNVPPQIHEKEASSPSIYSRHSRQALTCTAYGVPLPLSIQWHWRPWTPCKMFAQRSLRRRQQQDLMPQCRDWRAVTTQDAVNPIESLDTWTEFVEGKNKTVSKLVIQNANVSAMYKCVVSNKVGQDERLIYFYVTTIPDGFTIESKPSEELLEGQPVLLSCQADSYKYEHLRWYRLNLSTLHDAHGNPLLLDCKNVHLFATPLAASLEEVAPGARHATLSLSIPRVAPEHEGHYVCEVQDRRSHDKHCHKKYLSVQALEAPRLTQNLTDLLVNVSDSLEMQCLVAGAHAPSIVWYKDERLLEEKSGVDLADSNQKLSIQRVREEDAGRYLCSVCNAKGCVNSSASVAVEGSEDKGSMEIVILVGTGVIAVFFWVLLLLIFCNMRRPAHADIKTGYLSIIMDPGEVPLEEQCEYLSYDASQWEFPRERLHLGRVLGYGAFGKVVEASAFGIHKGSSCDTVAVKMLKEGATASEHRALMSELKILIHIGNHLNVVNLLGACTKPQGPLMVIVEFCKYGNLSNFLRAKRDAFSPCAEKSPEQRGRFRAMVELARLDRRRPGSSDRVLFARFSKTEGGARRASPDQEAEDLWLSPLTMEDLVCYSFQVARGMEFLASRKCIHRDLAARNILLSESDVVKICDFGLARDIYKDPDYVRKGSARLPLKWMAPESIFDKVYTTQSDVWSFGVLLWEIFSLGASPYPGVQINEEFCQRLRDGTRMRAPELATPAIRRIMLNCWSGDPKARPAFSELVEILGDLLQGRGLQEEEEVCMAPRSSQSSEEGSFSQVSTMALHIAQADAEDSPPSLQRHSLAARYYNWVSFPGCLARGAETRGSSRMKTFEEFPMTPTTYKGSVDNQTDSGMVLASEEFEQIESRHRQESGFR

SEQ ID NO: 5466 - protein, 1306 aa, Homo Sapiens
MQRGAALCLRLWLCLGLLDGLVSGYSMTPPTLNITEESHVIDTGDSLSISCRGQHPLEWAWPGAQEAPATGDKDSEDTGVVRDCEGTDARPYCKVLLLHEVHANDTGSYVCYYKYIKARIEGTTAASSYVFVRDFEQPFINKPDTLLVNRKDAMWVPCLVSIPGLNVTLRSQSSVLWPDGQEVVWDDRRGMLVSTPLLHDALYLQCETTWGDQDFLSNPFLVHITGNELYDIQLLPRKSLELLVGEKLVLNCTVWAEFNSGVTFDWDYPGKQAERGKWVPERRSQQTHTELSSILTIHNVSQHDLGSYVCKANNGIQRFRESTEVIVHENPFISVEWLKGPILEATAGDELVKLPVKLAAYPPPEFQWYKDGKALSGRHSPHALVLKEVTEASTGTYTLALWNSAAGLRRNISLELVVNVPPQIHEKEASSPSIYSRHSRQALTCTAYGVPLPLSIQWHWRPWTPCKMFAQRSLRRRQQQDLMPQCRDWRAVTTQDAVNPIESLDTWTEFVEGKNKTVSKLVIQNANVSAMYKCVVSNKVGQDERLIYFYVTTIPDGFTIESKPSEELLEGQPVLLSCQADSYKYEHLRWYRLNLSTLHDAHGNPLLLDCKNVHLFATPLAASLEEVAPGARHATLSLSIPRVAPEHEGHYVCEVQDRRSHDKHCHKKYLSVQALEAPRLTQNLTDLLVNVSDSLEMQCLVAGAHAPSIVWYKDERLLEEKSGVDLADSNQKLSIQRVREEDAGRYLCSVCNAKGCVNSSASVAVEGSEDKGSMEIVILVGTGVIAVFFWVLLLLIFCNMRRPAHADIKTGYLSIIMDPGEVPLEEQCEYLSYDASQWEFPRERLHLGRVLGYGAFGKVVEASAFGIHKGSSCDTVAVKMLKEGATASEHRALMSELKILIHIGNHLNVVNLLGACTKPQGPLMVIVEFCKYGNLSNFLRAKRDAFSPCAEKSPEQRGRFRAMVELARLDRRRPGSSDRVLFARFSKTEGGARRASPDQEAEDLWLSPLTMEDLVCYSFQVARGMEFLASRKCIHRDLAARNILLSESDVVKICDFGLARDIYKDPDYVRKGSARLPLKWMAPESIFDKVYTTQSDVWSFGVLLWEIFSLGASPYPGVQINEEFCQRLRDGTRMRAPELATPAIRRIMLNCWSGDPKARPAFSELVEILGDLLQGRGLQEEEEVCMAPRSSQSSEEGSFSQVSTMALHIAQADAEDSPPSLQRHSLAARYYNWVSFPGCLARGAETRGSSRMKTFEEFPMTPTTYKGSVDNQTDSGMVLASEEFEQIESRHRQESGFRGTRRTRGA

SEQ ID NO: 5467 - protein, 295 aa, Homo Sapiens
MQRGAALCLRLWLCLGLLDGLVSGYSMTPPTLNITEESHVIDTGDSLSISCRGQHPLEWAWPGAQEAPATGDKDSEDTGVVRDCEGTDARPYCKVLLLHEVHANDTGSYVCYYKYIKARIEGTTAASSYVFVRDFEQPFINKPDTLLVNRKDAMWVPCLVSIPGLNVTLRSQSSVLWPDGQEVVWDDRRGMLVSTPLLHDALYLQCETTWGDQDFLSNPFLVHITGNELYDIQLLPRKSLELLVGEKLVLNCTVWAEFNSGVTFDWDYPGKQKIPSSASSGSKDPSWRPRQETSW

SEQ ID NO: 5468 - protein, 142 aa, Homo Sapiens
MVELARLDRRRPGSSDRVLFARFSKTEGGARRASPDQEAEDLWLSPLTMEDLVCYSFQVARGMEFLASRKCIHRDLAARNILLSESDVVKICDFGLARDIYKDPDYVRKGSARLPLKWMAPESIFDKVYTTQSDVWSFGVLL

SEQ ID NO: 5469 - protein, 126 aa, Homo Sapiens
MAKRVAIVGAGVSGLASIKCCLEEGLEPTCFERSDDLGGLWRFTEHVEEGRASLYKSVVSNSCKEMSCYSDFPFPEDYPNYVPNSQFLEYLKMYANHFDLLKHIQFKSGIQLTEQQLFPISCIRDS

SEQ ID NO: 5470 - protein, 532 aa, Homo Sapiens
MAKRVAIVGAGVSGLASIKCCLEEGLEPTCFERSDDLGGLWRFTEHVEEGRASLYKSVVSNSCKEMSCYSDFPFPEDYPNYVPNSQFLEYLKMYANHFDLLKHIQFKTKVCSVTKCSDSAVSGQWEVVTMHEEKQESAIFDAVMVCTGFLTNPYLPLDSFPGINAFKGQYFHSRQYKHPDIFKDKRVLVIGMGNSGTDIAVEASHLAEKVFLSTTGGGWVISRIFDSGYPWDMVFMTRFQNMLRNSLPTPIVTWLMERKINNWLNHANYGLIPEDRTQLKEFVLNDELPGRIITGKVFIRPSIKEVKENSVIFNNTSKEEPIDIIVFATGYTFAFPFLDESVVKVEDGQASLYKYIFPAHLQKPTLAIIGLIKPLGSMIPTGETQARWAVRVLKGVNKLPPPSVMIEEINARKENKPSWFGLCYCKALQSDYITYIDELLTYINAKPNLFSMLLTDPHLALTVFFGPCSPYQFRLTGPGKWEGARNAIMTQWDRTFKVIKARVVQESPSPFESFLKVFSFLALLVAIFLIFL

SEQ ID NO: 5471 - protein, 532 aa, Homo Sapiens; identical to SEQ ID NO: 5470

SEQ ID NO: 5472 - protein, 532 aa, Homo Sapiens; identical to SEQ ID NO: 5470

SEQ ID NO: 5473 - protein, 469 aa, Homo Sapiens
MAKRVAIVGAGVSGLASIKCCLEEGLEPTCFERSDDLGGLWRFTTKVCSVTKCSDSAVSGQWEVVTMHEEKQESAIFDAVMVCTGFLTNPYLPLDSFPGINAFKGQYFHSRQYKHPDIFKDKRVLVIGMGNSGTDIAVEASHLAEKVFLSTTGGGWVISRIFDSGYPWDMVFMTRFQNMLRNSLPTPIVTWLMERKINNWLNHANYGLIPEDRTQLKEFVLNDELPGRIITGKVFIRPSIKEVKENSVIFNNTSKEEPIDIIVFATGYTFAFPFLDESVVKVEDGQASLYKYIFPAHLQKPTLAIIGLIKPLGSMIPTGETQARWAVRVLKGVNKLPPPSVMIEEINARKENKPSWFGLCYCKALQSDYITYIDELLTYINAKPNLFSMLLTDPHLALTVFFGPCSPYQFRLTGPGKWEGARNAIMTQWDRTFKVIKARVVQESPSPFESFLKVFSFLALLVAIFLIFL

SEQ ID NO: 5474 - protein, 131 aa, Homo Sapiens
MAKKVAVIGAGVSGLISLKCCVDEGLEPTCFERTEDIGGVWRFKENVEDGRASIYQSVVTNTSKEMSCFSDFPMPEDFPNFLHNSKLLEYFRIFAKKFDLLKYIQFQTTVLSVRKCPDFSSSGQWKVVTQS

SEQ ID NO: 5475 - protein, 535 aa, Homo Sapiens [sequence omitted]

SEQ ID NO: 5476 - protein, 153 aa, Homo Sapiens
TQPREKTILSKRRCQKAKTKENVEDGRASIYQSVVTNTSKEMSCFSDFPMPEDFPNFLHNSKLLEYFRIFAKKFDLLKYIQFQTTVLSVRKCPDFSSSGQWKVVTQSNGKEQSAVFDAVMVCSGHHILPHIPLKSFPGFYQHQAWHLGHEPYL

SEQ ID NO: 5477 - protein, 218 aa, Homo Sapiens
MGKKVAIIGAGVSGLASIRSCLEEGLEPTCFEKSNDIGGLWKFSDHAEEGRASIYKSVFSNSSKEMMCFPDFPFPDDFPNFMHNSKIQEYIIAFAKEKNLLKYIQFKTFVSSVNKHPDFATTGQWDVTTERDGKKESAVFDAVMVCSGHHVYPNLPDYKEPGVFNGKRVLVVGLGNSGCDIATELSRTAEQVMISSRSGSWVMSRVWDNGYPWDMLLV

SEQ ID NO: 5478 - protein, 532 aa, Homo Sapiens
MGKKVAIIGAGVSGLASIRSCLEEGLEPTCFEKSNDIGGLWKFSDHAEEGRASIYKSVFSNSSKEMMCFPDFPFPDDFPNFMHNSKIQEYIIAFAKEKNLLKYIQFKTFVSSVNKHPDFATTGQWDVTTERDGKKESAVFDAVMVCSGHHVYPNLPKESFPGLNHFKGKCFHSRDYKEPGVFNGKRVLVVGLGNSGCDIATELSRTAEQVMISSRSGSWVMSRVWDNGYPWDMLLVTRFGTFLKNNLPTAISDWLYVKQMNARFKHENYGLMPLNGVLRKEPVFNDELPASILCGIVSVKPNVKEFTETSAIFEDGTIFEGIDCVIFATGYSFAYPFLDESIIKSRNNEIILFKGVFPPLLEKSTIAVIGFVQSLGAAIPTVDLQSRWAAQVIKGTCTLPSMEDMMNDINEKMEKKRKWFGKSETIQTDYIVYMDELSSFIGAKPNIPWLFLTDPKLAMEVYFGPCSPYQFRLVGPGQWPGARNAILTQWDRSLKPMQTRVVGRLQKPCFFFHWLKLFAIPILLIAVFLVLT

SEQ ID NO: 5479 - protein, 48 aa, Homo Sapiens
MGKKVAIIGAGVSGLASIRSCLEEGLEPTCFEKSNDIGGLWKFSRSHE

SEQ ID NO: 5480 - protein, 145 aa, Homo Sapiens
MTKKRIAVIGGGVSGLSSIKCCVEEGLEPVCFERTDDIGGLWRFQENPEEGRASIYKSVIINTSKEMMCFSDYPIPDHYPNFMHNAQVLEYFRMYAKEFDLLKYIRFKTTVCSVKKQPDFATSGQWEVVTESEGKKEMNVFDGVM

SEQ ID NO: 5481 - protein, 192 aa, Homo Sapiens
MTKKRIAVIGGGVSGLSSIKCCVEEGLEPVCFERTDDIGGLWRFQENPEEGRASIYKSVIINTSKEMMCFSDYPIPDHYPNFMHNAQVLEYFRMYAKEFDLLKYIRFKTTVCSVKKQPDFATSGQWEVVTESEGKKEMNVFDGVMVCTGHHTNAHLPLESFPGIEKFKGQYFHSRDYKNPEGFTGKRVIIIG

SEQ ID NO: 5482 - protein, 533 aa, Homo Sapiens
MTKKRIAVIGGGVSGLSSIKCCVEEGLEPVCFERTDDIGGLWRFQENPEEGRASIYKSVIINTSKEMMCFSDYPIPDHYPNFMHNAQVLEYFRMYAKEFDLLKYIRFKTTVCSVKKQPDFATSGQWEVVTESEGKKEMNVFDGVMVCTGHHTNAHLPLESFPGIEKFKGQYFHSRDYKNPEGFTGKRVIIIGIGNSGGDLAVEISQTAKQVFLSTRRGAWILNRVGDYGYPADVLFSSRLTHFIWKICGQSLANKYLEKKINQRFDHEMFGLKPKHRALSQHPTLNDDLPNRIISGLVKVKGNVKEFTETAAIFEDGSREDDIDAVIFATGYSFDFPFLEDSVKVVKNKISLYKKVFPPNLERPTLAIIGLIQPLGAIMPISELQGRWATQVFKGLKTLPSQSEMMAEISKAQEEIDKRYVESQRHTIQGDYIDTMEELADLVGVRPNLLSLAFTDPKLALHLLLGPCTPIHYRVQGPGKWDGARKAILTTDDRIRKPLMTRVVERSSSMTSTMTIGKFMLALAFFAIIIAYF

SEQ ID NO: 5483 - protein, 285 aa, Homo Sapiens
MTKKRIAVIGGGVSGLSSIKCCVEEGLEPVCFERTDDIGGLWRFQENPEEGRASIYKSVIINTSKEMMCFSDYPIPDHYPNFMHNAQVLEYFRMYAKEFDLLKYIRFKTTVCSVKKQPDFATSGQWEVVTESEGKKEMNVFDGVMVCTGHHTNAHLPLESFPGIEKFKGQYFHSRDYKNPEGFTGKRVIIIGIGNSGGDLAVEISQTAKQVFLSTRRGAWILNRVGDYGYPADVLFSSRLTHFIWKICGQSLANKYLEKKINQRFDHEMFGLKPKHRSKDIALTE

SEQ ID NO: 5484 - protein, 464 aa, Homo Sapiens
MTKKRIAVIGGGVSGLSSIKCCVEEGLEPVCFERTDDIGGLWRFQENPEEGRASIYKSVIINTSKEMMCFSDYPIPDHYPNFMHNAQVLEYFRMYAKEFDLLKYIRFKTTVCSVKKQPDFATSGQWEVVTESEGKKEMNVFDGVMVCTGHHTNAHLPLESFPGIEKFKGQYFHSRDYKNPEGFTGKRVIIIGIGNSGGDLAVEISQTAKQVFLSTRRGAWILNRVGDYGYPADVLFSSRLTHFIWKICGQSLANKYLEKKINQRFDHEMFGLKPKHRALSQHPTLNDDLPNRIISGLVKVKGNVKEFTETAAIFEDGSREDDIDAVIFATGYSFDFPFLEDSVKVVKNKISLYKKVFPPNLERPTLAIIGLIQPLGAIMPISELQGRWATQVFKGLKTLPSQSEMMAEISKAQEEIDKSLTMRKTSDKPKLKNILQIPDYLKTVKIINKESLRNCPGIKGPKET

SEQ ID NO: 5485 - protein, 278 aa, Homo Sapiens
MTKKRIAVIGGGVSGLSSIKCCVEEGLEPVCFERTDDIGGLWRFQENPEEGRASIYKSVIINTSKEMMCFSDYPIPDHYPNFMHNAQVLEYFRMYAKEFDLLKYIRFKTTVCSVKKQPDFATSGQWEVVTESEGKKEMNVFDGVMVCTGHHTNAHLPLESFPGIEKFKGQYFHSRDYKNPEGFTGKRVIIIGIGNSGGDLAVEISQTAKQVFLSTRRGAWILNRVGDYGYPADVLFSSRLTHFIWKICGQSLANKYLEKKINQRFDHEMFGLKPKHRL

SEQ ID NO: 5486 - protein, 464 aa, Homo Sapiens; identical to SEQ ID NO: 5484

SEQ ID NO: 5487 - protein, 376 aa, Homo Sapiens
MQWTSLLLLAGLFSLSQAQYEDDPHWWFHYLRSQQSTYYDPYDPYPYETYEPYPYGVDEGPAYTYGSPSPPDPRDCPQECDCPPNFPTAMYCDNRNLKYLPFVPSRMKYVYFQNNQITSIQEGVFDNATGLLWIALHGNQITSDKVGRKVFSKLRHLERLYLDHNNLTRMPGPLPRSLRELHLDHNQISRVPNNALEGLENLTALYLQHNEIQEVGSSMRGLRSLILLDLSYNHLRKVPDGLPSALEQLYMEHNNVYTVPDSYFRGAPKLLYVRLSHNSLTNNGLASNTFNSSSLLELDLSYNQLQKIPPVNTNLENLYLQGNRINEFSISSFCTVVDVVNFSKLQVLRLDGNEIKRSAMPADAPLCLRLASLIEI

SEQ ID NO: 5488 - protein, 1103 aa, Homo Sapiens
LRWTPLNSSTIIGYRITVVAAGEGIPIFEDFVDSSVGYYTVTGLEPGIDYDISVITLINGGESAPTTLTQQTAVPPPTDLRFTNIGPDTMRVTWAPPPSIDLTNFLVRYSPVKNEEDVAELSISPSDNAVVLTNLLPGTEYVVSVSSVYEQHESTPLRGRQKTGLDSPTGIDFSDITANSFTVHWIAPRATITGYRIRHHPEHFSGRPREDRVPHSRNSITLTNLTPGTEYVVSIVALNGREESPLLIGQQSTVSDVPRDLEVVAATPTSLLISWDAPAVTVRYYRITYGETGGNSPVQEFTVPGSKSTATISGLKPGVDYTITVYAVTGRGDSPASSKPISINYRTEIDKPSQMQVTDVQDNSISVKWLPSSSPVTGYRVTTTPKNGPGPTKTKTAGPDQTEMTIEGLQPTVEYVVSVYAQNPSGESQPLVQTAVTTIPAPTDLKFTQVTPTSLSAQWTPPNVQLTGYRVRVTPKEKTGPMKEINLAPDSSSVVVSGLMVATKYEVSVYALKDTLTSRPAQGVVTTLENVSPPRRARVTDATETTITISWRTKTETITGFQVDAVPANGQTPIQRTIKPDVRSYTITGLQPGTDYKIYLYTLNDNARSSPVVIDASTAIDAPSNLRFLATTPNSLLVSWQPPRARITGYIIKYEKPGSPPREVVPRPRPGVTEATITGLEPGTEYTIYVIALKNNQKSEPLIGRKKTDELPQLVTLPHPNLHGPEILDVPSTVQKTPFVTHPGYDTGNGIQLPGTSGQQPSVGQQMIFEEHGFRRTTPPTTATPIRHRPRPYPPNVGEEIQIGHIPREDVDYHLYPHGPGLNPNASTGQEALSQTTISWAPFQDTSEYIISCHPVGTDEEPLQFRVPGTSTSATLTGLTRGATYNVIVEALKDQQRHKVREEVVTVGNSVNEGLNQPTDDSCFDPYTVSHYAVGDEWERMSESGFKLLCQCLGFGSGHFRCDSSRWCHDNGVNYKIGEKWDRQGENGQMMSCTCLGNGKGEFKCDPHEATCYDDGKTYHVGEQWQKEYLGAICSCTCFGGQRGWRCDNCRRPGGEPSPEGTTGQSYNQYSQRYHQRTNTNVNCPIECFMPLDVQADREDSRE

SEQ ID NO: 5489 - protein, 2355 aa, Homo Sapiens
MLRGPGPGLLLLAVQCLGTAVPSTGASKSKRQAQQMVQPQSPVAVSQSKPGCYDNGKHYQINQQWERTYLGNALVCTCYGGSRGFNCESKPEAEETCFDKYTGNTYRVGDTYERPKDSMIWDCTCIGAGRGRISCTIANRCHEGGQSYKIGDTWRRPHETGGYMLECVCLGNGKGEWTCKPIAEKCFDHAAGTSYVVGETWEKPYQGWMMVDCTCLGEGSGRITCTSRNRCNDQDTRTSYRIGDTWSKKDNRGNLLQCICTGNGRGEWKCERHTSVQTTSSGSGPFTDVRAAVYQPQPHPQPPPYGHCVTDSGVVYSVGMQWLKTQGNKQMLCTCLGNGVSCQETAVTQTYGGNSNGEPCVLPFTYNGRTFYSCTTEGRQDGHLWCSTTSNYEQDQKYSFCTDHTVLVQTRGGNSNGALCHFPFLYNNHNYTDCTSEGRRDNMKWCGTTQNYDADQKFGFCPMAAHEEICTTNEGVMYRIGDQWDKQHDMGHMMRCTCVGNGRGEWTCIAYSQLRDQCIVDDITYNVNDTFHKRHEEGHMLNCTCFGQGRGRWKCDPVDQCQDSETGTFYQIGDSWEKYVHGVRYQCYCYGRGIGEWHCQPLQTYPSSSGPVEVFITETPSQPNSHPIQWNAPQPSHISKYILRWRPKNSVGRWKEATIPGHLNSYTIKGLKPGVVYEGQLISIQQYGHQEVTRFDFTTTSTSTPVTSNTVTGETTPFSPLVATSESVTEITASSFVVSWVSASDTVSGFRVEYELSEEGDEPQYLDLPSTATSVNIPDLLPGRKYIVNVYQISEDGEQSLILSTSQTTAPDAPPDTTVDQVDDTSIVVRWSRPQAPITGYRIVYSPSVEGSSTELNLPETANSVTLSDLQPGVQYNITIYAVEENQESTPVVIQQETTGTPRSDTVPSPRDLQFVEVTDVKVTIMWTPPESAVTGYRVDVIPVNLPGEHGQRLPISRNTFAEVTGLSPGVTYYFKVFAVSHGRESKPLTAQQTTKLDAPTNLQFVNETDSTVLVRWTPPRAQITGYRLTVGLTRRGQPRQYNVGPSVSKYPLRNLQPASEYTVSLVAIKGNQESPKATGVFTTLQPGSSIPPYNTEVTETTIVITWTPAPRIGFKLGVRPSQGGEAPREVTSDSGSIVVSGLTPGVEYVYTIQVLRDGQERDAPIVNKVVTPLSPPTNLHLEANPDTGVLTVSWERSTTPDITGYRITTTPTNGQQGNSLEEVVHADQSSCTFDNLSPGLEYNVSVYTVKDDKESVPISDTIIPAVPPPTDLRFTNIGPDTMRVTWAPPPSIDLTNFLVRYSPVKNEEDVAELSISPSDNAVVLTNLLPGTEYVVSVSSVYEQHESTPLRGRQKTGLDSPTGIDFSDITANSFTVHWIAPRATITGYRIRHHPEHFSGRPREDRVPHSRNSITLTNLTPGTEYVVSIVALNGREESPLLIGQQSTVSDVPRDLEVVAATPTSLLISWDAPAVTVRYYRITYGETGGNSPVQEFTVPGSKSTATISGLKPGVDYTITVYAVTGRGDSPASSKPISINYRTEIDKPSQMQVTDVQDNSISVKWLPSSSPVTGYRVTTTPKNGPGPTKTKTAGPDQTEMTIEGLQPTVEYVVSVYAQNPSGESQPLVQTAVTNIDRPKGLAFTDVDVDSIKIAWESPQGQVSRYRVTYSSPEDGIHELFPAPDGEEDTAELQGLRPGSEYTVSVVALHDDMESQPLIGTQSTAIPAPTDLKFTQVTPTSLSAQWTPPNVQLTGYRVRVTPKEKTGPMKEINLAPDSSSVVVSGLMVATKYEVSVYALKDTLTSRPAQGVVTTLENVSPPRRARVTDATETTITISWRTKTETITGFQVDAVPANGQTPIQRTIKPDVRSYTITGLQPGTDYKIYLYTLNDNARSSPVVIDASTAIDAPSNLRFLATTPNSLLVSWQPPRARITGYIIKYEKPGSPPREVVPRPRPGVTEATITGLEPGTEYTIYVIALKNNQKSEPLIGRKKTDELPQLVTLPHPNLHGPEILDVPSTVQKTPFVTHPGYDTGNGIQLPGTSGQQPSVGQQMIFEEHGFRRTTPPTTATPIRHRPRPYPPNVGQEALSQTTISWAPFQDTSEYIISCHPVGTDEEPLQFRVPGTSTSATLTGLTRGATYNVIVEALKDQQRHKVREEVVTVGNSVNEGLNQPTDDSCFDPYTVSHYAVGDEWERMSESGFKLLCQCLGFGSGHFRCDSSRWCHDNGVNYKIGEKWDRQGENGQMMSCTCLGNGKGEFKCDPHEATCYDDGKTYHVGEQWQKEYLGAICSCTCFGGQRGWRCDNCRRPGGEPSPEGTTGQSYNQYSQRYHQRTNTNVNCPIECFMPLDVQADREDSRE

SEQ ID NO: 5490 - protein, 2477 aa, Homo Sapiens
MLRGPGPGLLLLAVQCLGTAVPSTGASKSKRQAQQMVQPQSPVAVSQSKPGCYDNGKHYQINQQWERTYLGNALVCTCYGGSRGFNCESKPEAEETCFDKYTGNTYRVGDTYERPKDSMIWDCTCIGAGRGRISCTIANRCHEGGQSYKIGDTWRRPHETGGYMLECVCLGNGKGEWTCKPIAEKCFDHAAGTSYVVGETWEKPYQGWMMVDCTCLGEGSGRITCTSRNRCNDQDTRTSYRIGDTWSKKDNRGNLLQCICTGNGRGEWKCERHTSVQTTSSGSGPFTDVRAAVYQPQPHPQPPPYGHCVTDSGVVYSVGMQWLKTQGNKQMLCTCLGNGVSCQETAVTQTYGGNSNGEPCVLPFTYNGRTFYSCTTEGRQDGHLWCSTTSNYEQDQKYSFCTDHTVLVQTRGGNSNGALCHFPFLYNNHNYTDCTSEGRRDNMKWCGTTQNYDADQKFGFCPMAAHEEICTTNEGVMYRIGDQWDKQHDMGHMMRCTCVGNGRGEWTCIAYSQLRDQCIVDDITYNVNDTFHKRHEEGHMLNCTCFGQGRGRWKCDPVDQCQDSETGTFYQIGDSWEKYVHGVRYQCYCYGRGIGEWHCQPLQTYPSSSGPVEVFITETPSQPNSHPIQWNAPQPSHISKYILRWRPKNSVGRWKEATIPGHLNSYTIKGLKPGVVYEGQLISIQQYGHQEVTRFDFTTTSTSTPVTSNTVTGETTPFSPLVATSESVTEITASSFVVSWVSASDTVSGFRVEYELSEEGDEPQYLDLPSTATSVNIPDLLPGRKYIVNVYQISEDGEQSLILSTSQTTAPDAPPDTTVDQVDDTSIVVRWSRPQAPITGYRIVYSPSVEGSSTELNLPETANSVTLSDLQPGVQYNITIYAVEENQESTPVVIQQETTGTPRSDTVPSPRDLQFVEVTDVKVTIMWTPPESAVTGYRVDVIPVNLPGEHGQRLPISRNTFAEVTGLSPGVTYYFKVFAVSHGRESKPLTAQQTTKLDAPTNLQFVNETDSTVLVRWTPPRAQITGYRLTVGLTRRGQPRQYNVGPSVSKYPLRNLQPASEYTVSLVAIKGNQESPKATGVFTTLQPGSSIPPYNTEVTETTIVITWTPAPRIGFKLGVRPSQGGEAPREVTSDSGSIVVSGLTPGVEYVYTIQVLRDGQERDAPIVNKVVTPLSPPTNLHLEANPDTGVLTVSWERSTTPDITGYRITTTPTNGQQGNSLEEVVHADQSSCTFDNLSPGLEYNVSVYTVKDDKESVPISDTIIPEVPQLTDLSFVDITDSSIGLRWTPLNSSTIIGYRITVVAAGEGIPIFEDFVDSSVGYYTVTGLEPGIDYDISVITLINGGESAPTTLTQQTAVPPPTDLRFTNIGPDTMRVTWAPPPSIDLTNFLVRYSPVKNEEDVAELSISPSDNAVVLTNLLPGTEYVVSVSSVYEQHESTPLRGRQKTGLDSPTGIDFSDITANSFTVHWIAPRATITGYRIRHHPEHFSGRPREDRVPHSRNSITLTNLTPGTEYVVSIVALNGREESPLLIGQQSTVSDVPRDLEVVAATPTSLLISWDAPAVTVRYYRITYGETGGNSPVQEFTVPGSKSTATISGLKPGVDYTITVYAVTGRGDSPASSKPISINYRTEIDKPSQMQVTDVQDNSISVKWLPSSSPVTGYRVTTTPKNGPGPTKTKTAGPDQTEMTIEGLQPTVEYVVSVYAQNPSGESQPLVQTAVTNIDRPKGLAFTDVDVDSIKIAWESPQGQVSRYRVTYSSPEDGIHELFPAPDGEEDTAELQGLRPGSEYTVSVVALHDDMESQPLIGTQSTAIPAPTDLKFTQVTPTSLSAQWTPPNVQLTGYRVRVTPKEKTGPMKEINLAPDSSSVVVSGLMVATKYEVSVYALKDTLTSRPAQGVVTTLENVSPPRRARVTDATETTITISWRTKTETITGFQVDAVPANGQTPIQRTIKPDVRSYTITGLQPGTDYKIYLYTLNDNARSSPVVIDASTAIDAPSNLRFLATTPNSLLVSWQPPRARITGYIIKYEKPGSPPREVVPRPRPGVTEATITGLEPGTEYTIYVIALKNNQKSEPLIGRKKTDELPQLVTLPHPNLHGPEILDVPSTVQKTPFVTHPGYDTGNGIQLPGTSGQQPSVGQQMIFEEHGFRRTTPPTTATPIRHRPRPYPPNVGEEIQIGHIPREDVDYHLYPHGPGLNPNASTGQEALSQTTISWAPFQDTSEYIISCHPVGTDEEPLQFRVPGTSTSATLTGLTRGATYNVIVEALKDQQRHKVREEVVTVGNSVNEGLNQPTDDSCFDPYTVSHYAVGDEWERMSESGFKLLCQCLGFGSGHFRCDSSRWCHDNGVNYKIGEKWDRQGENGQMMSCTCLGNGKGEFKCDPHEATCYDDGKTYHVGEQWQKEYLGAICSCTCFGGQRGWRCDNCRRPGGEPSPEGTTGQSYNQYSQRYHQRTNTNVNCPIECFMPLDVQADREDSRE

SEQ ID NO: 5491 - protein, 2176 aa, Homo Sapiens
MLRGPGPGLLLLAVQCLGTAVPSTGASKSKRQAQQMVQPQSPVAVSQSKPGCYDNGKHYQINQQWERTYLGNALVCTCYGGSRGFNCESKPEAEETCFDKYTGNTYRVGDTYERPKDSMIWDCTCIGAGRGRISCTIANRCHEGGQSYKIGDTWRRPHETGGYMLECVCLGNGKGEWTCKPIAEKCFDHAAGTSYVVGETWEKPYQGWMMVDCTCLGEGSGRITCTSRNRCNDQDTRTSYRIGDTWSKKDNRGNLLQCICTGNGRGEWKCERHTSVQTTSSGSGPFTDVRAAVYQPQPHPQPPPYGHCVTDSGVVYSVGMQWLKTQGNKQMLCTCLGNGVSCQETAVTQTYGGNSNGEPCVLPFTYNGRTFYSCTTEGRQDGHLWCSTTSNYEQDQKYSFCTDHTVLVQTRGGNSNGALCHFPFLYNNHNYTDCTSEGRRDNMKWCGTTQNYDADQKFGFCPMAAHEEICTTNEGVMYRIGDQWDKQHDMGHMMRCTCVGNGRGEWTCIAYSQLRDQCIVDDITYNVNDTFHKRHEEGHMLNCTCFGQGRGRWKCDPVDQCQDSETGTFYQIGDSWEKYVHGVRYQCYCYGRGIGEWHCQPLQTYPSSSGPVEVFITETPSQPNSHPIQWNAPQPSHISKYILRWRPKNSVGRWKEATIPGHLNSYTIKGLKPGVVYEGQLISIQQYGHQEVTRFDFTTTSTSTPVTSNTVTGETTPFSPLVATSESVTEITASSFVVSWVSASDTVSGFRVEYELSEEGDEPQYLDLPSTATSVNIPDLLPGRKYIVNVYQISEDGEQSLILSTSQTTAPDAPPDTTVDQVDDTSIVVRWSRPQAPITGYRIVYSPSVEGSSTELNLPETANSVTLSDLQPGVQYNITIYAVEENQESTPVVIQQETTGTPRSDTVPSPRDLQFVEVTDVKVTIMWTPPESAVTGYRVDVIPVNLPGEHGQRLPISRNTFAEVTGLSPGVTYYFKVFAVSHGRESKPLTAQQTTKLDAPTNLQFVNETDSTVLVRWTPPRAQITGYRLTVGLTRRGQPRQYNVGPSVSKYPLRNLQPASEYTVSLVAIKGNQESPKATGVFTTLQPGSSIPPYNTEVTETTIVITWTPAPRIGFKLGVRPSQGGEAPREVTSDSGSIVVSGLTPGVEYVYTIQVLRDGQERDAPIVNKVVTPLSPPTNLHLEANPDTGVLTVSWERSTTPDITGYRITTTPTNGQQGNSLEEVVHADQSSCTFDNLSPGLEYNVSVYTVKDDKESVPISDTIIPAVPPPTDLRFTNIGPDTMRVTWAPPPSIDLTNFLVRYSPVKNEEDVAELSISPSDNAVVLTNLLPGTEYVVSVSSVYEQHESTPLRGRQKTGLDSPTGIDFSDITANSFTVHWIAPRATITGYRIRHHPEHFSGRPREDRVPHSRNSITLTNLTPGTEYVVSIVALNGREESPLLIGQQSTVSDVPRDLEVVAATPTSLLISWDAPAVTVRYYRITYGETGGNSPVQEFTVPGSKSTATISGLKPGVDYTITVYAVTGRGDSPASSKPISINYRTEIDKPSQMQVTDVQDNSISVKWLPSSSPVTGYRVTTTPKNGPGPTKTKTAGPDQTEMTIEGLQPTVEYVVSVYAQNPSGESQPLVQTAVTTIPAPTDLKFTQVTPTSLSAQWTPPNVQLTGYRVRVTPKEKTGPMKEINLAPDSSSVVVSGLMVATKYEVSVYALKDTLTSRPAQGVVTTLENVSPPRRARVTDATETTITISWRTKTETITGFQVDAVPANGQTPIQRTIKPDVRSYTITGLQPGTDYKIYLYTLNDNARSSPVVIDASTAIDAPSNLRFLATTPNSLLVSWQPPRARITGYIIKYEKPGSPPREVVPRPRPGVTEATITGLEPGTEYTIYVIALKNNQKSEPLIGRKKTGQEALSQTTISWAPFQDTSEYIISCHPVGTDEEPLQFRVPGTSTSATLTGLTRGATYNVIVEALKDQQRHKVREEVVTVGNSVNEGLNQPTDDSCFDPYTVSHYAVGDEWERMSESGFKLLCQCLGFGSGHFRCDSSRWCHDNGVNYKIGEKWDRQGENGQMMSCTCLGNGKGEFKCDPHEATCYDDGKTYHVGEQWQKEYLGAICSCTCFGGQRGWRCDNCRRPGGEPSPEGTTGQSYNQYSQRYHQRTNTNVNCPIECFMPLDVQADREDSRE

SEQ ID NO: 5492 - protein, 2386 aa, Homo Sapiens
MLRGPGPGLLLLAVQCLGTAVPSTGASKSKRQAQQMVQPQSPVAVSQSKPGCYDNGKHYQINQQWERTYLGNALVCTCYGGSRGFNCESKPEAEETCFDKYTGNTYRVGDTYERPKDSMIWDCTCIGAGRGRISCTIANRCHEGGQSYKIGDTWRRPHETGGYMLECVCLGNGKGEWTCKPIAEKCFDHAAGTSYVVGETWEKPYQGWMMVDCTCLGEGSGRITCTSRNRCNDQDTRTSYRIGDTWSKKDNRGNLLQCICTGNGRGEWKCERHTSVQTTSSGSGPFTDVRAAVYQPQPHPQPPPYGHCVTDSGVVYSVGMQWLKTQGNKQMLCTCLGNGVSCQETAVTQTYGGNSNGEPCVLPFTYNGRTFYSCTTEGRQDGHLWCSTTSNYEQDQKYSFCTDHTVLVQTRGGNSNGALCHFPFLYNNHNYTDCTSEGRRDNMKWCGTTQNYDADQKFGFCPMAAHEEICTTNEGVMYRIGDQWDKQHDMGHMMRCTCVGNGRGEWTCIAYSQLRDQCIVDDITYNVNDTFHKRHEEGHMLNCTCFGQGRGRWKCDPVDQCQDSETGTFYQIGDSWEKYVHGVRYQCYCYGRGIGEWHCQPLQTYPSSSGPVEVFITETPSQPNSHPIQWNAPQPSHISKYILRWRPKNSVGRWKEATIPGHLNSYTIKGLKPGVVYEGQLISIQQYGHQEVTRFDFTTTSTSTPVTSNTVTGETTPFSPLVATSESVTEITASSFVVSWVSASDTVSGFRVEYELSEEGDEPQYLDLPSTATSVNIPDLLPGRKYIVNVYQISEDGEQSLILSTSQTTAPDAPPDTTVDQVDDTSIVVRWSRPQAPITGYRIVYSPSVEGSSTELNLPETANSVTLSDLQPGVQYNITIYAVEENQESTPVVIQQETTGTPRSDTVPSPRDLQFVEVTDVKVTIMWTPPESAVTGYRVDVIPVNLPGEHGQRLPISRNTFAEVTGLSPGVTYYFKVFAVSHGRESKPLTAQQTTKLDAPTNLQFVNETDSTVLVRWTPPRAQITGYRLTVGLTRRGQPRQYNVGPSVSKYPLRNLQPASEYTVSLVAIKGNQESPKATGVFTTLQPGSSIPPYNTEVTETTIVITWTPAPRIGFKLGVRPSQGGEAPREVTSDSGSIVVSGLTPGVEYVYTIQVLRDGQERDAPIVNKVVTPLSPPTNLHLEANPDTGVLTVSWERSTTPDITGYRITTTPTNGQQGNSLEEVVHADQSSCTFDNLSPGLEYNVSVYTVKDDKESVPISDTIIPAVPPPTDLRFTNIGPDTMRVTWAPPPSIDLTNFLVRYSPVKNEEDVAELSISPSDNAVVLTNLLPGTEYVVSVSSVYEQHESTPLRGRQKTGLDSPTGIDFSDITANSFTVHWIAPRATITGYRIRHHPEHFSGRPREDRVPHSRNSITLTNLTPGTEYVVSIVALNGREESPLLIGQQSTVSDVPRDLEVVAATPTSLLISWDAPAVTVRYYRITYGETGGNSPVQEFTVPGSKSTATISGLKPGVDYTITVYAVTGRGDSPASSKPISINYRTEIDKPSQMQVTDVQDNSISVKWLPSSSPVTGYRVTTTPKNGPGPTKTKTAGPDQTEMTIEGLQPTVEYVVSVYAQNPSGESQPLVQTAVTNIDRPKGLAFTDVDVDSIKIAWESPQGQVSRYRVTYSSPEDGIHELFPAPDGEEDTAELQGLRPGSEYTVSVVALHDDMESQPLIGTQSTAIPAPTDLKFTQVTPTSLSAQWTPPNVQLTGYRVRVTPKEKTGPMKEINLAPDSSSVVVSGLMVATKYEVSVYALKDTLTSRPAQGVVTTLENVSPPRRARVTDATETTITISWRTKTETITGFQVDAVPANGQTPIQRTIKPDVRSYTITGLQPGTDYKIYLYTLNDNARSSPVVIDASTAIDAPSNLRFLATTPNSLLVSWQPPRARITGYIIKYEKPGSPPREVVPRPRPGVTEATITGLEPGTEYTIYVIALKNNQKSEPLIGRKKTDELPQLVTLPHPNLHGPEILDVPSTVQKTPFVTHPGYDTGNGIQLPGTSGQQPSVGQQMIFEEHGFRRTTPPTTATPIRHRPRPYPPNVGEEIQIGHIPREDVDYHLYPHGPGLNPNASTGQEALSQTTISWAPFQDTSEYIISCHPVGTDEEPLQFRVPGTSTSATLTGLTRGATYNVIVEALKDQQRHKVREEVVTVGNSVNEGLNQPTDDSCFDPYTVSHYAVGDEWERMSESGFKLLCQCLGFGSGHFRCDSSRWCHDNGVNYKIGEKWDRQGENGQMMSCTCLGNGKGEFKCDPHEATCYDDGKTYHVGEQWQKEYLGAICSCTCFGGQRGWRCDNCRRPGGEPSPEGTTGQSYNQYSQRYHQRTNTNVNCPIECFMPLDVQADREDSRE

SEQ ID NO: 5493 - protein, 2296 aa, Homo Sapiens
MLRGPGPGLLLLAVQCLGTAVPSTGASKSKRQAQQMVQPQSPVAVSQSKPGCYDNGKHYQINQQWERTYLGNALVCTCYGGSRGFNCESKPEAEETCFDKYTGNTYRVGDTYERPKDSMIWDCTCIGAGRGRISCTIANRCHEGGQSYKIGDTWRRPHETGGYMLECVCLGNGKGEWTCKPIAEKCFDHAAGTSYVVGETWEKPYQGWMMVDCTCLGEGSGRITCTSRNRCNDQDTRTSYRIGDTWSKKDNRGNLLQCICTGNGRGEWKCERHTSVQTTSSGSGPFTDVRAAVYQPQPHPQPPPYGHCVTDSGVVYSVGMQWLKTQGNKQMLCTCLGNGVSCQETAVTQTYGGNSNGEPCVLPFTYNGRTFYSCTTEGRQDGHLWCSTTSNYEQDQKYSFCTDHTVLVQTRGGNSNGALCHFPFLYNNHNYTDCTSEGRRDNMKWCGTTQNYDADQKFGFCPMAAHEEICTTNEGVMYRIGDQWDKQHDMGHMMRCTCVGNGRGEWTCIAYSQLRDQCIVDDITYNVNDTFHKRHEEGHMLNCTCFGQGRGRWKCDPVDQCQDSETGTFYQIGDSWEKYVHGVRYQCYCYGRGIGEWHCQPLQTYPSSSGPVEVFITETPSQPNSHPIQWNAPQPSHISKYILRWRPKNSVGRWKEATIPGHLNSYTIKGLKPGVVYEGQLISIQQYGHQEVTRFDFTTTSTSTPVTSNTVTGETTPFSPLVATSESVTEITASSFVVSWVSASDTVSGFRVEYELSEEGDEPQYLDLPSTATSVNIPDLLPGRKYIVNVYQISEDGEQSLILSTSQTTAPDAPPDTTVDQVDDTSIVVRWSRPQAPITGYRIVYSPSVEGSSTELNLPETANSVTLSDLQPGVQYNITIYAVEENQESTPVVIQQETTGTPRSDTVPSPRDLQFVEVTDVKVTIMWTPPESAVTGYRVDVIPVNLPGEHGQRLPISRNTFAEVTGLSPGVTYYFKVFAVSHGRESKPLTAQQTTKLDAPTNLQFVNETDSTVLVRWTPPRAQITGYRLTVGLTRRGQPRQYNVGPSVSKYPLRNLQPASEYTVSLVAIKGNQESPKATGVFTTLQPGSSIPPYNTEVTETTIVITWTPAPRIGFKLGVRPSQGGEAPREVTSDSGSIVVSGLTPGVEYVYTIQVLRDGQERDAPIVNKVVTPLSPPTNLHLEANPDTGVLTVSWERSTTPDITGYRITTTPTNGQQGNSLEEVVHADQSSCTFDNLSPGLEYNVSVYTVKDDKESVPISDTIIPAVPPPTDLRFTNIGPDTMRVTWAPPPSIDLTNFLVRYSPVKNEEDVAELSISPSDNAVVLTNLLPGTEYVVSVSSVYEQHESTPLRGRQKTGLDSPTGIDFSDITANSFTVHWIAPRATITGYRIRHHPEHFSGRPREDRVPHSRNSITLTNLTPGTEYVVSIVALNGREESPLLIGQQSTVSDVPRDLEVVAATPTSLLISWDAPAVTVRYYRITYGETGGNSPVQEFTVPGSKSTATISGLKPGVDYTITVYAVTGRGDSPASSKPISINYRTEIDKPSQMQVTDVQDNSISVKWLPSSSPVTGYRVTTTPKNGPGPTKTKTAGPDQTEMTIEGLQPTVEYVVSVYAQNPSGESQPLVQTAVTTIPAPTDLKFTQVTPTSLSAQWTPPNVQLTGYRVRVTPKEKTGPMKEINLAPDSSSVVVSGLMVATKYEVSVYALKDTLTSRPAQGVVTTLENVSPPRRARVTDATETTITISWRTKTETITGFQVDAVPANGQTPIQRTIKPDVRSYTITGLQPGTDYKIYLYTLNDNARSSPVVIDASTAIDAPSNLRFLATTPNSLLVSWQPPRARITGYIIKYEKPGSPPREVVPRPRPGVTEATITGLEPGTEYTIYVIALKNNQKSEPLIGRKKTDELPQLVTLPHPNLHGPEILDVPSTVQKTPFVTHPGYDTGNGIQLPGTSGQQPSVGQQMIFEEHGFRRTTPPTTATPIRHRPRPYPPNVGEEIQIGHIPREDVDYHLYPHGPGLNPNASTGQEALSQTTISWAPFQDTSEYIISCHPVGTDEEPLQFRVPGTSTSATLTGLTRGATYNVIVEALKDQQRHKVREEVVTVGNSVNEGLNQPTDDSCFDPYTVSHYAVGDEWERMSESGFKLLCQCLGFGSGHFRCDSSRWCHDNGVNYKIGEKWDRQGENGQMMSCTCLGNGKGEFKCDPHEATCYDDGKTYHVGEQWQKEYLGAICSCTCFGGQRGWRCDNCRRPGGEPSPEGTTGQSYNQYSQRYHQRTNTNVNCPIECFMPLDVQADREDSRE

SEQ ID NO: 5494 - protein, 2446 aa, Homo Sapiens
MLRGPGPGLLLLAVQCLGTAVPSTGASKSKRQAQQMVQPQSPVAVSQSKPGCYDNGKHYQINQQWERTYLGNALVCTCYGGSRGFNCESKPEAEETCFDKYTGNTYRVGDTYERPKDSMIWDCTCIGAGRGRISCTIANRCHEGGQSYKIGDTWRRPHETGGYMLECVCLGNGKGEWTCKPIAEKCFDHAAGTSYVVGETWEKPYQGWMMVDCTCLGEGSGRITCTSRNRCNDQDTRTSYRIGDTWSKKDNRGNLLQCICTGNGRGEWKCERHTSVQTTSSGSGPFTDVRAAVYQPQPHPQPPPYGHCVTDSGVVYSVGMQWLKTQGNKQMLCTCLGNGVSCQETAVTQTYGGNSNGEPCVLPFTYNGRTFYSCTTEGRQDGHLWCSTTSNYEQDQKYSFCTDHTVLVQTRGGNSNGALCHFPFLYNNHNYTDCTSEGRRDNMKWCGTTQNYDADQKFGFCPMAAHEEICTTNEGVMYRIGDQWDKQHDMGHMMRCTCVGNGRGEWTCIAYSQLRDQCIVDDITYNVNDTFHKRHEEGHMLNCTCFGQGRGRWKCDPVDQCQDSETGTFYQIGDSWEKYVHGVRYQCYCYGRGIGEWHCQPLQTYPSSSGPVEVFITETPSQPNSHPIQWNAPQPSHISKYILRWRPKNSVGRWKEATIPGHLNSYTIKGLKPGVVYEGQLISIQQYGHQEVTRFDFTTTSTSTPVTSNTVTGETTPFSPLVATSESVTEITASSFVVSWVSASDTVSGFRVEYELSEEGDEPQYLDLPSTATSVNIPDLLPGRKYIVNVYQISEDGEQSLILSTSQTTAPDAPPDTTVDQVDDTSIVVRWSRPQAPITGYRIVYSPSVEGSSTELNLPETANSVTLSDLQPGVQYNITIYAVEENQESTPVVIQQETTGTPRSDTVPSPRDLQFVEVTDVKVTIMWTPPESAVTGYRVDVIPVNLPGEHGQRLPISRNTFAEVTGLSPGVTYYFKVFAVSHGRESKPLTAQQTTKLDAPTNLQFVNETDSTVLVRWTPPRAQITGYRLTVGLTRRGQPRQYNVGPSVSKYPLRNLQPASEYTVSLVAIKGNQESPKATGVFTTLQPGSSIPPYNTEVTETTIVITWTPAPRIGFKLGVRPSQGGEAPREVTSDSGSIVVSGLTPGVEYVYTIQVLRDGQERDAPIVNKVVTPLSPPTNLHLEANPDTGVLTVSWERSTTPDITGYRITTTPTNGQQGNSLEEVVHADQSSCTFDNLSPGLEYNVSVYTVKDDKESVPISDTIIPEVPQLTDLSFVDITDSSIGLRWTPLNSSTIIGYRITVVAAGEGIPIFEDFVDSSVGYYTVTGLEPGIDYDISVITLINGGESAPTTLTQQTAVPPPTDLRFTNIGPDTMRVTWAPPPSIDLTNFLVRYSPVKNEEDVAELSISPSDNAVVLTNLLPGTEYVVSVSSVYEQHESTPLRGRQKTGLDSPTGIDFSDITANSFTVHWIAPRATITGYRIRHHPEHFSGRPREDRVPHSRNSITLTNLTPGTEYVVSIVALNGREESPLLIGQQSTVSDVPRDLEVVAATPTSLLISWDAPAVTVRYYRITYGETGGNSPVQEFTVPGSKSTATISGLKPGVDYTITVYAVTGRGDSPASSKPISINYRTEIDKPSQMQVTDVQDNSISVKWLPSSSPVTGYRVTTTPKNGPGPTKTKTAGPDQTEMTIEGLQPTVEYVVSVYAQNPSGESQPLVQTAVTNIDRPKGLAFTDVDVDSIKIAWESPQGQVSRYRVTYSSPEDGIHELFPAPDGEEDTAELQGLRPGSEYTVSVVALHDDMESQPLIGTQSTAIPAPTDLKFTQVTPTSLSAQWTPPNVQLTGYRVRVTPKEKTGPMKEINLAPDSSSVVVSGLMVATKYEVSVYALKDTLTSRPAQGVVTTLENVSPPRRARVTDATETTITISWRTKTETITGFQVDAVPANGQTPIQRTIKPDVRSYTITGLQPGTDYKIYLYTLNDNARSSPVVIDASTAIDAPSNLRFLATTPNSLLVSWQPPRARITGYIIKYEKPGSPPREVVPRPRPGVTEATITGLEPGTEYTIYVIALKNNQKSEPLIGRKKTDELPQLVTLPHPNLHGPEILDVPSTVQKTPFVTHPGYDTGNGIQLPGTSGQQPSVGQQMIFEEHGFRRTTPPTTATPIRHRPRPYPPNVGQEALSQTTISWAPFQDTSEYIISCHPVGTDEEPLQFRVPGTSTSATLTGLTRGATYNVIVEALKDQQRHKVREEVVTVGNSVNEGLNQPTDDSCFDPYTVSHYAVGDEWERMSESGFKLLCQCLGFGSGHFRCDSSRWCHDNGVNYKIGEKWDRQGENGQMMSCTCLGNGKGEFKCDPHEATCYDDGKTYHVGEQWQKEYLGAICSCTCFGGQRGWRCDNCRRPGGEPSPEGTTGQSYNQYSQRYHQRTNTNVNCPIECFMPLDVQADREDSRE

SEQ ID NO: 5495 - protein, 2330 aa, Homo Sapiens
MLRGPGPGLLLLAVQCLGTAVPSTGASKSKRQAQQMVQPQSPVAVSQSKPGCYDNGKHYQINQQWERTYLGNALVCTCYGGSRGFNCESKPEAEETCFDKYTGNTYRVGDTYERPKDSMIWDCTCIGAGRGRISCTIANRCHEGGQSYKIGDTWRRPHETGGYMLECVCLGNGKGEWTCKPIAEKCFDHAAGTSYVVGETWEKPYQGWMMVDCTCLGEGSGRITCTSRNRCNDQDTRTSYRIGDTWSKKDNRGNLLQCICTGNGRGEWKCERHTSVQTTSSGSGPFTDVRAAVYQPQPHPQPPPYGHCVTDSGVVYSVGMQWLKTQGNKQMLCTCLGNGVSCQETAVTQTYGGNSNGEPCVLPFTYNGRTFYSCTTEGRQDGHLWCSTTSNYEQDQKYSFCTDHTVLVQTRGGNSNGALCHFPFLYNNHNYTDCTSEGRRDNMKWCGTTQNYDADQKFGFCPMAAHEEICTTNEGVMYRIGDQWDKQHDMGHMMRCTCVGNGRGEWTCIAYSQLRDQCIVDDITYNVNDTFHKRHEEGHMLNCTCFGQGRGRWKCDPVDQCQDSETGTFYQIGDSWEKYVHGVRYQCYCYGRGIGEWHCQPLQTYPSSSGPVEVFITETPSQPNSHPIQWNAPQPSHISKYILRWRPKNSVGRWKEATIPGHLNSYTIKGLKPGVVYEGQLISIQQYGHQEVTRFDFTTTSTSTPVTSNTVTGETTPFSPLVATSESVTEITASSFVVSWVSASDTVSGFRVEYELSEEGDEPQYLDLPSTATSVNIPDLLPGRKYIVNVYQISEDGEQSLILSTSQTTAPDAPPDTTVDQVDDTSIVVRWSRPQAPITGYRIVYSPSVEGSSTELNLPETANSVTLSDLQPGVQYNITIYAVEENQESTPVVIQQETTGTPRSDTVPSPRDLQFVEVTDVKVTIMWTPPESAVTGYRVDVIPVNLPGEHGQRLPISRNTFAEVTGLSPGVTYYFKVFAVSHGRESKPLTAQQTTKLDAPTNLQFVNETDSTVLVRWTPPRAQITGYRLTVGLTRRGQPRQYNVGPSVSKYPLRNLQPASEYTVSLVAIKGNQESPKATGVFTTLQPGSSIPPYNTEVTETTIVITWTPAPRIGFKLGVRPSQGGEAPREVTSDSGSIVVSGLTPGVEYVYTIQVLRDGQERDAPIVNKVVTPLSPPTNLHLEANPDTGVLTVSWERSTTPDITGYRITTTPTNGQQGNSLEEVVHADQSSCTFDNLSPGLEYNVSVYTVKDDKESVPISDTIIPAVPPPTDLRFTNIGPDTMRVTWAPPPSIDLTNFLVRYSPVKNEEDVAELSISPSDNAVVLTNLLPGTEYVVSVSSVYEQHESTPLRGRQKTGLDSPTGIDFSDITANSFTVHWIAPRATITGYRIRHHPEHFSGRPREDRVPHSRNSITLTNLTPGTEYVVSIVALNGREESPLLIGQQSTVSDVPRDLEVVAATPTSLLISWDAPAVTVRYYRITYGETGGNSPVQEFTVPGSKSTATISGLKPGVDYTITVYAVTGRGDSPASSKPISINYRTEIDKPSQMQVTDVQDNSISVKWLPSSSPVTGYRVTTTPKNGPGPTKTKTAGPDQTEMTIEGLQPTVEYVVSVYAQNPSGESQPLVQTAVTNIDRPKGLAFTDVDVDSIKIAWESPQGQVSRYRVTYSSPEDGIHELFPAPDGEEDTAELQGLRPGSEYTVSVVALHDDMESQPLIGTQSTAIPAPTDLKFTQVTPTSLSAQWTPPNVQLTGYRVRVTPKEKTGPMKEINLAPDSSSVVVSGLMVATKYEVSVYALKDTLTSRPAQGVVTTLENVSPPRRARVTDATETTITISWRTKTETITGFQVDAVPANGQTPIQRTIKPDVRSYTITGLQPGTDYKIYLYTLNDNARSSPVVIDASTAIDAPSNLRFLATTPNSLLVSWQPPRARITGYIIKYEKPGSPPREVVPRPRPGVTEATITGLEPGTEYTIYVIALKNNQKSEPLIGRKKTVQKTPFVTHPGYDTGNGIQLPGTSGQQPSVGQQMIFEEHGFRRTTPPTTATPIRHRPRPYPPNVGQEALSQTTISWAPFQDTSEYIISCHPVGTDEEPLQFRVPGTSTSATLTGLTRGATYNVIVEALKDQQRHKVREEVVTVGNSVNEGLNQPTDDSCFDPYTVSHYAVGDEWERMSESGFKLLCQCLGFGSGHFRCDSSRWCHDNGVNYKIGEKWDRQGENGQMMSCTCLGNGKGEFKCDPHEATCYDDGKTYHVGEQWQKEYLGAICSCTCFGGQRGWRCDNCRRPGGEPSPEGTTGQSYNQYSQRYHQRTNTNVNCPIECFMPLDVQADREDSRE

SEQ ID NO: 5496 - protein, 2240 aa, Homo Sapiens
MLRGPGPGLLLLAVQCLGTAVPSTGASKSKRQAQQMVQPQSPVAVSQSKPGCYDNGKHYQINQQWERTYLGNALVCTCYGGSRGFNCESKPEAEETCFDKYTGNTYRVGDTYERPKDSMIWDCTCIGAGRGRISCTIANRCHEGGQSYKIGDTWRRPHETGGYMLECVCLGNGKGEWTCKPIAEKCFDHAAGTSYVVGETWEKPYQGWMMVDCTCLGEGSGRITCTSRNRCNDQDTRTSYRIGDTWSKKDNRGNLLQCICTGNGRGEWKCERHTSVQTTSSGSGPFTDVRAAVYQPQPHPQPPPYGHCVTDSGVVYSVGMQWLKTQGNKQMLCTCLGNGVSCQETAVTQTYGGNSNGEPCVLPFTYNGRTFYSCTTEGRQDGHLWCSTTSNYEQDQKYSFCTDHTVLVQTRGGNSNGALCHFPFLYNNHNYTDCTSEGRRDNMKWCGTTQNYDADQKFGFCPMAAHEEICTTNEGVMYRIGDQWDKQHDMGHMMRCTCVGNGRGEWTCIAYSQLRDQCIVDDITYNVNDTFHKRHEEGHMLNCTCFGQGRGRWKCDPVDQCQDSETGTFYQIGDSWEKYVHGVRYQCYCYGRGIGEWHCQPLQTYPSSSGPVEVFITETPSQPNSHPIQWNAPQPSHISKYILRWRPKNSVGRWKEATIPGHLNSYTIKGLKPGVVYEGQLISIQQYGHQEVTRFDFTTTSTSTPVTSNTVTGETTPFSPLVATSESVTEITASSFVVSWVSASDTVSGFRVEYELSEEGDEPQYLDLPSTATSVNIPDLLPGRKYIVNVYQISEDGEQSLILSTSQTTAPDAPPDTTVDQVDDTSIVVRWSRPQAPITGYRIVYSPSVEGSSTELNLPETANSVTLSDLQPGVQYNITIYAVEENQESTPVVIQQETTGTPRSDTVPSPRDLQFVEVTDVKVTIMWTPPESAVTGYRVDVIPVNLPGEHGQRLPISRNTFAEVTGLSPGVTYYFKVFAVSHGRESKPLTAQQTTKLDAPTNLQFVNETDSTVLVRWTPPRAQITGYRLTVGLTRRGQPRQYNVGPSVSKYPLRNLQPASEYTVSLVAIKGNQESPKATGVFTTLQPGSSIPPYNTEVTETTIVITWTPAPRIGFKLGVRPSQGGEAPREVTSDSGSIVVSGLTPGVEYVYTIQVLRDGQERDAPIVNKVVTPLSPPTNLHLEANPDTGVLTVSWERSTTPDITGYRITTTPTNGQQGNSLEEVVHADQSSCTFDNLSPGLEYNVSVYTVKDDKESVPISDTIIPAVPPPTDLRFTNIGPDTMRVTWAPPPSIDLTNFLVRYSPVKNEEDVAELSISPSDNAVVLTNLLPGTEYVVSVSSVYEQHESTPLRGRQKTGLDSPTGIDFSDITANSFTVHWIAPRATITGYRIRHHPEHFSGRPREDRVPHSRNSITLTNLTPGTEYVVSIVALNGREESPLLIGQQSTVSDVPRDLEVVAATPTSLLISWDAPAVTVRYYRITYGETGGNSPVQEFTVPGSKSTATISGLKPGVDYTITVYAVTGRGDSPASSKPISINYRTEIDKPSQMQVTDVQDNSISVKWLPSSSPVTGYRVTTTPKNGPGPTKTKTAGPDQTEMTIEGLQPTVEYVVSVYAQNPSGESQPLVQTAVTTIPAPTDLKFTQVTPTSLSAQWTPPNVQLTGYRVRVTPKEKTGPMKEINLAPDSSSVVVSGLMVATKYEVSVYALKDTLTSRPAQGVVTTLENVSPPRRARVTDATETTITISWRTKTETITGFQVDAVPANGQTPIQRTIKPDVRSYTITGLQPGTDYKIYLYTLNDNARSSPVVIDASTAIDAPSNLRFLATTPNSLLVSWQPPRARITGYIIKYEKPGSPPREVVPRPRPGVTEATITGLEPGTEYTIYVIALKNNQKSEPLIGRKKTVQKTPFVTHPGYDTGNGIQLPGTSGQQPSVGQQMIFEEHGFRRTTPPTTATPIRHRPRPYPPNVGQEALSQTTISWAPFQDTSEYIISCHPVGTDEEPLQFRVPGTSTSATLTGLTRGATYNVIVEALKDQQRHKVREEVVTVGNSVNEGLNQPTDDSCFDPYTVSHYAVGDEWERMSESGFKLLCQCLGFGSGHFRCDSSRWCHDNGVNYKIGEKWDRQGENGQMMSCTCLGNGKGEFKCDPHEATCYDDGKTYHVGEQWQKEYLGAICSCTCFGGQRGWRCDNCRRPGGEPSPEGTTGQSYNQYSQRYHQRTNTNVNCPIECFMPLDVQADREDSRE

SEQ ID NO: 5497 - protein, 657 aa, Homo Sapiens
MLRGPGPGLLLLAVQCLGTAVPSTGASKSKRQAQQMVQPQSPVAVSQSKPGCYDNGKHYQINQQWERTYLGNALVCTCYGGSRGFNCESKPEAEETCFDKYTGNTYRVGDTYERPKDSMIWDCTCIGAGRGRISCTIANRCHEGGQSYKIGDTWRRPHETGGYMLECVCLGNGKGEWTCKPIAEKCFDHAAGTSYVVGETWEKPYQGWMMVDCTCLGEGSGRITCTSRNRCNDQDTRTSYRIGDTWSKKDNRGNLLQCICTGNGRGEWKCERHTSVQTTSSGSGPFTDVRAAVYQPQPHPQPPPYGHCVTDSGVVYSVGMQWLKTQGNKQMLCTCLGNGVSCQETAVTQTYGGNSNGEPCVLPFTYNGRTFYSCTTEGRQDGHLWCSTTSNYEQDQKYSFCTDHTVLVQTRGGNSNGALCHFPFLYNNHNYTDCTSEGRRDNMKWCGTTQNYDADQKFGFCPMAAHEEICTTNEGVMYRIGDQWDKQHDMGHMMRCTCVGNGRGEWTCIAYSQLRDQCIVDDITYNVNDTFHKRHEEGHMLNCTCFGQGRGRWKCDPVDQCQDSETGTFYQIGDSWEKYVHGVRYQCYCYGRGIGEWHCQPLQTYPSSSGPVEVFITETPSQPNSHPIQWNAPQPSHISKYILRWRPVSIPPRNLGY

SEQ ID NO: 5498 - protein, 2267 aa, Homo Sapiens
MLRGPGPGLLLLAVQCLGTAVPSTGASKSKRQAQQMVQPQSPVAVSQSKPGCYDNGKHYQINQQWERTYLGNALVCTCYGGSRGFNCESKPEAEETCFDKYTGNTYRVGDTYERPKDSMIWDCTCIGAGRGRISCTIANRCHEGGQSYKIGDTWRRPHETGGYMLECVCLGNGKGEWTCKPIAEKCFDHAAGTSYVVGETWEKPYQGWMMVDCTCLGEGSGRITCTSRNRCNDQDTRTSYRIGDTWSKKDNRGNLLQCICTGNGRGEWKCERHTSVQTTSSGSGPFTDVRAAVYQPQPHPQPPPYGHCVTDSGVVYSVGMQWLKTQGNKQMLCTCLGNGVSCQETAVTQTYGGNSNGEPCVLPFTYNGRTFYSCTTEGRQDGHLWCSTTSNYEQDQKYSFCTDHTVLVQTRGGNSNGALCHFPFLYNNHNYTDCTSEGRRDNMKWCGTTQNYDADQKFGFCPMAAHEEICTTNEGVMYRIGDQWDKQHDMGHMMRCTCVGNGRGEWTCIAYSQLRDQCIVDDITYNVNDTFHKRHEEGHMLNCTCFGQGRGRWKCDPVDQCQDSETGTFYQIGDSWEKYVHGVRYQCYCYGRGIGEWHCQPLQTYPSSSGPVEVFITETPSQPNSHPIQWNAPQPSHISKYILRWRPKNSVGRWKEATIPGHLNSYTIKGLKPGVVYEGQLISIQQYGHQEVTRFDFTTTSTSTPVTSNTVTGETTPFSPLVATSESVTEITASSFVVSWVSASDTVSGFRVEYELSEEGDEPQYLDLPSTATSVNIPDLLPGRKYIVNVYQISEDGEQSLILSTSQTTAPDAPPDTTVDQVDDTSIVVRWSRPQAPITGYRIVYSPSVEGSSTELNLPETANSVTLSDLQPGVQYNITIYAVEENQESTPVVIQQETTGTPRSDTVPSPRDLQFVEVTDVKVTIMWTPPESAVTGYRVDVIPVNLPGEHGQRLPISRNTFAEVTGLSPGVTYYFKVFAVSHGRESKPLTAQQTTKLDAPTNLQFVNETDSTVLVRWTPPRAQITGYRLTVGLTRRGQPRQYNVGPSVSKYPLRNLQPASEYTVSLVAIKGNQESPKATGVFTTLQPGSSIPPYNTEVTETTIVITWTPAPRIGFKLGVRPSQGGEAPREVTSDSGSIVVSGLTPGVEYVYTIQVLRDGQERDAPIVNKVVTPLSPPTNLHLEANPDTGVLTVSWERSTTPDITGYRITTTPTNGQQGNSLEEVVHADQSSCTFDNLSPGLEYNVSVYTVKDDKESVPISDTIIPEVPQLTDLSFVDITDSSIGLRWTPLNSSTIIGYRITVVAAGEGIPIFEDFVDSSVGYYTVTGLEPGIDYDISVITLINGGESAPTTLTQQTAVPPPTDLRFTNIGPDTMRVTWAPPPSIDLTNFLVRYSPVKNEEDVAELSISPSDNAVVLTNLLPGTEYVVSVSSVYEQHESTPLRGRQKTGLDSPTGIDFSDITANSFTVHWIAPRATITGYRIRHHPEHFSGRPREDRVPHSRNSITLTNLTPGTEYVVSIVALNGREESPLLIGQQSTVSDVPRDLEVVAATPTSLLISWDAPAVTVRYYRITYGETGGNSPVQEFTVPGSKSTATISGLKPGVDYTITVYAVTGRGDSPASSKPISINYRTEIDKPSQMQVTDVQDNSISVKWLPSSSPVTGYRVTTTPKNGPGPTKTKTAGPDQTEMTIEGLQPTVEYVVSVYAQNPSGESQPLVQTAVTTIPAPTDLKFTQVTPTSLSAQWTPPNVQLTGYRVRVTPKEKTGPMKEINLAPDSSSVVVSGLMVATKYEVSVYALKDTLTSRPAQGVVTTLENVSPPRRARVTDATETTITISWRTKTETITGFQVDAVPANGQTPIQRTIKPDVRSYTITGLQPGTDYKIYLYTLNDNARSSPVVIDASTAIDAPSNLRFLATTPNSLLVSWQPPRARITGYIIKYEKPGSPPREVVPRPRPGVTEATITGLEPGTEYTIYVIALKNNQKSEPLIGRKKTGQEALSQTTISWAPFQDTSEYIISCHPVGTDEEPLQFRVPGTSTSATLTGLTRGATYNVIVEALKDQQRHKVREEVVTVGNSVNEGLNQPTDDSCFDPYTVSHYAVGDEWERMSESGFKLLCQCLGFGSGHFRCDSSRWCHDNGVNYKIGEKWDRQGENGQMMSCTCLGNGKGEFKCDPHEATCYDDGKTYHVGEQWQKEYLGAICSCTCFGGQRGWRCDNCRRPGGEPSPEGTTGQSYNQYSQRYHQRTNTNVNCPIECFMPLDVQADREDSRE

SEQ ID NO: 5499 - protein, 2265 aa, Homo Sapiens
MLRGPGPGLLLLAVQCLGTAVPSTGASKSKRQAQQMVQPQSPVAVSQSKPGCYDNGKHYQINQQWERTYLGNALVCTCYGGSRGFNCESKPEAEETCFDKYTGNTYRVGDTYERPKDSMIWDCTCIGAGRGRISCTIANRCHEGGQSYKIGDTWRRPHETGGYMLECVCLGNGKGEWTCKPIAEKCFDHAAGTSYVVGETWEKPYQGWMMVDCTCLGEGSGRITCTSRNRCNDQDTRTSYRIGDTWSKKDNRGNLLQCICTGNGRGEWKCERHTSVQTTSSGSGPFTDVRAAVYQPQPHPQPPPYGHCVTDSGVVYSVGMQWLKTQGNKQMLCTCLGNGVSCQETAVTQTYGGNSNGEPCVLPFTYNGRTFYSCTTEGRQDGHLWCSTTSNYEQDQKYSFCTDHTVLVQTRGGNSNGALCHFPFLYNNHNYTDCTSEGRRDNMKWCGTTQNYDADQKFGFCPMAAHEEICTTNEGVMYRIGDQWDKQHDMGHMMRCTCVGNGRGEWTCIAYSQLRDQCIVDDITYNVNDTFHKRHEEGHMLNCTCFGQGRGRWKCDPVDQCQDSETGTFYQIGDSWEKYVHGVRYQCYCYGRGIGEWHCQPLQTYPSSSGPVEVFITETPSQPNSHPIQWNAPQPSHISKYILRWRPKNSVGRWKEATIPGHLNSYTIKGLKPGVVYEGQLISIQQYGHQEVTRFDFTTTSTSTPVTSNTVTGETTPFSPLVATSESVTEITASSFVVSWVSASDTVSGFRVEYELSEEGDEPQYLDLPSTATSVNIPDLLPGRKYIVNVYQISEDGEQSLILSTSQTTAPDAPPDTTVDQVDDTSIVVRWSRPQAPITGYRIVYSPSVEGSSTELNLPETANSVTLSDLQPGVQYNITIYAVEENQESTPVVIQQETTGTPRSDTVPSPRDLQFVEVTDVKVTIMWTPPESAVTGYRVDVIPVNLPGEHGQRLPISRNTFAEVTGLSPGVTYYFKVFAVSHGRESKPLTAQQTTKLDAPTNLQFVNETDSTVLVRWTPPRAQITGYRLTVGLTRRGQPRQYNVGPSVSKYPLRNLQPASEYTVSLVAIKGNQESPKATGVFTTLQPGSSIPPYNTEVTETTIVITWTPAPRIGFKLGVRPSQGGEAPREVTSDSGSIVVSGLTPGVEYVYTIQVLRDGQERDAPIVNKVVTPLSPPTNLHLEANPDTGVLTVSWERSTTPDITGYRITTTPTNGQQGNSLEEVVHADQSSCTFDNLSPGLEYNVSVYTVKDDKESVPISDTIIPAVPPPTDLRFTNIGPDTMRVTWAPPPSIDLTNFLVRYSPVKNEEDVAELSISPSDNAVVLTNLLPGTEYVVSVSSVYEQHESTPLRGRQKTGLDSPTGIDFSDITANSFTVHWIAPRATITGYRIRHHPEHFSGRPREDRVPHSRNSITLTNLTPGTEYVVSIVALNGREESPLLIGQQSTVSDVPRDLEVVAATPTSLLISWDAPAVTVRYYRITYGETGGNSPVQEFTVPGSKSTATISGLKPGVDYTITVYAVTGRGDSPASSKPISINYRTEIDKPSQMQVTDVQDNSISVKWLPSSSPVTGYRVTTTPKNGPGPTKTKTAGPDQTEMTIEGLQPTVEYVVSVYAQNPSGESQPLVQTAVTTIPAPTDLKFTQVTPTSLSAQWTPPNVQLTGYRVRVTPKEKTGPMKEINLAPDSSSVVVSGLMVATKYEVSVYALKDTLTSRPAQGVVTTLENVSPPRRARVTDATETTITISWRTKTETITGFQVDAVPANGQTPIQRTIKPDVRSYTITGLQPGTDYKIYLYTLNDNARSSPVVIDASTAIDAPSNLRFLATTPNSLLVSWQPPRARITGYIIKYEKPGSPPREVVPRPRPGVTEATITGLEPGTEYTIYVIALKNNQKSEPLIGRKKTDELPQLVTLPHPNLHGPEILDVPSTVQKTPFVTHPGYDTGNGIQLPGTSGQQPSVGQQMIFEEHGFRRTTPPTTATPIRHRPRPYPPNVGQEALSQTTISWAPFQDTSEYIISCHPVGTDEEPLQFRVPGTSTSATLTGLTRGATYNVIVEALKDQQRHKVREEVVTVGNSVNEGLNQPTDDSCFDPYTVSHYAVGDEWERMSESGFKLLCQCLGFGSGHFRCDSSRWCHDNGVNYKIGEKWDRQGENGQMMSCTCLGNGKGEFKCDPHEATCYDDGKTYHVGEQWQKEYLGAICSCTCFGGQRGWRCDNCRRPGGEPSPEGTTGQSYNQYSQRYHQRTNTNVNCPIECFMPLDVQADREDSRE

SEQ ID NO: 5500 - protein, 241 aa, Homo Sapiens
YLYTLNDNARSSPVVIDASTAIDAPSNLRFLATTPNSLLVSWQPPRARITGYIIKYEKPGSPPREVVPRPRPGVTEATITGLEPGTEYTIYVIALKNNQKSEPLIGRKKTVQKTPFVTHPGYDTGNGIQLPGTSGQQPSVGQQMIFEEHGFRRTTPPTTATPIRHRPRPYPPNVGEEIQIGHIPREDVDYHLYPHGPGLNPNASTGQEALSQTTISWAPFQDTSEYIISCHPVGTDEEPLQ

SEQ ID NO: 5501 - protein, 1894 aa, Homo Sapiens
MAPEAGATLRAPRRLSWAALLLLAALLPVASSAAASVDHPLKPRHVKLLSTKMGLKVTWDPPKDATSRPVEHYNIAYGKSLKSLKYIKVNAETYSFLIEDVEPGVVYFVLLTAENHSGVSRPVYRAESPPGGEWIEIDGFPIKGPGPFNETVTEKEVPNKPLRVRVRSSDDRLSVAWKAPRLSGAKSPRRSRGFLLGYGESGRKMNYVPLTRDERTHEIKKLASESVYVVSLQSMNSQGRSQPVYRAALTKRKISEEDELDVPDDISVRVMSSQSVLVSWVDPVLEKQKKVVASRQYTVRYREKGELARWDYKQIANRRVLIENLIPDTVYEFAVRISQGERDGKWSTSVFQRTPESAPTTAPENLNVWPVNGKPTVVAASWDALPETEGKVKEYILSYAPALKPFGAKSLTYPGDTTSALVDGLQPGERYLFKIRATNRRGLGPHSKAFIVAMPTTSKADVEQNTEDNGKPEKPEPSSPSPRAPASSQHPSVPASPQGRNAKDLLLDLKNKILANGGAPRKPQLRAKKAEELDLQSTEITGEEELGSREDSPMSPSDTQDQKRTLRPPSRHGHSVVAPGRTAVRARMPALPRREGVDKPGFSLATQPRPGAPPSASASPAHHASTQGTSHRPSLPASLNDNDLVDSDEDERAVGSLHPKGAFAQPRPALSPSRQSPSSVLRDRSSVHPGAKPASPARRTPHSGAAEEDSSASAPPSRLSPPHGGSSRLLPTQPHLSSPLSKGGKDGEDAPATNSNAPSRSTMSSSVSSHLSSRTQVSEGAEASDGESHGDGDREDGGRQAEATAQTLRARPASGHFHLLRHKPFAANGRSPSRFSIGRGPRLQPSSSPQSTVPSRAHPRVPSHSDSHPKLSSGIHGDEEDEKPLPATVVNDHVPSSSRQPISRGWEDLRRSPQRGASLHRKEPIPENPKSTGADTHPQGKYSSLASKAQDVQQSTDADTEGHSPKAQPGSTDRHASPARPPAARSQQHPSVPRRMTPGRAPQQQPPPPVATSQHHPGPQSRDAGRSPSQPRLSLTQAGRPRPTSQGRSHSSSDPYTASSRGMLPTALQNQDEDAQGSYDDDSTEVEAQDVRAPAHAARAKEAAASLPKHQQVESPTGAGAGGDHRSQRGHAASPARPSRPGGPQSRARVPSRAAPGKSEPPSKRPLSSKSQQSVSAEDDEEEDAGFFKGGKEDLLSSSVPKWPSSSTPRGGKDADGSLAKEEREPAIALAPRGGSLAPVKRPLPPPPGSSPRASHVPSRLPPRSAATVSPVAGTHPWPQYTTRAPPGHFSTTPMLSLRQRMMHARFRNPLSRQPARPSYRQGYNGRPNVEGKVLPGSNGKPNGQRIINGPQGTKWVVDLDRGLVLNAEGRYLQDSHGNPLRIKLGGDGRTIVDLEGTPVVSPDGLPLFGQGRHGTPLANAQDKPILSLGGKPLVGLEVIKKTTHPPTTTMQPTTTTTPLPTTTTPRPTTATTRRTTTTRRTTTRRPTTTVRTTTRTTTTTTPTPTTPIPTCPPGTLERHDDDGNLIMSSNGIPECYAEEDEFSGLETDTAVPTEEAYVIYDEDYEFETSRPPTTTEPSTTATTPRVIPEEGAISSFPEEEFDLAGRKRFVAPYVTYLNKDPSAPCSLTDALDHFQVDSLDEIIPNDLKKSDLPPQHAPRNITVVAVEGCHSFVIVDWDKATPGDVVTGYLVYSASYEDFIRNKWSTQASSVTHLPIENLKPNTRYYFKVQAQNPHGYGPISPSVSFVTESDNPLLVVRPPGGEPIWIPFAFKHDPSYTDCHGRQYVKRTWYRKFVGVVLCNSLRYKIYLSDNLKDTFYSIGDSWGRGEDHCQFVDSHLDGRTGPQSYVEALPTIQGYYRQYRQEPVRFGNIGFGTPYYYVGWYECGVSIPGKW

SEQ ID NO: 5502 - protein, 1790 aa, Homo Sapiens
  misc_feature (1)..(1): Xaa can be any naturally occurring amino acid
XPRHVKLLSTKMGLKVTWDPPKDATSRPVEHYNIAYGKSLKSLKYIKVNAETYSFLIEDVEPGVVYFVLLTAENHSGVSRPVYRAESPPGGEWIEIDGFPIKGPGPFNETVTEKEVPNKPLRVRVRSSDDRLSVAWKAPRLSGAKSPRRSRGFLLGYGESGRKMNYVPLTRDERTHEIKKLASESVYVVSLQSMNSQGRSQPVYRAALTKRKISEEDELDVPDDISVRVMSSQSVLVSWVDPVLEKQKKVVASRQYTVRYREKGELARWDYKQIANRRVLIENLIPDTVYEFAVRISQGERDGKWSTSVFQRTPESAPTTAPENLNVWPVNGKPTVVAASWDALPETEGKVKASKADVEQNTEDNGKPEKPEPSSPSPRAPASSQHPSVPASPQGRNAKDLLLDLKNKILANGGAPRKPQLRAKKAEELDLQSTEITGEEELGSREDSPMSPSDTQDQKRTLRPPSRHGHSVVAPGRTAVRARMPALPRREGVDKPGFSLATQPRPGAPPSASASPAHHASTQGTSHRPSLPASLNDNDLVDSDEDERAVGSLHPKGAFAQPRPALSPSRQSPSSVLRDRSSVHPGAKPASPARRTPHSGAAEEDSSASAPPSRLSPPHGGSSRLLPTQPHLSSPLSKGGKDGEDAPATNSNAPSRSTMSSSVSSHLSSRTQVSEGAEASDGESHGDGDREDGGRQAEATAQTLRARPASGHFHLLRHKPFAANGRSPSRFSIGRGPRLQPSSSPQSTVPSRAHPRVPSHSDSHPKLSSGIHGDEEDEKPLPATVVNDHVPSSSRQPISRGWEDLRRSPQRGASLHRKEPIPENPKSTGADTHPQGKYSSLASKAQDVQQSTDADTEGHSPKAQPGSTDRHASPARPPAARSQQHPSVPRRMTPGRAPQQQPPPPVATSQHHPGPQSRDAGRSPSQPRLSLTQAGRPRPTSQGRSHSSSDPYTASSRGMLPTALQNQDEDAQGSYDDDSTEVEAQDVRAPAHAARAKEAAASLPKHQQVESPTGAGAGGDHRSQRGHAASPARPSRPGGPQSRARVPSRAAPGKSEPPSKRPLSSKSQQSVSAEDDEEEDAGFFKGGKEDLLSSSVPKWPSSSTPRGGKDADGSLAKEEREPAIALAPRGGSLAPVKRPLPPPPGSSPRASHVPSRLPPRSAATVSPVAGTHPWPQYTTRAPPGHFSTTPMLSLRQRMMHARFRNPLSRQPARPSYRQGYNGRPNVEGKVLPGSNGKPNGQRIINGPQGTKWVVDLDRGLVLNAEGRYLQDSHGNPLRIKLGGDGRTIVDLEGTPVVSPDGLPLFGQGRHGTPLANAQDKPILSLGGKPLVGLEVIKKTTHPPTTTMQPTTTTTPLPTTTTPRPTTATTRRTTTTRRTTTRRPTTTVRTTTRTTTTTTPTPTTPIPTCPPGTLERHDDDGNLIMSSNGIPECYAEEDEFSGLETDTAVPTEEAYVIYDEDYEFETSRPPTTTEPSTTATTPRVIPEEGAISSFPEEEFDLAGRKRFVAPYVTYLNKDPSAPCSLTDALDHFQVDSLDEIIPNDLKKSDLPPQHAPRNITVVAVEGCHSFVIVDWDKATPGDVVTGYLVYSASYEDFIRNKWSTQASSVTHLPIENLKPNTRYYFKVQAQNPHGYGPISPSVSFVTESDNPLLVVRPPGGEPIWIPFAFKHDPSYTDCHGRQYVKRTWYRKFVGVVLCNSLRYKIYLSDNLKDTFYSIGDSWGRGEDHCQFVDSHLDGRTGPQSYVEALPTIQGYYRQYRQEPVRFGNIGFGTPYYYVGWYECGVSIPGKW

SEQ ID NO: 5503 - protein, 733 aa, Homo Sapiens
MAGGRETCLPLIGFILICLKMVASAKSAPEIPTIDQAYSKLSNSITVEWATVPGATSYLLTAEDGDTVIETTVANSPGTVTGLKAATWYEITIRSISAAGRSQASPPKQAKTVLAAPILEVSSPSSDSILVQWEAVYMAIAFSVSIMRANGLGSIWKENTTNTSLTFTSLEAGTLYTIKAYAWNANRIPGDDSTCNQRTSPRAPANIQVSFDSGALKASFSWARAEGAFNYTVMALSDSSELTCSTTFSSCTISSLQCGTEYLISVLASNDAGSSKSSSAMTLKTVACAPGRVTIQEDPPGHLSVAWSSVDLGDYYVVFVKSDDGLEVHCNTSLTQCNFLSECGFTYFISVFVYNKAGQSPLGDIFNYTTAPCCPSDINPVLVSSDRVEIVWSPVRGAELYETKAVDGYNMVECNDTTPACTLSALECDTKYNITVYSFNEVRGSNMSCTPQFITTAPCSPEIKNVSRDAFSMINVHWRSTNDDATYTVTAQGEKGLYQCSSTGESCTMRGLPCGSVFSVTAVAETQAGRSLPSYSVPLETVPCCPTGLTVTQITQSVINVSWTIGRVAQTHVAVLESHTGQSKCHTHQNHCLLGCITCGINYTVTLKAISATGLTADCSYQSYFSGACCPLGVKLYRLGPNGIRIYWQASRGSANYSTDLYGSKGIFTCTPSAGLSFCDVTEIPCGDVYTVMVSPVAKTGLKLTFCPKKIYSVTCSGSTLGMVIYRGKRNEE

SEQ ID NO: 5504 - protein, 499 aa, Homo Sapiens
  misc_feature (1)..(1): Xaa can be any naturally occurring amino acid
XEGAFNYTVMALSDSSELTCSTTFSSCTISSLQCGTEYLISVLASNDAGSSKSSSAMTLKTVACAPGRVTIQEDPPGHLSVAWSSVDLGDYYVVFVKSDDGLEVHCNTSLTQCNFLSECGFTYFISVFVYNKAGQSPLGDIFNYTTAPCCPSDINPVLVSSDRVEIVWSPVRGAELYETKAVDGYNMVECNDTTPACTLSALECDTKYNITVYSFNEVRGSNMSCTPQFITTAPCSPEIKNVSRDAFSMINVHWRSTNDDATYTVTAQGEKGLYQCSSTGESCTMRGLPCGSVFSVTAVAETQAGRSLPSYSVPLETVPCCPTGLTVTQITQSVINVSWTIGRVAQTHVAVLESHTGQSKCHTHQNHCLLGCITCGINYTVTLKAISATGLTADCSYQSYFSGACCPLGVKLYRLGPNGIRIYWQASRGSANYSTDLYGSKGIFTCTPSAGLSFCDVTEIPCGDVYTVMVSPVAKTGLKLTFCPKKIYSVIYRGKRNEE

SEQ ID NO: 5505 - protein, 46 aa, Homo Sapiens
MAVSDVPSLSVGKEVQWEKLIAKAASIRDICHINMVQICWQLFLKC

SEQ ID NO: 5506 - protein, 1237 aa, Homo Sapiens
MAVSDVPSLSVGKEVQWEKLIAKAASIRDICKQRPYQHGADMLAAISQVLNECTKPDQATPAALVLQGLHALCQAEVVCIRSTWNALSPKLSCDTRPLILKTLSELFSLVPSLTVNTTEYENFKVQVLSFLWTHTQNKDPIVANAAYRSLANFSAGEHTILHLPEKIRPEIPIPEELDDDEDVEDVDLSVPGSCYLKLLSLTPPLVLPALEEFFTSLVKQEMVNMPRGIYHSALKGGARSDQGKTVAGIPNFILKMYETNKQPGLKPGLAGGMLFCYDVSMYQSKDGKPLNRLMASRGRSFKQTSLALVHEVHIQLSEWHRAIFLPQAWLAYMNRAYHAILQGRLGELELQLKHGKEEPEEVQYKKSTAWLWVRDMLTDEITKAAAKESPVVKGNALLALSSLAVVVSRHEASLSSDSDGLLEVQPNFLSMKEWVSMVLDTLLVIVDSHYQPRGQLLSWFYYKSYSGENTASAIARSAAATALSLLVPVFIISCKEKVEEILNMLTARLPGKPSADESQAVQIHMGLALGMFLSRLCEEKLSDISGQEMNLLLMKSLDALENCCFDTSLEYNTGCILGVGLVLSLMSHSSQMQSRVHVAALLRKLSAHVDDSGSQSRTFQEVLAYTLSCVCTSAFSAGIIEATEAEDVMNKLRLLVENSQQTSGFALALGNIVHGLSVCGHGKAEDLGSKLLPAWIRIVLTEGTPTMLCLAALHGMVALVGSEGDVMQLKSEAIQTSHFQGRLNEVIRTLTQVISVSGVIGLQSNAVWLLGHLHLSTLSSSQSRASVPTDYSYLPESSFIGAAIGFFITGGKKGPESVPPSLLKVVMKPIATVGESYQYPPVNWAALLSPLMRLNFGEEIQQLCLEIMVTQAQSSQNAAALLGLWVTPPLIHSLSLNTKRYLLISAPLWIKHISDEQILGFVENLMVAVFKAASPLGSPELCPSALHGLSQAMKLPSPAHHLWSLLSEATGKIFDLLPNKIRRKDLELYISIAKCLLEMTDDDANRIAQVTKSNIEKAAFVKLYLVSQGRFPLVNLTDMLSVAVQHREKEVLAWMILHSLYQARIVSHANTGVLKRMEWLLELMGYIRNVAYQSTSFHNTALDKALDFFLLIFATAVVAWADHTAPLLLGLSASWLPWHQENGPAGPVPSFLGRSPMHRVTLQEVLTLLPNSMALLLQKEPWKEQTQKFIDWLFSIMESPKEALSAQSRDLLKATLLSLRVLPEFKKKAVWTRAYGW

SEQ ID NO: 5507 - protein, 99 aa, Homo Sapiens
MLTARLPGKPSADESQAVQIHMGLALGMFLSRLCEEKLSDISGQEMNLLLMKSLDALENCCFDTSLEYNTGCILGVGLVLSLMSHSSQMQSRVHVAALL

SEQ ID NO: 5508 - protein, 128 aa, Homo Sapiens
MLTARLPGKPSADESQAVQIHMGLALGMFLSRLCEEKLSDISGQEMNLLLMKSLDALENCCFDTSLEYNTGCILGVGLVLSLMSHSSQMQSRVHVAALLRKLSAHVDDSGSQSRTFQEVLAYTLSCVC

SEQ ID NO: 5509 - protein, 180 aa, Homo Sapiens
MPKVFSVYFVCLCPALGKICDISGQEMNLLLMKSLDALENCCFDTSLEYNTGCILGVGLVLSLMSHSSQMQSRVHVAALLRKLSAHVDDSGSQSRTFQEVLAYTLSCVCTSAFSAGIIEATEAEDVMNKLRLLVENSQQTSGFALALGNIVHGLSVCGHGKAEDLGSKLLPAWIRIVLTE

SEQ ID NO: 5510 - protein, 1801 aa, Homo Sapiens
MSDDIRKRFEFPNSLIQSQAVGHLIAAVLKENGFSEKIHQSTNQTPALNLLWEKCCSDNVVVRTACCEGLVALVAQDHAEFSYVLNGILNLIPSTRNTHGLIKAIMHLLQMQALKEGQGGEKNIQSIYTIRNHPHPLITVLEHRPDCWPVFLQQLTAFFQQCPERLEVSCIQIMAPFLWYLYCEPSQLQEYAKLRLALLKVLLQPQVLCDKDQPSILEQQILQLCCDIVPCLQVKDLIQTTEAMMFIEEVCLSLLRHPVFWKIQLTQMSLQLLCVSEVSLKITGECSSSIHLLEHSVELLKEDFPVELVIIGIALLLLQTPASQQKPILNLALKLLSVTEDQKIPKSSLLLVMPILQILSSTALEDCISVDEEGPSRQQLALNLLEMIQQECYRDDHQKLSYKLVCPVTSMYGTIFTAWRILEVMTDSSAASDWLASVESLLPITAVIPAPAFLLLAHLLVEDKGQNLHQILKVTTELAQADSSQVPNLIPVLMFKLGRPLEPILYNDILYTLPKLGVHKVCIGQILRIIQLLGTTPRLRAVTLRLLTSLWEKQDRVYPELQRFMAVSDVPSLSVGKEVQWEKLIAKAASIRDICKQRPYQHGADMLAAISQVLNECTKPDQATPAALVLQGLHALCQAEVVCIRSTWNALSPKLSCDTRPLILKTLSELFSLVPSLTVNTTEYENFKVQVLSFLWTHTQNKDPIVANAAYRSLANFSAGEHTILHLPEKIRPEIPIPEELDDDEDVEDVDLSVPGSCYLKLLSLTPPLVLPALEEFFTSLVKQEMVNMPRGIYHSALKGGARSDQGKTVAGIPNFILKMYETNKQPGLKPGLAGGMLFCYDVSMYQSKDGKPLNRLMASRGRSFKQTSLALVHEVHIQLSEWHRAIFLPQAWLAYMNRAYHAILQGRLGELELQLKHGKEEPEEVQYKKSTAWLWVRDMLTDEITKAAAKESPVVKGNALLALSSLAVVVSRHEASLSSDSDGLLEVQPNFLSMKEWVSMVLDTLLVIVDSHYQPRGQLLSWFYYKSYSGENTASAIARSAAATALSLLVPVFIISCKEKVEEILNMLTARLPGKPSADESQAVQIHMGLALGMFLSRLCEEKLSDISGQEMNLLLMKSLDALENCCFDTSLEYNTGCILGVGLVLSLMSHSSQMQSRVHVAALLRKLSAHVDDSGSQSRTFQEVLAYTLSCVCTSAFSAGIIEATEAEDVMNKLRLLVENSQQTSGFALALGNIVHGLSVCGHGKAEDLGSKLLPAWIRIVLTEGTPTMLCLAALHGMVALVGSEGDVMQLKSEAIQTSHFQGRLNEVIRTLTQVISVSGVIGLQSNAVWLLGHLHLSTLSSSQSRASVPTDYSYLPESSFIGAAIGFFITGGKKGPESVPPSLLKVVMKPIATVGESYQYPPVNWAALLSPLMRLNFGEEIQQLCLEIMVTQAQSSQNAAALLGLWVTPPLIHSLSLNTKRYLLISAPLWIKHISDEQILGFVENLMVAVFKAASPLGSPELCPSALHGLSQAMKLPSPAHHLWSLLSEATGKIFDLLPNKIRRKDLELYISIAKCLLEMTDDDANRIAQVTKSNIEKAAFVKLYLVSQGRFPLVNLTDMLSVAVQHREKEVLAWMILHSLYQARIVSHANTGVLKRMEWLLELMGYIRNVAYQSTSFHNTALDKALDFFLLIFATAVVAWADHTAPLLLGLSASWLPWHQENGPAGPVPSFLGRSPMHRVTLQEVLTLLPNSMALLLQKEPWKEQTQKFIDWLFSIMESPKEALSAQSRDLLKATLLSLRVLPEFKKKAVWTRAYGW

SEQ ID NO: 5511 - protein, 1801 aa, Homo Sapiens; identical to SEQ ID NO: 5510

SEQ ID NO: 5512 - protein, 181 aa, Homo Sapiens
MLPAATEGQKDMVWKWMPLLLLLVCVATMCSAQDRTDLLNVCMDAKHHKTKPGPEDKLHDQCSPWKKNACCTASTSQELHKDTSRLYNFNWDHCGKMEPACKRHFIQDTCLYECSPNLGPWIQQVNQSWRKERFLDVPLCKEDCQRWWEDCHTSHTCKSNWHRGWDWTSGVNKCPAGALCR

SEQ ID NO: 5513 - protein, 198 aa, Homo Sapiens
MLPAATELRLQGQKDMVWKWMPLLLLLVCVATMCSAQDRTDLLNVCMDAKHHKTKPGPEDKLHDQCSPWKKNACCTASTSQELHKDTSRLYNFNWDHCGKMEPACKRHFIQDTCLYECSPNLGPWIQQVNQSWRKERFLDVPLCKEDCQRWWEDCHTSHTCKSNWHRGWDWTSGVNKCPAGALCRTFESYFPTPAALC

SEQ ID NO: 5514 - protein, 214 aa, Homo Sapiens
MLPAATEVQCSPWKKNACCTASTSQELHKDTSRLYNFNWDHCGKMEPACKRHFIQDTCLYECSPNLGPWIQQVNQSWRKERFLDVPLCKEDCQRWWEDCHTSHTCKSNWHRGWDWTSGVNKCPAGALCRTFESYFPTPAALCEGLWSHSYKVSNYSRGSGRCIQMWFDSAQGNPNEEVARFYAAAMHVNAGEMLHGTGGLLLSLALMLQLWLLG

SEQ ID NO: 5515 - protein, 210 aa, Homo Sapiens
MLPAATEVQGQKDMVWKWMPLLLLLVCVATMCSAQDRTDLLNVCMDAKHHKTKPGPEDKLHDQCSPWKKNACCTASTSQELHKDTSRLYNFNWDHCGKMEPACKRHFIQDTCLYECSPNLGPWIQQVNQSWRKERFLDVPLCKEDCQRWWEDCHTSHTCKSNWHRGWDWTSGVNKCPAGALCRTFESYFPTPAALCEGLWSHSYKVSNYS

SEQ ID NO: 5516 - protein, 148 aa, Homo Sapiens
MLPAATEVQKDHAGSCGEGNLKGKKLEEGRLDTKHRAMLRLQGQKDMVWKWMPLLLLLVCVATMCSAQDRTDLLNVCMDAKHHKTKPGPEDKLHDQCSPWKKNACCTASTSQELHKDTSRLYNFNWDHCGKMEPACKRHFIQDTCLYE

SEQ ID NO: 5517 - protein, 251 aa, Homo Sapiens
MLPAATEVQLRLQGQKDMVWKWMPLLLLLVCVATMCSAQDRTDLLNVCMDAKHHKTKPGPEDKLHDQCSPWKKNACCTASTSQELHKDTSRLYNFNWDHCGKMEPACKRHFIQDTCLYECSPNLGPWIQQVNQSWRKERFLDVPLCKEDCQRWWEDCHTSHTCKSNWHRGWDWTSAALCEGLWSHSYKVSNYSRGSGRCIQMWFDSAQGNPNEEVARFYAAAMHVNAGEMLHGTGGLLLSLALMLQLWLLG

SEQ ID NO: 5518 - protein, 244 aa, Homo Sapiens
MLPAATEVQLRLQGQKDMVWKWMPLLLLLVCVATMCSAQDRTDLLNVCMDAKHHKTKPGPEDKLHDQCSPWKKNACCTASTSQELHKDTSRLYNFNWDHCGKMEPACSATSSRTPVSMSAHQPGALDPAGIRAGAKNASWMCPYAKRTVSAGGRIVTPPTRARATGTEDGTGPQELTSAQLGLSAAPLSPTSPLQLPFVKASGVTHTRSATTAEGAAAASRCGLIQPRATPTRKWRGSMLQPCM

SEQ ID NO: 5519 - protein, 169 aa, Homo Sapiens
MVWKWMPLLLLLVCVATMCSAQDRTDLLNVCMDAKHHKTKPGPEDKLHDQCSPWKKNACCTASTSQELHKDTSRLYNFNWDHCGKMEPACKRHFIQDTCLYECSPNLGPWIQQVNQSWRKERFLDVPLCKEDCQRWWEDCHTSHTCKSNWHRGWDWTSAALCEGLWSHS

SEQ ID NO: 5520 - protein, 171 aa, Homo Sapiens
MVWKWMPLLLLLVCVATMCSAQDRTDLLNVCMDAKHHKTKPGPEDKLHDQCSPWKKNACCTASTSQELHKDTSRLYNFNWDHCGKMEPACKRHFIQDTCLYECSPNLGPWIQQVNQSWRKERFLDVPLCKEDCQRWWEDCHTSHTCKSNWHRGWDWTSGVNKCPAGALCRT

SEQ ID NO: 5521 - protein, 255 aa, Homo Sapiens
MVWKWMPLLLLLVCVATMCSAQDRTDLLNVCMDAKHHKTKPGPEDKLHDQCSPWKKNACCTASTSQELHKDTSRLYNFNWDHCGKMEPACKRHFIQDTCLYECSPNLGPWIQQVNQSWRKERFLDVPLCKEDCQRWWEDCHTSHTCKSNWHRGWDWTSGVNKCPAGALCRTFESYFPTPAALCEGLWSHSYKVSNYSRGSGRCIQMWFDSAQGNPNEEVARFYAAAMHVNAGEMLHGTGGLLLSLALMLQLWLLG

SEQ ID NO: 5522 - protein, 74 aa, Homo Sapiens
MAWQMMQLLLLALVTAAGSAQPRSARARTDLLNVCMNAKHHKTQPSPEDELYGQCSPWKKNACCTASTSQELHK

SEQ ID NO: 5523 - protein, 104 aa, Homo Sapiens
MAWQMMQLLLLALVTAAGSAQPRSARARTDLLNVCMNAKHHKTQPSPEDELYGQCSPWKKNACCTASTSQELHKDTSRLYNFNWDHCGKMEPTCKRHFIQDSCL

SEQ ID NO: 5524 - protein, 178 aa, Homo Sapiens
MDMAWQMMQLLLLALVTAAGSAQPRSARARTDLLNVCMNAKHHKTQPSPEDELYGQCSPWKKNACCTASTSQELHKDTSRLYNFNWDHCGKMEPTCKRHFIQDSCLYECSPNLGPWIRQVNQSWRKERILNVPLCKEDCERWWEDCRTSYTCKSNWHKGWNWTSGINECPAGALCSTF

SEQ ID NO: 5525 - protein, 245 aa, Homo Sapiens
MDMAWQMMQLLLLALVTAAGSAQPRSARARTDLLNVCMNAKHHKTQPSPEDELYGQCSPWKKNACCTASTSQELHKDTSRLYNFNWDHCGKMEPTCKRHFIQDSCLYECSPNLGPWIRQVNQSWRKERILNVPLCKEDCERWWEDCRTSYTCKSNWHKGWNWTSGINECPAGALCSTFESYFPTPAALCEGLWSHSFKVSNYSRGSGRCIQMWFDSAQGNPNEEVAKFYAAAMNAGAPSRGIIDS

SEQ ID NO: 5526 - protein, 172 aa, Homo Sapiens
MDMAWQMMQLLLLALVTAAGSAQPRSARARTDLLNVCMNAKHHKTQPSPEDELYGQVGAPQGPSPGSVPLDDLPGAEEPEYGGDGCGGERLSPVSSPPSAVPGRRMPAARPAPARSCTRTPPACTTLTGITVVRWNPPASATLSRTAVSMSAHPTWGPGSGRSTRAGAKSAF

SEQ ID NO: 5527 - protein, 86 aa, Homo Sapiens
MGLSAAAPLWGPPGLLLAIALHPALSVPPRRDYCVLGAGPAGLQMAYFLQRAGRDYAVFERAPRPGSFFTRYPRHRKLISINKRYT

SEQ ID NO: 5528 - protein, 684 aa, Homo Sapiens
MGLSAAAPLWGPPGLLLAIALHPALSVPPRRDYCVLGAGPAGLQMAYFLQRAGRDYAVFERAPRPGSFFTRYPRHRKLISINKRYTGKANAEFNLRHDWNSLLSHDPRLLFRHYSRAYFPDARDMVRYLGDFADTLGLRVQYNTTIAHVTLDKDRQAWNGHYFILTDQKGQVHQCSVLFVATGLSVPNQVDFPGSEYAEGYESVSVDPEDFVGQNVLILGRGNSAFETAENILGVTNFIHMLSRSRVRLSWATHYVGDLRAINNGLLDTYQLKSLDGLLESDLTDLAILKDSKGKFHVTPKFFLEEANTNQSADSITLPQDDNDNFAMRVPYDRVIRCLGWNFDFSIFNKSLRLNSGNAFGKKYPLIRASYESKGSRGLFILGTASHSVDYRKSAGGFIHGFRYTVRAVHRLLEHRHHSVTWPATELPITQLTSSIVRRVNEASGLYQMFGVLADVILLKENSTAFEYLEEFPIQMLAQLETLTGRKAKHGLFVINMEYGRNFSGPDKDVFFDDRSVGHTEDAWQSNFLHPVIYYYRYLPTEQEVRFRPAHWPLPRPTAIHHIVEDFLTDWTAPIGHILPLRRFLENCLDTDLRSFYAESCFLFALTRQKLPPFCQQGYLRMQGLVSTESLWQHRVESRLLRDYAPTGRRLEDSSQQLGDQEPLGSPLAPGPLAQSVDSNKEEL

SEQ ID NO: 5529 - protein, 684 aa, Homo Sapiens; identical to SEQ ID NO: 5528

SEQ ID NO: 5530 - protein, 684 aa, Homo Sapiens; identical to SEQ ID NO: 5528

SEQ ID NO: 5531 - protein, 157 aa, Homo Sapiens
MLPEQGPQPSTMPLWCLLAACTSLPRQAATMLEEAASPNEAVHASTSGSGALTDQTFTDLSAAEASSEEVPDFMEVPHSVHHKINCFFYLEKQLCQLPSPLCLSSLLTLKLKTTVPAPGRWWSFQPHKAFPLLVGTPGSWQSTIDPAWAAPSQPSPG

SEQ ID NO: 5532 - protein, 57 aa, Homo Sapiens
MAAVRALVASRLAAASAFTSLSPGGRTPSQRAALHLSVPRPAARVALDPGAPEPWRG

SEQ ID NO: 5533 - protein, 237 aa, Homo Sapiens
MAAVRALVASRLAAASAFTSLSPGGRTPSQRAALHLSVPRPAARVALVLSGCGVYDGTEIHEASAILVHLSRGGAEVQIFAPDVPQMHVIDHTKGQPSEGESRNVLTESARIARGKITDLANLSAANHDAAIFPGGFGAAKNLLCCIAPVLAAKVLRGVEVTVGHEQEEGGKWPYAGTAEAIKALGAKHCVKEVVEAHVDQKNKVVTTPAFMCETALHYIHDGIGAMVRKVLELTGK

SEQ ID NO: 5534 - protein, 268 aa, Homo Sapiens
MAAVRALVASRLAAASAFTSLSPGGRTPSQRAALHLSVPRPAARVALVLSGCGVYDGTEIHEASAILVHLSRGGAEVQIFAPDVPQMHVIDHTKGQPSEGESRNVLTESARIARGKITDLANLSAANHDAAIFPGGFGAAKNLSTFAVDGKDCKVNKEVERVLKEFHQAGKPIGLCCIAPVLAAKVLRGVEVTVGHEQEEGGKWPYAGTAEAIKALGAKHCVKEVVEAHVDQKNKVVTTPAFMCETALHYIHDGIGAMVRKVLELTGK

SEQ ID NO: 5535 - protein, 182 aa, Homo Sapiens
MHVIDHTKGQPSEGESRNVLTESARIARGKITDLANLSAANHDAAIFPGGFGAAKNLSTFAVDGKDCKVNKEVERVLKEFHQAGKPIGLCCIAPVLAAKVLRGVEVTVGHEQEEGGKWPYAGTAEAIKALGAKHCVKEVVEAHVDQKNKVVTTPAFMCETALHYIHDGIGAMVRKVLELTGK

SEQ ID NO: 5536 - protein, 224 aa, Homo Sapiens; identical to SEQ ID NO: 1864

SEQ ID NO: 5537 - protein, 106 aa, Homo Sapiens
  misc_feature (1)..(1): Xaa can be any naturally occurring amino acid
XDGTEIHEASAILVHLSRGGAEVQIFAPDVPQMHVIDHTKGQPSEGESRNVLTESARIARGKITDLANLSAANHDAAIFPGGFGAAKNLGSPYSDPAKHRSLGLQL

SEQ ID NO: 5538 - protein, 137 aa, Homo Sapiens
  misc_feature (1)..(1): Xaa can be any naturally occurring amino acid
XDGTEIHEASAILVHLSRGGAEVQIFAPDVPQMHVIDHTKGQPSEGESRNVLTESARIARGKITDLANLSAANHDAAIFPGGFGAAKNLSTFAVDGKDCKVNKEVERVLKEFHQAGKPIGGSPYSDPAKHRSLGLQL

SEQ ID NO: 5539 - protein, 537 aa, Homo Sapiens
MLNTLQTNAGYLEQVKRQRGDPQTQLEAMELYLARSGLQVEDLDRLNIIHVTGTKGKGSTCAFTECILRSYGLKTGFFSSPHLVQVRERIRINGQPISPELFTKYFWRLYHRLEETKDGSCVSMPPYFRFLTLMAFHVFLQEKVDLAVVEVGIGGAYDCTNIIRKPVVCGVSSLGIDHTSLLGDTVEKIAWQKGGIFKQGVPAFTVLQPEGPLAVLRDRAQQISCPLYLCPMLEALEEGGPPLTLGLEGEHQRSNAALALQLAHCWLQRQDRHGAGEPKASRPGLLWQLPLAPVFQPTSHMRLGLRNTEWPGRTQVLRRGPLTWYLDGAHTASSAQACVRWFRQALQGRERPSGGPEVRVLLFNATGDRDPAALLKLLQPCQFDYAVFCPNLTEVSSTGNADQQNFTVTLDQVLLRCLEHQQHWNHLDEEQASPDLWSAPSPEPGGSASLLLAPHPPHTCSASSLVFSCISHALQWISQGRDPIFQPPSPPKGLLTHPVAHSGASILREAAAIHVLVTGSLHLVGGVLKLLEPALSQ

SEQ ID NO: 5540 - protein, 265 aa, Homo Sapiens
MLNTLQTNAGYLEQVKRQRGDPQTQLEAMELYLARSGLQVEDLDRLNIIHVTGTKGKGSTCAFTECILRSYGLKTGFFSSPHLVQVRERIRINGQPISPELFTKYFWRLYHRLEETKDGSCVSMPPYFRFLTLMAFHVFLQEKVDLAVVEVGIGGAYDCTNIIRKPVVCGVSSLGIDHTSLLGDTVEKIAWQKGGIFKQGVPAFTVLQPEGPLAVLRDRAQQISVLGSQRHPGQGSCGSCPWHLCSSPHPTCGSGFGTRSGRAGR

SEQ ID NO: 5541 - protein, 194 aa, Homo Sapiens
MLNTLQTNAGYLEQVKRQRGDPQTQLEAMELYLARSGLQVEDLDRLNIIHVTGTKGKGSTCAFTECILRSYGLKTGFFSSPHLVQVRERIRINGQPISPELFTKYFWRLYHRLEETKVDLAVVEVGIGGAYDCTNIIRKPVVCGVSSLGIDHTSLLGDTVEKIAWQKGGIFKQGVPAFTVLQPEGPLAVLRDRA

SEQ ID NO: 5542 - protein, 375 aa, Homo Sapiens
MSRARSHLRAALFLAAASARGITTQVAARRGLSAWPVPQEPSMEYQDAVRMLNTLQTNAGYLEQVKRQRGDPQTQLEAMELYLARSGLQVEDLDRLNIIHVTGTKGKGSTCAFTECILRSYGLKTGFFSSPHLVQVRERIRINGQPISPELFTKYFWRLYHRLEETKDGSCVSMPPYFRFLTLMAFHVFLQEKVDLAVVEVGIGGAYDCTNIIRKPVVCGVSSLGIDHTSLLGDTVEKIAWQKGGIFKQGVPAFTVLQPEGPLAVLRDRAQQISVLGSQRHPGQGSCGSCPWHLCSSPHPTCGSGFGTRSGRAGRRCCGAGPSPGTWTVRTPPAARRPACAGSARRCRAARGRAVAPRFESCSSMLPGTGTRRPC

SEQ ID NO: 5543 - protein, 587 aa, Homo Sapiens
MSRARSHLRAALFLAAASARGITTQVAARRGLSAWPVPQEPSMEYQDAVRMLNTLQTNAGYLEQVKRQRGDPQTQLEAMELYLARSGLQVEDLDRLNIIHVTGTKGKGSTCAFTECILRSYGLKTGFFSSPHLVQVRERIRINGQPISPELFTKYFWRLYHRLEETKDGSCVSMPPYFRFLTLMAFHVFLQEKVDLAVVEVGIGGAYDCTNIIRKPVVCGVSSLGIDHTSLLGDTVEKIAWQKGGIFKQGVPAFTVLQPEGPLAVLRDRAQQISCPLYLCPMLEALEEGGPPLTLGLEGEHQRSNAALALQLAHCWLQRQDRHGAGEPKASRPGLLWQLPLAPVFQPTSHMRLGLRNTEWPGRTQVLRRGPLTWYLDGAHTASSAQACVRWFRQALQGRERPSGGPEVRVLLFNATGDRDPAALLKLLQPCQFDYAVFCPNLTEVSSTGNADQQNFTVTLDQVLLRCLEHQQHWNHLDEEQASPDLWSAPSPEPGGSASLLLAPHPPHTCSASSLVFSCISHALQWISQGRDPIFQPPSPPKGLLTHPVAHSGASILREAAAIHVLVTGSLHLVGGVLKLLEPALSQ

SEQ ID NO: 5544 - protein, 375 aa, Homo Sapiens; identical to SEQ ID NO: 5542

SEQ ID NO: 5545 - protein, 561 aa, Homo Sapiens
MSRARSHLRAALFLAAASARGITTQVAARRGLSAWPVPQEPSMEYQDAVRMLNTLQTNAGYLEQVKRQRGDPQTQLEAMELYLARSGLQVEDLDRLNIIHVTGTKGKGSTCAFTECILRSYGLKTGFFSSPHLVQVRERIRINGQPISPELFTKYFWRLYHRLEETKVDLAVVEVGIGGAYDCTNIIRKPVVCGVSSLGIDHTSLLGDTVEKIAWQKGGIFKQGVPAFTVLQPEGPLAVLRDRAQQISCPLYLCPMLEALEEGGPPLTLGLEGEHQRSNAALALQLAHCWLQRQDRHGAGEPKASRPGLLWQLPLAPVFQPTSHMRLGLRNTEWPGRTQVLRRGPLTWYLDGAHTASSAQACVRWFRQALQGRERPSGGPEVRVLLFNATGDRDPAALLKLLQPCQFDYAVFCPNLTEVSSTGNADQQNFTVTLDQVLLRCLEHQQHWNHLDEEQASPDLWSAPSPEPGGSASLLLAPHPPHTCSASSLVFSCISHALQWISQGRDPIFQPPSPPKGLLTHPVAHSGASILREAAAIHVLVTGSLHLVGGVLKLLEPALSQ

SEQ ID NO: 5546 - protein, 1976 aa, Homo Sapiens
MGVLKVWLGLALALAEFAVLPHHSEGACVYQDSLLADATIWKPDSCQSCRCHGDIVICKPAVCRNPQCAFEKGEVLQIAANQCCPECVLRTPGSCHHEKKIHEHGTEWASSPCSVCSCNHGEVRCTPQPCPPLSCGHQELAFIPEGSCCPVCVGLGKPCSYEGHVFQDGEDWRLSRCAKCLCRNGVAQCFTAQCQPLFCNQDETVVRVPGKCCPQCSARSCSAAGQVYEHGEQWSENACTTCICDRGEVRCHKQACLPLRCGKGQSRARRHGQCCEECVSPAGSCSYDGVVRYQDEMWKGSACEFCMCDHGQVTCQTGECAKVECARDEELIHLDGKCCPECISRNGYCVYEETGEFMSSNASEVKRIPEGEKWEDGPCKVCECRGAQVTCYEPSCPPCPVGTLALEVKGQCCPDCTSVHCHPDCLTCSQSPDHCDLCQDPTKLLQNGWCVHSCGLGFYQAGSLCLACQPQCSTCTSGLECSSCQPPLLMRHGQCVPTCGDGFYQDRHSCAVCHESCAGCWGPTEKHCLACRDPLHVLRDGGCESSCGKGFYNRQGTCSACDQSCDSCGPSSPRCLTCTEKTVLHDGKCMSECPGGYYADATGRCKVCHNSCASCSGPTPSHCTACSPPKALRQGHCLPRCGEGFYSDHGVCKACHSSCLACMGPAPSHCTGCKKPEEGLQVEQLSDVGIPSGECLAQCRAHFYLESTGICEACHQSCFRCAGKSPHNCTDCGPSHVLLDGQCLSQCPDGYFHQEGSCTECHPTCRQCHGPLESDCISCYPHISLTNGNCRTSCREEQFLNLVGYCADCHHLCQHCAADLHNTGSICLRCQNAHYLLLGDHCVPDCPSGYYAERGACKKCHSSCRTCQGRGPFSCSSCDTNLVLSHTGTCSTTCFPGHYLDDNHVCQPCNTHCGSCDSQASCTSCRDPNKVLLFGECQYESCAPQYYLDFSTNTCKECDWSCSACSGPLKTDCLQCMDGYVLQDGACVEQCLSSFYQDSGLCKNCDSYCLQCQGPHECTRCKGPFLLLEAQCVQECGKGYFADHAKHKCTACPQGCLQCSHRDRCHLCDHGFFLKSGLCVYNCVPGFSVHTSNETCSGKIHTPSLHVNGSLILPIGSIKPLDFSLLNVQDQEGRVEDLLFHVVSTPTNGQLVLSRNGKEVQLDKAGRFSWKDVNEKKVRFVHSKEKLRKGYLFLKISDQQFFSEPQLINIQAFSTQAPYVLRNEVLHISRGERATITTQMLDIRDDDNPQDVVIEIIDPPLHGQLLQTLQSPATPIYQFQLDELSRGLLHYAHDGSDSTSDVAVLQANDGHSFHNILFQVKTVPQNDRGLQLVANSMVWVPEGGMLQITNRILQAEAPGASAEEIIYKITQDYPQFGEVVLLVNMPADSPADEGQHLPDGRTATPTSTFTQQDINEGIVWYRHSGAPAQSDSFRFEVSSASNAQTRLESHMFNIAILPQTPEAPKVSLEASLHMTAREDGLTVIQPHSLSFINSEKPSGKIVYNITLPLHPNQGIIEHRDHPHSPIRYFTQEDINQGKVMYRPPPAAPHLQELMAFSFAGLPESVKFHFTVSDGEHTSPEMVLTIHLLPSDQQLPVFQVTAPRLAVSPGGSTSVGLQVVVRDAETAPKELFFELRRPPQHGVLLKHTAEFRRPMATGDTFTYEDVEKNALQYIHDGSSTREDSMEISVTDGLTVTMLEVRVEVSLSEDRGPRLAAGSSLSITVASKSTAIITRSHLAYVDDSSPDPEIWIQLNYLPSYGTLLRISGSEVEELSEVSNFTMEDINNKKIRYSAVFETDGHLVTDSFYFSVSDMDHNHLDNQIFTIMITPAENPPPVIAFADLITVDEGGRAPLSFHHFFATDDDDNLQRDAIIKLSALPKYGCIENTGTGDRFGPETASDLEASFPIQDVLENYIYYFQSVHESIEPTHDIFSFYVSDGTSRSEIHSINITIEVKTLEVGKVEPLTTIFHTIRELSL

SEQ ID NO: 5547 - protein, 4012 aa, Homo Sapiens
MGVLKVWLGLALALAEFAVLPHHSEGACVYQDSLLADATIWKPDSCQSCRCHGDIVICKPAVCRNPQCAFEKGEVLQIAANQCCPECVLRTPGSCHHEKKIHEHGTEWASSPCSVCSCNHGEVRCTPQPCPPLSCGHQELAFIPEGSCCPVCVGLGKPCSYEGHVFQDGEDWRLSRCAKCLCRNGVAQCFTAQCQPLFCNQDETVVRVPGKCCPQCSARSCSAAGQVYEHGEQWSENACTTCICDRGEVRCHKQACLPLRCGKGQSRARRHGQCCEECVSPAGSCSYDGVVRYQDEMWKGSACEFCMCDHGQVTCQTGECAKVECARDEELIHLDGKCCPECISRNGYCVYEETGEFMSSNASEVKRIPEGEKWEDGPCKVCECRGAQVTCYEPSCPPCPVGTLALEVKGQCCPDCTSVHCHPDCLTCSQSPDHCDLCQDPTKLLQNGWCVHSCGLGFYQAGSLCLACQPQCSTCTSGLECSSCQPPLLMRHGQCVPTCGDGFYQDRHSCAVCHESCAGCWGPTEKHCLACRDPLHVLRDGGCESSCGKGFYNRQGTCSACDQSCDSCGPSSPRCLTCTEKTVLHDGKCMSECPGGYYADATGRCKVCHNSCASCSGPTPSHCTACSPPKALRQGHCLPRCGEGFYSDHGVCKACHSSCLACMGPAPSHCTGCKKPEEGLQVEQLSDVGIPSGECLAQCRAHFYLESTGICEACHQSCFRCAGKSPHNCTDCGPSHVLLDGQCLSQCPDGYFHQEGSCTECHPTCRQCHGPLESDCISCYPHISLTNGNCRTSCREEQFLNLVGYCADCHHLCQHCAADLHNTGSICLRCQNAHYLLLGDHCVPDCPSGYYAERGACKKCHSSCRTCQGRGPFSCSSCDTNLVLSHTGTCSTTCFPGHYLDDNHVCQPCNTHCGSCDSQASCTSCRDPNKVLLFGECQYESCAPQYYLDFSTNTCKECDWSCSACSGPLKTDCLQCMDGYVLQDGACVEQCLSSFYQDSGLCKNCDSYCLQCQGPHECTRCKGPFLLLEAQCVQECGKGYFADHAKHKCTACPQGCLQCSHRDRCHLCDHGFFLKSGLCVYNCVPGFSVHTSNETCSGKIHTPSLHVNGSLILPIGSIKPLDFSLLNVQDQEGRVEDLLFHVVSTPTNGQLVLSRNGKEVQLDKAGRFSWKDVNEKKVRFVHSKEKLRKGYLFLKISDQQFFSEPQLINIQAFSTQAPYVLRNEVLHISRGERATITTQMLDIRDDDNPQDVVIEIIDPPLHGQLLQTLQSPATPIYQFQLDELSRGLLHYAHDGSDSTSDVAVLQANDGHSFHNILFQVKTVPQNDRGLQLVANSMVWVPEGGMLQITNRILQAEAPGASAEEIIYKITQDYPQFGEVVLLVNMPADSPADEGQHLPDGRTATPTSTFTQQDINEGIVWYRHSGAPAQSDSFRFEVSSASNAQTRLESHMFNIAILPQTPEAPKVSLEASLHMTAREDGLTVIQPHSLSFINSEKPSGKIVYNITLPLHPNQGIIEHRDHPHSPIRYFTQEDINQGKVMYRPPPAAPHLQELMAFSFAGLPESVKFHFTVSDGEHTSPEMVLTIHLLPSDQQLPVFQVTAPRLAVSPGGSTSVGLQVVVRDAETAPKELFFELRRPPQHGVLLKHTAEFRRPMATGDTFTYEDVEKNALQYIHDGSSTREDSMEISVTDGLTVTMLEVRVEVSLSEDRGPRLAAGSSLSITVASKSTAIITRSHLAYVDDSSPDPEIWIQLNYLPSYGTLLRISGSEVEELSEVSNFTMEDINNKKIRYSAVFETDGHLVTDSFYFSVSDMDHNHLDNQIFTIMITPAENPPPVIAFADLITVDEGGRAPLSFHHFFATDDDDNLQRDAIIKLSALPKYGCIENTGTGDRFGPETASDLEASFPIQDVLENYIYYFQSVHESIEPTHDIFSFYVSDGTSRSEIHSINITIERKNDEPPRMTLQPLRVQLSSGVVISNSSLSLQDLDTPDNELIFVLTKKPDHGHVLWRQTASEPLENGRVLVQGSTFTYQDILAGLVGYVPSVPGMVVDEFQFSLTDGLHVDTGRMKIYTELPASDTPHLAINQGLQLSAGSVARITEQHLKVTDIDSDDHQVMYIMKEDPGAGRLQMMKHGNLEQISIKGPIRSFTQADISQGHVEYSHGTGEPGGSFAFKFDVVDGEGNRLIDKSFSISILEDKSPPVITTNKGLVLDENSVKKITTLQLSATDQDSGPTELIYRITRQPQLGHLEHAASPGIQISSFTQADLTSRNVQYVHSSEAEKHSDAFSFTLSDGVSEVTQTFHITLHPVDDSLPVVQNLGMRVQEGMRKTITEFELKAVDADTEAESVTFTIVQPPRHGTIERTSNGQHFHLTSTFTMKDIYQNRVSYSHDGSNSLKDRFTFTVSDGTNPFFIIEEGGKEIMTAAPQPFRVDILPVDDGTPRIVTNLGLQWLEYMDGKATNLITKKELLTMDPDTEDAQLVYEITTGPKHGFVENKLQPGRAAATFTQEDVNLGLIRYVLHKEKIREMMDSFQFLVKDSKPNVVSDNVFHIQWSLISFKYTSYNVSEKAGSVSVTVQRTGNLNQYAIVLCRTEQGTASSSSRVSSQPGQQDYVEYAGQVQFDEREDTKSCTIVINDDDVFENVESFTVELSMPAYALLGEFTQAKVIINDTEDEPTLEFDKKIYWVNESAGFLFAPIERKGDASSIVSAICYTVPKSAMGSSLYALESGSDFKSRGMSAASRVIFGPGVTMSTCDVMLIDDSEYEEEEEFEIALADASDNARIGRVATAKVLISGPNDASTVSLGNTAFTVSEDAGTVKIPVIRHGTDLSTFASVWCATRPSDPASATPGVDYVPSSRKVEFGPGVIEQYCTLTILDDTQYPVIEGLETFVVFLSSAQGAELTKPFQAVIAINDTFQDVPSMQFAKDLLLVKEKEGVLHVPITRSGDLSYESSVRCYTQSHSAQVMEDFEERQNADSSRITFLKGDKVKNCTVYIHDDSMFEPEEQFRVYLGLPLGNHWSGARIGKNNMATITISNDEDAPTIEFEEAAYQVREPAGPDAIAILNIKVIRRGDQNRTSKVRCSTRDGSAQSGVDYYPKSRVLKFSPGVDHIFFKVEILSNEDREWHESFSLVLGPDDPVEAVLGDVTTATVTILDQEAAGSLILPAPPIVVTLADYDHVEEVTKEGVKKSPSPGYPLVCVTPCDPHFPRYAVMKERCSEAGINQTSVQFSWEVAAPTDGNGARSPFETITDNTPFTSVNHMVLDSIYFSRRFHVRCVAKAVDKVGHVGTPLRSNIVTIGTDSAICHTPVVAGTSRGFQAQSFIATLKYLDVKHKEHPNRIHISVQIPHQDGMLPLISTMPLHNLHFLLSESIYRHQHVCSNLVTTYDLRGISEAGFLDDVVYDSTALGPGYDRPFQFDPSVREPKTIQLYKHLNLKSCVWTFDAYYDMTELIDVCGGSVTADFQVRDSAQSFLTVHVPLYVSYIYVTAPRGWASLEHHTEMEFSFFYDTVLWRTGIQTDSVLSARLQIIRIYIREDGRLVIEFKTHAKFRGQFVMEHHTLPEVKSFVLTPDHLGGIEFDLQLLWSAQTFDSPHQLWRATSSYNRKDYSGEYTIYLIPCTVQPTQPWVDPGEKPLACTAHAPERFLIPIAFQQTNRPVPVVYSLNTEFQLCNNEKVFLMDPNTSDMSLAEMDYKGAFSKGQILYGRVLWNPEQNLNSAYKLQLEKVYLCTGKDGYVPFFDPTGTIYNEGPQYGCIQPNKHLKHRFLLLDRNQPEVTDKYFHDVPFEAHFASELPDFHVVSNMPGVDGFTLKVDALYKVEAGHQWYLQVIYIIGPDTISGPRVQRSLTAPLRRNRRDLVEPDGQLILDDSLIYDNEGDQVKNGTNMKSLNLEMQELAVAASLSQTGASIGSALAAIMLLLLVFLVACFINRKCQKQRKKKPAEDILEEYPLNTKVEVPKRHPDRVEKNVNRHYCTVRNVNILSEPEAAYTFKGAKVKRLNLEVRVHNNLQDGTEV

SEQ ID NO: 5548 - protein, 39 aa, Homo Sapiens
MGVLKVWLGLALALAEFAVLPHHSEGACVYQDSLLAEGG

SEQ ID NO: 5549 - protein, 652 aa, Homo Sapiens
  misc_feature (1)..(1): Xaa can be any naturally occurring amino acid
XCSYEGHVFQDGEDWRLSRCAKCLCRNGVAQCFTAQCQPLFCNQDETVVRVPGKCCPQCSARSCSAAGQVYEHGEQWSENACTTCICDRGEVRCHKQACLPLRCGKGQSRARRHGQCCEECVSPAGSCSYDGVVRYQDEMWKGSACEFCMCDHGQVTCQTGECAKVECARDEELIHLDGKCCPECISRNGYCVYEETGEFMSSNASEVKRIPEGEKWEDGPCKVCECRGAQVTCYEPSCPPCPVGTLALEVKGQCCPDCTSVHCHPDCLTCSQSPDHCDLCQDPTKLLQNGWCVHSCGLGFYQAGSLCLACQPQCSTCTSGLECSSCQPPLLMRHGQCVPTCGDGFYQDRHSCAVCHESCAGCWGPTEKHCLACRDPLHVLRDGGCESSCGKGFYNRQGTCSACDQSCDSCGPSSPRCLTCTEKTVLHDGKCMSECPGGYYADATGRCKVCHNSCASCSGPTPSHCTACSPPKALRQGHCLPRCGEGFYSDHGVCKACHSSCLACMGPAPSHCTGCKKPEEGLQVEQLSDVGIPSGECLAQCRAHFYLESTGICEACHQSCFRCAGKSPHNCTDCGPSHVLLDGQCLSQCPDGYFHQEGSCTECHPTCRQCHGPLESDCISCYPHISLTNGNCRTSCREEQFLNLVGYCAGE

SEQ ID NO: 5550 - protein, 666 aa, Homo Sapiens
  misc_feature (1)..(1): Xaa can be any naturally occurring amino acid
XGEVLQIAANQCCPECVLRTPGSCHHEKKIHEHGTEWASSPCSVCSCNHGEVRCTPQPCPPLSCGHQELAFIPEGSCCPVCVGLGKPCSYEGHVFQDGEDWRLSRCAKCLCRNGVAQCFTAQCQPLFCNQDETVVRVPGKCCPQCSARSCSAAGQVYEHGEQWSENACTTCICDRGEVRCHKQACLPLRCGKGQSRARRHGQCCEECVSPAGSCSYDGVVRYQDEMWKGSACEFCMCDHGQVTCQTGECAKVECARDEELIHLDGKCCPECISRNGYCVYEETGEFMSSNASEVKRIPEGEKWEDGPCKVCECRGAQVTCYEPSCPPCPVGTLALEVKGQCCPDCTSVHCHPDCLTCSQSPDHCDLCQDPTKLLQNGWCVHSCGLGFYQAGSLCLACQPQCSTCTSGLECSSCQPPLLMRHGQCVPTCGDGFYQDRHSCAVCHESCAGCWGPTEKHCLACRDPLHVLRDGGCESSCGKGFYNRQGTCSACDQSCDSCGPSSPRCLTCTEKTVLHDGKCMSECPGGYYADATGRCKVCHNSCASCSGPTPSHCTACSPPKALRQGHCLPRCGEGFYSDHGVCKACHSSCLACMGPAPSHCTGCKKPEEGLQVEQLSDVGIPSGECLAQCRAHFYLESTGICEGQNLDFCQNLEVISAVCLGISSTEN

SEQ ID NO: 5551 - protein, 426 aa, Homo Sapiens
  misc_feature (1)..(1): Xaa can be any naturally occurring amino acid
XTLPLHPNQGLPESVKFHFTVSDGEHTSPEMVLTIHLLPSDQQLPVFQVTAPRLAVSPGGSTSVGLQVVVRDAETAPKELFFELRRPPQHGVLLKHTAEFRRPMATGDTFTYEDVEKNALQYIHDGSSTREDSMEISVTDGLTVTMLEVRVEVSLSEDRGPRLAAGSSLSITVASKSTAIITRSHLAYVDDSSPDPEIWIQLNYLPSYGTLLRISGSEVEELSEVSNFTMEDINNKKIRYSAVFETDGHLVTDSFYFSVSDMDHNHLDNQIFTIMITPAENPPPVIAFADLITVDEGGRAPLSFHHFFATDDDDNLQRDAIIKLSALPKYGCIENTGTGDRFGPETASDLEASFPIQDVLENYIYYFQSVHESIEPTHDIFSFYVSDGTSRSEIHSINITIEVKTLEVGKVEPLTTIFHTIRELSL

SEQ ID NO: 5552 - protein, 222 aa, Homo Sapiens
MLDESLAVRRSKKCKEMIMHWEKKEDIDIVNTVDQLDKTAPRITLLHSPSQVGLLKNGCYGIYITSRVLKASDPDTEDDQIIFKILQGPKHGHLENTTTGEFIHEKFSQKDLNSKTILYIINPSLEVNSDTVEFQIMDPTGNSATPQILELKWSHIEWSQTEYEVCENVGLLPLEIIRRGYSMDSAFVGIKVNQVSAAVGKDFTVIPSKLIQFDPGSSILCL

SEQ ID NO: 5553 - protein, 2179 aa, Homo Sapiens
MNSLSWGAANAVLLLLLLAWASPTFISINRGVRVMKGHSAFLSGDDLKFAIPKEKDACKVEVVMNEPITQRVGKLTPQVFDCHFLPNEVKYVHNGCPILDEDTVKLRLYRFTERDTFIETFILWVYLLEPDCNIIHMSNNVLEVPEFNGLSQAIDKNLLRFDYDRMASLECTVSLDTARTRLPAHGQMVLGEPRPEEPRGDQPHSFFPESQLRAKLKCPGGSCTPGLKKIGSLKVSCEEFLLMGLRYQHLDPPSPNIDYISIQLDLTDTRSKIVYKSESAWLPVYIRAGIPNQIPKAAFMAVFILEVDQFILTSLTTSVLDCEEDETPKPLLVFNITKAPLQGYVTHLLDHTRPISSFTWKDLSDMQIAYQPPNSSHSERRHDEVELEVYDFFFERSAPMTVHISIRTADTNAPRVSWNTGLSLLEGQSRAITWEQFQVVDNDDIGAVRLVTVGGLQHGWLTLRGGKGFLFTVADLQAGVVRYHHDDSDSTKDFVVFRIFDGHHSIRHKFPINVLPKDDSPPFLITNVVIELEEGQTILIQGSMLRASDVDASDDYIFFNITKPPQAGEIMKKPGPGLIGYPVHGFLQRDLFNGIIYYRHFGGEIFEDSFQFVLWDSHEPPNLSVPQVATIHITPVDDQLPKEAPGVSRHLVVKETEVAYITKKQLHFIDSESYDRELVYTITTPPFFSFSHRHLDAGKLFMVDSIPKVVKNPTALELRSFTQHAVNYMKVAYMPPMQDIGPHCRDVQFTFSVSNQHGGTLHGICFNITILPVDNQVPEAFTNPLKVTEGGQSIISTEHILISDADTKLDNIDLSLRELPLHGRVELNGFPLNSGGTFSWGDLHTLKVRYQHDGTEVLQDDLLLEVTDGTNSAEFVLHVEVFPVNDEPPVLKADLMPVMNCSEGGEVVITSEYIFATDVDSDNLKLMFVIAREPQHGVVRRAGVTVDQFSQRDVISEAVTYKHTGGEIGLMPCFDTITLVVSDGEAGPFVNGCCYNGPNPSVPLHASFPVYDLNITVYPVDNQPPSIAIGPVFVVDEGCSTALTVNHLSATDPDTAADDLEFVLVSPPQFGYLENILPSVGFEKSNIGISIDSFQWKDMNAFHINYVQSRHLRIEPTADQFTVYVTDGKHHSLEIPFSIIINPTNDEAPDFVVQNITVCEGQMKELDSSIISAVDLDIPQDALLFSITQKPRHGLLIDRGFSKDFSENKQPANPHQKHAPVHSFSMELLKTGMRLTYMHDDSESLADDFTIQLSDGKHKILKTISVEVIPVNDEKPMLSKKAEIAMNMGETRIISSAILSAIDEDSPREKIYYVFERLPQNGQLQLKIGRDWVPLSPGMKCTQEEVDLNLLRYTHTGAMDSQNQDSFTFYLWDGNNRSPALDCQITIKDMEKGDIVILTKPLVVSKGDRGFLTTTTLLAVDGTDKPEELLYVITSPPRYGQIEYVHYPGVPITNFSQMDVVGQTVCYVHKSKVTVSSDRFRFIISNGLRTEHGVFEITLETVDRALPVVTRNKGLRLAQGAVGLLSPDLLQLTDPDTPAENLTFLLVQLPQHGQLYLWGTGLLQHNFTQQDVDSKNVAYRHSGGDSQTDCFTFMATDGTNQGFIVNGRVWEEPVLFTIQVDQLDKTAPRITLLHSPSQVGLLKNGCYGIYITSRVLKASDPDTEDDQIIFKILQGPKHGHLENTTTGEFIHEKFSQKDLNSKTILYIINPSLEVNSDTVEFQIMDPTGNSATPQILELKWSHIEWSQTEYEVCENVGLLPLEIIRRGYSMDSAFVGIKVNQVSAAVGKDFTVIPSKLIQFDPGMSTKMWNIAITYDGLEEDDEVFEVILNSPVNAVLGTKTKAAVKILDSKGGQCHPSYSSNQSKHSTWEKGIWHLLPPGSSSSTTSGSFHLERRPLPSSMQLAVIRGDTLRGFDSTDLSQRKLRTRGNGKTVRPSSVYRNGTDIIYNYHGIVSLKLEDDSFPTHKRKAKVSIISQPQKTIKVAELPQADKVESTTDSHFPRQDQLPSFPKNCTLELKGLFHFEEGIQKLYQCNGIAWKAWSPQTKDVEDKSCPAGWHQHSGYCHILITEQKGTWNAAAQACREQYLGNLVTVFSRQHMRWLWDIGGRKSFWIGLNDQVHAGHWEWIGGEPVAFTNGRRGPSQRSKLGKSCVLVQRQGKWQTKDCRRAKPHNYVCSRKL

SEQ ID NO: 5554 - protein, 2179 aa, Homo Sapiens; identical to SEQ ID NO: 5553

SEQ ID NO: 5555 - protein, 1335 aa, Homo Sapiens
MNSLSWGAANAVLLLLLLAWASPTFISINRGVRVMKGHSAFLSGDDLKFAIPKEKDACKVEVVMNEPITQRVGKLTPQVFDCHFLPNEVKYVHNGCPILDEDTVKLRLYRFTERDTFIETFILWVYLLEPDCNIIHMSNNVLEVPEFNGLSQAIDKNLLRFDYDRMASLECTVSLDTARTRLPAHGQMVLGEPRPEEPRGDQPHSFFPESQLRAKLKCPGGSCTPGLKKIGSLKVSCEEFLLMGLRYQHLDPPSPNIDYISIQLDLTDTRSKIVYKSESAWLPVYIRAGIPNQIPKAAFMAVFILEVDQFILTSLTTSVLDCEEDETPKPLLVFNITKAPLQGYVTHLLDHTRPISSFTWKDLSDMQIAYQPPNSSHSERRHDEVELEVYDFFFERSAPMTVHISIRTADTNAPRVSWNTGLSLLEGQSRAITWEQFQVVDNDDIGAVRLVTVGGLQHGWLTLRGGKGFLFTVADLQAGVVRYHHDDSDSTKDFVVFRIFDGHHSIRHKFPINVLPKDDSPPFLITNVVIELEEGQTILIQGSMLRASDVDASDDYIFFNITKPPQAGEIMKKPGPGLIGYPVHGFLQRDLFNGIIYYRHFGGEIFEDSFQFVLWDSHEPPNLSVPQVATIHITPVDDQLPKEAPGVSRHLVVKETEVAYITKKQLHFIDSESYDRELVYTITTPPFFSFSHRHLDAGKLFMVDSIPKVVKNPTALELRSFTQHAVNYMKVAYMPPMQDIGPHCRDVQFTFSVSNQHGGTLHGICFNITILPVDNQVPEAFTNPLKVTEGGQSIISTEHILISDADTKLDNIDLSLRELPLHGRVELNGFPLNSGGTFSWGDLHTLKVRYQHDGTEVLQDDLLLEVTDGTNSAEFVLHVEVFPVNDEPPVLKADLMPVMNCSEGGEVVITSEYIFATDVDSDNLKLMFVIAREPQHGVVRRAGVTVDQFSQRDVISEAVTYKHTGGEIGLMPCFDTITLVVSDGEAGPFVNGCCYNGPNPSVPLHASFPVYDLNITVYPVDNQPPSIAIGPVFVVDEGCSTALTVNHLSATDPDTAADDLEFVLVSPPQFGYLENILPSVGFEKSNIGISIDSFQWKDMNAFHINYVQSRHLRIEPTADQFTVYVTDGKHHSLEIPFSIIINPTNDEAPDFVVQNITVCEGQMKELDSSIISAVDLDIPQDALLFSITQKPRHGLLIDRGFSKDFSENKQPANPHQKHAPVHSFSMELLKTGMRLTYMHDDSESLADDFTIQLSDGKHKILKTISVEVIPVNDEKPMLSKKAEIAMNMGETRIISSAILSAIDEDSPREKIYYVFERLPQNGQLQLKECQLRCGI

SEQ ID NO: 5556 - protein, 715 aa, Homo Sapiens
MVTQESMLKAALPLFTRFIISNGLRTEHGVFEITLETVDRALPVVTRNKGLRLAQGAVGLLSPDLLQLTDPDTPAENLTFLLVQLPQHGQLYLWGTGLLQHNFTQQDVDSKNVAYRHSGGDSQTDCFTFMATDGTNQGFIVNGRVWEEPVLFTIQVDQLDKTAPRITLLHSPSQVGLLKNGCYGIYITSRVLKASDPDTEDDQIIFKILQGPKHGHLENTTTGEFIHEKFSQKDLNSKTILYIINPSLEVNSDTVEFQIMDPTGNSATPQILELKWSHIEWSQTEYEVCENVGLLPLEIIRRGYSMDSAFVGIKVNQVSAAVGKDFTVIPSKLIQFDPGMSTKMWNIAITYDGLEEDDEVFEVILNSPVNAVLGTKTKAAVKILDSKGGQCHPSYSSNQSKHSTWEKGIWHLLPPGSSSSTTSGSFHLERRPLPSSMQLAVIRGDTLRGFDSTDLSQRKLRTRGNGKTVRPSSVYRNGTDIIYNYHGIVSLKLEDDSFPTHKRKAKVSIISQPQKTIKVAELPQADKVESTTDSHFPRQDQLPSFPKNCTLELKGLFHFEEGIQKLYQCNGIAWKAWSPQTKDVEDKSCPAGWHQHSGYCHILITEQKGTWNAAAQACREQYLGNLVTVFSRQHMRWLWDIGGRKSFWIGLNDQVHAGHWEWIGGEPVAFTNGRRGPSQRSKLGKSCVLVQRQGKWQTKDCRRAKPHNYVCSRKL

SEQ ID NO: 5557 - protein, 2139 aa, Homo Sapiens
MAGASRHPTGTPRQLLVALACLLLSRPALQGRASSLGTEPDPALYLPARGALDGTRPDGPSVLIANPGLRVPLGRSLWLDPLRDLVIGVQPGDRCEVTVLDALPRLKGALSPRRFPCTFGPRQVQYTHFGSHSPGRARVLLQLRYDAPTHTLVLPFTLAVDLVFSQLELVTRNRPLVVEKLRSWSRAIDRRVLDFASLKSGATATRRCRLTPLPHEDGPLPKYGRLVDAVGAPLPRGKGVDCEAFLRAGVRYQHTATSSPNRDYVPMMVELLGPEGQDAGSAGVLVREHFQLLVRIRGGAENTPPRPSFMATMMMEVDPLVLTALTPDALAAEDVESDPGDLVFNILNAPTHPPGHPGQQGYVVSTDDPLGLPVSFFTQQELRELKIAYQPPAENSHGERLFQLELEVVDGDGAASDPFAFMVTVKSMNTLVPVASHNRGLVLFEGQSRPLSSTHSIPISDKDNLEEVKMAAVRGLRHGQLVVFGAPAGCKYFTPADLAAGRVVYQHDGSNTYSDNIIFRMEDGHHQVDFLFPLTILPVDDEPPMVNTNTGLSLTEGQVVQISPFVLSATDIDSEDSTIHFVLENQPLKGNEEEPQWELAPGSSHSGHYLGDLLLQQAELPLSTEDEDWHYMEKEGLYEKVVTEWLQRDIMEGRLFYRHLGPHSPQSVMVQLAFHVQDDHDPPNLSKQHIFTIKVQPVDILSPQLYPGTTLEMTVQEYQLTHFQKNFLRYIDQDSDDQNLWYTLLTLPTDTDGNHQVRAGEIVLTDSPDTLIMHFTQAQVNQHKVAYQPPQKLGIAPRVVQFTYQVEDAAGNSVPGTFTLFLQPVDNQPPEVTNRGFAILEGGSFNLSSNELHVTDPDTDIDQIVFILVRGPQHGHLQYFKRCMVPGESFMQADVINGSVSYQHGRDQTTTSDTFHLEVSDGVHHIPITIPISVHPNVANRSPRISLRSSSLLDVSIDVLENKATEITMGVIHGKRKDVGDLMLSFIVKDSPKLGTILVNGLPTERFTQEDLINGRVAYAHTAGEVGFQKQHDAFSLILSKDSYQWVVGNSIIEKVQVQVTVLPVDNVGPKVFVGESFIVYEGEKNSLTLQHLHVEDVDTHQDELLCTVTSQPASGYLEKIASAPGSKMSQSGSPISAFSLRDIQVRHINYVQSIHKGVEPQEDQFTFYCSDGINFSPNVFFPIIILPTNDEQPKLFAHEFKVLEGMSLVIDTQLLNGADADLPPNELHFQLTALPRHGRIIQQLATGSQPIHSFTLKEIQEASTIVYEHDDSETKEDSFEVWLSDGKHTTHRKVPIVVTLVDDETPHLTVNNGLKVEKGHSEIITNRILKATDLDSDDKSLSFVLHSGPQQGLLQRLRKPRGEVRNNLTLGMNFTQDEINRGLICYIHTGQEGIVDIIKFDVTDGVNTLTDHYFYVTIGNLDSVFPEVISKRITLIEGARVTLTNNLLTNSDINSSDEHHFSITRAPSLGHLESSDYAGEPIASFTQLQLASNKISYVHTSNDEKKMDSFEFQVIGELYPVFRTFRIFITDVDNKKPILTIHRLTLQKEDSQLITLLELTVEDSDTPDDLILFTITQVPMHGKILYNGSRPVTTFTKQDLNKNLISYKHDGSETTEDSFSLTVTDGTHTDFYVLPDTALATHKPQVMRVQIRSLDNRLPQITTNRGAPALKRLHTGHMGFLITSKSLKAEDQDSPHRLLKYKVTRGPEHGFIIKTGLGNQSTRVFTQADIDEMKISYVLNEGSNASKDIFYFSVEDNGGNKLTNQPFHLNWAWICLEKEYYIVDEDSTFLEVTLTRRGYLGETSFISIGTKDETAKKDKDFKWKTNKQIQFNPGQTTATWRVRIIPDNEYETSETFQIILSEPLMAVLEFPEMATVEIVDPGDESTVYIPEAEYKIEEDIGELLIPVRRSGDASQELIVICSTRQGSATGTISSTVLFSDYISRPEDHTSILHFDKNETQKTCQVLIIDDSLYEEEESFSVSLRLPVGGQLGARFPTTKVTILADRYDEPVLHFGDAEYHVNESARYVEVCVWRRGTDLSQPSSIAVRSRKSEQESAEAGTDYVGISRNLDFAPGVRMQTFQVTILDDLGQPTLEGPEKFELLLQMPMGAVLGEPNKTTIFIEDTITDCKQSACSSFD

SEQ ID NO: 5558 - protein, 1284 aa, Homo Sapiens
MHVFIVGMSLSSVTLASALQVRGEALSEEEIWSLLFLAAEQLLEDLRNDSSDYVVCPWSALLSAAGSLSFQGRVSHIEAAPFKAPELLQGQSEDEQPDASQPLQLCEPLHSILLTMCEDQPHRRCTLQSVLEACRVHEKEVSVYPAPAGLHIRRLVGLVLGTISEVEKRVVEESSSVQQNRSYLLRKRLRGTSSESPAAQAPECLHPCRVSERSTETQSSPEPHWSTLTHSHCSLLVNRALPGADPQDQQAGRRLSSGSVHSAADSSWPTTPSQRGFLQRRSKFSRPEFILLAGEAPMTLHLPGSVVTKKGKSYLALRDLCVVLLNGQHLEVKCDVESTVGAVFNAVTSFANLEELTYFGLAYMKSKEFFFLDSETRLCKIAPEGWREQPQKTSMNTFTLFLRIKFFVSHYGLLQHSLTRHQFYLQLRKDILEERLYCNEEILLQLGVLALQAEFGNYPKEVESKPYFHVEDYIPASLIERMTALRVQVEVSEMHRLSSALWGEDAELKFLRVTQQLPEYGVLVHQVFSEKRRPEEEMALGICAKGVIVYEVKNNSRIAMLRFQWRETGKISTYQKKFTITSSVTGKKHTFVTDSAKTSKYLLDLCSAQHGFNAQMGSGQPSHVLFDHDKFVQMANLSPAHQARSKPLIWIQRLSCSENELFVSRLQGAAGGLLSTSMDNFNVDGSKEAGAEGIGRSPCTGREQLKSACVIQKPMTWDSLSGPPVQSMHAGSKNNRRKSFIAEPGREIVRVTLKRDPHRGFGFVINEGEYSGQADPGIFISSIIPGGPAEKAKTIKPGGQILALNHISLEGFTFNMAVRMIQNSPDNIELIISQSKGVGGNNPDEEKNSTANSGVSSTDILSFGYQGSLLSHTQDQDRNTEELDMAGVQSLVPRLRHQLSFLPLKGAGSSCPPSPPEISAGEIYFVELVKEDGTLGFSVTGGINTSVPYGGIYVKSIVPGGPAAKEGQILQGDRLLQVDGVILCGLTHKQAVQCLTGPGQVARLVLERRVPRSTQQCPSANDSMGDERTAVSLVTALPGRPSSCVSVTDGPKFEVKLKKNANGLGFSFVQMEKESCSHLKSDLVRIKRLFPGQPAEENGAIAAGDIILAVNGRSTEGLIFQEVLHLLRGAPQEVTLLLCRPPPGALPELEQEWQTPELSADKEFTRATCTDSCTSPILDQEDSWRDSASPDAGEGLGLRPESSQKAIREAQWGQNRERPWASSLTHSPESHPHLCKLHQERDESTLATSLEKDVRQNCYSVCDIMRLGRYSFSSPLTRLSTDIF

SEQ ID NO: 5559 - protein, 66 aa, Homo Sapiens
MQPLTKDAGMSLSSVTLASALQVRGEALSEEEIWSLLFLAAEQLLEDLRNAPAALRAPALHPADHV

SEQ ID NO: 5560 - protein, 1309 aa, Homo Sapiens
MQPLTKDAGMSLSSVTLASALQVRGEALSEEEIWSLLFLAAEQLLEDLRNDSSDYVVCPWSALLSAAGSLSFQGRVSHIEAAPFKAPELLQGQSEDEQPDASQMHVYSLGMTLYWSAGFHVPPHQPLQLCEPLHSILLTMCEDQPHRRCTLQSVLEACRVHEKEVSVYPAPAGLHIRRLVGLVLGTISEVEKRVVEESSSVQQNRSYLLRKRLRGTSSESPAAQAPECLHPCRVSERSTETQSSPEPHWSTLTHSHCSLLVNRALPGADPQDQQAGRRLSSGSVHSAADSSWPTTPSQRGFLQRRSKFSRPEFILLAGEAPMTLHLPGSVVTKKGKSYLALRDLCVVLLNGQHLEVKCDVESTVGAVFNAVTSFANLEELTYFGLAYMKSKEFFFLDSETRLCKIAPEGWREQPQKTSMNTFTLFLRIKFFVSHYGLLQHSLTRHQFYLQLRKDILEERLYCNEEILLQLGVLALQAEFGNYPKEQVESKPYFHVEDYIPASLIERMTALRVQVEVSEMHRLSSALWGEDAELKFLRVTQQLPEYGVLVHQVFSEKRRPEEEMALGICAKGVIVYEVKNNSRIAMLRFQWRETGKISTYQKKFTITSSVTGKKHTFVTDSAKTSKYLLDLCSAQHGFNAQMGSGQPSHVLFDHDKFVQMANLSPAHQARSKPLIWIQRLSCSENELFVSRLQGAAGGLLSTSMDNFNVDGSKEAGAEGIGRSPCTGREQLKSACVIQKPMTWDSLSGPPVQSMHAGSKNNRRKSFIAEPGREIVRVTLKRDPHRGFGFVINEGEYSGQADPGIFISSIIPGGPAEKAKTIKPGGQILALNHISLEGFTFNMAVRMIQNSPDNIELIISQSKGVGGNNPDEEKNSTANSGVSSTDILSFGYQGSLLSHTQDQDRNTEELDMAGVQSLVPRLRHQLSFLPLKGAGSSCPPSPPEISAGEIYFVELVKEDGTLGFSVTGGINTSVPYGGIYVKSIVPGGPAAKEGQILQGDRLLQVDGVILCGLTHKQAVQCLTGPGQVARLVLERRVPRSTQQCPSANDSMGDERTAVSLVTALPGRPSSCVSVTDGPKFEVKLKKNANGLGFSFVQMEKESCSHLKSDLVRIKRLFPGQPAEENGAIAAGDIILAVNGRSTEGLIFQEVLHLLRGAPQEVTLLLCRPPPGALPELEQEWQTPELSADKEFTRATCTDSCTSPILDQEDSWRDSASPDAGEGLGLRPESSQKAIREAQWGQNRERPWASSLTHSPESHPHLCKLHQERDESTLATSLEKDVRQNCYSVCDIMRLGRYSFSSPLTRLSTDIF

SEQ ID NO: 5561 - protein, 1397 aa, Homo Sapiens
MQPLTKDAGMSLSSVTLASALQVRGEALSEEEIWSLLFLAAEQLLEDLRNDSSDYVVCPWSALLSAAGSLSFQGRVSHIEAAPFKAPELLQGQSEDEQPDASQMHVYSLGMTLYWSAGFHVPPHQPLQLCEPLHSILLTMCEDQPHRRCTLQSVLEACRVHEKEVSVYPAPAGLHIRRLVGLVLGTISEVEKRVVEESSSVQQNRSYLLRKRLRGTSSESPAAQAPECLHPCRVSERSTETQSSPEPHWSTLTHSHCSLLVNRALPGADPQDQQAGRRLSSGSVHSAADSSWPTTPSQRGFLQRRSKFSRPEFILLAGEAPMTLHLPGSVVTKKGKSYLALRDLCVVLLNGQHLEVKCDVESTVGAVFNAVTSFANLEELTYFGLAYMKSKEFFFLDSETRLCKIAPEGWREQPQKTSMNTFTLFLRIKFFVSHYGLLQHSLTRHQFYLQLRKDILEERLYCNEEILLQLGVLALQAEFGNYPKEQVESKPYFHVEDYIPASLIERMTALRVQVEVSEMHRLSSALWGEDAELKFLRVTQQLPEYGVLVHQVFSEKRRPEEEMALGICAKGVIVYEVKNNSRIAMLRFQWRETGKISTYQKKFTITSSVTGKKHTFVTDSAKTSKYLLDLCSAQHGFNAQMGSGQPSHVLFDHDKFVQMANLSPAHQARSKPLIWIQRLSCSENELFVSRLQGAAGGLLSTSMDNFNVDGSKEAGAEGIGRSPCTGREQLKSACVIQKPMTWDSLSGPPVQSMHAGSKNNRRKSFIAEPGREIVRVTLKRDPHRGFGFVINEGEYSGQADPGIFISSIIPGGPAEKAKTIKPGGQILALNHISLEGFTFNMAVRMIQNSPDNIELIISQSKGVGGNNPDEEKNSTANSGVSSTDILSFGYQGSLLSHTQDQDRNTEELDMAGVQSLVPRLRHQLSFLPLKGAGSSCPPSPPEISAGEIYFVELVKEDGTLGFSVTGGINTSVPYGGIYVKSIVPGGPAAKEGQILQGDRLLQVDGVILCGLTHKQAVQCLTGPGQVARLVLERRVPRSTQQCPSANDSMGDERTAVSLVTALPGRPSSCVSVTDGPKFEVKLKKNANGLGFSFVQMEKESCSHLKSDLVRIKRLFPGQPAEENGAIAAGDIILAVNGRSTEGLIFQEVLHLLRGAPQEVTLLLCRPPPGALPELEQEWQTPELSADKEFTRATCTDSCTSPILDQEDSWRDSASPDAGEGLGLRPESSQKAIREAQWGQNRERPWASSLTHSPESHPHLCKLHQERDESTLATSLEKDVRQNCYSVCDIMRLGSPELDGEDGEGDMYHPCGAPSPTSEDEEYLTINSTCQGQLPCEECLEADSGTIPLPQFCSWGTVPESLPPEESPESGSEWEDLEEPVALEYGALRSLSFGGLNV

SEQ ID NO: 5562 - protein, 325 aa, Homo Sapiens
MVCGSPGGMLLLRAGLLALAALCLLRVPGARAAACEPVRIPLCKSLPWNMTKMPNHLHHSTQANAILAIEQFEGLLGTHCSPDLLFFLCAMYAPICTIDFQHEPIKPCKSVCERARQGCEPILIKYRHSWPENLACEELPVYDRGVCISPEAIVTADGADFPMDSSNGNCRGASSERCKCKPIRATQKTYFRNNYNYVIRAKVKEIKTKCHDVTAVVEVKEILKSSLVNIPRDTVNLYTSSGCLCPPLNVNEEYIIMGYEDEERSRLLLVEGSIAEKWKDRLGKKVKRWDMKLRHLGLSKSDSSNSDSTQSQKSGRNSNPRQARN

SEQ ID NO: 5563 - protein, 129 aa, Homo Sapiens
MKTLQFFFLFCCWKAICCNSCELTNITIAIEKEECRFCISINTTWCAGYCYTRDLVYKDPARPKIQKTCTFKELVYETVRVPGCAHHADSLYTYPVATQCHCGKCDSDSTDCTVRGLGPSYCSFGEMKE

SEQ ID NO: 5564 - protein, 129 aa, Homo Sapiens; identical to SEQ ID NO: 5563

SEQ ID NO: 5565 - protein, 129 aa, Homo Sapiens; identical to SEQ ID NO: 5563

SEQ ID NO: 5566 - protein, 695 aa, Homo Sapiens
MALLLVSLLAFLSLGSGCHHRICHCSNRVFLCQESKVTEIPSDLPRNAIELRFVLTKLRVIQKGAFSGFGDLEKIEISQNDVLEVIEADVFSNLPKLHEIRIEKANNLLYINPEAFQNLPNLQYLLISNTGIKHLPDVHKIHSLQKVLLDIQDNINIHTIERNSFVGLSFESVILWLNKNGIQEIHNCAFNGTQLDELNLSDNNNLEELPNDVFHGASGPVILDISRTRIHSLPSYGLENLKKLRARSTYNLKKLPTLEKLVALMEASLTYPSHCCAFANWRRQISELHPICNKSILRQEVDYMTQARGQRSSLAEDNESSYSRGFDMTYTEFDYDLCNEVVDVTCSPKPDAFNPCEDIMGYNILRVLIWFISILAITGNIIVLVILTTSQYKLTVPRFLMCNLAFADLCIGIYLLLIASVDIHTKSQYHNYAIDWQTGAGCDAAGFFTVFASELSVYTLTAITLERWHTITHAMQLDCKVQLRHAASVMVMGWIFAFAAALFPIFGISSYMKVSICLPMDIDSPLSQLYVMSLLVLNVLAFVVICGCYIHIYLTVRNPNIVSSSSDTRIAKRMAMLIFTDFLCMAPISFFAISASLKVPLITVSKAKILLVLFHPINSCANPFLYAIFTKNFRRDFFILLSKCGCYEMQAQIYRTETSSTVHNTHPRNGHCSSAPRVTSGSTYILVPLSHLAQN

SEQ ID NO: 5567 - protein, 278 aa, Homo Sapiens
MALLLVSLLAFLSLGSGCHHRICHCSNRVFLCQESKVTEIPSDLPRNAIELRFVLTKLRVIQKGAFSGFGDLEKIEISQNDVLEVIEADVFSNLPKLHEIRIEKANNLLYINPEAFQNLPNLQYLLISNTGIKHLPDVHKIHSLQKVLLDIQDNINIHTIERNSFVGLSFESVILWLNKNGIQEIHNCAFNGTQLDELNLSDNNNLEELPNDVFHGASGPVILSELHPICNKSILRQEVDYMTQARGQRSSLAEDNESSYSRGFDMTYTEFDYDLCNE

SEQ ID NO: 5568 - protein, 669 aa, Homo Sapiens
MALLLVSLLAFLSLGSGCHHRICHCSNRVFLCQESKVTEIPSDLPRNAIELRFVLTKLRVIQKGAFSGFGDLEKIEISQNDVLEVIEADVFSNLPKLHEIRIEKANNLLYINPEAFQNLPNLQYLLISNTGIKHLPDVHKIHSLQKVLLWLNKNGIQEIHNCAFNGTQLDELNLSDNNNLEELPNDVFHGASGPVILDISRTRIHSLPSYGLENLKKLRARSTYNLKKLPTLEKLVALMEASLTYPSHCCAFANWRRQISELHPICNKSILRQEVDYMTQARGQRSSLAEDNESSYSRGFDMTYTEFDYDLCNEVVDVTCSPKPDAFNPCEDIMGYNILRVLIWFISILAITGNIIVLVILTTSQYKLTVPRFLMCNLAFADLCIGIYLLLIASVDIHTKSQYHNYAIDWQTGAGCDAAGFFTVFASELSVYTLTAITLERWHTITHAMQLDCKVQLRHAASVMVMGWIFAFAAALFPIFGISSYMKVSICLPMDIDSPLSQLYVMSLLVLNVLAFVVICGCYIHIYLTVRNPNIVSSSSDTRIAKRMAMLIFTDFLCMAPISFFAISASLKVPLITVSKAKILLVLFHPINSCANPFLYAIFTKNFRRDFFILLSKCGCYEMQAQIYRTETSSTVHNTHPRNGHCSSAPRVTSGSTYILVPLSHLAQN

SEQ ID NO: 5569 - protein, 152 aa, Homo Sapiens
MALLLVSLLAFLSLGSGCHHRICHCSNRVFLCQESKVTEIPSDLPRNAIELRFVLTKLRVIQKGAFSGFGDLEKIEISQNDVLEVIEADVFSNLPKLHEIRIEKANNLLYINPEAFQNLPNLQYLSFSSFVLENAKVENGDHRAFSDRTNAL

SEQ ID NO: 5570 - protein, 215 aa, Homo Sapiens
GPVCGLDGKTYRNECALLKARCKEQPELEVQYQGRCKKTCRDVFCPGSSTCVVDQTNNAYCVTCNRICPEPASSEQYLCGNDGVTYSSACHLRKATCLLGRSIGLAYEGKCITKSCEDIQCTGGKKCLWDFKVGRGRCSLCDELCPDSKSDEPVCASDNATYASECAMKEAACSSGVLLEVKHSGSCNSISEDTEEEEEDEDQDYSFPISSILEW

SEQ ID NO: 5571 - protein, 344 aa, Homo Sapiens
MVRARHQPGGLCLLLLLLCQFMEDRSAQAGNCWLRQAKNGRCQVLYKTELSKEECCSTGRLSTSWTEEDVNDNTLFKWMIFNGGAPNCIPCKETCENVDCGPGKKCRMNKKNKPRCVCAPDCSNITWKGPVCGLDGKTYRNECALLKARCKEQPELEVQYQGRCKKTCRDVFCPGSSTCVVDQTNNAYCVTCNRICPEPASSEQYLCGNDGVTYSSACHLRKATCLLGRSIGLAYEGKCIKAKSCEDIQCTGGKKCLWDFKVGRGRCSLCDELCPDSKSDEPVCASDNATYASECAMKEAACSSGVLLEVKHSGSCNSISEDTEEEEEDEDQDYSFPISSILEW

SEQ ID NO: 5572 - protein, 317 aa, Homo Sapiens
MVRARHQPGGLCLLLLLLCQFMEDRSAQAGNCWLRQAKNGRCQVLYKTELSKEECCSTGRLSTSWTEEDVNDNTLFKWMIFNGGAPNCIPCKETCENVDCGPGKKCRMNKKNKPRCVCAPDCSNITWKGPVCGLDGKTYRNECALLKARCKEQPELEVQYQGRCKKTCRDVFCPGSSTCVVDQTNNAYCVTCNRICPEPASSEQYLCGNDGVTYSSACHLRKATCLLGRSIGLAYEGKCIKAKSCEDIQCTGGKKCLWDFKVGRGRCSLCDELCPDSKSDEPVCASDNATYASECAMKEAACSSGVLLEVKHSGSCN

SEQ ID NO: 5573 - protein, 102 aa, Homo Sapiens
  misc_feature (1)..(1): Xaa can be any naturally occurring amino acid
XSACHLRKATCLLGRSIGLAYEGKCITKSCEDIQCTGGKKCLWDFKVGRGRCSLCDELCPDSKSDEPVCASDNATYASECAMKEAACSSGVLLEVKHSGSCN

SEQ ID NO: 5574 - protein, 140 aa, Homo Sapiens
MWKRWLALALALVAVAWVRAEEELRSKSKICANVFCGAGRECAVTEKGEPTCLCIEQCKPHKRPVCGSNGKTYLNHCELHRDACLTGSKIQVDYDGHCKEKKSVSPSASPVVCYQSNRDELRRRIIQWLEAEIIPDGWFS

SEQ ID NO: 5575 - protein, 308 aa, Homo Sapiens
MWKRWLALALALVAVAWVRAEEELRSKSKICANVFCGAGRECAVTEKGEPTCLCIEQCKPHKRPVCGSNGKTYLNHCELHRDACLTGSKIQVDYDGHCKEKKSVSPSASPVVCYQSNRDELRRRIIQWLEAEIIPDGWFSKGSNYSEILDKYFKNFDNGDSRLDSSEFLKFVEQNETAINITTYPDQENNKLLRGLCVDALIELSDENADWKLSFQEFLKCLNPSFNPPEKKCALEDETYADGAETEVDCNRCVCACGNWVCTAMTCDGKNQKGAQTQTEEEMTRYVQELQKHQETAEKTKRVSTKEI

SEQ ID NO: 5576 - protein, 273 aa, Homo Sapiens
MWKRWLALALALVAVAWVRAEQCKPHKRPVCGSNGKTYLNHCELHRDACLTGSKIQVDYDGHCKEKKSVSPSASPVVCYQSNRDELRRRIIQWLEAEIIPDGWFSKGSNYSEILDKYFKNFDNGDSRLDSSEFLKFVEQNETAINITTYPDQENNKLLRGLCVDALIELSDENADWKLSFQEFLKCLNPSFNPPEKKCALEDETYADGAETEVDCNRCVCACGNWVCTAMTCDGKNQKGAQTQTEEEMTRYVQELQKHQETAEKTKRVSTKEI

SEQ ID NO: 5577 - protein, 20 aa, Homo Sapiens
  misc_feature (1)..(1): Xaa can be any naturally occurring amino acid
XSFQEFLKCLNPSFNPPEKK

SEQ ID NO: 5578 - protein, 84 aa, Homo Sapiens
MLGGRPRCECAPDCSGLPARLQVCGSDGATYRDECELRAARCRGHPDLSVMYRGRCRKSCEHVVCPRPQSCVVDQTGSAHCVVC

SEQ ID NO: 5579 - protein, 263 aa, Homo Sapiens
MRPGAPGPLWPLPWGALAWAVGFVSSMGSGNPAPGGVCWLQQGQEATCSLVLQTDVTRAECCASGNIDTAWSNLTHPGNKINLLGFLGLVHCLPCKDSCDGVECGPGKACRMLGGRPRCECAPDCSGLPARLQVCGSDGATYRDECELRAARCRGHPDLSVMYRGRCRKSCEHVVCPRPQSCVVDQTGSAHCVVCRAAPCPVPSSPGQELCGNNNVTYISSCHMRQATCFLGRSIGVRHAGSCAGTPEEPPGGESAEEEENFV

SEQ ID NO: 5580 - protein, 92 aa, Homo Sapiens
MRQATCFLGRSIGVRHAGSCAGADAGRGHRPVLGAGEPPALRPQCSYRPLQAPLRSRQVVSLQKRKRTSCEPAGQAWAWCPRPPIIPCYLLP

SEQ ID NO: 5581 - protein, 40 aa, Homo Sapiens
MRQATCFLGRSIGVRHAGSCAGTPEEPPGGESAEEEENFV

SEQ ID NO: 5582 - protein, 40 aa, Homo Sapiens; identical to SEQ ID NO: 5581

SEQ ID NO: 5583 - protein, 40 aa, Homo Sapiens; identical to SEQ ID NO: 5581

SEQ ID NO: 5584 - protein, 673 aa, Homo Sapiens
MKPGGFWLHLTLLGASLPAALGWMDPGTSRGPDVGVGESQAEEPRSFEVTRREGLSSHNELLASCGKKFCSRGSRCVLSLAPEDRVSVTTVTVGLSTVLTCAVHGDLRPPIIWKRNGLTLNFLDLEDINDFGEDDSLYITKVTTIHMGNYTCHASGHEQLFQTHVLQVNVPPVIRVYPESQAQEPGVAASLRCHAEGIPMPRITWLKNGVDVSTQMSKQLSLLANGSELHISSVRYEDTGAYTCIAKNEVGVDEDISSLFIEDSARKTLANILWREEGLSVGNMFYVFSDDGIIVIHPVDCEIQRHLKPTEKIFMSYEEICPQREKNATQPCQWVSAVNVRNRYIYVAQPALSRVLVVDIQAQKVLQSIGVDPLPAKLSYDKSHDQVWVLSWGDVHKSRPSLQVITEASTGQSQHLIRTPFAGVDDFFIPPTNLIINHIRFGFIFNKSDPAVHKVDLETMMPLKTIGLHHHGCVPQAMAHTHLGGYFFIQCRQDSPASAARQLLVDSVTDSVLGPNGDVTGTPHTSPDGRFIVSAAADSPWLHVQEITVRGEIQTLYDLQINSGISDLAFQRSFTESNQYNIYAALHTEPDLLFLELSTGKVGMLKNLKEPPAGPAQPWGGTHRIMRDSGLFGQYLLTPARESLFLINGRQNTLRCEVSGIKGGTTVVWVGEV

SEQ ID NO: 5585 - protein, 842 aa, Homo Sapiens
MKPGGFWLHLTLLGASLPAALGWMDPGTSRGPDVGVGESQAEEPRSFEVTRREGLSSHNELLASCGKKFCSRGSRCVLSRKTGEPECQCLEACRPSYVPVCGSDGRFYENHCKLHRAACLLGKRITVIHSKDCFLKGDTCTMAGYARLKNVLLALQTRLQPLQEGDSRQDPASQKRLLVESLFRDLDADGNGHLSSSELAQHVLKKQDLDEDLLGCSPGDLLRFDDYNSDSSLTLREFYMAFQVVQLSLAPEDRVSVTTVTVGLSTVLTCAVHGDLRPPIIWKRNGLTLNFLDLEDINDFGEDDSLYITKVTTIHMGNYTCHASGHEQLFQTHVLQVNVPPVIRVYPESQAQEPGVAASLRCHAEGIPMPRITWLKNGVDVSTQMSKQLSLLANGSELHISSVRYEDTGAYTCIAKNEVGVDEDISSLFIEDSARKTLANILWREEGLSVGNMFYVFSDDGIIVIHPVDCEIQRHLKPTEKIFMSYEEICPQREKNATQPCQWVSAVNVRNRYIYVAQPALSRVLVVDIQAQKVLQSIGVDPLPAKLSYDKSHDQVWVLSWGDVHKSRPSLQVITEASTGQSQHLIRTPFAGVDDFFIPPTNLIINHIRFGFIFNKSDPAVHKVDLETMMPLKTIGLHHHGCVPQAMAHTHLGGYFFIQCRQDSPASAARQLLVDSVTDSVLGPNGDVTGTPHTSPDGRFIVSAAADSPWLHVQEITVRGEIQTLYDLQINSGISDLAFQRSFTESNQYNIYAALHTEPDLLFLELSTGKVGMLKNLKEPPAGPAQPWGGTHRIMRDSGLFGQYLLTPARESLFLINGRQNTLRCEVSGIKGGTTVVWVGEV

SEQ ID NO: 5586 - protein, 157 aa, Homo Sapiens
MNPVPQMEMQKSPVFCVAHAGSCRPELFLFGHLGSSWGLDLKEEEPRSFEVTRREGLSSHNELLASCGKKFCSRGSRCVLSRKTGEPECQCLEACRPSYVPVCGSDGRFYENHCKLHRAACLLGKRITVIHSKDCFLKGDTCTMAGYARLKNVLLAL

SEQ ID NO: 5587 - protein, 846 aa, Homo Sapiens
MFKCWSVVLVLGFIFLESEGRPTKEGGYGLKSYQPLMRLRHKEKNQESSRVKGFMIQDGPFGSCENKYCGLGRHCVTSRETGQAECACMDLCKRHYKPVCGSDGEFYENHCEVHRAACLKKQKITIVHNEDCFFKGDKCKTTEYSKMKNMLLDLQNQKYIMQENENPNGDDISRKKLLVDQMFKYFDADSNGLVDINELTQVIKQEELGKDLFDCTLYVLLKYDDFNADKHLALEEFYRAFQVIQLSLPEDQKLSITAATVGQSAVLSCAIQGTLRPPIIWKRNNIILNNLDLEDINDFGDDGSLYITKVTTTHVGNYTCYADGYEQVYQTHIFQVNVPPVIRVYPESQAREPGVTASLRCHAEGIPKPQLGWLKNGIDITPKLSKQLTLQANGSEVHISNVRYEDTGAYTCIAKNEAGVDEDISSLFVEDSARKTLANILWREEGLGIGNMFYVFYEDGIKVIQPIECEFQRHIKPSEKLLGFQDEVCPKAEGDEVQRCVWASAVNVKDKFIYVAQPTLDRVLIVDVQSQKVVQAVSTDPVPVKLHYDKSHDQVWVLSWGTLEKTSPTLQVITLASGNVPHHTIHTQPVGKQFDRVDDFFIPTTTLIITHMRFGFILHKDEAALQKIDLETMSYIKTINLKDYKCVPQSLAYTHLGGYYFIGCKPDSTGAVSPQVMVDGVTDSVIGFNSDVTGTPYVSPDGHYLVSINDVKGLVRVQYITIRGEIQEAFDIYTNLHISDLAFQPSFTEAHQYNIYGSSSTQTDVLFVELSSGKVKMIKSLKEPLKAEEWPWNRKNRQIQDSGLFGQYLMTPSKDSLFILDGRLNKLNCEITEVEKGNTVIWVGDA

SEQ ID NO: 5588 - protein, 837 aa, Homo Sapiens
MFKCWSVVLVLGFIFLESEGRPTKEGGYGLKSYQPLMRLRHKEKNQESSRVKGFMIQDGPFGSCENKYCGLGRHCVTSRETGQAECACMDLCKRHYKPVCGSDGEFYENHCEVHRAACLKKQKITIVHNEDCFFKGDKCKTTEYSKMKNMLLDLQNQKYIMQENENPNGDDISRKKLLVDQMFKYFDADSNGLVDINELTQVIKQEELGKDLFDCTLYVLLKYDDFNADKHLALEEFYRAFQVIQLSLPEDQKLSITAATVGQSAVLSCAIQGTLRPPIIWKRNNIILNNLDLEDINDFGDDGSLYITKVTTTHVGNYTCYADGYEQVYQTHIFQVNVPPVIRVYPESQAREPGVTASLRCHAEGIPKPQLGWLKNGIDITPKLSKQLTLQANGSEVHISNVRYEDTGAYTCIAKNEAGVDEDISSLFVEDSARKTRLGIGNMFYVFYEDGIKVIQPIECEFQRHIKPSEKLLGFQDEVCPKAEGDEVQRCVWASAVNVKDKFIYVAQPTLDRVLIVDVQSQKVVQAVSTDPVPVKLHYDKSHDQVWVLSWGTLEKTSPTLQVITLASGNVPHHTIHTQPVGKQFDRVDDFFIPTTTLIITHMRFGFILHKDEAALQKIDLETMSYIKTINLKDYKCVPQSLAYTHLGGYYFIGCKPDSTGAVSPQVMVDGVTDSVIGFNSDVTGTPYVSPDGHYLVSINDVKGLVRVQYITIRGEIQEAFDIYTNLHISDLAFQPSFTEAHQYNIYGSSSTQTDVLFVELSSGKVKMIKSLKEPLKAEEWPWNRKNRQIQDSGLFGQYLMTPSKDSLFILDGRLNKLNCEITEVEKGNTVIWVGDA

SEQ ID NO: 5589 - protein, 847 aa, Homo Sapiens
MFKCWSVVLVLGFIFLESEGRPTKEGGYGLKSYQPLMRLRHKQEKNQESSRVKGFMIQDGPFGSCENKYCGLGRHCVTSRETGQAECACMDLCKRHYKPVCGSDGEFYENHCEVHRAACLKKQKITIVHNEDCFFKGDKCKTTEYSKMKNMLLDLQNQKYIMQENENPNGDDISRKKLLVDQMFKYFDADSNGLVDINELTQVIKQEELGKDLFDCTLYVLLKYDDFNADKHLALEEFYRAFQVIQLSLPEDQKLSITAATVGQSAVLSCAIQGTLRPPIIWKRNNIILNNLDLEDINDFGDDGSLYITKVTTTHVGNYTCYADGYEQVYQTHIFQVNVPPVIRVYPESQAREPGVTASLRCHAEGIPKPQLGWLKNGIDITPKLSKQLTLQANGSEVHISNVRYEDTGAYTCIAKNEAGVDEDISSLFVEDSARKTLANILWREEGLGIGNMFYVFYEDGIKVIQPIECEFQRHIKPSEKLLGFQDEVCPKAEGDEVQRCVWASAVNVKDKFIYVAQPTLDRVLIVDVQSQKVVQAVSTDPVPVKLHYDKSHDQVWVLSWGTLEKTSPTLQVITLASGNVPHHTIHTQPVGKQFDRVDDFFIPTTTLIITHMRFGFILHKDEAALQKIDLETMSYIKTINLKDYKCVPQSLAYTHLGGYYFIGCKPDSTGAVSPQVMVDGVTDSVIGFNSDVTGTPYVSPDGHYLVSINDVKGLVRVQYITIRGEIQEAFDIYTNLHISDLAFQPSFTEAHQYNIYGSSSTQTDVLFVELSSGKVKMIKSLKEPLKAEEWPWNRKNRQIQDSGLFGQYLMTPSKDSLFILDGRLNKLNCEITEVEKGNTVIWVGDA

SEQ ID NO: 5590 - protein, 138 aa, Homo Sapiens
MSSSRVGLRLAACLLNVSEAGRKYIVENIAKAALLDKNGKKHPQVSVLNIFSDQDYKRSVITIATSVDKLGLAEDLVLHVPGCSVFLFGEADLPEKRSLVQRRKQLGWFTRRDFSALQPDLGAAPSQRCGLTACFRAL

SEQ ID NO: 5591 - protein, 147 aa, Homo Sapiens
MSSSRVGLRLAACLLNVSEAGRKYIVENIAKAALLDKNGKKHPQVSVLNIFSDQDYKRSVITIATSVDKLGLAEDLVLHVPGCSVFLFGEADLPEKRSLVQRRKQLGWFTRRDFSALQPDLGAAPSQRCGLTGSEHGFCFALFFFFF

SEQ ID NO: 5592 - protein, 114 aa, Homo Sapiens
MSSSRVGLRLAACLLNVSEAGRKYIVENIAKAALLDKNGKKHPQVSVLNIFSDQDYKRSVITIATSVDKLGSSVLAACLEAFQAIDMEVQEGIHPCLGAVDLIPIYPLSGVTVE

SEQ ID NO: 5593 - protein, 77 aa, Homo Sapiens
MSSSRVGLRLAACLLNVSEAGRKYIVENIAKAALLDKNGKKHPQVSVLNIFSDQDYKRSVITIATSVDKLVDKRNQA

SEQ ID NO: 5594 - protein, 466 aa, Homo Sapiens
MRAPGMRSRPAGPALLLLLLFLGAAESVRRAQPPRRYTPDWPSLDSRPLPAWFDEAKFGVFIHWGVFSVPAWGSEWFWWHWQGEGRPQYQRFMRDNYPPGFSYADFGPQFTARFFHPEEWADLFQAAGAKYVVLTTKHHEGFTNWPSPVSWNWNSKDVGPHRDLVGELGTALRKRNIRYGLYHSLLEWFHPLYLLDKKNGFKTQHFVSAKTMPELYDLVNSYKPDLIWSDGEWECPDTYWNSTNFLSWLYNDSPVKDEVVVNDRWGQNCSCHHGGYYNCEDKFKPQSLPDHKWEMCTSIDKFSWGYRRDMALSDVTEESEIISELVQTVSLGGNYLLNIGPTKDGLIVPIFQERLLAVGKWLSINGEAIYASKPWRVQWEKNTTSVWYTSKGSAVYAIFLHWPENGVLNLESPITTSTTKITMLGIQGDLKWSTDPDKGLFISLPQLPPSAVPAEFAWTIKLTGVK

SEQ ID NO: 5595 - protein, 467 aa, Homo Sapiens
MRPQELPRLAFPLLLLLLLLLPPPPCPAHSATRFDPTWESLDARQLPAWFDQAKFGIFIHWGVFSVPSFGSEWFWWYWQKEKIPKYVEFMKDNYPPSFKYEDFGPLFTAKFFNANQWADIFQASGAKYIVLTSKHHEGFTLWGSEYSWNWNAIDEGPKRDIVKELEVAIRNRTDLRFGLYYSLFEWFHPLFLEDESSSFHKRQFPVSKTLPELYELVNNYQPEVLWSDGDGGAPDQYWNSTGFLAWLYNESPVRGTVVTNDRWGAGSICKHGGFYTCSDRYNPGHLLPHKWENCMTIDKLSWGYRREAGISDYLTIEELVKQLVETVSCGGNLLMNIGPTLDGTISVVFEERLRQMGSWLKVNGEAIYETHTWRSQNDTVTPDVWYTSKPKEKLVYAIFLKWPTSGQLFLGHPKAILGATEVKLLGHGQPLNWISLEQNGIMVELPQLTIHQMPCKWGWALALTNVI

SEQ ID NO: 5596 - protein, 109 aa, Homo Sapiens
QLVETVSCGGNLLMNIGPTLDGTISVVFEERLRQMGSWLKVNGEAIYETHTWRSQNDTVTPDVWYTSKPKEKLVYAIFLKWPTSGQLFLGHPKAILGATEVRGNFTLFL

SEQ ID NO: 5597 - protein, 69 aa, Homo Sapiens
KPAHLNANDWATNGVGRKVSHSYGYGLWTQAPWWPWPRIGPQWPPSGSASSTSSPSPKTSGNGSRCGRP

SEQ ID NO: 5598 - protein, 69 aa, Homo Sapiens
MELRPWLLWVVAATGTLVLLAADAQGQKVFTNTWAVRIPGGPAVANSVARKHGFLNLGQIFGDYYHFWH

SEQ ID NO: 5599 - protein, 794 aa, Homo Sapiens
MELRPWLLWVVAATGTLVLLAADAQGQKVFTNTWAVRIPGGPAVANSVARKHGFLNLGQIFGDYYHFWHRGVTKRSLSPHRPRHSRLQREPQVQWLEQQVAKRRTKRDVYQEPTDPKFPQQWYLSGVTQRDLNVKAAWAQGYTGHGIVVSILDDGIEKNHPDLAGNYDPGASFDVNDQDPDPQPRYTQMNDNRHGTRCAGEVAAVANNGVCGVGVAYNARIGGVRMLDGEVTDAVEARSLGLNPNHIHIYSASWGPEDDGKTVDGPARLAEEAFFRGVSQGRGGLGSIFVWASGNGGREHDSCNCDGYTNSIYTLSISSATQFGNVPWYSEACSSTLATTYSSGNQNEKQIVTTDLRQKCTESHTGTSASAPLAAGIIALTLEANKNLTWRDMQHLVVQTSKPAHLNANDWATNGVGRKVSHSYGYGLLDAGAMVALAQNWTTVAPQRKCIIDILTEPKDIGKRLEVRKTVTACLGEPNHITRLEHAQARLTLSYNRRGDLAIHLVSPMGTRSTLLAARPHDYSADGFNDWAFMTTHSWDEDPSGEWVLEIENTSEANNYGTLTKFTLVLYGTAPEGLPVPPESSGCKTLTSSQACVVCEEGFSLHQKSCVQHCPPGFAPQVLDTHYSTENDVETIRASVCAPCHASCATCQGPALTDCLSCPSHASLDPVEQTCSRQSQSSRESPPQQQPPRLPPEVEAGQRLRAGLLPSHLPEVVAGLSCAFIVLVFVTVFLVLQLRSGFSFRGVKVYTMDRGLISYKGLPPEAWQEECPSDSEEDEGRGERTAFIKDQSAL

SEQ ID NO: 5600 - protein, 794 aa, Homo Sapiens; identical to SEQ ID NO: 5599

SEQ ID NO: 5601 - protein, 794 aa, Homo Sapiens; identical to SEQ ID NO: 5599

SEQ ID NO: 5602 - protein, 175 aa, Homo Sapiens
MELRPWLLWVVAATGTLVLLAADAQGQKVFTNTWAVRIPGGPAVANSVARKHGFLNLGQIFGDYYHFWHRGVTKRSLSPHRPRHSRLQREPQWLEQQVAKRRTKRDVYQEPTDPKFPQQWYLSGVTQRDLNVKAAWAQGYTGHGIVVSILDDGIEKNHPDLAGNYDPGASFDVND

SEQ ID NO: 5603 - protein, 216 aa, Homo Sapiens
PNHIHIYSASWGPEDDGKTVDGPARLAEEAFFRGVSQGRGGLGSIFVWASGNGGREHDSCNCDGYTNSIYTLSISSATQFGNVPWYSEACSSTLATTYSSGNQNEKQIVTTDLRQKCTESHTGTSASAPLAAGIIALTLEANKNLTWRDMQHLVVQTSKPAHLNANDWATNGVGRKVSHSYGYGLLDAGAMVALAQNWTTVAPQRKCIIDILTEPK

SEQ ID NO: 5604 - protein, 451 aa, Homo Sapiens
MVELGKFERKEFKSSSLQDGHTKMEEAPTHLNSFLKKEGLTFNRKRKWELDSYPIMLWWSPLTGETGRLGQCGADACFFTINRTYLHHHMTKAFLFYGTDFNIDSLPLPRKAHHDWAVFHEESPKNNYKLFHKPVITLFNYTATFSRHSHLPLTTQYLESIEVLKSLRYLVPLQSKNKLRKRLAPLVYVQSDCDPPSDRDSYVRELMTYIEVDSYGECLRNKDLPQQLKNPASMDADGFYRIIAQYKFILAFENAVCDDYITEKFWRPLKLGVVPVYYGSPSITDWLPSNKSAILVSEFSHPRELASYIRRLDSDDRLYEAYVEWKLKGEISNQRLLTALRERKWGVQDVNQDNYIDAFECMVCTKVWANIRLQEKGLPPKRWEAEDTHLSCPEPTVFAFSPLRTPPLSSLREMWISSFEQSKKEAQALRWLVDRNQNFSSQEFWGLVFKD

SEQ ID NO: 5605 - protein, 451 aa, Homo Sapiens; identical to SEQ ID NO: 5604

SEQ ID NO: 5606 - protein, 479 aa, Homo Sapiens
MVRIQRRKLLASCLCVTATVFLLVTLQVMVELGKFERKEFKSSSLQDGHTKMEEAPTHLNSFLKKEGLTFNRKRKWELDSYPIMLWWSPLTGETGRLGQCGADACFFTINRTYLHHHMTKAFLFYGTDFNIDSLPLPRKAHHDWAVFHEESPKNNYKLFHKPVITLFNYTATFSRHSHLPLTTQYLESIEVLKSLRYLVPLQSKNKLRKRLAPLVYVQSDCDPPSDRDSYVRELMTYIEVDSYGECLRNKDLPQQLKNPASMDADGFYRIIAQYKFILAFENAVCDDYITEKFWRPLKLGVVPVYYGSPSITDWLPSNKSAILVSEFSHPRELASYIRRLDSDDRLYEAYVEWKLKGEISNQRLLTALRERKWGVQDVNQDNYIDAFECMVCTKVWANIRLQEKGLPPKRWEAEDTHLSCPEPTVFAFSPLRTPPLSSLREMWISSFEQSKKEAQALRWLVDRNQNFSSQEFWGLVFKD

SEQ ID NO: 5607 - protein, 492 aa, Homo Sapiens
MAAGPIRVVLVLLGVLSVCAASGHGSVAEREAGGEAEWAEPWDGAVFRPPSALGAVGVTRSSGTPRPGREEAGDLPVLLWWSPGLFPHFPGDSERIECARGACVASRNRRALRDSRTRALLFYGTDFRASAAPLPRLAHQSWALLHEESPLNNFLLSHGPGIRLFNLTSTFSRHSDYPLSLQWLPGTAYLRRPVPPPMERAEWRRRGYAPLLYLQSHCDVPADRDRYVRELMRHIPVDSYGKCLQNRELPTARLQDTATATTEDPELLAFLSRYKFHLALENAICNDYMTEKLWRPMHLGAVPVYRGSPSVRDWMPNNHSVILIDDFESPQKLAEFIDFLDKNDEEYMKYLAYKQPGGITNQFLLDSLKHREWGVNDPLLPNYLNGFECFVCDYELARLDAEKAHAASPGDSPVFEPHIAQPSHMDCPVPTPGFGNVEEIPENDSWKEMWLQDYWQGLDQGEALTAMIHNNETEQTKFWDYLHEIFMKRQHL

SEQ ID NO: 5608 - protein, 476 aa, Homo Sapiens
MAAGPIRVVLVLLGVLSVCAASGHGSVAEREAGGEAEWAEPWDGAVFRPPSALGAVGVTRSSGTPRPGREEAGDLPVLLWWSPGLFPHFPGDSERIECARGACVASRNRRALRDSRTRALLFYGTDFRASAAPLPRLAHQSWALLHEESPLNNFLLSHGPGIRLFNLTSTFSRHSDYPLSLQWLPGTAYLRRPVPPPMERAEWRRRGYAPLLYLQSHCDVPADRDRYVRELMRHIPVDSYGKCLQNRELPTARLQDTATATTEDPELLAFLSRYKFHLALENAICNDYMTEKLWRPMHLGAVPVYRGSPSVRDWMPNNHSVILIDDFESPQKLAEFIDFLDKNDEEYMKYLAYKQPGGITNQFLLDSLKHREWGVNDPLLPNYLNGFECFVCDYELARLDAEKAHAASPGDSPVFEPHIAQPSHMDCPVPTPGFGNVEEIPENDSSLVQVRDHCICLRFLWPHSEKGRTHNYAAVP

SEQ ID NO: 5609 - protein, 135 aa, Homo Sapiens
MNLRKSGTLGHPGSLDETTYERLAEETLDSLAEFFEDLADKPYTFEDYDVSFGSGVLTVKLGGDLGTYVINKQTPNKQIWLSSPSSGPKRYDWTGKNWVYSHDGVSLHELLAAELTKALKTKLDLSSLAYSGKDA

SEQ ID NO: 5610 - protein, 135 aa, Homo Sapiens; identical to SEQ ID NO: 5609

SEQ ID NO: 5611 - protein, 171 aa, Homo Sapiens
MWTLGRRAVAGLLASPSPAQAQTLTRVPRPAELAPLCGRRGLRTDIDATCTPRRASSNQRGLNQIWNVKKQSVYLMNLRKSGTLGHPGSLDETTYERLAEETLDSLAEFFEDLADKPYTFEDYDVSFGSGVLTVKLGGDLGTYVINKQTPNKQIWLSSPSRLTWLLWLFHP

SEQ ID NO: 5612 - protein, 196 aa, Homo Sapiens
MWTLGRRAVAGLLASPSPAQAQTLTRVPRPAELAPLCGRRGLRTDIDATCTPRRASSNQRGLNQIWNVKKQSVYLMNLRKSGTLGHPGSLDETTYERLAEETLDSLAEFFEDLADKPYTFEDYDVSFGSGVLTVKLGGDLGTYVINKQTPNKQIWLSSPSRYVVDLSVMTGLGKTGCTPTTACPSMSCWPQSSLKP

SEQ ID NO: 5613 - protein, 210 aa, Homo Sapiens
MWTLGRRAVAGLLASPSPAQAQTLTRVPRPAELAPLCGRRGLRTDIDATCTPRRASSNQRGLNQIWNVKKQSVYLMNLRKSGTLGHPGSLDETTYERLAEETLDSLAEFFEDLADKPYTFEDYDVSFGSGVLTVKLGGDLGTYVINKQTPNKQIWLSSPSSGPKRYDWTGKNWVYSHDGVSLHELLAAELTKALKTKLDLSSLAYSGKDA

SEQ ID NO: 5614 - protein, 210 aa, Homo Sapiens; identical to SEQ ID NO: 5613

SEQ ID NO: 5615 - protein, 196 aa, Homo Sapiens
MWTLGRRAVAGLLASPSPAQAQTLTRVPRPAELAPLCGRRGLRTDIDATCTPRRASSNQRGLNQIWNVKKQSVYLMNLRKSGTLGHPGSLDETTYERLAEETLDSLAEFFEDLADKPYTFEDYDVSFGVNVAPVAVPSLRKSEDHALQTGHVLDYLCFCLLGFQSASEQRSNPDSVVHRMAGDGVWLCRPGWSAMA

SEQ ID NO: 5616 - protein, 91 aa, Homo Sapiens
MWTLGRRAVAGLLASPSPAQAQTLTRVPRPAELAPLCGRRGLRTDIDATCTPRRASSNQRGLNQIWNVKKQSVYLMNLRKSGTLGHPGVVS

SEQ ID NO: 5617 - protein, 19 aa, Homo Sapiens
MAELTVEVRGSNGAFYKAI

SEQ ID NO: 5618 - protein, 621 aa, Homo Sapiens
MAELTVEVRGSNGAFYKGFIKDVHEDSLTVVFENNWQPERQVPFNEVRLPPPPDIKKEISEGDEVEVYSRANDQEPCGWWLAKVRMMKGEFYVIEYAACDATYNEIVTFERLRPVNQNKTVKKNTFFKCTVDVPEDLREACANENAHKDFKKAVGACRIFYHPETTQLMILSASEATVKRVNILSDMHLRSIRTKLMLMSRNEEATKHLECTKQLAAAFHEEFVVREDLMGLAIGTHGSNIQQARKVPGVTAIELDEDTGTFRIYGESADAVKKARGFLEFVEDFIQVPRNLVGKVIGKNGKVIQEIVDKSGVVRVRIEGDNENKLPREDGMVPFVFVGTKESIGNVQVLLEYHIAYLKEVEQLRMERLQIDEQLRQIGSRSYSGRGRGRRGPNYTSGYGTNSELSNPSETESERKDELSDWSLAGEDDRDSRHQRDSRRRPGGRGRSVSGGRGRGGPRGGKSSISSVLKDPDSNPYSLLDNTESDQTADTDASESHHSTNRRRRSRRRRTDEDAVLMDGMTESDTASVNENGLVTVADYISRAESQSRQRNLPRETLAKNKKEMAKDVIEEHGPSEKAINGPTSASGDDISKLQRTPGEEKINTLKEENTQEAAVLNGVS

SEQ ID NO: 5619 - protein, 539 aa, Homo Sapiens
MAELTVEVRGSNGAFYKGFIKDVHEDSLTVVFENNWQPERQVPFNEVRLPPPPDIKKEISEGDEVEVYSRANDQEPCGWWLAKVRMMKGEFYVIEYAACDATYNEIVTFERLRPVNQNKTVKKNTFFKCTVDVPEDLREACANENAHKDFKKAVGACRIFYHPETTQLMILSASEATVKRVNILSDMHLRSIRTKLMLMSRNEEATKHLECTKQLAAAFHEEFVVREDLMGLAIGTHGSNIQQARKVPGVTAIELDEDTGTFRIYGESADAVKKARGFLEFVEDFIQVPRNLVGKVIGKNGKVIQEIVDKSGVVRVRIEGDNENKLPREDGMVPFVFVGTKESIGNVQVLLEYHIAYLKEVEQLRMERLQIDEQLRQIGSRSYSGRGRGRRGPNYTSGYGTNSELSNPSETESERKDELSDWSLAGEDDRDSRHQRDSRRRPGGRGRSVSGGRGRGGPRGGKSSISSVLKDPDSNPYSLLDNTESDQTADTDASESHHSTNRRRRSRRRRTDEDAVLMDGMTESDTASVNENGLGKRCD

SEQ ID NO: 5620 - protein, 490 aa, Homo Sapiens
MAELTVEVRGSNGAFYKVYSRANDQEPCGWWLAKVRMMKGEFYVIEYAACDATYNEIVTFERLRPVNQNKTVKKNTFFKCTVDVPEDLREACANENAHKDFKKAVGACRIFYHPETTQLMILSASEATVKRVNILSDMHLRSIRTKLMLMSRNEEATKHLECTKQLAAAFHEEFVVREDLMGLAIGTHGSNIQQARKVPGVTAIELDEDTGTFRIYGESADAVKKARGFLEFVEDFIQVPRNLVGKVIGKNGKVIQEIVDKSGVVRVRIEGDNENKLPREDGMVPFVFVGTKESIGNVQVLLEYHIAYLKEVEQLRMERLQIDEQLRQIGSRSYSGRGRGRRGPNYTSGYGTNSELSNPSETESERKDELSDWSLAGEDDRDSRHQRDSRRRPGGRGRSVSGGRGRGGPRGGKSSISSVLKDPDSNPYSLLDNTESDQTADTDASESHHSTNRRRRSRRRRTDEDAVLMDGMTESDTASVNENGLGKRCD

SEQ ID NO: 5621 - protein, 75 aa, Homo Sapiens
MMKGEFYVIEYAACDATYNEIVTFERLRPVNQNKTVKKNTFFKCTVDVPEDLREACANENAHKDFKKAVGACRIF

SEQ ID NO: 5622 - protein, 94 aa, Homo Sapiens
MMKGEFYVIEYAACDATYNEIVTFERLRPVNQNKTVKKNTFFKCTVDVPEDLREACANENAHKDFKKAVGACRIFYHPETTQLMILSASEATVK

SEQ ID NO: 5623 - protein, 119 aa, Homo Sapiens
MMKGEFYVIEYAACDATYNEIVTFERLRPVNQNKTVKKNTFFKCTVDVPEDLREACANENAHKDFKKAVGACRIFYHPETTQLMILSASEATVKRVNILSDMHLRSIRTKLMLMSRNEE

SEQ ID NO: 5624 - protein, 123 aa, Homo Sapiens
MMKGEFYVIEYAACDATYNEIVTFERLRPVNQNKTVKKNTFFKCTVDVPEDLREACANENAHKDFKKAVGACRIFYHPETTQLMILSASEATVKRVNILSDMHLRSIRTKLMLMSRNEEATKH

SEQ ID NO: 5625 - protein, 536 aa, Homo Sapiens
MMKGEFYVIEYAACDATYNEIVTFERLRPVNQNKTVKKNTFFKCTVDVPEDLREACANENAHKDFKKAVGACRIFYHPETTQLMILSASEATVKRVNILSDMHLRSIRTKLMLMSRNEEATKHLECTKQLAAAFHEEFVVREDLMGLAIGTHGSNIQQARKVPGVTAIELDEDTGTFRIYGESADAVKKARGFLEFVEDFIQVPRNLVGKVIGKNGKVIQEIVDKSGVVRVRIEGDNENKLPREDGMVPFVFVGTKESIGNVQVLLEYHIAYLKEVEQLRMERLQIDEQLRQIGSRSYSGRGRGRRGPNYTSGYGTNSELSNPSETESERKDELSDWSLAGEDDRDSRHQRDSRRRPGGRGRSVSGGRGRGGPRGGKSSISSVLKDPDSNPYSLLDNTESDQTADTDASESHHSTNRRRRSRRRRTDEDAVLMDGMTESDTASVNENGLVTVADYISRAESQSRQRNLPRETLAKNKKEMAKDVIEEHGPSEKAINGPTSASGDDISKLQRTPGEEKINTLKEENTQEAAVLNGVS

SEQ ID NO: 5626 - protein, 454 aa, Homo Sapiens
MMKGEFYVIEYAACDATYNEIVTFERLRPVNQNKTVKKNTFFKCTVDVPEDLREACANENAHKDFKKAVGACRIFYHPETTQLMILSASEATVKRVNILSDMHLRSIRTKLMLMSRNEEATKHLECTKQLAAAFHEEFVVREDLMGLAIGTHGSNIQQARKVPGVTAIELDEDTGTFRIYGESADAVKKARGFLEFVEDFIQVPRNLVGKVIGKNGKVIQEIVDKSGVVRVRIEGDNENKLPREDGMVPFVFVGTKESIGNVQVLLEYHIAYLKEVEQLRMERLQIDEQLRQIGSRSYSGRGRGRRGPNYTSGYGTNSELSNPSETESERKDELSDWSLAGEDDRDSRHQRDSRRRPGGRGRSVSGGRGRGGPRGGKSSISSVLKDPDSNPYSLLDNTESDQTADTDASESHHSTNRRRRSRRRRTDEDAVLMDGMTESDTASVNENGLGKRCD

SEQ ID NO: 5627 - protein, 151 aa, Homo Sapiens
MRAVNILVYFFGFFWWFFNVQGFIKDVHEDSLTVVFENNWQPERQVPFNEVRLPPPPDIKKEISEGDEVEVYSRANDQEPCGWWLAKVRMMKGEFYVIEYAACDATYNEIVTFERLRPVNQNKTVKKNTFFKCTVDVPEDLREACANENAH

SEQ ID NO: 5628 - protein, 608 aa, Homo Sapiens
MVTEGFIKDVHEDSLTVVFENNWQPERQVPFNEVRLPPPPDIKKEISEGDEVEVYSRANDQEPCGWWLAKVRMMKGEFYVIEYAACDATYNEIVTFERLRPVNQNKTVKKNTFFKCTVDVPEDLREACANENAHKDFKKAVGACRIFYHPETTQLMILSASEATVKRVNILSDMHLRSIRTKLMLMSRNEEATKHLECTKQLAAAFHEEFVVREDLMGLAIGTHGSNIQQARKVPGVTAIELDEDTGTFRIYGESADAVKKARGFLEFVEDFIQVPRNLVGKVIGKNGKVIQEIVDKSGVVRVRIEGDNENKLPREDGMVPFVFVGTKESIGNVQVLLEYHIAYLKEVEQLRMERLQIDEQLRQIGSRSYSGRGRGRRGPNYTSGYGTNSELSNPSETESERKDELSDWSLAGEDDRDSRHQRDSRRRPGGRGRSVSGGRGRGGPRGGKSSISSVLKDPDSNPYSLLDNTESDQTADTDASESHHSTNRRRRSRRRRTDEDAVLMDGMTESDTASVNENGLVTVADYISRAESQSRQRNLPRETLAKNKKEMAKDVIEEHGPSEKAINGPTSASGDDISKLQRTPGEEKINTLKEENTQEAAVLNGVS

SEQ ID NO: 5629 - protein, 247 aa, Homo Sapiens
  misc_feature (1)..(1): Xaa can be any naturally occurring amino acid
XTNSELSNPSETESERKDELSDWSLAGEDDRDSRHQRDSRRRPGGRGRSVSGGRGRGGPRGGKSSISSVLKDPDSNPYSLLDNTESDQTADTDASESHHSTNRRRRSRRRRTDEDAVLMDGMTESDTASVNENGLDDSEKKPQRRNRSRRRRFRGQAEDRQPVTVADYISRAESQSRQRNLPRETLAKNKKEMAKDVIEEHGPSEKAINGPTSASGDDISKLQRTPGEEKINTLKEENTQEAAVLNG

SEQ ID NO: 5630 - protein, 144 aa, Homo Sapiens
MGRGYSGALQARGGLEEPLERGLRGPSFTQSPLHGAAAAYLSAQRDASLPVPGQRSDMQKVTLGLLVFLAGFPVLDANDLEDKNSPFYYDWHSLQVGGLICAGVLCAMGIIIVMSAKCKCKFGQKSGHHPGETPPLITPGSAQS

SEQ ID NO: 5631 - protein, 70 aa, Homo Sapiens
MQKVTLGLLVFLAGFPVLDANDLEDKNSPFYYDWHSLQVGGLICAGVLCAMGIIIVMSAKCKCKFGQKSG

SEQ ID NO: 5632 - protein, 87 aa, Homo Sapiens
MQKVTLGLLVFLAGFPVLDANDLEDKNSPFYYDWHSLQVGGLICAGVLCAMGIIIVMSAKCKCKFGQKSGHHPGETPPLITPGSAQS

SEQ ID NO: 5633 - protein, 87 aa, Homo Sapiens; identical to SEQ ID NO: 5632

SEQ ID NO: 5634 - protein, 87 aa, Homo Sapiens; identical to SEQ ID NO: 5632

SEQ ID NO: 5635 - protein, 96 aa, Homo Sapiens
MQKVTLGLLVFLAGFPVLDANDLEDKNSPFYYDWHSLQVGGLICAGVLCAMGIIIVMSEWRSSGEQAGRGWGSPPLTTQLSPTGAKCKCKFGQKSG

SEQ ID NO: 5636 - protein, 113 aa, Homo Sapiens
MQKVTLGLLVFLAGFPVLDANDLEDKNSPFYYDWHSLQVGGLICAGVLCAMGIIIVMSEWRSSGEQAGRGWGSPPLTTQLSPTGAKCKCKFGQKSGHHPGETPPLITPGSAQS

SEQ ID NO: 5637 - protein, 113 aa, Homo Sapiens; identical to SEQ ID NO: 5636

SEQ ID NO: 5638 - protein, 113 aa, Homo Sapiens; identical to SEQ ID NO: 5636

SEQ ID NO: 5639 - protein, 116 aa, Homo Sapiens
MQKVTLGLLVFLAGFPVLDANDLEDKNSPFYYGAPYIFVKRMGGQMERTQAGTEVPSTFLLDWHSLQVGGLICAGVLCAMGIIIVMSAKCKCKFGQKSGHHPGETPPLITPGSAQS

SEQ ID NO: 5640 - protein, 116 aa, Homo Sapiens; identical to SEQ ID NO: 5639

SEQ ID NO: 5641 - protein, 61 aa, Homo Sapiens
MQKVTLGLLVFLAGFPVLDANDLEDKNSPFYYGESPCPLSPPHNPTYCLVPRVPIQGWGLT

SEQ ID NO: 5642 - protein, 61 aa, Homo Sapiens; identical to SEQ ID NO: 5641

SEQ ID NO: 5643 - protein, 844 aa, Homo Sapiens
MGPGAPFARVGWPLPLLVVMAAGVAPVWASHSPHLPRPHSRVPPHPSSERRAVYIGALFPMSGGWPGGQACQPAVEMALEDVNSRRDILPDYELKLIHHDSKCDPGQATKYLYELLYNDPIKIILMPGCSSVSTLVAEAARMWNLIVLSYGSSSPALSNRQRFPTFFRTHPSATLHNPTRVKLFEKWGWKKIATIQQTTEVFTSTLDDLEERVKEAGIEITFRQSFFSDPAVPVKNLKRQDARIIVGLFYETEARKVFCEVYKERLFGKKYVWFLIGWYADNWFKIYDPSINCTVDEMTEAVEGHITTEIVMLNPANTRSISNMTSQEFVEKLTKRLKRHPEETGGFQEAPLAYDAIWALALALNKTSGGGGRSGVRLEDFNYNNQTITDQIYRAMNSSSFEGVSGHVVFDASGSRMAWTLIEQLQGGSYKKIGYYDSTKDDLSWSKTDKWIGGSPPADQTLVIKTFRFLSQKLFISVSVLSSLGIVLAVVCLSFNIYNSHVRYIQNSQPNLNNLTAVGCSLALAAVFPLGLDGYHIGRNQFPFVCQARLWLLGLGFSLGYGSMFTKIWWVHTVFTKKEEKKEWRKTLEPWKLYATVGLLVGMDVLTLAIWQIVDPLHRTIETFAKEEPKEDIDVSILPQLEHCSSRKMNTWLGIFYGYKGLLLLLGIFLAYETKSVSTEKINDHRAVGMAIYNVAVLCLITAPVTMILSSQQDAAFAFASLAIVFSSYITLVVLFVPKMRRLITRGEWQSEAQDTMKTGSSTNNNEEEKSRLLEKENRELEKIIAEKEERVSELRHQLQSRQQLRSRRHPPTPPEPSGGLPRGPPEPPDRLSCDGSRVHLLYK

SEQ ID NO: 5644 - protein, 844 aa, Homo Sapiens; identical to SEQ ID NO: 5643

SEQ ID NO: 5645 - protein, 131 aa, Homo Sapiens
MLLLLLLAPLFLRPPGAGGAQTPNATSEGCQIIHPPWEGGIRYRGLTRDQVKAINFLPVDYEIEYVCRGEREVVGPKVRKCLANGSWTDMDTPSRCGTLPSETQASALPGLQHGQVWEGAGDQAREAGRQW

SEQ ID NO: 5646 - protein, 97 aa, Homo Sapiens
MLLLLLLAPLFLRPPGAGGAQTPNATSEGCQIIHPPWEGGIRYRGLTRDQVKAINFLPVDYEIEYVCRGEREVVGPKVRKCLANGSWTDMDTPSRCV

SEQ ID NO: 5647 - protein, 899 aa, Homo Sapiens
MLLLLLLAPLFLRPPGAGGAQTPNATSEGCQIIHPPWEGGIRYRGLTRDQVKAINFLPVDYEIEYVCRGEREVVGPKVRKCLANGSWTDMDTPSRCVNRTPHSERRAVYIGALFPMSGGWPGGQACQPAVEMALEDVNSRRDILPDYELKLIHHDSKCDPGQATKYLYELLYNDPIKIILMPGCSSVSTLVAEAARMWNLIVLSYGSSSPALSNRQRFPTFFRTHPSATLHNPTRVKLFEKWGWKKIATIQQTTEVFTSTLDDLEERVKEAGIEITFRQSFFSDPAVPVKNLKRQDARIIVGLFYETEARKVFCEVYKERLFGKKYVWFLIGWYADNWFKIYDPSINCTVDEMTEAVEGHITTEIVMLNPANTRSISNMTSQEFVEKLTKRLKRHPEETGGFQEAPLAYDAIWALALALNKTSGGGGRSGVRLEDFNYNNQTITDQIYRAMNSSSFEGVSGHVVFDASGSRMAWTLIEQLQGGSYKKIGYYDSTKDDLSWSKTDKWIGGSPPADQTLVIKTFRFLSQKLFISVSVLSSLGIVLAVVCLSFNIYNSHVRYIQNSQPNLNNLTAVGCSLALAAVFPLGLDGYHIGRNQFPFVCQARLWLLGLGFSLGYGSMFTKIWWVHTVFTKKEEKKEWRKTLEPWKLYATVGLLVGMDVLTLAIWQIVDPLHRTIETFAKEEPKEDIDVSILPQLEHCSSRKMNTWLGIFYGYKGLLLLLGIFLAYETKSVSTEKINDHRAVGMAIYNVAVLCLITAPVTMILSSQQDAAFAFASLAIVFSSYITLVVLFVPKMRRLITRGEWQSEAQDTMKTGSSTNNNEEEKSRLLEKENRELEKIIAEKEERVSELRHQLQSRQQLRSRRHPPTPPEPSGGLPRGPPEPPDRLSCDGSRVHLLYK

SEQ ID NO: 5648 - protein, 137 aa, Homo Sapiens
MLLLLLLAPLFLRPPGAGGAQTPNATSEGCQIIHPPWEGGIRYRGLTRDQVKAINFLPVDYEIEYVCRGEREVVGPKVRKCLANGSWTDMDTPSRCVRICSKSYLTLENGKVFLTGGDLPALDGARVDFRCDPDFHL

SEQ ID NO: 5649 - protein, 156 aa, Homo Sapiens
MLLLLLLAPLFLRPPGAGGAQTPNATSEGCQIIHPPWEGGIRYRGLTRDQVKAINFLPVDYEIEYVCRGEREVVGPKVRKCLANGSWTDMDTPSRCVRICSKSYLTLENGKVFLTGGDLPALDGARVDFRCDPDFHLVGSSRSICSQGQWSTPKPH

SEQ ID NO: 5650 - protein, 193 aa, Homo Sapiens
MLLLLLLAPLFLRPPGAGGAQTPNATSEGCQIIHPPWEGGIRYRGLTRDQVKAINFLPVDYEIEYVCRGEREVVGPKVRKCLANGSWTDMDTPSRCVRICSKSYLTLENGKVFLTGGDLPALDGARVDFRCDPDFHLVGSSRSICSQGQWSTPKPHCQGTLPSETQASALPGLQHGQVWEGAGDQAREAGRQW

SEQ ID NO: 5651 - protein, 961 aa, Homo Sapiens
MLLLLLLAPLFLRPPGAGGAQTPNATSEGCQIIHPPWEGGIRYRGLTRDQVKAINFLPVDYEIEYVCRGEREVVGPKVRKCLANGSWTDMDTPSRCVRICSKSYLTLENGKVFLTGGDLPALDGARVDFRCDPDFHLVGSSRSICSQGQWSTPKPHCQVNRTPHSERRAVYIGALFPMSGGWPGGQACQPAVEMALEDVNSRRDILPDYELKLIHHDSKCDPGQATKYLYELLYNDPIKIILMPGCSSVSTLVAEAARMWNLIVLSYGSSSPALSNRQRFPTFFRTHPSATLHNPTRVKLFEKWGWKKIATIQQTTEVFTSTLDDLEERVKEAGIEITFRQSFFSDPAVPVKNLKRQDARIIVGLFYETEARKVFCEVYKERLFGKKYVWFLIGWYADNWFKIYDPSINCTVDEMTEAVEGHITTEIVMLNPANTRSISNMTSQEFVEKLTKRLKRHPEETGGFQEAPLAYDAIWALALALNKTSGGGGRSGVRLEDFNYNNQTITDQIYRAMNSSSFEGVSGHVVFDASGSRMAWTLIEQLQGGSYKKIGYYDSTKDDLSWSKTDKWIGGSPPADQTLVIKTFRFLSQKLFISVSVLSSLGIVLAVVCLSFNIYNSHVRYIQNSQPNLNNLTAVGCSLALAAVFPLGLDGYHIGRNQFPFVCQARLWLLGLGFSLGYGSMFTKIWWVHTVFTKKEEKKEWRKTLEPWKLYATVGLLVGMDVLTLAIWQIVDPLHRTIETFAKEEPKEDIDVSILPQLEHCSSRKMNTWLGIFYGYKGLLLLLGIFLAYETKSVSTEKINDHRAVGMAIYNVAVLCLITAPVTMILSSQQDAAFAFASLAIVFSSYITLVVLFVPKMRRLITRGEWQSEAQDTMKTGSSTNNNEEEKSRLLEKENRELEKIIAEKEERVSELRHQLQSRQQLRSRRHPPTPPEPSGGLPRGPPEPPDRLSCDGSRVHLLYK

SEQ ID NO: 5652 - protein, 578 aa, Homo Sapiens
MLLLLLLAPLFLRPPGAGGAQTPNATSEGCQIIHPPWEGGIRYRGLTRDQVKAINFLPVDYEIEYVCRGEREVVGPKVRKCLANGSWTDMDTPSRCVRICSKSYLTLENGKVFLTGGDLPALDGARVDFRCDPDFHLVGSSRSICSQGQWSTPKPHCQVNRTPHSERRAVYIGALFPMSGGWPGGQACQPAVEMALEDVNSRRDILPDYELKLIHHDSKCDPGQATKYLYELLYNDPIKIILMPGCSSVSTLVAEAARMWNLIVLSYGSSSPALSNRQRFPTFFRTHPSATLHNPTRVKLFEKWGWKKIATIQQTTEVFTSTLDDLEERVKEAGIEITFRQSFFSDPAVPVKNLKRQDARIIVGLFYETEARKVFCEVYKERLFGKKYVWFLIGWYADNWFKIYDPSINCTVDEMTEAVEGHITTEIVMLNPANTRSISNMTSQEFVEKLTKRLKRHPEETGGFQEAPLAYDAIWALALALNKTSGGGGRSGVRLEDFNYNNQTITDQIYRAMNSSSFEGVSGHVVFDASGSRMAWTLIEQLQGGSYKKIGYYDSTKDDLSWSKTDKWIVISRTHSPT

SEQ ID NO: 5653 - protein, 578 aa, Homo Sapiens; identical to SEQ ID NO: 5652

SEQ ID NO: 5654 - protein, 133 aa, Homo Sapiens
MPGAWMLLLLLLAPLFLRPPGAGGAQTPNATSEGCQIIHPPWEGGIRYRGLTRDQVKAINFLPVDYEIEYVCRGEREVVGPKVRKCLANGSWTDMDTPSRCVRICSKSYLTLENGKVFLTGGDLPALDGARVD

SEQ ID NO: 5655 - protein, 70 aa, Homo Sapiens
MRKSPGLSDCLWAWILLLSTLTGRRTSRKSHQNTDLYEVNEGKDVAMDSRHYKMNLKTIPLSSPGFWTDS

SEQ ID NO: 5656 - protein, 35 aa, Homo Sapiens
MRKSPGLSDCLWAWILLLSTLTGRSYGQPSLQDEL

SEQ ID NO: 5657 - protein, 85 aa, Homo Sapiens
MRKSPGLSDCLWAWILLLSTLTGRSYGQPSLQDELKDNTTVFTRILDRLLDGYDNRLRPGLGERVTEVKTDIFVTSFGPVSDHDM

SEQ ID NO: 5658 - protein, 168 aa, Homo Sapiens
MRKSPGLSDCLWAWILLLSTLTGRSYGQPSLQDELKDNTTVFTRILDRLLDGYDNRLRPGLGERVTEVKTDIFVTSFGPVSDHDMEYTIDVFFRQSWKDERLKFKGPMTVLRLNNLMASKIWTPDTFFHNGKKSVAHNMTMPNKLLRITEDGTLLYTMRLTVRAECPM

SEQ ID NO: 5659 - protein, 456 aa, Homo Sapiens
MRKSPGLSDCLWAWILLLSTLTGRSYGQPSLQDELKDNTTVFTRILDRLLDGYDNRLRPGLGERVTEVKTDIFVTSFGPVSDHDMEYTIDVFFRQSWKDERLKFKGPMTVLRLNNLMASKIWTPDTFFHNGKKSVAHNMTMPNKLLRITEDGTLLYTMRLTVRAECPMHLEDFPMDAHACPLKFGSYAYTRAEVVYEWTREPARSVVVAEDGSRLNQYDLLGQTVDSGIVQSSTGEYVVMTTHFHLKRKIGYFVIQTYLPCIMTVILSQVSFWLNRESVPARTVFGVTTVLTMTTLSISARNSLPKVAYATAMDWFIAVCYAFVFSALIEFATVNYFTKRGYAWDGKSVVPEKPKKVKDPLIKKNNTYAPTATSYTPNLARGDPGLATIAKSATIEPKEVKPETKPPEPKKTFNSVSKIDRLSRIAFPLLFGIFNLVYWATYLNREPQLKAPTPHQ

SEQ ID NO: 5660 - protein, 456 aa, Homo Sapiens; identical to SEQ ID NO: 5659

SEQ ID NO: 5661 - protein, 456 aa, Homo Sapiens; identical to SEQ ID NO: 5659

SEQ ID NO: 5662 - protein, 456 aa, Homo Sapiens; identical to SEQ ID NO: 5659

SEQ ID NO: 5663 - protein, 456 aa, Homo Sapiens; identical to SEQ ID NO: 5659

SEQ ID NO: 5664 - protein, 456 aa, Homo Sapiens; identical to SEQ ID NO: 5659

SEQ ID NO: 5665 - protein, 285 aa, Homo Sapiens
MRKSPGLSDCLWAWILLLSTLTGRSYGQPSLQDELKDNTTVFTRILDRLLDGYDNRLRPGLGERVTEVKTDIFVTSFGPVSDHDMEYTIDVFFRQSWKDERLKFKGPMTVLRLNNLMASKIWTPDTFFHNGKKSVAHNMTMPNKLLRITEDGTLLYTMRLTVRAECPMHLEDFPMDAHACPLKFGSYAYTRAEVVYEWTREPARSVVVAEDGSRLNQYDLLGQTVDSGIVQSSTGEYVVMTTHFHLKRKIGYFVIQTYLPCIMTVILSQVSFWLNRESVPARTVF

SEQ ID NO: 5666 - protein, 456 aa, Homo Sapiens; identical to SEQ ID NO: 5659

SEQ ID NO: 5667 - protein, 456 aa, Homo Sapiens; identical to SEQ ID NO: 5659

SEQ ID NO: 5668 - protein, 94 aa, Homo Sapiens
MRKSPGLSDCLWAWILLLSTLTGRSYGQPSLQDELKDNTTVFTRILDRLLDGYDNRLRPGLGERVTEVKTDIFVTSFGPVSDHDMIFALQNTAQ

SEQ ID NO: 5669 - protein, 471 aa, Homo Sapiens
MVQVSIASNELLQPAMRKSPGLSDCLWAWILLLSTLTGRSYGQPSLQDELKDNTTVFTRILDRLLDGYDNRLRPGLGERVTEVKTDIFVTSFGPVSDHDMEYTIDVFFRQSWKDERLKFKGPMTVLRLNNLMASKIWTPDTFFHNGKKSVAHNMTMPNKLLRITEDGTLLYTMRLTVRAECPMHLEDFPMDAHACPLKFGSYAYTRAEVVYEWTREPARSVVVAEDGSRLNQYDLLGQTVDSGIVQSSTGEYVVMTTHFHLKRKIGYFVIQTYLPCIMTVILSQVSFWLNRESVPARTVFGVTTVLTMTTLSISARNSLPKVAYATAMDWFIAVCYAFVFSALIEFATVNYFTKRGYAWDGKSVVPEKPKKVKDPLIKKNNTYAPTATSYTPNLARGDPGLATIAKSATIEPKEVKPETKPPEPKKTFNSVSKIDRLSRIAFPLLFGIFNLVYWATYLNREPQLKAPTPHQ

SEQ ID NO: 5670 - protein, 113 aa, Homo Sapiens
MVQVSIASNEVSYPSELLQPAMRKSPGLSDCLWAWILLLSTLTGRSYGQPSLQDELKDNTTVFTRILDRLLDGYDNRLRPGLGERVTEVKTDIFVTSFGPVSDHDMEYTIDVF

SEQ ID NO: 5671 - protein, 427 aa, Homo Sapiens
MEYTIDVFFRQKWKDERLKFKGPMNILRLNNLMASKIWTPDTFFHNGKKSVAHNMTMPNKLLRIQDDGTLLYTMRLTVQAECPMHLEDFPMDAHSCPLKFGSYAYTTSEVTYIWTYNASDSVQVAPDGSRLNQYDLLGQSIGKETIKSSTGEYTVMTAHFHLKRKIGYFVIQTYLPCIMTVILSQVSFWLNRESVPARTVFGVTTVLTMTTLSISARNSLPKVAYATAMDWFIAVCYAFVFSALIEFATVNYFTKRGWAWDGKSVVNDKSPSIKAEGITLTYNSVKAILQGAKLIWSKYIAFSWPSLFQEKTLEYLEKWMDCLTFKQSSKKEKASVMIQNNAYAVAVANYAPNLSKDPVLSTISKSATTPEPNKKPENKPAEAKKTFNSVSKIDRMSRIVFPVLFGTFNLVYWATYLNREPVLGVSP

SEQ ID NO: 5672 - protein, 137 aa, Homo Sapiens
MKTKLNIYNMQFLLFVFLVWDPARLVLANIQEDEAKNNITIFTRILDRLLDGYDNRLRPGLGDSITEVFTNIYVTSFGPVSDTDMEYTIDVFFRQKWKDERLKFKGPMNILRLNNLMASKIWTPDTFFHNGKKSVAH

SEQ ID NO: 5673 - protein, 152 aa, Homo Sapiens
MKTKLNIYNMQFLLFVFLVWDPARLVLANIQEDEAKNNITIFTRILDRLLDGYDNRLRPGLGDSITEVFTNIYVTSFGPVSDTDMEYTIDVFFRQKWKDERLKFKGPMNILRLNNLMASKIWTPDTFFHNGKKSVAHNMTMPNKLLRIQDDG

SEQ ID NO: 5674 - protein, 159 aa, Homo Sapiens
MKTKLNIYNMQFLLFVFLVWDPARLVLANIQEDEAKNNITIFTRILDRLLDGYDNRLRPGLGDSITEVFTNIYVTSFGPVSDTDMEYTIDVFFRQKWKDERLKFKGPMNILRLNNLMASKIWTPDTFFHNGKKSVAHNMTMPNKLLRIQDDGTLLYTMR

SEQ ID NO: 5675 - protein, 451 aa, Homo Sapiens
MKTKLNIYNMQFLLFVFLVWDPARLVLANIQEDEAKNNITIFTRILDRLLDGYDNRLRPGLGDSITEVFTNIYVTSFGPVSDTDMEYTIDVFFRQKWKDERLKFKGPMNILRLNNLMASKIWTPDTFFHNGKKSVAHNMTMPNKLLRIQDDGTLLYTMRLTVQAECPMHLEDFPMDAHSCPLKFGSYAYTTSEVTYIWTYNASDSVQVAPDGSRLNQYDLLGQSIGKETIKSSTGEYTVMTAHFHLKRKIGYFVIQTYLPCIMTVILSQVSFWLNRESVPARTVFGVTTVLTMTTLSISARNSLPKVAYATAMDWFIAVCYAFVFSALIEFATVNYFTKRGWAWDGKSVVNDKKKEKASVMIQNNAYAVAVANYAPNLSKDPVLSTISKSATTPEPNKKPENKPAEAKKTFNSVSKIDRMSRIVFPVLFGTFNLVYWATYLNREPVLGVSP

SEQ ID NO: 5676 - protein, 451 aa, Homo Sapiens; identical to SEQ ID NO: 5675

SEQ ID NO: 5677 - protein, 511 aa, Homo Sapiens
MKTKLNIYNMQFLLFVFLVWDPARLVLANIQEDEAKNNITIFTRILDRLLDGYDNRLRPGLGDSITEVFTNIYVTSFGPVSDTDMEYTIDVFFRQKWKDERLKFKGPMNILRLNNLMASKIWTPDTFFHNGKKSVAHNMTMPNKLLRIQDDGTLLYTMRLTVQAECPMHLEDFPMDAHSCPLKFGSYAYTTSEVTYIWTYNASDSVQVAPDGSRLNQYDLLGQSIGKETIKSSTGEYTVMTAHFHLKRKIGYFVIQTYLPCIMTVILSQVSFWLNRESVPARTVFGVTTVLTMTTLSISARNSLPKVAYATAMDWFIAVCYAFVFSALIEFATVNYFTKRGWAWDGKSVVNDKSPSIKAEGITLTYNSVKAILQGAKLIWSKYIAFSWPSLFQEKTLEYLEKWMDCLTFKQSSKKEKASVMIQNNAYAVAVANYAPNLSKDPVLSTISKSATTPEPNKKPENKPAEAKKTFNSVSKIDRMSRIVFPVLFGTFNLVYWATYLNREPVLGVSP

SEQ ID NO: 5678 - protein, 451 aa, Homo Sapiens; identical to SEQ ID NO: 5675

SEQ ID NO: 5679 - protein, 367 aa, Homo Sapiens
MKTKLNIYNMQFLLFVFLVWDPARLVLANIQEDEAKNNITIFTRILDRLLDGYDNRLRPGLGDSITEVFTNIYVTSFGPVSDTDMEYTIDVFFRQKWKDERLKFKGPMNILRLNNLMASKIWTPDTFFHNGKKSVAHNMTMPNKLLRIQDDGTLLYTMRLTVQAECPMHLEDFPMDAHSCPLKFGSYAYTTSEVTYIWTYNASDSVQVAPDGSRLNQYDLLGQSIGKETIKSSTGEYTVMTAHFHLKRKIGYFVIQTYLPCIMTVILSQVSFWLNRESVPARTVFGVTTVLTMTTLSISARNSLPKVAYATAMDWFIAVCYAFVFSALIEFATVNYFTKRGWAWDGKSVVNDKVSESFRVIIIKKIP

SEQ ID NO: 5680 - protein, 451 aa, Homo Sapiens; identical to SEQ ID NO: 5675

SEQ ID NO: 5681 - protein, 66 aa, Homo Sapiens
MKTKLNIYNMQFLLFVFLVWDPARLVLANIQEDEAKNNITIFTRILDRLLDGYDNRLRPGLGGIYN

SEQ ID NO: 5682 - protein, 66 aa, Homo Sapiens; identical to SEQ ID NO: 5681

SEQ ID NO: 5683 - protein, 66 aa, Homo Sapiens; identical to SEQ ID NO: 5681

SEQ ID NO: 5684 - protein, 73 aa, Homo Sapiens
MKTKLNIYNMQFLLFVFLVWDPARLVLANIQEDEAKNNITIFTRILDRLLDGYDNRLRPGLGVSRVESPVCVT

SEQ ID NO: 5685 - protein, 56 aa, Homo Sapiens
SSTGEYTVMTAHFHLKRKIGYFVIQTYLPCIMTVILSQVSFWLNRESVPARTVFGE

SEQ ID NO: 5686 - protein, 16 aa, Homo Sapiens
MDNGMFSGFIMIKNLL

SEQ ID NO: 5687 - protein, 86 aa, Homo Sapiens
MDNGMFSGFIMIKNLLLFCISMNLSSHFGFSQMPTSSVKDETNDNITIFTRILDGLLDGYDNRLRPGLGERITQVRTDIYVTSFGP

SEQ ID NO: 5688 - protein, 149 aa, Homo Sapiens
MDNGMFSGFIMIKNLLLFCISMNLSSHFGFSQMPTSSVKDETNDNITIFTRILDGLLDGYDNRLRPGLGERITQVRTDIYVTSFGPVSDTEMEYTIDVFFRQSWKDERLRFKGPMQRLPLNNLLASKIWTPDTFFHNGKKSIAHNMTTP

SEQ ID NO: 5689 - protein, 166 aa, Homo Sapiens
MDNGMFSGFIMIKNLLLFCISMNLSSHFGFSQMPTSSVKDETNDNITIFTRILDGLLDGYDNRLRPGLGERITQVRTDIYVTSFGPVSDTEMEYTIDVFFRQSWKDERLRFKGPMQRLPLNNLLASKIWTPDTFFHNGKKSIAHNMTTPNKLLRLEDDGTLLYTMR

SEQ ID NO: 5690 - protein, 462 aa, Homo Sapiens
MDNGMFSGFIMIKNLLLFCISMNLSSHFGFSQMPTSSVKDETNDNITIFTRILDGLLDGYDNRLRPGLGERITQVRTDIYVTSFGPVSDTEMEYTIDVFFRQSWKDERLRFKGPMQRLPLNNLLASKIWTPDTFFHNGKKSIAHNMTTPNKLLRLEDDGTLLYTMRLTISAECPMQLEDFPMDAHACPLKFGSYAYPNSEVVYVWTNGSTKSVVVAEDGSRLNQYHLMGQTVGTENISTSTGEYTIMTAHFHLKRKIGYFVIQTYLPCIMTVILSQVSFWLNRESVPARTVFGVTTVLTMTTLSISARNSLPKVAYATAMDWFIAVCYAFVFSALIEFATVNYFTKRGWAWDGKKALEAAKIKKKREVILNKSTNAFTTGKMSHPPNIPKEQTPAGTSNTTSVSVKPSEEKTSESKKTYNSISKIDKMSRIVFPVLFGTFNLVYWATYLNREPVIKGAASPK

SEQ ID NO: 5691 - protein, 462 aa, Homo Sapiens; identical to SEQ ID NO: 5690

SEQ ID NO: 5692 - protein, 462 aa, Homo Sapiens; identical to SEQ ID NO: 5690

SEQ ID NO: 5693 - protein, 86 aa, Homo Sapiens
MPTSSVKDETNDNITIFTRILDGLLDGYDNRLRPGLGERITQVRTDIYVTSFGPVSDTEMEYTIDVFFRQSWKDERLRFKGPMQRL

SEQ ID NO: 5694 - protein, 166 aa, Homo Sapiens
MPTSSVKDETNDNITIFTRILDGLLDGYDNRLRPGLGERITQVRTDIYVTSFGPVSDTEMEYTIDVFFRQSWKDERLRFKGPMQRLPLNNLLASKIWTPDTFFHNGKKSIAHNMTTPNKLLRLEDDGTLLYTMRLTISAECPMQLEDFPMDAHACPLKFGSYAYPN

SEQ ID NO: 5695 - protein, 258 aa, Homo Sapiens
EAGVRGTEEDGCWVCNLESVSQSQTWQENKLSEYQIDIFFAQTWTDSRLRFNSTMKILTLNSNMVGLIWIPDTIFRNSKTAEAHWITTPNQLLRIWNDGKILYTLRLTINAECQLQLHNFPMDEHSCPLIFSSYGYPKEEMIYRWRKNSVEAADQKSWRLYQFDFMGLRNTTEIVTTSAGDYVVMTIYFELSRRMGYFTIQTYIPCILTVVLSWVSFWIKKDATPARTALGITTVLTMTTLSTIARKSLPRVSYVTAM

SEQ ID NO: 5696 - protein, 467 aa, Homo Sapiens
MAPKLLLLLCLFSGLHARSRKVEEDEYEDSSSNQKWVLAPKSQDTDVTLILNKLLREYDKKLRPDIGIKPTVIDVDIYVNSIGPVSSINMEYQIDIFFAQTWTDSRLRFNSTMKILTLNSNMVGLIWIPDTIFRNSKTAEAHWITTPNQLLRIWNDGKILYTLRLTINAECQLQLHNFPMDEHSCPLIFSSYGYPKEEMIYRWRKNSVEAADQKSWRLYQFDFMGLRNTTEIVTTSAGDYVVMTIYFELSRRMGYFTIQTYIPCILTVVLSWVSFWIKKDATPARTALGITTVLTMTTLSTIARKSLPRVSYVTAMDLFVTVCFLFVFAALMEYATLNYYSSCRKPTTTKKTTSLLHPDSSRWIPERISLQAPSNYSLLDMRPPPTAMITLNNSVYWQEFEDTCVYECLDGKDCQSFFCCYEECKSGSWRKGRIHIDILELDSYSRVFFPTSFLLFNLVYWVGYLYL

SEQ ID NO: 5697 - protein, 253 aa, Homo Sapiens
MAPKLLLLLCLFSGLHARSRKVEEDEYEDSSSNQKWVLAPKSQDTDVTLILNKLLREYDKKLRPDIGIKPTVIDVDIYVNSIGPVSSINMEYQIDIFFAQTWTDSRLRFNSTMKILTLNSNMVGLIWIPDTIFRNSKTAEAHWITTPNQLLRIWNDGKILYTLRLTINAECQLQLHNFPMDEHSCPLIFSSYGYPKEEMIYRWRKNSVEAADQKSWRLYQFDFMGLRNTTEIVTTSAGRNLLKEAQLSKAREA

SEQ ID NO: 5698 - protein, 288 aa, Homo Sapiens
MDEHSCPLIFSSYGYPKEEMIYRWRKNSVEAADQKSWRLYQFDFMGLRNTTEIVTTSAGDYVVMTIYFELSRRMGYFTIQTYIPCILTVVLSWVSFWIKKDATPARTALGITTVLTMTTLSTIARKSLPRVSYVTAMDLFVTVCFLFVFAALMEYATLNYYSSCRKPTTTKKTTSLLHPDSSRWIPERISLQAPSNYSLLDMRPPPTAMITLNNSVYWQEFEDTCVYECLDGKDCQSFFCCYEECKSGSWRKGRIHIDILELDSYSRVFFPTSFLLFNLVYWVGYLYL

SEQ ID NO: 5699 - protein, 38 aa, Homo Sapiens
  misc_feature (1)..(1): Xaa can be any naturally occurring amino acid
XAECQLQLHNFPMDEHSCPLIFSSSTILAFRLSLHAYR

SEQ ID NO: 5700 - protein, 169 aa, Homo Sapiens
  misc_feature (1)..(1): Xaa can be any naturally occurring amino acid
XDYVVMTIYFELSRRMGYFTIQTYIPCILTVVLSWVSFWIKKDATPARTALGITTVLTMTTLSTIARKSLPRVSYVTAMDLFVTVCFLFVFAALMEYATLNYYSSCRKPTTTKKTTSLLHPDSSRWIPERISLQAPSKPSCCPACGLQGLPFRSLVSHPRISRAFCLPV

SEQ ID NO: 5701 - protein, 52 aa, Homo Sapiens
MNYSLHLAFVCLSLFTERMCIQGSQFNVEVGRSDKLSLPGFENLTAGYNKFL

SEQ ID NO: 5702 - protein, 59 aa, Homo Sapiens
MNYSLHLAFVCLSLFTERMCIQGSQFNVEVGRSDKLSLPGFENLTAGYNKFLRPNFGGE

SEQ ID NO: 5703 - protein, 92 aa, Homo Sapiens
MNYSLHLAFVCLSLFTERMCIQGSQFNVEVGRSDKLSLPGFENLTAGYNKFLRPNFGGEPVQIALTLDIASISSISESNMDYTATIYLRQRW

SEQ ID NO: 5704 - protein, 171 aa, Homo Sapiens
MNYSLHLAFVCLSLFTERMCIQGSQFNVEVGRSDKLSLPGFENLTAGYNKFLRPNFGGEPVQIALTLDIASISSISESNMDYTATIYLRQRWMDQRLVFEGNKSFTLDARLVEFLWVPDTYIVESKKSFLHEVTVGNRLIRLFSNGTVLYALRITTTVACNMDLSKYPMDT

SEQ ID NO: 5705 - protein, 189 aa, Homo Sapiens
MNYSLHLAFVCLSLFTERMCIQGSQFNVEVGRSDKLSLPGFENLTAGYNKFLRPNFGGEPVQIALTLDIASISSISESNMDYTATIYLRQRWMDQRLVFEGNKSFTLDARLVEFLWVPDTYIVESKKSFLHEVTVGNRLIRLFSNGTVLYALRITTTVACNMDLSKYPMDTQTCKLQLESWGYDGNDVE

SEQ ID NO: 5706 - protein, 440 aa, Homo Sapiens
MNYSLHLAFVCLSLFTERMCIQGSQFNVEVGRSDKLSLPGFENLTAGYNKFLRPNFGGEPVQIALTLDIASISSISESNMDYTATIYLRQRWMDQRLVFEGNKSFTLDARLVEFLWVPDTYIVESKKSFLHEVTVGNRLIRLFSNGTVLYALRITTTVACNMDLSKYPMDTQTCKLQLESWGYDGNDVEFTWLRGNDSVRGLEHLRLAQYTIERYFTLVTRSQQETGNYTRLVLQFELRRNVLYFILETYVPSTFLVVLSWVSFWISLDSVPARTCIGVTTVLSMTTLMIGSRTSLPNTNCFIKAIDVYLGICFSFVFGALLEYAVAHYSSLQQMAAKDRGTTKEVEEVSITNIINSSISSFKRKISFASIEISSDNVDYSDLTMKTSDKFKFVFREKMGRIVDYFTIQNPSNVDHYSKLLFPLIFMLANVFYWAYYMYF

SEQ ID NO: 5707 - protein, 440 aa, Homo Sapiens; identical to SEQ ID NO: 5706

SEQ ID NO: 5708 - protein, 349 aa, Homo Sapiens
MNYSLHLAFVCLSLFTERMCIQGSQFNVEVGRSDKLSLPGFENLTAGYNKFLRPNFGGEPVQIALTLDIASISSISESNMDYTATIYLRQRWMDQRLVFEGNKSFTLDARLVEFLWVPDTYIVESKKSFLHEVTVGNRLIRLFSNGTVLYALRITTTVACNMDLSKYPMDTQTCKLQLESWGYDGNDVEFTWLRGNDSVRGLEHLRLAQYTIERYFTLVTRSQQETGNYTRLVLQFELRRNVLYFILETYVPSTFLVVLSWVSFWISLDSVPARTCIGVTTVLSMTTLMIGSRTSLPNTNCFIKAIDVYLGICFSFVFGALLEYAVAHYSSLQQMAAKDRQKICYLYAA

SEQ ID NO: 5709 - protein, 289 aa, Homo Sapiens
MNYSLHLAFVCLSLFTERMCIQGSQFNVEVGRSDKLSLPGFENLTAGYNKFLRPNFGGEPVQIALTLDIASISSISESNMDYTATIYLRQRWMDQRLVFEGNKSFTLDARLVEFLWVPDTYIVESKKSFLHEVTVGNRLIRLFSNGTVLYALRITTTVACNMDLSKYPMDTQTCKLQLESWGYDGNDVEFTWLRGNDSVRGLEHLRLAQYTIERYFTLVTRSQQETGNYTRLVLQFELRRNVLYFILETYVPSTFLVVLSWVSFWISLDSVPARTCIGDNKGSRRSQYY

SEQ ID NO: 5710 - protein, 123 aa, Homo Sapiens
MARGSALLLASLLLAAALSASAGLWSPAKEKRGWTLNSAGYLLGPHAVGNHRSFSDKNGLTSKRELRPEDDMKPGSFDRSIPENNIMRTIIEFLSFLHLKEAGALDRLLDLPAAASSEDIERS

SEQ ID NO: 5711 - protein, 113 aa, Homo Sapiens
MLPPQKKPWESMAKGLVLGALFTSFLLLVYSYAVPPLHAGLASTRTPEAAASCSPPALEPEAVIRANGSAGECQPRRNIVFLKTHKTASSTLLNILFRFGQKHRLKFAFPNGR

SEQ ID NO: 5712 - protein, 164 aa, Homo Sapiens
MLPPQKKPWESMAKGLVLGALFTSFLLLVYSYAVPPLHAGLASTRTPEAAASCSPPALEPEAVIRANGSAGECQPRRNIVFLKTHKTASSTLLNILFRFGQKHRLKFAFPNGRNDFDYPTFFARSLVQDYRPGACFNIICNHMRFHYDEVRGLVPTNAIFITVL

SEQ ID NO: 5713 - protein, 265 aa, Homo Sapiens
MLPPQKKPWESMAKGLVLGALFTSFLLLVYSYAVPPLHAGLASTRTPEAAASCSPPALEPEAVIRANGSAGECQPRRNIVFLKTHKTASSTLLNILFRFGQKHRLKFAFPNGRNDFDYPTFFARSLVQDYRPGACFNIICNHMRFHYDEVRGLVPTNAIFITVLRDPARLFESSFHYFGPVVPLTWKLSAGDKLTEFLQDPDRYYDPNGFNAHYLRNLLFFDLGYDNSLDPSSPQVQEHILEVERRFHLVLLQEYFDESLVLLKD

SEQ ID NO: 5714 - protein, 71 aa, Homo Sapiens
MLPPQKKPWESMAKGLVLGALFTSFLLLVYSYAVPPLHAGLASTTPEAAASCSPPALEPEAVIRANGSAGE

SEQ ID NO: 5715 - protein, 76 aa, Homo Sapiens
MLPPQKKPWESMAKGLVLGALFTSFLLLVYSYAVPPLHAGLASTTPEAAASCSPPALEPEAVIRANGSAGECQPRR

SEQ ID NO: 5716 - protein, 85 aa, Homo Sapiens
MLPPQKKPWESMAKGLVLGALFTSFLLLVYSYAVPPLHAGLASTTPEAAASCSPPALEPEAVIRANGSAGECQPRRNIVFLKTHK

SEQ ID NO: 5717 - protein, 95 aa, Homo Sapiens
MLPPQKKPWESMAKGLVLGALFTSFLLLVYSYAVPPLHAGLASTTPEAAASCSPPALEPEAVIRANGSAGECQPRRNIVFLKTHKTASSTLLNIL

SEQ ID NO: 5718 - protein, 99 aa, Homo Sapiens
MLPPQKKPWESMAKGLVLGALFTSFLLLVYSYAVPPLHAGLASTTPEAAASCSPPALEPEAVIRANGSAGECQPRRNIVFLKTHKTASSTLLNILFRFG

SEQ ID NO: 5719 - protein, 100 aa, Homo Sapiens
MLPPQKKPWESMAKGLVLGALFTSFLLLVYSYAVPPLHAGLASTTPEAAASCSPPALEPEAVIRANGSAGECQPRRNIVFLKTHKTASSTLLNILFRFGQ

SEQ ID NO: 5720 - protein, 103 aa, Homo Sapiens
MLPPQKKPWESMAKGLVLGALFTSFLLLVYSYAVPPLHAGLASTTPEAAASCSPPALEPEAVIRANGSAGECQPRRNIVFLKTHKTASSTLLNILFRFGQKHR

SEQ ID NO: 5721 - protein, 143 aa, Homo Sapiens
MLPPQKKPWESMAKGLVLGALFTSFLLLVYSYAVPPLHAGLASTTPEAAASCSPPALEPEAVIRANGSAGECQPRRNIVFLKTHKTASSTLLNILFRFGQKHRLKFAFPNGRNDFDYPTFFARSLVQDYRPGACFNIICNHMR

SEQ ID NO: 5722 - protein, 149 aa, Homo Sapiens
MLPPQKKPWESMAKGLVLGALFTSFLLLVYSYAVPPLHAGLASTTPEAAASCSPPALEPEAVIRANGSAGECQPRRNIVFLKTHKTASSTLLNILFRFGQKHRLKFAFPNGRNDFDYPTFFARSLVQDYRPGACFNIICNHMRFHYDEV

SEQ ID NO: 5723 - protein, 170 aa, Homo Sapiens
MLPPQKKPWESMAKGLVLGALFTSFLLLVYSYAVPPLHAGLASTTPEAAASCSPPALEPEAVIRANGSAGECQPRRNIVFLKTHKTASSTLLNILFRFGQKHRLKFAFPNGRNDFDYPTFFARSLVQDYRPGACFNIICNHMRFHYDEVRGLVPTNAIFITVLRDPARLF

SEQ ID NO: 5724 - protein, 199 aa, Homo Sapiens
MLPPQKKPWESMAKGLVLGALFTSFLLLVYSYAVPPLHAGLASTTPEAAASCSPPALEPEAVIRANGSAGECQPRRNIVFLKTHKTASSTLLNILFRFGQKHRLKFAFPNGRNDFDYPTFFARSLVQDYRPGACFNIICNHMRFHYDEVRGLVPTNAIFITVLRDPARLFESSFHYFGPVVPLTWKLSAGDKLTEFLQD

SEQ ID NO: 5725 - protein, 242 aa, Homo Sapiens
MLPPQKKPWESMAKGLVLGALFTSFLLLVYSYAVPPLHAGLASTTPEAAASCSPPALEPEAVIRANGSAGECQPRRNIVFLKTHKTASSTLLNILFRFGQKHRLKFAFPNGRNDFDYPTFFARSLVQDYRPGACFNIICNHMRFHYDEVRGLVPTNAIFITVLRDPARLFESSFHYFGPVVPLTWKLSAGDKLTEFLQDPDRYYDPNGFNAHYLRNLLFFDLGYDNSLDPSSPQVQEHILEV

SEQ ID NO: 5726 - protein, 423 aa, Homo Sapiens
MLPPQKKPWESMAKGLVLGALFTSFLLLVYSYAVPPLHAGLASTTPEAAASCSPPALEPEAVIRANGSAGECQPRRNIVFLKTHKTASSTLLNILFRFGQKHRLKFAFPNGRNDFDYPTFFARSLVQDYRPGACFNIICNHMRFHYDEVRGLVPTNAIFITVLRDPARLFESSFHYFGPVVPLTWKLSAGDKLTEFLQDPDRYYDPNGFNAHYLRNLLFFDLGYDNSLDPSSPQVQEHILEVERRFHLVLLQEYFDESLVLLKDLLCWELEDVLYFKLNARRDSPVPRLSGELYGRATAWNMLDSHLYRHFNASFWRKVEAFGRERMAREVAALRHANERMRTICIDGGHAVDAAAIQDEAMQPWQPLGTKSILGYNLKKSIGQRHAQLCRRMLTPEIQYLMDLGANLWVTKLWKFIRDFLRW

SEQ ID NO: 5727 - protein, 279 aa, Homo Sapiens
MLPPQKKPWESMAKGLVLGALFTSFLLLVYSYAVPPLHAGLASTTPEAAASCSPPALEPEAVIRANGSAGECQPRRNIVFLKTHKTASSTLLNILFRFGQKHRLKFAFPNGRNDFDYPTFFARSLVQDYRPGACFNIICNHMRFHYDEVRGLVPTNAIFITVLRDPARLFESSFHYFGPVVPLTWKLSAGDKLTEFLQDPDRYYDPNGFNAHYLRNLLFFDLGYDNSLDPSSPQVQEHILEVERRFHLVLLQEYFDESLVLLKDLLCWELEDVLYFKLN

SEQ ID NO: 5728 - protein, 423 aa, Homo Sapiens; identical to SEQ ID NO: 5726

SEQ ID NO: 5729 - protein, 423 aa, Homo Sapiens; identical to SEQ ID NO: 5726

SEQ ID NO: 5730 - protein, 423 aa, Homo Sapiens; identical to SEQ ID NO: 5726

SEQ ID NO: 5731 - protein, 423 aa, Homo Sapiens; identical to SEQ ID NO: 5726

SEQ ID NO: 5732 - protein, 423 aa, Homo Sapiens; identical to SEQ ID NO: 5726

SEQ ID NO: 5733 - protein, 398 aa, Homo Sapiens
MMSMLGGLQRYFRVILLLLLALTLLLLAGFLHSDLELDTPLFGGQAEGPPVTNIMFLKTHKTASSTVLNILYRFAETHNLSVALPAGSRVHLGYPWLFLARYVEGVGSQQRFNIMCNHLRFNLPQVQKVMPNDTFYFSILRNPVFQLESSFIYYKTYAPAFRGAPSLDAFLASPRTFYNDSRHLRNVYAKNNMWFDFGFDPNAQCEEGYVRARIAEVERRFRLVLIAEHLDESLVLLRRRLRWALDDVVAFRLNSRSARSVARLSPETRERARSWCALDWRLYEHFNRTLWAQLRAELGPRRLRGEVERLRARRRELASLCLQDGGALKNHTQIRDPRLRPYQSGKADILGYNLRPGLDNQTLGVCQRLVMPELQYMARLYALQFPEKPLKNIPFLGA

SEQ ID NO: 5734 - protein, 431 aa, Homo Sapiens
MPPILQRLQQATKMMSRRKILLLVLGCSTVSLLIHQGAQLSWYPKLFPLSCPPLRNSPPRPKHMTVAFLKTHKTAGTTVQNILFRFAERHNLTVALPHPSCEHQFCYPRNFSAHFVHPATRPPHVLASHLRFDRAELERLMPPSTVYVTILREPAAMFESLFSYYNQYCPAFRRVPNASLEAFLRAPEAYYRAGEHFAMFAHNTLAYDLGGDNERSPRDDAAYLAGLIRQVEEVFSLVMIAEYFDESLVLLRRLLAWDLDDVLYAKLNARAASSRLAAIPAALARAARTWNALDAGLYDHFNATFWRHVARAGRACVEREARELREARQRLLRRCFGDEPLLRPAAQIRTKQLQPWQPSRKVDIMGYDLPGGGAGPATEACLKLAMPEVQYSNYLLRKQKRRGGARARPEPVLDNPPPRPIRVLPRGPQGP

SEQ ID NO: 5735 - protein, 431 aa, Homo Sapiens; identical to SEQ ID NO: 5734

SEQ ID NO: 5736 - protein, 62 aa, Homo Sapiens
KAMTAAAGSAGRAAVPLLLCALLAPGGAYVLDDSDGLGREFDGIGAVSGGGDWCLKVSLKGR

SEQ ID NO: 5737 - protein, 685 aa, Homo Sapiens
MAEWLLSASWQRRAKAMTAAAGSAGRAAVPLLLCALLAPGGAYVLDDSDGLGREFDGIGAVSGGGATSRLLVNYPEPYRSQILDYLFKPNFGASLHILKVEIGGDGQTTDGTEPSHMHYALDENYFRGYEWWLMKEAKKRNPNITLIGLPWSFPGWLGKGFDWPYVNLQLTAYYVVTWIVGAKRYHDLDIDYIGIWNERSYNANYIKILRKMLNYQGLQRVKIIASDNLWESISASMLLDAELFKVVDVIGAHYPGTHSAKDAKLTGKKLWSSEDFSTLNSDMGAGCWGRILNQNYINGYMTSTIAWNLVASYYEQLPYGRCGLMTAQEPWSGHYVVESPVWVSAHTTQFTQPGWYYLKTVGHLEKGGSYVALTDGLGNLTIIIETMSHKHSKCIRPFLPYFNVSQQFATFVLKGSFSEIPELQVWYTKLGKTSERFLFKQLDSLWLLDSDGSFTLSLHEDELFTLTTLTTGRKGSYPLPPKSQPFPSTYKDDFNVDYPFFSEAPNFADQTGVFEYFTNIEDPGEHHFTLRQVLNQRPITWAADASNTISIIGDYNWTNLTIKCDVYIETPDTGGVFIAGRVNKGGILIRSARGIFFWIFANGSYRVTGDLAGWIIYALGRVEVTAKKWYTLTLTIKGHFTSGMLNDKSLWTDIPVNFPKNGWAAIGTHSFEFAQFDNFLVEATR

SEQ ID NO: 5738 - protein, 211 aa, Homo Sapiens
MAEWLLSASWQRRAKAMTAAAGSAGRAAVPLLLCALLAPGGAYVLDDSDGLGREFDGIGAVSGGGATSRLLVNYPEPYRSQILDYLFKPNFGASLHILKVEIGGDGQTTDGTEPSHMHYALDENYFRGYEWWLMKEAKKRNPNITLIGLPWSFPGWLGKGFDWPYVNLQLTAYYVVTWIVGAKRYHDLDIDYIGIWNERSYNANYIKVFGE

SEQ ID NO: 5739 - protein, 112 aa, Homo Sapiens
MAEWLLSASWQRRAKAMTAAAGSAGRAAVPLLLCALLAPGGAYVLDDSDGLGREFDGIGAVSGGGATSRLLVNYPEPYRSQILDYLFKPNFGASLHILKVEIGGDGQTTDIL

SEQ ID NO: 5740 - protein, 662 aa, Homo Sapiens
MAEWLLSASWQRRAKAMTAAAGSAGRAAVPLLLCALLAPGGAYVLDDSDGLGREFDGIGAVSGGGPNFGASLHILKVEIGGDGQTTDGTEPSHMHYALDENYFRGYEWWLMKEAKKRNPNITLIGLPWSFPGWLGKGFDWPYVNLQLTAYYVVTWIVGAKRYHDLDIDYIGIWNERSYNANYIKILRKMLNYQGLQRVKIIASDNLWESISASMLLDAELFKVVDVIGAHYPGTHSAKDAKLTGKKLWSSEDFSTLNSDMGAGCWGRILNQNYINGYMTSTIAWNLVASYYEQLPYGRCGLMTAQEPWSGHYVVESPVWVSAHTTQFTQPGWYYLKTVGHLEKGGSYVALTDGLGNLTIIIETMSHKHSKCIRPFLPYFNVSQQFATFVLKGSFSEIPELQVWYTKLGKTSERFLFKQLDSLWLLDSDGSFTLSLHEDELFTLTTLTTGRKGSYPLPPKSQPFPSTYKDDFNVDYPFFSEAPNFADQTGVFEYFTNIEDPGEHHFTLRQVLNQRPITWAADASNTISIIGDYNWTNLTIKCDVYIETPDTGGVFIAGRVNKGGILIRSARGIFFWIFANGSYRVTGDLAGWIIYALGRVEVTAKKWYTLTLTIKGHFTSGMLNDKSLWTDIPVNFPKNGWAAIGTHSFEFAQFDNFLVEATR

SEQ ID NO: 5741 - protein, 589 aa, Homo Sapiens
MGFMVADLWATSRLLVNYPEPYRSQILDYLFKPNFGASLHILKVEIGGDGQTTDGTEPSHMHYALDENYFRGYEWWLMKEAKKRNPNITLIGLPWSFPGWLGKGFDWPYVNLQLTAYYVVTWIVGAKRYHDLDIDYIGIWNERSYNANYIKILRKMLNYQGLQRVKIIASDNLWESISASMLLDAELFKVVDVIGAHYPGTHSAKDAKLTGKKLWSSEDFSTLNSDMGAGCWGRILNQNYINGYMTSTIAWNLVASYYEQLPYGRCGLMTAQEPWSGHYVVESPVWVSAHTTQFTQPGWYYLKTVGHLEKGGSYVALTDGLGNLTIIIETMSHKHSKCIRPFLPYFNVSQQFATFVLKGSFSEIPELQVWYTKLGKTSERFLFKQLDSLWLLDSDGSFTLSLHEDELFTLTTLTTGRKGSYPLPPKSQPFPSTYKDDFNVDYPFFSEAPNFADQTGVFEYFTNIEDPGEHHFTLRQVLNQRPITWAADASNTISIIGDYNWTNLTIKCDVYIETPDTGGVFIAGRVNKGGILIRSARGIFFWIFANGSYRVTGDLAGWIIYALGRVEVTAKKWYTLTLTIKVAGRRKKT

SEQ ID NO: 5742 - protein, 659 aa, Homo Sapiens
MLGKSHGRATHGPLPLADLGIHLPCVKVLHQVTPEEKPAATSRLLVNYPEPYRSQILDYLFKPNFGASLHILKVEIGGDGQTTDGTEPSHMHYALDENYFRGYEWWLMKEAKKRNPNITLIGLPWSFPGWLGKGFDWPYVNLQLTAYYVVTWIVGAKRYHDLDIDYIGIWNERSYNANYIKILRKMLNYQGLQRVKIIASDNLWESISASMLLDAELFKVVDVIGAHYPGTHSAKDAKLTGKKLWSSEDFSTLNSDMGAGCWGRILNQNYINGYMTSTIAWNLVASYYEQLPYGRCGLMTAQEPWSGHYVVESPVWVSAHTTQFTQPGWYYLKTVGHLEKGGSYVALTDGLGNLTIIIETMSHKHSKCIRPFLPYFNVSQQFATFVLKGSFSEIPELQVWYTKLGKTSERFLFKQLDSLWLLDSDGSFTLSLHEDELFTLTTLTTGRKGSYPLPPKSQPFPSTYKDDFNVDYPFFSEAPNFADQTGVFEYFTNIEDPGEHHFTLRQVLNQRPITWAADASNTISIIGDYNWTNLTIKCDVYIETPDTGGVFIAGRVNKGGILIRSARGIFFWIFANGSYRVTGDLAGWIIYALGRVEVTAKKWYTLTLTIKGHFTSGMLNDKSLWTDIPVNFPKNGWAAIGTHSFEFAQFDNFLVEATR

SEQ ID NO: 5743 - protein, 434 aa, Homo Sapiens
MLNYQGLQRVKIIASDNLWESISASMLLDAELFKVVDVIGAHYPGTHSAKDAKLTGKKLWSSEDFSTLNSDMGAGCWGRILNQNYINGYMTSTIAWNLVASYYEQLPYGRCGLMTAQEPWSGHYVVESPVWVSAHTTQFTQPGWYYLKTVGHLEKGGSYVALTDGLGNLTIIIETMSHKHSKCIRPFLPYFNVSQQFATFVLKGSFSEIPELQVWYTKLGKTSERFLFKQLDSLWLLDSDGSFTLSLHEDELFTLTTLTTGRKGSYPLPPKSQPFPSTYKDDFNVDYPFFSEAPNFADQTGVFEYFTNIEDPGEHHFTLRQVLNQRPITWAADASNTISIIGDYNWTNLTIKCDVYIETPDTGGVFIAGRVNKGGILIRSARGIFFWIFANGSYRVTGDLAGWIIYALGRVEVTAKKWYTLTLTIKVAGRRKKT

SEQ ID NO: 5744 - protein, 72 aa, Homo Sapiens
  misc_feature (1)..(1): Xaa can be any naturally occurring amino acid
XKLGKTSERFLFKQLDSLWLLDSDGSFTLSLHEDELFTLTTLTTGRKGSYPLPPKSQPFPSTYKDDFNVGPI

SEQ ID NO: 5745 - protein, 404 aa, Homo Sapiens
  misc_feature (1)..(1): Xaa can be any naturally occurring amino acid
XLLSASWQRRAKAMTAAAGSAGRAAVPLLLCALLAPGGAYVLDDSDGLGREFDGIGAVSGGGATSRLLVNYPEPYRSQILDYLFKPNFGASLHILKVEIGGDGQTTDGTEPSHMHYALDENYFRGYEWWLMKEAKKRNPNITLIGLPWSFPGWLGKGFDWPYVNLQLTAYYVVTWIVGAKRYHDLDIDYIGIWNERSYNANYIKILRKMLNYQGLQRVKIIASDNLWESISASMLLDAELFKVVDVIGAHYPGTHSAKDAKLTGKKLWSSEDFSTLNSDMGAGCWGRILNQNYINGYMTSTIAWNLVASYYEQLPYGRCGLMTAQEPWSGHYVVESPVWVSAHTTQFTQPGWYYLKTVGHLEKGGSYVALTDGLGNLTIIIETMVNFCCCYWINSLLYYWKNKI

SEQ ID NO: 5746 - protein, 78 aa, Homo Sapiens
MAAVVAATRWWQLLLVLSAAGMGASGAPQPPNILLLLMDDESLPPPRAAGSPRWAPVLPDGCLCPLENAERRSGVPKV

SEQ ID NO: 5747 - protein, 116 aa, Homo Sapiens
MAAVVAATRWWQLLLVLSAAGMGASGAPQPPNILLLLMDDESLPPPRAAGSPRWAPVLPDGCLCPLENAERSDCFPEHALQRPGVRVLTAVAGPFSALSGISLLKILCFRISSFHF

SEQ ID NO: 5748 - protein, 522 aa, Homo Sapiens
MAAVVAATRWWQLLLVLSAAGMGASGAPQPPNILLLLMDDMGWGDLGVYGEPSRETPNLDRMAAEGLLFPNFYSANPLCSPSRAALLTGRLPIRNGFYTTNAHARNAYTPQEIVGGIPDSEQLLPELLKKAGYVSKIVGKWHLGHRPQFHPLKHGFDEWFGSPNCHFGPYDNKARPNIPVYRDWEMVGRYYEEFPINLKTGEANLTQIYLQEALDFIKRQARHHPFFLYWAVDATHAPVYASKPFLGTSQRGRYGDAVREIDDSIGKILELLQDLHVADNTFVFFTSDNGAALISAPEQGGSNGPFLCGKQTTFEGGMREPALAWWPGHVTAGQVSHQLGSIMDLFTTSLALAGLTPPSDRAIDGLNLLPTLLQGRLMDRPIFYYRGDTLMAATLGQHKAHFWTWTNSWENFRQGIDFCPGQNVSGVTTHNLEDHTKLPLIFHLGRDPGERFPLSFASAEYQEALSRITSVVQQHQEALVPAQPQLNVCNWAVMNWAPPGCEKLGKCLTPPESIPKKCLWSH

SEQ ID NO: 5749 - protein, 170 aa, Homo Sapiens
MTGTASSLAARAALLTGRLPIRNGFYTTNAHARNAYTPQEIVGGIPDSEQLLPELLKKAGYVSKIVGKWHLGHRPQFHPLKHGFDEWFGSPNCHFGPYDNKARPNIPVYRDWEMVGRYYEEFPINLKTGEANLTQIYLQEALDFIKRQARHHPFFLYWAVDATHAPVYAS

SEQ ID NO: 5750 - protein, 51 aa, Homo Sapiens
SAAGMGASGAPQPPNILLLLMDDMHVFRGQLLRACRCWCQAGRRQTDTFPT

SEQ ID NO: 5751 - protein, 69 aa, Homo Sapiens
SAAGMGASGAPQPPNILLLLMDDRGRHCSQDGYPSAMASTPPTPMPETPTHRRRLWAASQTRSSSCRSF

SEQ ID NO: 5752 - protein, 202 aa, Homo Sapiens
MRRKEKRLLQAVALVLAALVLLPNVGLWALYRERQPDGTPGGSGAAVAPAAGQGSHSRQKKTFFLGDGQKLKDWHDKEAIRRDAQRVGNGEQGRPYPMTDAERVDQAYRENGFNIYVSDKISLNRSLPDIRHPNCNSKRYLETLPNTSIIIPFHNEGWSSLLRTVHSVLNRSPPELVAEIVLVDDFSDRDLPTASTPSPFVC

SEQ ID NO: 5753 - protein, 541 aa, Homo Sapiens
MRRKEKRLLQAVALVLAALVLLPNVGLWALYRERQPDGTPGGSGAAVAPAAGQGSHSRQKKTFFLGDGQKLKDWHDKEAIRRDAQRVGNGEQGRPYPMTDAERVDQAYRENGFNIYVSDKISLNRSLPDIRHPNCNSKRYLETLPNTSIIIPFHNEGWSSLLRTVHSVLNRSPPELVAEIVLVDDFSDRDRIARNRKTIVCPMIDVIDHDDFRYETQAGDAMRGAFDWEMYYKRIPIPPELQKADPSDPFESPVMAGGLFAVDRKWFWELGGYDPGLEIWGGEQYEISFKVWMCGGRMEDIPCSRVGHIYRKYVPYKVPAGVSLARNLKRVAEVWMDEYAEYIYQRRPEYRHLSAGDVAVQKKLRSSLNCKSFKWFMTKIAWDLPKFYPPVEPPAAAWGEIRNVGTGLCADTKHGALGSPLRLEGCVRGRGEAAWNNMQVFTFTWREDIRPGDPQHTKKFCFDAISHTSPVTLYDCHSMKGNQLWKYRKDKTLYHPVSGSCMDCSESDHRIFMNTCNPSSLTQQWLFEHTNSTVLEKFNRN

SEQ ID NO: 5754 - protein, 603 aa, Homo Sapiens
MRRKEKRLLQAVALVLAALVLLPNVGLWALYRERQPDGTPGGSGAAVAPAAGQGSHSRQKKTFFLGDGQKLKDWHDKEAIRRDAQRVGNGEQGRPYPMTDAERVDQAYRENGFNIYVSDKISLNRSLPDIRHPNCNSKRYLETLPNTSIIIPFHNEGWSSLLRTVHSVLNRSPPELVAEIVLVDDFSDREHLKKPLEDYMALFPSVRILRTKKREGLIRTRMLGASVATGDVITFLDSHCEANVNWLPPLLDRIARNRKTIVCPMIDVIDHDDFRYETQAGDAMRGAFDWEMYYKRIPIPPELQKADPSDPFESPVMAGGLFAVDRKWFWELGGYDPGLEIWGGEQYEISFKVWMCGGRMEDIPCSRVGHIYRKYVPYKVPAGVSLARNLKRVAEVWMDEYAEYIYQRRPEYRHLSAGDVAVQKKLRSSLNCKSFKWFMTKIAWDLPKFYPPVEPPAAAWGEIRNVGTGLCADTKHGALGSPLRLEGCVRGRGEAAWNNMQVFTFTWREDIRPGDPQHTKKFCFDAISHTSPVTLYDCHSMKGNQLWKYRKDKTLYHPVSGSCMDCSESDHRIFMNTCNPSSLTQQWLFEHTNSTVLEKFNRN

SEQ ID NO: 5755 - protein, 366 aa, Homo Sapiens
MRRKEKRLLQAVALVLAALVLLPNVGLWALYRERQPDGTPGGSGAAVAPAAGQGSHSRQKKTFFLGDGQKLKDWHDKEAIRRDAQRVGNGEQGRPYPMTDAERVDQAYRENGFNIYVSDKISLNRSLPDIRHPNCNSKRYLETLPNTSIIIPFHNEGWSSLLRTVHSVLNRSPPELVAEIVLVDDFSDREHLKKPLEDYMALFPSVRILRTKKREGLIRTRMLGASVATGDVITFLDSHCEANVNWLPPLLDRIARNRKTIVCPMIDVIDHDDFRYETQAGDAMRGAFDWEMYYKRIPIPPELQKADPSDPFESPVMAGGLFAVDRKWFWELGGYDPGLEIWGGEQYEISFKVSQLSRRPVLGTAS

SEQ ID NO: 5756 - protein, 581 aa, Homo Sapiens [sequence omitted]

SEQ ID NO: 5757 - protein, 31 aa, Homo Sapiens
  misc_feature (1)..(1): Xaa can be any naturally occurring amino acid
XINIYLSDRISLHRRLPERWNPLAPEGALGQ

SEQ ID NO: 5758 - protein, 141 aa, Homo Sapiens
ALPEVRHPLCLQQHPQDSLPTASVILCFHDEAWSTLLRTVHSILDTVPRAFLKEIILVDDLSQQGSHGFPPGSSGTTQVCSQRICGQAGGGEVTQEQQEAGCHQGPDAGGHQSHRGCARLHGCPLRVPPRLAGAPPQQNSW

SEQ ID NO: 5759 - protein, 196 aa, Homo Sapiens
MERLQLQRRLGCRTFHWFLANVYPELYPSEPRPSFSGKLHNTGLGLCADCQAEGDILGCPMVLAPCSDSRQQQYLQHTSRKEIHFGSPQHLCFAVRQEQVILQNCTEEGLAIHQQHWDFQENGMIVHILSGKCMEAVVQENNKDLYLRPCDEKPASSGVLTRSMLWMNDECQCQKEKRILAIKIQLQVNLKSLYIS

SEQ ID NO: 5760 - protein, 639 aa, Homo Sapiens
MLLRKRYRHRPCRLQFLLLLLMLGCVLMMVAMLHPPHHTLHQTVTAQASKHSPEARYRLDFGESQDWVLEAEDEGEEYSPLEGLPPFISLREDQLLVAVALPQARRNQSQGRRGGSYRLIKQPRRQDKEAPKRDWGADEDGEVSEEEELTPFSLDPRGLQEALSARIPLQRALPEVRHPLCLQQHPQDSLPTASVILCFHDEAWSTLLRTVHSILDTVPRAFLKEIILVDDLSQQGQLKSALSEYVARLEGVKLLRSNKRLGAIRARMLGATRATGDVLVFMDAHCECHPGWLEPLLSRIAGDRSRVVSPVIDVIDWKTFQYYPSKDLQRGVLDWKLDFHWEPLPEHVRKALQSPISPIRSPVVPGEVVAMDRHYFQNTGAYDSLMSLRGGENLELSFKAWLCGGSVEILPCSRVGHIYQNQDSHSPLDQEATLRNRVRIAETWLGSFKETFYKHSPEAFSLSKAEKPDCMERLQLQRRLGCRTFHWFLANVYPELYPSEPRPSFSGKLHNTGLGLCADCQAEGDILGCPMVLAPCSDSRQQQYLQHTSRKEIHFGSPQHLCFAVRQEQVILQNCTEEGLAIHQQHWDFQENGMIVHILSGKCMEAVVQENNKDLYLRPCDGKARQQWRFDQINAVDER

SEQ ID NO: 5761 - protein, 617 aa, Homo Sapiens
MLLRKRYRHRPCRLQFLLLLLMLGCVLMMVAMLHPPHHTLHQTVTAQASKHSPEARYRLDFGESQDWVLEAEDEGEEYSPLEGLPPFISLREDQLLVAVALPQARRNQSQGRRGGSYRLIKQPRRQDKEAPKRDWGADEDGEVSEEEELTPFSLDPRGLQEALSARIPLQRALPEVRHPLCLQQHPQDSLPTASVILCFHDEAWSTLLRTVHSILDTVPRAFLKEIILVDDLSQQGQLKSALSEYVARLEGVKLLRSNKRLGAIRARMLGATRATGDVLVFMDAHCECHPGWLEPLLSRIAGDRSRVVSPVIDVIDWKTFQYYPSKDLQRGVLDWKLDFHWEPLPEHVRKALQSPISPIRSPVVPGEVVAMDRHYFQNTGAYDSLMSLRGGENLELSFKAWLCGGSVEILPCSRVGHIYQNQDSHSPLDQEATLRNRVRIAETWLGSFKETFYKHSPEAFSLSKAEKPDCMERLQLQRRLGCRTFHWFLANVYPELYPSEPRPSFSGKLHNTGLGLCADCQAEGDILGCPMVLAPCSDSRQQQYLQHTSRKEIHFGSPQHLCFAVRQEQVILQNCTEEGLAIHQQHWDFQEDENRANSAAAEAYQRPLTFQQIVNNG

SEQ ID NO: 5762 - protein, 571 aa, Homo Sapiens
MRRRSRMLLCFAFLWVLGIAYYMYSGGGSALAGGAGGGAGRKEDWNEIDPIKKKDLHHSNGEEKAQSMETLPPGKVRWPDFNQEAYVGGTMVRSGQDPYARNKFNQVESDKLRMDRAIPDTRHDQCQRKQWRVDLPATSVVITFHNEARSALLRTVVSVLKKSPPHLIKEIILVDDYSNDPEDGALLGKIEKVRVLRNDRREGLMRSRVRGADAAQAKVLTFLDSHCECNEHWLEPLLERVAEDRTRVVSPIIDVINMDNFQYVGASADLKGGFDWNLVFKWDYMTPEQRRSRQGNPVAPIKTPMIAGGLFVMDKFYFEELGKYDMMMDVWGGENLEISFRVWQCGGSLEIIPCSRVGHVFRKQHPYTFPGGSGTVFARNTRRAAEVWMDEYKNFYYAAVPSARNVPYGNIQSRLELRKKLSCKPFKWYLENVYPELRVPDHQDIAFGALQQGTNCLDTLGHFADGVVGVYECHNAGGNQEWALTKEKSVKHMDLCLTVVDRAPGSLIKLQGCRENDSRQKWEQIEGNSKLRHVGSNLCLDSRTAKSGGLSVEVCGPALSQQWKFTLNLQQ

SEQ ID NO: 5763 - protein, 23 aa, Homo Sapiens
MRLLRRRHMPLRLAMVGCAFVLF

SEQ ID NO: 5764 - protein, 23 aa, Homo Sapiens
MRLLRRRHMPLRLAMVGCAFVLF

SEQ ID NO: 5765 - protein, 39 aa, Homo Sapiens
MRLLRRRHMPLRLAMVGCAFVLFLFLLHRDVSSREEATE

SEQ ID NO: 5766 - protein, 55 aa, Homo Sapiens
MRLLRRRHMPLRLAMVGCAFVLFLFLLHRDVSSREEATEKPWLKSLVSRKDHVLD

SEQ ID NO: 5767 - protein, 62 aa, Homo Sapiens
MRLLRRRHMPLRLAMVGCAFVLFLFLLHRDVSSREEATEKPWLKSLVSRKDHVLDLMLEAMN

SEQ ID NO: 5768 - protein, 69 aa, Homo Sapiens
MRLLRRRHMPLRLAMVGCAFVLFLFLLHRDVSSREEATEKPWLKSLVSRKDHVLDLMLEAMNNLRDSMP

SEQ ID NO: 5769 - protein, 78 aa, Homo Sapiens
MRLLRRRHMPLRLAMVGCAFVLFLFLLHRDVSSREEATEKPWLKSLVSRKDHVLDLMLEAMNNLRDSMPKLQIRAPEA

SEQ ID NO: 5770 - protein, 123 aa, Homo Sapiens
MRLLRRRHMPLRLAMVGCAFVLFLFLLHRDVSSREEATEKPWLKSLVSRKDHVLDLMLEAMNNLRDSMPKLQIRAPEAQQTLFSINQSCLPGFYTPAELKPFWERPPQDPNAPGADGKAFQKS

SEQ ID NO: 5771 - protein, 137 aa, Homo Sapiens
MRLLRRRHMPLRLAMVGCAFVLFLFLLHRDVSSREEATEKPWLKSLVSRKDHVLDLMLEAMNNLRDSMPKLQIRAPEAQQTLFSINQSCLPGFYTPAELKPFWERPPQDPNAPGADGKAFQKSKWTPLETQEKEEGY

SEQ ID NO: 5772 - protein, 622 aa, Homo Sapiens
MRLLRRRHMPLRLAMVGCAFVLFLFLLHRDVSSREEATEKPWLKSLVSRKDHVLDLMLEAMNNLRDSMPKLQIRAPEAQQTLFSINQSCLPGFYTPAELKPFWERPPQDPNAPGADGKAFQKSKWTPLETQEKEEGYKKHCFNAFASDRISLQRSLGPDTRPPECVDQKFRRCPPLATTSVIIVFHNEAWSTLLRTVYSVLHTTPAILLKEIILVDDASTEEHLKEKLEQYVKQLQVVRVVRQEERKGLITARLLGASVAQAEVLTFLDAHCECFHGWLEPLLARIAEDKTVVVSPDIVTIDLNTFEFAKPVQRGRVHSRGNFDWSLTFGWETLPPHEKQRRKDETYPIKSPTFAGGLFSISKSYFEHIGTYDNQMEIWGGENVEMSFRVWQCGGQLEIIPCSVVGHVFRTKSPHTFPKGTSVIARNQVRLAEVWMDSYKKIFYRRNLQAAKMAQEKSFGDISERLQLREQLHCHNFSWYLHNVYPEMFVPDLTPTFYGAIKNLGTNQCLDVGENNRGGKPLIMYSCHGLGGNQYFEYTTQRDLRHNIAKQLCLHVSKGALGLGSCHFTGKNSQVPKDEEWELAQDQLIRNSGSGTCLTSQDKKPAMAPCNPSDPHQLWLFV

SEQ ID NO: 5773 - protein, 365 aa, Homo Sapiens
MRLLRRRHMPLRLAMVGCAFVLFLFLLHRDVSSREEATEKPWLKSLVSRKDHVLDLMLEAMNNLRDSMPKLQIRAPEAQQTLFSINQSCLPGFYTPAELKPFWERPPQDPNAPGADGKAFQKSKWTPLETQEKEEGYKKHCFNAFASDRISLQRSLGPDTRPPECVDQKFRRCPPLATTSVIIVFHNEAWSTLLRTVYSVLHTTPAILLKEIILVDDASTEEHLKEKLEQYVKQLQVVRVVRQEERKGLITARLLGASVAQAEVLTFLDAHCECFHGWLEPLLARIAEDKTVVVSPDIVTIDLNTFEFAKPVQRGRVHSRGNFDWSLTFGWETLPPHEKQRRKDETYPIKCGSVGASWRSSPALS

SEQ ID NO: 5774 - protein, 622 aa, Homo Sapiens; identical to SEQ ID NO: 5772

SEQ ID NO: 5775 - protein, 637 aa, Homo Sapiens
MMFWRKLPKALFIGLTLAIAVNLLLVFSSKGTLQNLFTGGLHRELPLHLNKRYGAVIKRLSHLEVELQDLKESMKLALRQQENVNSTLKRAKDEVRPLLKAMETKVNETKKHKTQMKLFPHSQLFRQWGEDLSEAQQKAAQDLFRKFGYNAYLSNQLPLNRTIPDTRDYRCLRKTYPSQLPSLSVILIFVNEALSIIQRAITSIINRTPSRLLKEIILVDDFSSNGELKVHLDEKIKLYNQKYPGLLKIIRHPERKGLAQARNTGWEAATADVVAILDAHIEVNVGWAEPILARIQEDRTVIVSPVFDNIRFDTFKLDKYELAVDGFNWELWCRYDALPQAWIDLHDVTAPVKSPSIMGILAANRHFLGEIGSLDGGMLIYGGENVELSLRVWQCGGKVEILPCSRIAHLERHHKPYALDLTAALKRNALRVAEIWMDEHKHMVYLAWNIPLQNSGIDFGDVSSRMALREKLKCKTFDWYLKNVYPLLKPLHTIVGYGRMKNLLDENVCLDQGPVPGNTPIMYYCHEFSSQNVYYHLTGELYVGQLIAEASASDRCLTDPGKAEKPTLEPCSKAAKNRLHIYWDFKPGGAVINRDTKRCLEMKKDLLGSHVLVLQTCSTQVWEIQHTVRDWGQTNSQ

SEQ ID NO: 5776 - protein, 529 aa, Homo Sapiens
MRSEKSLTLAAPGEVRGPEGEQQDAGDFPEAGGGGGCCSSERLVINISGLRFETQLRTLSLFPDTLLGDPGRRVRFFDPLRNEYFFDRNRPSFDAILYYYQSGGRLRRPVNVPLDIFLEEIRFYQLGDEALAAFREDEGCLPEGGEDEKPLPSQPFQRQVWLLFEYPESSGPARGIAIVSVLVILISIVIFCLETLPQFRVDGRGGNNGGVSRVSPVSRGSQEEEEDEDDSYTFHHGITPGEMGTGGSSSLSTLGGSFFTDPFFLVETLCIVWFTFELLVRFSACPSKPAFFRNIMNIIDLVAIFPYFITLGTELVQQQEQQPASGGGGQNGQQAMSLAILRVIRLVRVFRIFKLSRHSKGLQILGKTLQASMRELGLLIFFLFIGVILFSSAVYFAEADDDDSLFPSIPDAFWWAVVTMTTVGYGDMYPMTVGGKIVGSLCAIAGVLTIALPVPVIVSNFNYFYHRETEQEEQGQYTHVTCGQPAPDLRATDNGLGKPDFPEANRERRPSYLPTPHRAYAEKRMLTEV

SEQ ID NO: 5777 - protein, 88 aa, Homo Sapiens
  misc_feature (1)..(1): Xaa can be any naturally occurring amino acid
XENVCLDQGPVPGNTPIMYYCHEFSSQNVYYHLTGELYVGQLIAEASASDRCLTDPGKAEKPTLEPCSKAAKNRLHIYWDFKPPTITK

SEQ ID NO: 5778 - protein, 161 aa, Homo Sapiens
  misc_feature (1)..(1): Xaa can be any naturally occurring amino acid
XYPLLKPLHTIVGYGRMKNLLDENVCLDQGPVPGNTPIMYYCHEFSSQNVYYHLTGELYVGQLIAEASASDRCLTDPGKAEKPTLEPCSKAAKNRLHIYWDFKPEKCWQVVQARTSMHRILTAAGPSTSSEDENPAWHRWQASGLTPLWRPPTSSNQARKS

SEQ ID NO: 5779 - protein, 417 aa, Homo Sapiens
EHLKDKLEEYMARFSKVRIVRTKKREGLIRTRLLGASMARGEVLTFLDSHCEVNVNWLPPLLNQIALNHKTIVCPMIDVIDHNHFGYEAQAGDAMRGAFDWEMYYKRIPIPPELQRADPSDPFESPVMAGGLFAVDRKWFWELGGYDPGLEIWGGEQYEISFKVWMCGGEMFDVPCSRVGHIYRKYVPYKVPSGTSLARNLKRVAETWMDEFAEYIYQRRPEYRHLSTGDISAQKELRKQLKCKDFKWFMAAVAWDVPKYYPPVEPPPAAWGEIRNVAANLCVDSKHGATGTELRLDICVKDGSERTWSHEQLFTFGWREDIRPGEPLHTRKFCFDAISHNSPVTLYDCHGMKGNQLWGYRKDRTLFHPVSNSCMDCNPAEKKIFMARCDPLSETQQWIFEHINMTVLEKFNHHANS

SEQ ID NO: 5780 - protein, 601 aa, Homo Sapiens
MKRKQKRFLQMTLLFTVALIFLPNVGLWSLYKDKHLVKSAEPGEQQTFPLGLGDGQFYSWTDGLRRKDWHDYESIQKEAMRSGKGEHGKPYPLTEEDHDDSAYRENGFNIFVSNNIALERSLPDIRHANCKHKMYLERLPNTSIIIPFHNEGWTSLLRTIHSIINRTPGSLIAEIILVDDFSEREHLKDKLEEYMARFSKVRIVRTKKREGLIRTRLLGASMARGEVLTFLDSHCEVNVNWLPPLLNQIALNHKTIVCPMIDVIDHNHFGYEAQAGDAMRGAFDWEMYYKRIPIPPELQRADPSDPFESPVMAGGLFAVDRKWFWELGGYDPGLEIWGGEQYEISFKVWMCGGEMFDVPCSRVGHIYRKYVPYKVPSGTSLARNLKRVAETWMDEFAEYIYQRRPEYRHLSTGDISAQKELRKQLKCKDFKWFMAAVAWDVPKYYPPVEPPPAAWGEIRNVAANLCVDSKHGATGTELRLDICVKDGSERTWSHEQLFTFGWREDIRPGEPLHTRKFCFDAISHNSPVTLYDCHGMKGNQLWGYRKDRTLFHPVSNSCMDCNPAEKKIFMARCDPLSETQQWIFEHINMTVLEKFNHHANS

SEQ ID NO: 5781 - protein, 61 aa, Homo Sapiens
MKRKQKRFLQMTLLFTVALIFLPNVGLWSLYKDKHLVKSAEPGEQQVSATQRKITQGLVRQ

SEQ ID NO: 5782 - protein, 584 aa, Homo Sapiens
MRAKFRAGAGHQRNPSISADHGVHELVYQTFPLGLGDGQFYSWTDGLRRKDWHDYESIQKEAMRSGKGEHGKPYPLTEEDHDDSAYRENGFNIFVSNNIALERSLPDIRHANCKHKMYLERLPNTSIIIPFHNEGWTSLLRTIHSIINRTPGSLIAEIILVDDFSEREHLKDKLEEYMARFSKVRIVRTKKREGLIRTRLLGASMARGEVLTFLDSHCEVNVNWLPPLLNQIALNHKTIVCPMIDVIDHNHFGYEAQAGDAMRGAFDWEMYYKRIPIPPELQRADPSDPFESPVMAGGLFAVDRKWFWELGGYDPGLEIWGGEQYEISFKVWMCGGEMFDVPCSRVGHIYRKYVPYKVPSGTSLARNLKRVAETWMDEFAEYIYQRRPEYRHLSTGDISAQKELRKQLKCKDFKWFMAAVAWDVPKYYPPVEPPPAAWGEIRNVAANLCVDSKHGATGTELRLDICVKDGSERTWSHEQLFTFGWREDIRPGEPLHTRKFCFDAISHNSPVTLYDCHGMKGNQLWGYRKDRTLFHPVSNSCMDCNPAEKKIFMARCDPLSETQQWIFEHINMTVLEKFNHHANS

SEQ ID NO: 5783 - protein, 116 aa, Homo Sapiens
MAPPSVPLVLLLVLLLSLAETPASAPAHRGRGGWTLNSAGYLLGPVLHLPQMGDQDGKRETALEILDLWKAIDGLPYSHPPQPSKRNVMETFAKPEIGDLGMLSMKIPKEEDVLKS

SEQ ID NO: 5784 - protein, 49 aa, Homo Sapiens
MAPPSVPLVLLLVLLLSLAETPASAPAHRSSTFPKWVTKTERGRQPLRS

SEQ ID NO: 5785 - protein, 49 aa, Homo Sapiens; identical to SEQ ID NO: 5784

SEQ ID NO: 5786 - protein, 119 aa, Homo Sapiens
MAAVAAVAARRRRLSVSGRDENSVELTMAEGPYKIILTARPFRLDLLEDRSLLLSVNARGLLEFEHQRAPRVSFSDKVNLTLGSIWDKIKNLFSRQGSKDPAEGDGAQPEETPRDGDKA

SEQ ID NO: 5787 - protein, 852 aa, Homo Sapiens
MAAVAAVAARRRRLSVSGRDENSVELTMAEGPYKIILTARPFRLDLLEDRSLLLSVNARGLLEFEHQRAPRVSFSDKVNLTLGSIWDKIKNLFSRQGSKDPAEGDGAQPEETPRDGDKPEETQGKAEKDEPGAWEETFKTHSDSKPYGPMSVGLDFSLPGMEHVYGIPEHADNLRLKVTEGGEPYRLYNLDVFQYELYNPMALYGSVPVLLAHNPHRDLGIFWLNAAETWVDISSNTAGKTLFGKMMDYLQGSGETPQTDVRWMSETGIIDVFLLLGPSISDVFRQYASLTGTQALPPLFSLGYHQSRWNYRDEADVLEVDQGFDDHNLPCDVIWLDIEHADGKRYFTWDPSRFPQPRTMLERLASKRRKLVAIVDPHIKVDSGYRVHEELRNLGLYVKTRDGSDYEGWCWPGSAGYPDFTNPTMRAWWANMFSYDNYEGSAPNLFVWNDMNEPSVFNGPEVTMLKDAQHYGGWEHRDVHNIYGLYVHMATADGLRQRSGGMERPFVLARAFFAGSQRFGAVWTGDNTAEWDHLKISIPMCLSLGLVGLSFCGADVGGFFKNPEPELLVRWYQMGAYQPFFRAHAHLDTGRREPWLLPSQHNDIIRDALGQRYSLLPFWYTLLYQAHREGIPVMRPLWVQYPQDVTTFNIDDQYLLGDALLVHPVSDSGAHGVQVYLPGQGEVWYDIQSYQKHHGPQTLYLPVTLSSIPVFQRGGTIVPRWMRVRRSSECMKDDPITLFVALSPQGTAQGELFLDDGHTFNYQTRQEFLLRRFSFSGNTLVSSSADPEGHFETPIWIERVVIIGAGKPAAVVLQTKGSPESRLSFQHDPETSVLVLRKPGINVASDWSIHLR

SEQ ID NO: 5788 - protein, 76 aa, Homo Sapiens
MAAVAAVAARRRRSWASLVLAFLGVCLGITLAVDRSNFKTCEESSFCDREAYGQASLHTEPCWTLYSLVLIPSRSI

SEQ ID NO: 5789 - protein, 52 aa, Homo Sapiens
MAAVAAVAARRRRSWASLVLAFLGVCLGITLAVDRSNFKTCEESSFCKCCWC

SEQ ID NO: 5790 - protein, 52 aa, Homo Sapiens; identical to SEQ ID NO: 5789

SEQ ID NO: 5791 - protein, 52 aa, Homo Sapiens; identical to SEQ ID NO: 5789

SEQ ID NO: 5792 - protein, 966 aa, Homo Sapiens
MAAVAAVAARRRRSWASLVLAFLGVCLGITLAVDRSNFKTCEESSFCKRQRSIRPGLSPYRALLDSLQLGPDSLTVHLIHEVTKVLLVLELQGLQKNMTRFRIDELEPRRPRYRVPDVLVADPPIARLSVSGRDENSVELTMAEGPYKIILTARPFRLDLLEDRSLLLSVNARGLLEFEHQRAPRVSFSDKVNLTLGSIWDKIKNLFSRQGSKDPAEGDGAQPEETPRDGDKPEETQGKAEKDEPGAWEETFKTHSDSKPYGPMSVGLDFSLPGMEHVYGIPEHADNLRLKVTEGGEPYRLYNLDVFQYELYNPMALYGSVPVLLAHNPHRDLGIFWLNAAETWVDISSNTAGKTLFGKMMDYLQGSGETPQTDVRWMSETGIIDVFLLLGPSISDVFRQYASLTGTQALPPLFSLGYHQSRWNYRDEADVLEVDQGFDDHNLPCDVIWLDIEHADGKRYFTWDPSRFPQPRTMLERLASKRRKLVAIVDPHIKVDSGYRVHEELRNLGLYVKTRDGSDYEGWCWPGSAGYPDFTNPTMRAWWANMFSYDNYEGSAPNLFVWNDMNEPSVFNGPEVTMLKDAQHYGGWEHRDVHNIYGLYVHMATADGLRQRSGGMERPFVLARAFFAGSQRFGAVWTGDNTAEWDHLKISIPMCLSLGLVGLSFCGADVGGFFKNPEPELLVRWYQMGAYQPFFRAHAHLDTGRREPWLLPSQHNDIIRDALGQRYSLLPFWYTLLYQAHREGIPVMRPLWVQYPQDVTTFNIDDQYLLGDALLVHPVSDSGAHGVQVYLPGQGEVWYDIQSYQKHHGPQTLYLPVTLSSIPVFQRGGTIVPRWMRVRRSSECMKDDPITLFVALSPQGTAQGELFLDDGHTFNYQTRQEFLLRRFSFSGNTLVSSSADPEGHFETPIWIERVVIIGAGKPAAVVLQTKGSPESRLSFQHDPETSVLVLRKPGINVASDWSIHLR

SEQ ID NO: 5793 - protein, 944 aa, Homo Sapiens
MAAVAAVAARRRRSWASLVLAFLGVCLGITLAVDRSNFKTCEESSFCKRQRSIRPGLSPYRALLDSLQLGPDSLTVHLIHEVTKVLLVLELQGLQKNMTRFRIDELEPRRPRYRVPDVLVADPPIARLSVSGRDENSVELTMAEGPYKIILTARPFRLDLLEDRSLLLSVNARGLLEFEHQRAPRVSQGSKDPAEGDGAQPEETPRDGDKPEETQGKAEKDEPGAWEETFKTHSDSKPYGPMSVGLDFSLPGMEHVYGIPEHADNLRLKVTEGGEPYRLYNLDVFQYELYNPMALYGSVPVLLAHNPHRDLGIFWLNAAETWVDISSNTAGKTLFGKMMDYLQGSGETPQTDVRWMSETGIIDVFLLLGPSISDVFRQYASLTGTQALPPLFSLGYHQSRWNYRDEADVLEVDQGFDDHNLPCDVIWLDIEHADGKRYFTWDPSRFPQPRTMLERLASKRRKLVAIVDPHIKVDSGYRVHEELRNLGLYVKTRDGSDYEGWCWPGSAGYPDFTNPTMRAWWANMFSYDNYEGSAPNLFVWNDMNEPSVFNGPEVTMLKDAQHYGGWEHRDVHNIYGLYVHMATADGLRQRSGGMERPFVLARAFFAGSQRFGAVWTGDNTAEWDHLKISIPMCLSLGLVGLSFCGADVGGFFKNPEPELLVRWYQMGAYQPFFRAHAHLDTGRREPWLLPSQHNDIIRDALGQRYSLLPFWYTLLYQAHREGIPVMRPLWVQYPQDVTTFNIDDQYLLGDALLVHPVSDSGAHGVQVYLPGQGEVWYDIQSYQKHHGPQTLYLPVTLSSIPVFQRGGTIVPRWMRVRRSSECMKDDPITLFVALSPQGTAQGELFLDDGHTFNYQTRQEFLLRRFSFSGNTLVSSSADPEGHFETPIWIERVVIIGAGKPAAVVLQTKGSPESRLSFQHDPETSVLVLRKPGINVASDWSIHLR

SEQ ID NO: 5794 - protein, 847 aa, Homo Sapiens
MTRFRIDELEPRRPRYRVPDVLVADPPIARLSVSGRDENSVELTMAEGPYKIILTARPFRLDLLEDRSLLLSVNARGLLEFEHQRAPRVSQGSKDPAEGDGAQPEETPRDGDKPEETQGKAEKDEPGAWEETFKTHSDSKPYGPMSVGLDFSLPGMEHVYGIPEHADNLRLKVTEGGEPYRLYNLDVFQYELYNPMALYGSVPVLLAHNPHRDLGIFWLNAAETWVDISSNTAGKTLFGKMMDYLQGSGETPQTDVRWMSETGIIDVFLLLGPSISDVFRQYASLTGTQALPPLFSLGYHQSRWNYRDEADVLEVDQGFDDHNLPCDVIWLDIEHADGKRYFTWDPSRFPQPRTMLERLASKRRKLVAIVDPHIKVDSGYRVHEELRNLGLYVKTRDGSDYEGWCWPGSAGYPDFTNPTMRAWWANMFSYDNYEGSAPNLFVWNDMNEPSVFNGPEVTMLKDAQHYGGWEHRDVHNIYGLYVHMATADGLRQRSGGMERPFVLARAFFAGSQRFGAVWTGDNTAEWDHLKISIPMCLSLGLVGLSFCGADVGGFFKNPEPELLVRWYQMGAYQPFFRAHAHLDTGRREPWLLPSQHNDIIRDALGQRYSLLPFWYTLLYQAHREGIPVMRPLWVQYPQDVTTFNIDDQYLLGDALLVHPVSDSGAHGVQVYLPGQGEVWYDIQSYQKHHGPQTLYLPVTLSSIPVFQRGGTIVPRWMRVRRSSECMKDDPITLFVALSPQGTAQGELFLDDGHTFNYQTRQEFLLRRFSFSGNTLVSSSADPEGHFETPIWIERVVIIGAGKPAAVVLQTKGSPESRLSFQHDPETSVLVLRKPGINVASDWSIHLR

SEQ ID NO: 5795 - protein, 79 aa, Homo Sapiens
MPSPRPVLLRGARAALLLLLPPRLLARPSLLLRRSLSAASCPPISLPAAASRSSMDGAGAEEVLAPLRLAVRQQAVWNQ

SEQ ID NO: 5796 - protein, 79 aa, Homo Sapiens; identical to SEQ ID NO: 5795

SEQ ID NO: 5797 - protein, 739 aa, Homo Sapiens
MPSPRPVLLRGARAALLLLLPPRLLARPSLLLRRSLSAASCPPISLPAAASRSSMDGAGAEEVLAPLRLAVRQQGDLVRKLKEDKAPQVDVDKAVAELKARKRVLEAKELALQPKDDIVDRAKMEDTLKRRFFYDQAFAIYGGVSGLYDFGPVGCALKNNIIQTWRQHFIQEEQILEIDCTMLTPEPVLKTSGHVDKFADFMVKDVKNGECFRADHLLKAHLQKLMSDKKCSVEKKSEMESVLAQLDNYGQQELADLFVNYNVKSPITGNDLSPPVSFNLMFKTFIGPGGNMPGYLRPETAQGIFLNFKRLLEFNQGKLPFAAAQIGNSFRNEISPRSGLIRVREFTMAEIEHFVDPSEKDHPKFQNVADLHLYLYSAKAQVSGQSARKMRLGDAVEQGVINNTVLGYFIGRIYLYLTKVGISPDKLRFRQHMENEMAHYACDCWDAESKTSYGWIEIVGCADRSCYDLSCHARATKVPLVAEKPLKEPKTVNVVQFEPSKGAIGKAYKKDAKLVMEYLAICDECYITEMEMLLNEKGEFTIETEGKTFQLTKDMINVKRFQKTLYVEEVVPNVIEPSFGLGRIMYTVFEHTFHVREGDEQRTFFSFPAVVAPFKCSVLPLSQNQEFMPFVKELSEALTRHGVSHKVDDSSGSIGRRYARTDEIGVAFGVTIDFDTVNKTPHTATLRDRDSMRQIRAEISELPSIVQDLANGNITWADVEARYPLFEGQETGKKETIEE

SEQ ID NO: 5798 - protein, 77 aa, Homo Sapiens
VVQFEPSKGAIGKAYKKDAKLVMEYLAICDECYITEMEMLLNEKGEFTIETEGKTFQLTKDMINVKRFQKTLYEQIL

SEQ ID NO: 5799 - protein, 345 aa, Homo Sapiens
MVAALLGGGGEARGGTVPGAWLCLMALLQLLGSAPRGSGLAHGRRLICWQALLQCQGEPECSYAYNQYAEACAPVLAQHGGGDAPGAAAAAFPASAASFSSRWRCPSHCISALIQLNHTRRGPALEDCDCAQDENCKSTKRAIEPCLPRTSGGGAGGPGAGGVMGCTEARRRCDRDSRCNLALSRYLTYCGKVFNGLRCTDECRTVIEDMLAMPKAALLNDCVCDGLERPICESVKENMARLCFGAELGNGPGSSGSDGGLDDYYDEDYDDEQRTGGAGGEQPLDDDDGVPHPPRPGSGAAASGGRGDLPYGPGRRSSGGGGRLAPRGAWTPLASILLLLLGPLF

SEQ ID NO: 5800 - protein, 678 aa, Homo Sapiens
MAPSLSPGPAALRRAPQLLLLLLAAECALAALLPAREATQFLRPRQRRAFQVFEEAKQGHLERECVEELCSREEAREVFENDPETDYFYPRYLDCINKYGSPYTKNSGFATCVQNLPDQCTPNPCDRKGTQACQDLMGNFFCLCKAGWGGRLCDKDVNECSQENGGCLQICHNKPGSFHCSCHSGFELSSDGRTCQDIDECADSEACGEARCKNLPGSYSCLCDEGFAYSSQEKACRDVDECLQGRCEQVCVNSPGSYTCHCDGRGGLKLSQDMDTCEDILPCVPFSVAKSVKSLYLGRMFSGTPVIRLRFKRLQPTRLVAEFDFRTFDPEGILLFAGGHQDSTWIVLALRAGRLELQLRYNGVGRVTSSGPVINHGMWQTISVEELARNLVIKVNRDAVMKIAVAGDLFQPERGLYHLNLTVGGIPFHEKDLVQPINPRLDGCMRSWNWLNGEDTTIQETVKVNTRMQCFSVTERGSFYPGSGFAFYSLDYMRTPLDVGTESTWEVEVVAHIRPAADTGVLFALWAPDLRAVPLSVALVDYHSTKKLKKQLVVLAVEHTALALMEIKVCDGQEHVVTVSLRDGEATLEVDGTRGQSEVSAAQLQERLAVLERHLRSPVLTFAGGLPDVPVTSAPVTAFYRGCMTLEVNRRLLDLDEAAYKHSDITAHSCPPVEPAAA

SEQ ID NO: 5801 - protein, 101 aa, Homo Sapiens
MQRLCVYVLIFALALAAFSEASWKPRSQQPDAPLGTGANRDLELPWLEQQGPASHHRRQLGPQGPPHLVADPSKKQGPWLEEEEEAYGWMDFGRRSAEDEN

SEQ ID NO: 5802 - protein, 144 aa, Homo Sapiens
KLESIDGARYHALLIPSCPGALTDLASSGSLARILQHFHSESKPICAVGHGVAALCCATNEDRSWVFDSYSLTGPSVCELVRAPGFARLPLVVEDFVKDSGACFSGLGAAPGWGRGGKQEDRPPEEQRRAGEDFPIYQCVFIYP

SEQ ID NO: 5803 - protein, 184 aa, Homo Sapiens
MASERLPNRPACLLVASGAAEGVSAQSFLHCFTMASTAFNLQVATPGGKAMEFVDVTESNARWVQDFRLKAYASPAKLESIDEPICAVGHGVAALCCATNEDRSWVFDSYSLTGPSVCELVRAPGFARLPLVVEDFVKDSGACFSASEPDAVHVVLDRHLVTGQNASSTVPAVQNLLFLCGSRK

SEQ ID NO: 5804 - protein, 184 aa, Homo Sapiens; identical to SEQ ID NO: 5803

SEQ ID NO: 5805 - protein, 186 aa, Homo Sapiens
MASERLPNRPACLLVASGAAEGVSAQSFLHCFTMASTAFNLQVATPGGKAMEFVDVTESNARWVQDFRLKAYASPAKLESIDGARYHALLIPSCPGALTDLASSGSLARILQHFHSESKPICAVGHGVAALCCATNEDRSWVFDSYSLTGGLGLSQEPPPRSRSPLCVSSSGPPASPACRSWWRTS

SEQ ID NO: 5806 - protein, 220 aa, Homo Sapiens
MASERLPNRPACLLVASGAAEGVSAQSFLHCFTMASTAFNLQVATPGGKAMEFVDVTESNARWVQDFRLKAYASPAKLESIDGARYHALLIPSCPGALTDLASSGSLARILQHFHSESKPICAVGHGVAALCCATNEDRSWVFDSYSLTGPSVCELVRAPGFARLPLVVEDFVKDSGACFSASEPDAVHVVLDRHLVTGQNASSTVPAVQNLLFLCGSRK

SEQ ID NO: 5807 - protein, 250 aa, Homo Sapiens
MASERLPNRPACLLVASGAAEGVSAQSFLHCFTMASTAFNLQVATPGGKAMEFVDVTESNARWVQDFRLKAYASPAKLESIDGARYHALLIPSCPGALTDLASSGSLARILQHFHSESKPICAVGHGVAALCCATNEDRSWVFDSYSLTGPSVCELVRAPGFARLPLVVEDFVKDSGACFSGAAASCPKADRHWQHFPVEEIFLACGFKVAGLGAAPGWGRGGKQEDRPPEEQRRAGEDFPIYQCVFIYP

SEQ ID NO: 5808 - protein, 120 aa, Homo Sapiens
MASERLPNRPACLLVASGAAEGVSAQSFLHCFTMASTAFNLQVATPGGKAMEFVDVTESNARWVQDFRLKAYASPAKLESIDGARYHALLIPSCPGALTDLASSGSLARILQHFHSESSR

SEQ ID NO: 5809 - protein, 162 aa, Homo Sapiens
WVQDFRLKAYASPAKLESIDGARYHALLIPSCPGALTDLASSGSLARILQHFHSESKPICAVGHGVAALCCATNEDRSWVFDSYSLTGPSVCELVRAPGFARLPLVVEDFVKDSGACFSGQGLGQHQAGAEEESKRTDLQKSSGGRVRISPYTSVCSSTHEE

SEQ ID NO: 5810 - protein, 87 aa, Homo Sapiens
  misc_feature (1)..(1): Xaa can be any naturally occurring amino acid
XPSVCELVRAPGFARLPLVVEDFVKDSGACFSASEPDAVHVVLDRHLVTGQNASSTVPAVQNLLFLCGSRSSSLLPQGRPALAALSC

SEQ ID NO: 5811 - protein, 487 aa, Homo Sapiens
MEFSSPSREECPKPLSRVSIMAGSLTGLLLLQAVSWASGARPCIPKSFGYSSVVCVCNATYCDSFDPPTFPALGTFSRYESTRSGRRMELSMGPIQANHTGTGIGYNIIRVPMASCDFSIRTYTYADTPDDFQLHNFSLPEEDTKLKIPLIHRALQLAQRPVSLLASPWTSPTWLKTNGAVNGKGSLKGQPGDIYHQTWARYFVKFLDAYAEHKLQFWAVTAENEPSAGLLSGYPFQCLGFTPEHQRDFIARDLGPTLANSTHHNVRLLMLDDQRLLLPHWAKVVLTDPEAAKYVHGIAVHWYLDFLAPAKATLGETHRLFPNTMLFASEACVGSKFWEQSVRLGSWDRGMQYSHSIITNLLYHVVGWTDWNLALNPEGGPNWVRNFVDSPIIVDITKDTFYKQPMFYHLGHFSKFIPEGSQRVGLVASQKNDLDAVALMHPDGSAVVVVLNRSSKDVPLTIKDPAVGFLETISPGYSIHTYLWRRQ

SEQ ID NO: 5812 - protein, 536 aa, Homo Sapiens
MEFSSPSREECPKPLSRVSIMAGSLTGLLLLQAVSWASGARPCIPKSFGYSSVVCVCNATYCDSFDPPTFPALGTFSRYESTRSGRRMELSMGPIQANHTGTGLLLTLQPEQKFQKVKGFGGAMTDAAALNILALSPPAQNLLLKSYFSEEGIGYNIIRVPMASCDFSIRTYTYADTPDDFQLHNFSLPEEDTKLKIPLIHRALQLAQRPVSLLASPWTSPTWLKTNGAVNGKGSLKGQPGDIYHQTWARYFVKFLDAYAEHKLQFWAVTAENEPSAGLLSGYPFQCLGFTPEHQRDFIARDLGPTLANSTHHNVRLLMLDDQRLLLPHWAKVVLTDPEAAKYVHGIAVHWYLDFLAPAKATLGETHRLFPNTMLFASEACVGSKFWEQSVRLGSWDRGMQYSHSIITNLLYHVVGWTDWNLALNPEGGPNWVRNFVDSPIIVDITKDTFYKQPMFYHLGHFSKFIPEGSQRVGLVASQKNDLDAVALMHPDGSAVVVVLNRSSKDVPLTIKDPAVGFLETISPGYSIHTYLWRRQ

SEQ ID NO: 5813 - protein, 536 aa, Homo Sapiens; identical to SEQ ID NO: 5812

SEQ ID NO: 5814 - protein, 449 aa, Homo Sapiens
MELSMGPIQANHTGTGLLLTLQPEQKFQKVKGFGGAMTDAAALNILALSPPAQNLLLKSYFSEEGIGYNIIRVPMASCDFSIRTYTYADTPDDFQLHNFSLPEEDTKLKIPLIHRALQLAQRPVSLLASPWTSPTWLKTNGAVNGKGSLKGQPGDIYHQTWARYFVKFLDAYAEHKLQFWAVTAENEPSAGLLSGYPFQCLGFTPEHQRDFIARDLGPTLANSTHHNVRLLMLDDQRLLLPHWAKVVLTDPEAAKYVHGIAVHWYLDFLAPAKATLGETHRLFPNTMLFASEACVGSKFWEQSVRLGSWDRGMQYSHSIITNLLYHVVGWTDWNLALNPEGGPNWVRNFVDSPIIVDITKDTFYKQPMFYHLGHFSKFIPEGSQRVGLVASQKNDLDAVALMHPDGSAVVVVLNRSSKDVPLTIKDPAVGFLETISPGYSIHTYLWRRQ

SEQ ID NO: 5815 - protein, 54 aa, Homo Sapiens
MHRRRLALGLGFCLLAGTSLSVLWVYLENWLPVSYVPYYLPCPEIFILAAPCMV

SEQ ID NO: 5816 - protein, 160 aa, Homo Sapiens
MHRRRLALGLGFCLLAGTSLSVLWVYLENWLPVSYVPYYLPCPEIFNMKLHYKREKPLQPVVWSQYPQPKLLEHRGGSQCPRPPCCQAHTAADTHTLVGAHRLRGNLQPRASAAHLPATEPDHWGHGVCRGEVHSFHPVLPGVSRGVLHAWVPGALLHLH

SEQ ID NO: 5817 - protein, 120 aa, Homo Sapiens
MHRRRLALGLGFCLLAGTSLSVLWVYLENWLPVSYVPYYLPCPEIFNMKLHYKREKPLQPVVWSQYPQPKLLEHRPTQLLTLTPWLAPIVSEGTFNPELLQHIYQPLNLTIGVTVFAVGK

SEQ ID NO: 5818 - protein, 347 aa, Homo Sapiens
MHRRRLALGLGFCLLAGTSLSVLWVYLENWLPVSYVPYYLPCPEIFNMKLHYKREKPLQPVVWSQYPQPKLLEHRPTQLLTLTPWLAPIVSEGTFNPELLQHIYQPLNLTIGVTVFAVGKYTHFIQSFLESAEEFFMRGYRVHYYIFTDNPAAVPGVPLGPHRLLSSIPIQGHSHWEETSMRRMETISQHIAKRAHREVDYLFCLDVDMVFRNPWGPETLGDLVAAIHPSYYAVPRQQFPYERRRVSTAFVADSEGDFYYGGAVFGGQVARVYEFTRGCHMAILADKANGIMAAWREESHLNRHFISNKPSKVLSPEYLWDDRKPQPPSLKLIRFSTLDKDISCLRS

SEQ ID NO: 5819 - protein, 294 aa, Homo Sapiens
MHRRRLALGLGFCLLAGTSLSVLWVYLENWLPVSYVPYYLPCPEIFNMKLHYKREKPLQPVVWSQYPQPKLLEHRPTQLLTLTPWLAPIVSEGTFNPELLQHIYQPLNLTIGVTVFAVGNPSWSQPRSSSCVGTGCTTTSSLTTLQPFPGSRWVPTGFSAPSPSRVTPTGRRHPCAGWRPSASTLLRGLTGRWTTSSALMWTWCFGTRGALRPWETWWLPFTQATTPFPASSSPMSAGVFPLPLWQTAKGTSIMVGQSSGGRWPGYMSLLGAATWPSWRTRPMASWLPGGRKAT

SEQ ID NO: 5820 - protein, 72 aa, Homo Sapiens
MHRRRLALGLGFCLLAGTSLSVLWVYLENWLPVSYVPYYLPCPEILLEYRGVISAHCNLHLPGSSNCHASAT

SEQ ID NO: 5821 - protein, 72 aa, Homo Sapiens; identical to SEQ ID NO: 5820

SEQ ID NO: 5822 - protein, 160 aa, Homo Sapiens
MHRRRLALGLGFCLLAGTSLSVLWVYLENWLPVSYVPYYLPCPEILPMMMALSCLCHQQHEAALQEGEATPARGMVTVPSAQAAGAQAHTAADTHTLVGAHRLRGNLQPRASAAHLPATEPDHWGHGVCRGEVHSFHPVLPGVSRGVLHAWVPGALLHLH

SEQ ID NO: 5823 - protein, 330 aa, Homo Sapiens
MHRRRLALGLGFCLLAGTSLSVLWVYLENWLPVSYVPYYLPCPEILSQYPQPKLLEHRPTQLLTLTPWLAPIVSEGTFNPELLQHIYQPLNLTIGVTVFAVGKYTHFIQSFLESAEEFFMRGYRVHYYIFTDNPAAVPGVPLGPHRLLSSIPIQGHSHWEETSMRRMETISQHIAKRAHREVDYLFCLDVDMVFRNPWGPETLGDLVAAIHPSYYAVPRQQFPYERRRVSTAFVADSEGDFYYGGAVFGGQVARVYEFTRGCHMAILADKANGIMAAWREESHLNRHFISNKPSKVLSPEYLWDDRKPQPPSLKLIRFSTLDKDISCLRS

SEQ ID NO: 5824 - protein, 145 aa, Homo Sapiens
MKRVLVLLLAVAFGHALERGRDYEKNKVCKEFSHLGKEDFTSLSLVLYSRKFPSGTFEQVSQLVKEVVSLTEACCAEGADPDCYDTRTSALSAKSCESNSPFPVHPGTAECCTKEGLERKLCMAALKHQPQEFPTYVEPTNDEIC

SEQ ID NO: 5825 - protein, 474 aa, Homo Sapiens
MKRVLVLLLAVAFGHALERGRDYEKNKVCKEFSHLGKEDFTSLSLVLYSRKFPSGTFEQVSQLVKEVVSLTEACCAEGADPDCYDTRTSALSAKSCESNSPFPVHPGTAECCTKEGLERKLCMAALKHQPQEFPTYVEPTNDEICEAFRKDPKEYANQFMWEYSTNYGQAPLSLLVSYTKSYLSMVGSCCTSASPTVCFLKERLQLKHLSLLTTLSNRVCSQYAAYGEKKSRLSNLIKLAQKVPTADLEDVLPLAEDITNILSKCCESASEDCMAKELPEHTVKLCDNLSTKNSKFEDCCQEKTAMDVFVCTYFMPAAQLPELPDVELPTNKDVCDPGNTKVMDKYTFELSRRTHLPEVFLSKVLEPTLKSLGECCDVEDSTTCFNAKGPLLKKELSSFIDKGQELCADYSENTFTEYKKKLAERLKAKLPDATPTELAKLVNKHSDFASNCCSINSPPLYCDSEIDAELKNIL

SEQ ID NO: 5826 - protein, 348 aa, Homo Sapiens
MKRVLVLLLAVAFGHALERGRDYEKNKVCKEFSHLGKEDFTSLSLVLYSRKFPSGTFEQVSQLVKEVVSLTEACCAEGADPDCYDTRTSALSAKSCESNSPFPVHPGTAECCTKEGLERKLCMAALKHQPQEFPTYVEPTNDEICEAFRKDPKEYANQFMWEYSTNYGQAPLSLLVSYTKSYLSMVGSCCTSASPTVCFLKERLQLKHLSLLTTLSNRVCSQYAAYGEKKSRLSNLIKLAQKVPTADLEDVLPLAEDITNILSKCCESASEDCMAKELPEHTVKLCDNLSTKNSKFEDCCQEKTAMDVFVCTYFMPAAQLPELPDVELPTNKDVCDPGNTKVMDKALY

SEQ ID NO: 5827 - protein, 476 aa, Homo Sapiens
MKRVLVLLLAVAFGHALERGRDYEKNKVCKEFSHLGKEDFTSLSLVLYSRKFPSGTFEQVSQLVKEVVSLTEACCAEGADPDCYDTRTSALSAKSCESNSPFPVHPGTAECCTKEGLERKLCMAALKHQPQEFPTYVEPTNDEICEAFRKDPKEYANQFMWEYSTNYGQAPLSLLVSYTKSYLSMVGSCCTSASPTVCFLKERLQLKHLSLLTTLSNRVCSQYAAYGEKKSRLSNLIKLAQKVPTADLEDVLPLAEDITNILSKCCESASEDCMAKELPEHTVKLCDNLSTKNSKFEDCCQEKTAMDVFVCTYFMPAAQLPELPDVELPTNKDVCDPGNTKVMDKYTFELSRRTHLPEVFLSKVLEPTLKSLGECCDVEDSTTCFNAKGPLLKKELSSFIDKGQELCADYSENTFTEYKKKLAERLKAKLPDATPTELAKLVNKHSDFASNCCSINSPPLYCDSETRVGATQGNDL

SEQ ID NO: 5828 - protein, 493 aa, Homo Sapiens
MLWSWSEERGGAARLSGRKMKRVLVLLLAVAFGHALERGRDYEKNKVCKEFSHLGKEDFTSLSLVLYSRKFPSGTFEQVSQLVKEVVSLTEACCAEGADPDCYDTRTSALSAKSCESNSPFPVHPGTAECCTKEGLERKLCMAALKHQPQEFPTYVEPTNDEICEAFRKDPKEYANQFMWEYSTNYGQAPLSLLVSYTKSYLSMVGSCCTSASPTVCFLKERLQLKHLSLLTTLSNRVCSQYAAYGEKKSRLSNLIKLAQKVPTADLEDVLPLAEDITNILSKCCESASEDCMAKELPEHTVKLCDNLSTKNSKFEDCCQEKTAMDVFVCTYFMPAAQLPELPDVELPTNKDVCDPGNTKVMDKYTFELSRRTHLPEVFLSKVLEPTLKSLGECCDVEDSTTCFNAKGPLLKKELSSFIDKGQELCADYSENTFTEYKKKLAERLKAKLPDATPTELAKLVNKHSDFASNCCSINSPPLYCDSEIDAELKNIL

SEQ ID NO: 5829 - protein, 180 aa, Homo Sapiens
MKSIYFVAGLFVMLVQGSWQRSLQDTEEKSRSFSASQADPLSDPDQMNEDKRHSQGTFTSDYSKYLDSRRAQDFVQWLMNTKRNRNNIAKRHDEFERHAEGTFTSDVSSYLEGQAAKEFIAWLVKGRGRRDFPEEVAIVEELGRRHADGSFSDEMNTILDNLAARDFINWLIQTKITDRK

SEQ ID NO: 5830 - protein, 180 aa, Homo Sapiens; identical to SEQ ID NO: 5829

SEQ ID NO: 5831 - protein, 80 aa, Homo Sapiens
MPPCQPQRPLLLLLLLLACQPQVPSAQVMDFLFEKWKLYGDQCHHNLSLLPPPTELVCNRTFDKYSCWPDTPANTTANIS

SEQ ID NO: 5832 - protein, 477 aa, Homo Sapiens
MPPCQPQRPLLLLLLLLACQPQVPSAQVMDFLFEKWKLYGDQCHHNLSLLPPPTELVCNRTFDKYSCWPDTPANTTANISCPWYLPWHHKVQHRFVFKRCGPDGQWVRGPRGQPWRDASQCQMDGEEIEVQKEVAKMYSSFQVMYTVGYSLSLGALLLALAILGGLSKLHCTRNAIHANLFASFVLKASSVLVIDGLLRTRYSQKIGDDLSVSTWLSDGAVAGCRVAAVFMQYGIVANYCWLLVEGLYLHNLLGLATLPERSFFSLYLGIGWGAPMLFVVPWAVVKCLFENVQCWTSNDNMGFWWILRFPVFLAILINFFIFVRIVQLLVAKLRARQMHHTDYKFRLAKSTLTLIPLLGVHEVVFAFVTDEHAQGTLRSAKLFFDLFLSSFQGLLVAVLYCFLNKEVQSELRRRWHRWRLGKVLWEERNTSNHRASSSPGHGPPSKELQFGRGGGSQDSSAETPLAGGLPRLAESPF

SEQ ID NO: 5833 - protein, 523 aa, Homo Sapiens
MPPCQPQRPLLLLLLLLACQPQVPSAQVMDFLFEKWKLYGDQCHHNLSLLPPPTELVCNRTFDKYSCWPDTPANTTANISCPWYLPWHHKVQHRFVFKRCGPDGQWVRGPRGQPWRDASQCQMDGEEIEVQKEVAKMYSSFQVMYTVGYSLSLGALLLALAILGGLSKLHCTRNAIHANLFASFVLKASSVLVIDGLLRTRYSQKIGDDLSVSTWLSDGVSPPRRPQAGGWVGSQAGGHVAALTLHLYQAVAGCRVAAVFMQYGIVANYCWLLVEGLYLHNLLGLATLPERSFFSLYLGIGWGAPMLFVVPWAVVKCLFENVQCWTSNDNMGFWWILRFPVFLAILINFFIFVRIVQLLVAKLRARQMHHTDYKFRLAKSTLTLIPLLGVHEVVFAFVTDEHAQGTLRSAKLFFDLFLSSFQVPARPPAPPPGAQCATPDHPVSPGPAGGCPLLLPQQGGAVGAAAALAPLAPGQSAMGGAEHQQPQGLIFARPRPSQQGAAVWEGWWQPGFICGDPLGWWPP

SEQ ID NO: 5834 - protein, 308 aa, Homo Sapiens
MFVQLLRAIYVPQNVYCIHVDEKAPMKYKTAVQTLVNCFENVFISSKTEKVAYAGFTRLQADINCMKVLVHSKFQWNYVINLCGQDFPIKTNREIIHYIRSKWSDKNITPGVIQPLHIKSKTSQSHLEFVPKGSIYAPPNNRFKDKPPHNLTIYFGSAYYVLTRKFVEFILTDIHAKDMLQWSKDIRSPEQHYWVTLNRLKDAPGATPNAGWEGNVRAIKRKSEEGNVHDGCKGRYVEDICVYGPGDLPWLIQSPSLFANKFEPSTDPLVVTCLERRHRLQVLRQAEVPIEPHWHFQQQSHFNMRLNR

SEQ ID NO: 5835 - protein, 429 aa, Homo Sapiens
MSQLRATKSGLVVRAVICIFIFLYLRNPTPAESEEEPAQPEVVECGFYPDELCSALFEGKGAAPIAKFCKTPHKSEIHAHLHTPGNCSRISRGLHFITRPLSAEEGDFSLAYIITIHKELAMFVQLLRAIYVPQNVYCIHVDEKAPMKYKTAVQTLVNCFENVFISSKTEKVAYAGFTRLQADINCMKVLVHSKFQWNYVINLCGQDFPIKTNREIIHYIRSKWSDKNITPGVIQPLHIKSKTSQSHLEFVPKGSIYAPPNNRFKDKPPHNLTIYFGSAYYVLTRKFVEFILTDIHAKDMLQWSKDIRSPEQHYWVTLNRLKDAPGATPNAGWEGNVRAIKRKSEEGNVHDGCKGRYVEDICVYGPGDLPWLIQSPSLFANKFEPSTDPLVVTCLERRHRLQVLRQAEVPIEPHWHFQQQSHFNMRLNR

SEQ ID NO: 5836 - protein, 50 aa, Homo Sapiens
MALRVVRSVRALLCTLRAVPSPAAPCPPRPWQLGVGAVRTLRTGPALLSG

SEQ ID NO: 5837 - protein, 58 aa, Homo Sapiens
MALRVVRSVRALLCTLRAVPSPAAPCPPRPWQLGVGAVRTLRTGPALLSGSVGRCCLL

SEQ ID NO: 5838 - protein, 162 aa, Homo Sapiens
MALRVVRSVRALLCTLRAVPSPAAPCPPRPWQLGVGAVRTLRTGPALLSVRKFTEKHEWVTTENGIGTVGISNFAQEALGDVVYCSLPEVGTKLNKQDEFGALESVKAASELYSPLSGEVTEINEALAENPGLVNKSCYEDGKLLLEISQGITTTVNILSRI

SEQ ID NO: 5839 - protein, 173 aa, Homo Sapiens
MALRVVRSVRALLCTLRAVPSPAAPCPPRPWQLGVGAVRTLRTGPALLSVRKFTEKHEWVTTENGIGTVGISNFAQEALGDVVYCSLPEVGTKLNKQDEFGALESVKAASELYSPLSGEVTEINEALAENPGLVNKSCYEDGWLIKMTLSNPSELDELMSEEAYEKYIKSIEE

SEQ ID NO: 5840 - protein, 118 aa, Homo Sapiens
SVRALLCTLRAVPSPAAPCPPRPWQLGVGAVRTLRTGPALLSDEFGALESVKAASELYSPLSGEVTEINEALAENPGLVNKSCYEDGWLIKMTLSNPSELDELMSEEAYEKYIKSIEE

SEQ ID NO: 5841 - protein, 66 aa, Homo Sapiens
  misc_feature (1)..(1): Xaa can be any naturally occurring amino acid
XCTLRAVPSPAAPCPPRPWQLGVGAVRTLRTGPALLSVRKFTEKHEWVTTENGIGTVGISNFAQVG

SEQ ID NO: 5842 - protein, 100 aa, Homo Sapiens
  misc_feature (1)..(1): Xaa can be any naturally occurring amino acid
XEKHEWVTTENGIGTVGISNFAQEALGDVVYCSLPEVGTKLNKQGEVTEINEALAENPGLVNKSCYEDGWLIKMTLSNPSELDELMSEEAYEKYIKSIEE

SEQ ID NO: 5843 - protein, 105 aa, Homo Sapiens
  misc_feature (1)..(1): Xaa can be any naturally occurring amino acid
XTLRTGPALLSVRKFTEKHEWVTTENGIGTVGISNFAQEALGDVVYCSLPEVGTKLNKQDEFGALESVKAASELYSPLSGEVTEINEALAENPGLVNKSCYEDVS

SEQ ID NO: 5844 - protein, 80 aa, Homo Sapiens
  misc_feature (1)..(1): Xaa can be any naturally occurring amino acid
XVRSVRALLCTLRAVPSPAAPCPPRPWQLGVGAVRTLRTGPALLSVRKFTEKHEWVTTENGIGTVGISNFAQMSLVLWKV

SEQ ID NO: 5845 - protein, 372 aa, Homo Sapiens; identical to SEQ ID NO: 2629

SEQ ID NO: 5846 - protein, 478 aa, Homo Sapiens
MAHVPARTSPGPGPQLLLLLLPLFLLLLRDVAGSHRAPAWSALPAAADGLQGDRDLQRHPGDAAATLGPSAQDMVAVHMHRLYEKYSRQGARPGGGNTVRSFRARLEVVDQKAVYFFNLTSMQDSEMILTATFHFYSEPPRWPRALEVLCKPRAKNASGRPLPLGPPTRQHLLFRSLSQNTATQGLLRGAMALAPPPRGLWQAKDISPIVKAARRDGELLLSAQLDSEERDPGVPRPSPYAPYILVYANDLAISEPNSVAVTLQRYDPFPAGDPEPRAAPNNSADPRVRRAAQATGPLQDNELPGLDERPPRAHAQHFHKHQLWPSPFRALKPRPGRKDRRKKGQEVFMAASQVLDFDEKTMQKARRKQWDEPRVCSRRYLKVDFADIGWNEWIISPKSFDAYYCAGACEFPMPKIVRPSNHATIQSIVRAVGIIPGIPEPCCVPDKMNSLGVLFLDENRNVVLKVYPNMSVDTCACR

SEQ ID NO: 5847 - protein, 407 aa, Homo Sapiens
MVLAAPLLLGFLLLALELRPRGEAAEGPAAAAAAAAAAAAAGVGGERSSRPAPSVAPEPDGCPVCVWRQHSRELRLESIKSQILSKLRLKEAPNISREVVKQLLPKAPPLQQILDLHDFQGDALQPEDFLEEDEYHATTETVISMAQETDPAVQTDGSPLCCHFHFSPKVMFTKVLKAQLWVYLRPVPRPATVYLQILRLKPLTGEGTAGGGGGGRRHIRIRSLKIELHSRSGHWQSIDFKQVLHSWFRQPQSNWGIEINAFDPSGTDLAVTSLGPGAEGLHPFMELRVLENTKRSRRNLGLDCDEHSSESRCCRYPLTVDFEAFGWDWIIAPKRYKANYCSGQCEYMFMQKYPHTHLVQQANPRGSAGPCCTPTKMSPINMLYFNDKQQIIYGKIPGMVVDRCGCS

SEQ ID NO: 5848 - protein, 380 aa, Homo Sapiens
  misc_feature (1)..(1): Xaa can be any naturally occurring amino acid
XAAAAAAAAAAAAAGVGGERSSRPAPSVAPEPDGCPVCVWRQHSRELRLESIKSQILSKLRLKEAPNISREVVKQLLPKAPPLQQILDLHDFQGDALQPEDFLEEDEYHATTETVISMAQETDPAVQTDGSPLCCHFHFSPKVMFTKVLKAQLWVYLRPVPRPATVYLQILRLKPLTGEGTAGGGGGGRRHIRIRSLKIELHSRSGHWQSIDFKQVLHSWFRQPQSNWGIEINAFDPSGTDLAVTSLGPGAEGLHPFMELRVLENTKRSRRNLGLDCDEHSSESRCCRYPLTVDFEAFGWDWIIAPKRYKANYCSGQCEYMFMQKYPHTHLVQQANPRGSAGPCCTPTKMSPINMLYFNDKQQIIYGKIPGMVVDRCGCS

SEQ ID NO: 5849 - protein, 6 aa, Homo Sapiens
MPGQEL

SEQ ID NO: 5850 - protein, 113 aa, Homo Sapiens
MPGQELRTVNGSQMLLVLLVLSWLPHGGALSLAEASRASFPGPSELHSEDSRFRELRKRYEDLLTRLRANQSWEDSNTDLVPAPAVRILTPEVRLGSGGHLHLRISRAALPEG

SEQ ID NO: 5851 - protein, 308 aa, Homo Sapiens
MPGQELRTVNGSQMLLVLLVLSWLPHGGALSLAEASRASFPGPSELHSEDSRFRELRKRYEDLLTRLRANQSWEDSNTDLVPAPAVRILTPEVRLGSGGHLHLRISRAALPEGLPEASRLHRALFRLSPTASRSWDVTRPLRRQLSLARPQAPALHLRLSPPPSQSDQLLAESSSARPQLELHLRPQAARGRRRARARNGDHCPLGPGRCCRLHTVRASLEDLGWADWVLSPREVQVTMCIGACPSQFRAANMHAQIKTSLHRLKPDTVPAPCCVPASYNPMVLIQKTDTGVSLQTYDDLLAKDCHCI

SEQ ID NO: 5852 - protein, 429 aa, Homo Sapiens
MCPGALWVALPLLSLLAGSLQGKPLQSWGRGSAGGNAHSPLGVPGGGLPEHTFNLKMFLENVKVDFLRSLNLSGVPSQDKTRVEPPQYMIDLYNRYTSDKSTTPASNIVRSFSMEDAISITATEDFPFQKHILLFNISIPRHEQITRAELRLYVSCQNHVDPSHDLKGSVVIYDVLDGTDAWDSATETKTFLVSQDIQDEGWETLEVSSAVKRWVRSDSTKSKNKLEVTVESHRKGCDTLDISVPPGSRNLPFFVVFSNDHSSGTKETRLELREMISHEQESVLKKLSKDGSTEAGESSHEEDTDGHVAAGSTLARRKRSAGAGSHCQKTSLRVNFEDIGWDSWIIAPKEYEAYECKGGCFFPLADDVTPTKHAIVQTLVHLKFPTKVGKACCVPTKLSPISVLYKDDMGVPTLKYHYEGMSVAECGCR

SEQ ID NO: 5853 - protein, 364 aa, Homo Sapiens
MLRFLPDLAFSFLLILALGQAVQFQEYVFLQFLGLDKAPSPQKFQPVPYILKKIFQDREAAATTGVSRDLCYVKELGVRGNVLRFLPDQGFFLYPKKISQASSCLQKLLYFNLSAIKEREQLTLAQLGLDLGPNSYYNLGPELELALFLVQEPHVWGQTTPKPGKMFVLRSVPWPQGAVHFNLLDVAKDWNDNPRKNFGLFLEILVKEDRDSGVNFQPEDTCARLRCSLHASLLVVTLNPDQCHPSRKRRAAIPVPKLSCKNLCHRHQLFINFRDLGWHKWIIAPKGFMANYCHGECPFSLTISLNSSNYAFMQALMHAVDPEIPQAVCIPTKLSPISMLYQDNNDNVILRHYEDMVVDECGCG

SEQ ID NO: 5854 - protein, 501 aa, Homo Sapiens
MRLPKLLTFLLWYLAWLDLEFICTVLGAPDLGQRPQGTRPGLAKAEAKERPPLARNVFRPGGHSYGGGATNANARAKGGTGQTGGLTQPKKDEPKKLPPRPGGPEPKPGHPPQTRQATARTVTPKGQLPGGKAPPKAGSVPSSFLLKKAREPGPPREPKEPFRPPPITPHEYMLSLYRTLSDADRKGGNSSVKLEAGLANTITSFIDKGQDDRGPVVRKQRYVFDISALEKDGLLGAELRILRKKPSDTAKPAAPGGGRAAQLKLSSCPSGRQPAALLDVRSVPGLDGSGWEVFDIWKLFRNFKNSAQLCLELEAWERGRAVDLRGLGFDRAARQVHEKALFLVFGRTKKRDLFFNEIKARSGQDDKTVYEYLFSQRRKRRAPLATRQGKRPSKNLKARCSRKALHVNFKDMGWDDWIIAPLEYEAFHCEGLCEFPLRSHLEPTNHAVIQTLMNSMDPESTPPTCCVPTRLSPISILFIDSANNVVYKQYEDMVVESCGCR

SEQ ID NO: 5855 - protein, 501 aa, Homo Sapiens; identical to SEQ ID NO: 5854

SEQ ID NO: 5856 - protein, 271 aa, Homo Sapiens [sequence omitted]

SEQ ID NO: 5857 - protein, 455 aa, Homo Sapiens
MDTPRVLLSAVFLISFLWDLPGFQQASISSSSSSAELGSTKGMRSRKEGKMQRAPRDSDAGREGQEPQPRPQDEPRAQQPRAQEPPGRGPRVVPHEYMLSIYRTYSIAEKLGINASFFQSSKSANTITSFVDRGLDDLSHTPLRRQKYLFDVSMLSDKEELVGAELRLFRQAPSAPWGPPAGPLHVQLFPCLSPLLLDARTLDPQGAPPAGWEVFDVWQGLRHQPWKQLCLELRAAWGELDAGEAEARARGPQQPPPPDLRSLGFGRRVRPPQERALLVVFTRSQRKNLFAEMREQLGSAEAAGPGAGAEGSWPPPSGAPDARPWLPSPGRRRRRTAFASRHGKRHGKKSRLRCSKKPLHVNFKELGWDDWIIAPLEYEAYHCEGVCDFPLRSHLEPTNHAIIQTLMNSMDPGSTPPSCCVPTKLTPISILYIDAGNNVVYKQYEDMVVESCGCR

SEQ ID NO: 5858 - protein, 353 aa, Homo Sapiens [sequence omitted]

SEQ ID NO: 5859 - protein, 450 aa, Homo Sapiens
MDLSAAAALCLWLLSACRPRDGLEAAAVLRAAGAGPVRSPGGGGGGGGGGRTLAQAAGAAAVPAAAVPRARAARRAAGSGFRNGSVVPHHFMMSLYRSLAGRAPAGAAAVSASGHGRADTITGFTDQATQDESAAETGQSFLFDVSSLNDADEVVGAELRVLRRGSPESGPGSWTSPPLLLLSTCPGAARAPRLLYSRAAEPLVGQRWEAFDVADAMRRHRREPRPPRAFCLLLRAVAGPVPSPLALRRLGFGWPGGGGSAAEERAVLVVSSRTQRKESLFREIRAQARALGAALASEPLPDPGTGTASPRAVIGGRRRRRTALAGTRTAQGSGGGAGRGHGRRGRSRCSRKPLHVDFKELGWDDWIIAPLDYEAYHCEGLCDFPLRSHLEPTNHAIIQTLLNSMAPDAAPASCCVPARLSPISILYIDAANNVVYKQYEDMVVEACGCR

SEQ ID NO: 5860 - protein, 454 aa, Homo Sapiens
MARPNKFLLWFCCFAWLCFPISLGSQASGGEAQIAASAELESGAMPWSLLQHIDERDRAGLLPALFKVLSVGRGGSPRLQPDSRALHYMKKLYKTYATKEGIPKSNRSHLYNTVRLFTPCTRHKQAPGDQVTGILPSVELLFNLDRITTVEHLLKSVLLYNINNSVSFSSAVKCVCNLMIKEPKSSSRTLGRAPYSFTFNSQFEFGKKHKWIQIDVTSLLQPLVASNKRSIHMSINFTCMKDQLEHPSAQNGLFNMTLVSPSLILYLNDTSAQAYHSWYSLHYKRRPSQGPDQERSLSAYPVGEEAAEDGRSSHHRHRRGQETVSSELKKPLGPASFNLSEYFRQFLLPQNECELHDFRLSFSQLKWDNWIVAPHRYNPRYCKGDCPRAVGHRYGSPVHTMVQNIIYEKLDSSVPRPSCVPAKYSPLSVLTIEPDGSIAYKEYEDMIATKCTCR

SEQ ID NO: 5861 - protein, 366 aa, Homo Sapiens
MKKLYKTYATKEGIPKSNRSHLYNTVRLFTPCTRHKQAPGDQVTGILPSVELLFNLDRITTVEHLLKSVLLYNINNSVSFSSAVKCVCNLMIKEPKSSSRTLGRAPYSFTFNSQFEFGKKHKWIQIDVTSLLQPLVASNKRSIHMSINFTCMKDQLEHPSAQNGLFNMTLVSPSLILYLNDTSAQAYHSWYSLHYKRRPSQGPDQERSLSAYPVGEEAAEDGRSSHHRHRRGQETVSSELKKPLGPASFNLSEYFRQFLLPQNECELHDFRLSFSQLKWDNWIVAPHRYNPRYCKGDCPRAVGHRYGSPVHTMVQNIIYEKLDSSVPRPSCVPAKYSPLSVLTIEPDGSIAYKEYEDMIATKCTCR

SEQ ID NO: 5862 - protein, 366 aa, Homo Sapiens; identical to SEQ ID NO: 5861

SEQ ID NO: 5863 - protein, 366 aa, Homo Sapiens; identical to SEQ ID NO: 5861

SEQ ID NO: 5864 - protein, 366 aa, Homo Sapiens; identical to SEQ ID NO: 5861

SEQ ID NO: 5865 - protein, 61 aa, Homo Sapiens
MKLWDVVAVCLVLLHTASAFPLPAANMPEDYPDQFDDVMDFIQATIKRLKRSPDKQMAVLP

SEQ ID NO: 5866 - protein, 61 aa, Homo Sapiens; identical to SEQ ID NO: 5865

SEQ ID NO: 5867 - protein, 185 aa, Homo Sapiens
MKLWDVVAVCLVLLHTASAFPLPAANMPEDYPDQFDDVMDFIQATIKRLKRSPDKQMAVLPRRERNRQAAAANPENSRGKGRRGQRGKNRGCVLTAIHLNVTDLGLGYETKEELIFRYCSGSCDAAETTYDKILKNLSRNRRLVSDKVGQACCRPIAFDDDLSFLDDNLVYHILRKHSAKRCGCI

SEQ ID NO: 5868 - protein, 185 aa, Homo Sapiens; identical to SEQ ID NO: 5867

SEQ ID NO: 5869 - protein, 211 aa, Homo Sapiens
MKLWDVVAVCLVLLHTASAFPLPAGKRPPEAPAEDRSLGRRRAPFALSSDSNMPEDYPDQFDDVMDFIQATIKRLKRSPDKQMAVLPRRERNRQAAAANPENSRGKGRRGQRGKNRGCVLTAIHLNVTDLGLGYETKEELIFRYCSGSCDAAETTYDKILKNLSRNRRLVSDKVGQACCRPIAFDDDLSFLDDNLVYHILRKHSAKRCGCI

SEQ ID NO: 5870 - protein, 159 aa, Homo Sapiens
MPEDYPDQFDDVMDFIQATIKRLKRSPDKQMAVLPRRERNRQAAAANPENSRGKGRRGQRGKNRGCVLTAIHLNVTDLGLGYETKEELIFRYCSGSCDAAETTYDKILKNLSRNRRLVSDKVGQACCRPIAFDDDLSFLDDNLVYHILRKHSAKRCGCI

SEQ ID NO: 5871 - protein, 202 aa, Homo Sapiens
MQSLPNSNGAAAGRDFKMKLWDVVAVCLVLLHTASAFPLPAANMPEDYPDQFDDVMDFIQATIKRLKRSPDKQMAVLPRRERNRQAAAANPENSRGKGRRGQRGKNRGCVLTAIHLNVTDLGLGYETKEELIFRYCSGSCDAAETTYDKILKNLSRNRRLVSDKVGQACCRPIAFDDDLSFLDDNLVYHILRKHSAKRCGCI

SEQ ID NO: 5872 - protein, 228 aa, Homo Sapiens
MQSLPNSNGAAAGRDFKMKLWDVVAVCLVLLHTASAFPLPAGKRPPEAPAEDRSLGRRRAPFALSSDSNMPEDYPDQFDDVMDFIQATIKRLKRSPDKQMAVLPRRERNRQAAAANPENSRGKGRRGQRGKNRGCVLTAIHLNVTDLGLGYETKEELIFRYCSGSCDAAETTYDKILKNLSRNRRLVSDKVGQACCRPIAFDDDLSFLDDNLVYHILRKHSAKRCGCI

SEQ ID NO: 5873 - protein, 90 aa, Homo Sapiens
MKMLPGVGVFGTGSSARVLVPLLRAEGFTVEALWGKTEEEAKQLAEEMNIAFYTSRTDDILLHQDVDLVCISIPPPLTRQISVKALESSL

SEQ ID NO: 5874 - protein, 385 aa, Homo Sapiens
MKMLPGVGVFGTGSSARVLVPLLRAEGFTVEALWGKTEEEAKQLAEEMNIAFYTSRTDDILLHQDVDLVCISIPPPLTRQISVKALGIGKNVVCEKAATSVDAFRMVTASRYYPQLMSLVGNVLRFLPAFVRMKQLISEHYVGAVMICDARIYSGSLLSPSYGWICDELMGGGGLHTMGTYIVDLLTHLTGRRAEKVHGLLKTFVRQNAAIRGIRHVTSDDFCFFQMLMGGGVCSTVTLNFNMPGAFVHEVMVVGSAGRLVARGADLYGQKNSATQEELLLRDSLAVGAGLPEQGPQDVPLLYLKGMVYMVQALRQSFQGQGDRRTWDRTPVSMAASFEDGLYMQSVVDAIKRSSRSGEWEAVEVLTEEPDTNQNLCEALQRNNL

SEQ ID NO: 5875 - protein, 112 aa, Homo Sapiens
MKMLPGVGVFGTGSSARVLVPLLRAEGFTVEALWGKTEEEAKQLAEEMNIAFYTSRTDDILLHQDVDLVCISIPPPLTRQISVKALGTPGRPQQGQIMSLPLGSPLRVTPLL

SEQ ID NO: 5876 - protein, 112 aa, Homo Sapiens; identical to SEQ ID NO: 5875

SEQ ID NO: 5877 - protein, 88 aa, Homo Sapiens
MKMLPGVGVFGTGSSARVLVPLLRAEGFTVEALWGKTEEEAKQLAEEMNIAFYTSRTDDILLHQDVDLVLGRMWFARRQQHRWMPSGW

SEQ ID NO: 5878 - protein, 103 aa, Homo Sapiens
  misc_feature (1)..(1): Xaa can be any naturally occurring amino acid
XKTEEEAKQLAEEMNIAFYTSRTDDILLHQDVDLVCISIPPPLTRQISVKALGSTCGVPEWSLDGCGGEAQVHTLPRWASTRRVLGRMWFARRQQHRWMPSGW

SEQ ID NO: 5879 - protein, 682 aa, Homo Sapiens
MCGIFAYMNYRVPRTRKEIFETLIKGLQRLEYRGYDSAGVAIDGNNHEVKERHIQLVKKRGKVKALDEELYKQDSMDLKVEFETHFGIAHTRWATHGVPSAVNSHPQRSDKGNEFVVIHNGIITNYKDLRKFLESKGYEFESETDTETIAKLIKYVFDNRETEDITFSTLVERVIQQLEGAFALVFKSVHYPGEAVATRRGSPLLIGVRSKYKLSTEQIPILYRTCTLENVKNICKTRMKRLDSSACLHAVGDKAVEFFFASDASAIIEHTNRVIFLEDDDIAAVADGKLSIHRVKRSASDDPSRAIQTLQMELQQIMKGNFSAFMQKEIFEQPESVFNTMRGRVNFETNTVLLGGLKDHLKEIRRCRRLIVIGCGTSYHAAVATRQVLEELTELPVMVELASDFLDRNTPVFRDDVCFFISQSGETADTLLALRYCKDRGALTVGVTNTVGSSISRETDCGVHINAGPEIGVASTKAYTSQFISLVMFGLMMSEDRISLQNRRQEIIRGLRSLPELIKEVLSLEEKIHDLALELYTQRSLLVMGRGYNYATCLEGALKIKEITYMHSEGILAGELKHGPLALIDKQMPVIMVIMKDPCFAKCQNALQQVTARQGRPIILCSKDDTESSKFAYKTIELPHTVDCLQGILSVIPLQLLSFHLAVLRGYDVDFPRNLAKSVTVE

SEQ ID NO: 5880 - protein, 216 aa, Homo Sapiens
MNLLLNSISLLTFLSEFVVIHNGIITNYKDLRKFLESKGYEFESETDTETIAKLIKYVFDNRETEDITFSTLVERVIQQLEGAFALVFKSVHYPGEAVATRRGSPLLIGVRSKYKLSTEQIPILYRTCTLENVKNICKTRMKRLDSSACLHAVGDKAVEFFFASDASAIIEHTNRVIFLEDDDIAAVADGKLSIHRVKRSASDDPSRAIQTLQMEL

SEQ ID NO: 5881 - protein, 179 aa, Homo Sapiens [sequence omitted]

SEQ ID NO: 5882 - protein, 464 aa, Homo Sapiens
MILANVFCLFFFLDETLRSLASPSSLQGPELHGWRPPVDCVRANELCAAESNCSSRYRTLRQCLAGRDRNTMLANKECQAALEVLQESPLYDCRCKRGMKKELQCLQIYWSIHLGLTEGEEFYEASPYEPVTSRLSDIFRLASIFSGTGADPVVSAKSNHCLDAAKACNLNDNCKKLRSSYISICNREISPTERCNRRKCHKALRQFFDRVPSEYTYRMLFCSCQDQACAERRRQTILPSCSYEDKEKPNCLDLRGVCRTDHLCRSRLADFHANCRASYQTVTSCPADNYQACLGSYAGMIGFDMTPNYVDSSPTGIVVSPWCSCRGSGNMEEECEKFLRDFTENPCLRNAIQAFGNGTDVNVSPKGPSFQATQAPRVEKTPSLPDDLSDSTSLGTSVITTCTSVQEQGLKANNSKELSMCFTELTTNIIPGSNKVIKPNSGPSRARPSAALTVLSVLMLKLAL

SEQ ID NO: 5883 - protein, 265 aa, Homo Sapiens
MILANVFCLFFFLDETLRSLASPSSLQGPELHGWRPPVDCVRANELCAAESNCSSRYRTLRQCLAGRDRNTMLANKECQAALEVLQESPLYDCRCKRGMKKELQCLQIYWSIHLGLTEGEEFYEASPYEPVTSRLSDIFRLASIFSGTGADPVVSAKSNHCLDAAKACNLNDNCKKLRSSYISICNREISPTERCNRRKCHKALRQFFDRVPSEYTYRMLFCSCQDQACAERRRQTILPSCSYEDKEKPNCLDLRGVCRTDHLCR

SEQ ID NO: 5884 - protein, 464 aa, Homo Sapiens; identical to SEQ ID NO: 5882

SEQ ID NO: 5885 - protein, 359 aa, Homo Sapiens
MILANVFCLFFFLGEEFYEASPYEPVTSRLSDIFRLASIFSGTGADPVVSAKSNHCLDAAKACNLNDNCKKLRSSYISICNREISPTERCNRRKCHKALRQFFDRVPSEYTYRMLFCSCQDQACAERRRQTILPSCSYEDKEKPNCLDLRGVCRTDHLCRSRLADFHANCRASYQTVTSCPADNYQACLGSYAGMIGFDMTPNYVDSSPTGIVVSPWCSCRGSGNMEEECEKFLRDFTENPCLRNAIQAFGNGTDVNVSPKGPSFQATQAPRVEKTPSLPDDLSDSTSLGTSVITTCTSVQEQGLKANNSKELSMCFTELTTNIIPGSNKVIKPNSGPSRARPSAALTVLSVLMLKLAL

SEQ ID NO: 5886 - protein, 62 aa, Homo Sapiens
MILANVFCLFFFLGPGPLLRRNGVQREKTCSYIQGRMMPEFSLGYEEGCPTESPWCALAKWV

SEQ ID NO: 5887 - protein, 331 aa, Homo Sapiens
MILANVFCLFFFLGTGADPVVSAKSNHCLDAAKACNLNDNCKKLRSSYISICNREISPTERCNRRKCHKALRQFFDRVPSEYTYRMLFCSCQDQACAERRRQTILPSCSYEDKEKPNCLDLRGVCRTDHLCRSRLADFHANCRASYQTVTSCPADNYQACLGSYAGMIGFDMTPNYVDSSPTGIVVSPWCSCRGSGNMEEECEKFLRDFTENPCLRNAIQAFGNGTDVNVSPKGPSFQATQAPRVEKTPSLPDDLSDSTSLGTSVITTCTSVQEQGLKANNSKELSMCFTELTTNIIPGSNKVIKPNSGPSRARPSAALTVLSVLMLKLAL

SEQ ID NO: 5888 - protein, 74 aa, Homo Sapiens
MLANKECQAALEVLQESPLYDCRCKRGMKKELQCLQIYWSIHLGLTEGEEFYEASPYEPVTSRLSDIFRLASIF

SEQ ID NO: 5889 - protein, 299 aa, Homo Sapiens
MVRCLGPALLLLLLLGSASSVGGNRCVDAAEACTADARCQRLRSEYVAQCLGRAAQGGCPRARCRRALRRFFARGPPALTHALLFCPCAGPACAERRRQTFVPSCAFSGPGPAPPSCLEPLNFCERSRVCRCARAAAGPWRGWGRGLSPAHRPPAAQASPPGLSGLVHPSAQRPRRLPAGPGRPLPARLRGPRGVPAGTAVTPNYVDNVSARVAPWCDCGASGNRREDCEAFRGLFTRNRCLDGAIQAFASGWPPVLLDQLNPQGDPEHSLLQVSSTGRALERRSLLSILPVLALPALL

SEQ ID NO: 5890 - protein, 182 aa, Homo Sapiens
MVRCLGPALLLLLLLGSASSVGGNRCVDAAEACTADARCQRLRSEYVAQCLGRAAQGGCPRARCRRALRRFFARGPPALTHALLFCPCAGPACAERRRQTFVPSCAFSGPGPAPPSCLEPLNFCERSRVCRPRLLAFQVSCTPAPSAPDGCLLDQGARCLRAYAGLVGSPQAPPSPLTTWTT

SEQ ID NO: 5891 - protein, 269 aa, Homo Sapiens
MVRCLGPALLLLLLLGSASSVGGNRCVDAAEACTADARCQRLRSEYVAQCLGRAAQGGCPRARCRRALRRFFARGPPALTHALLFCPCAGPACAERRRQTFVPSCAFSGPGPAPPSCLEPLNFCERSRVCRPRLLAFQVSCTPAPSAPDGCLLDQGARCLRAYAGLVGTAVTPNYVDNVSARVAPWCDCGASGNRREDCEAFRGLFTRNRCLDGAIQAFASGWPPVLLDQLNPQGDPEHSLLQVSSTGRALERRSLLSILPVLALPALL

SEQ ID NO: 5892 - protein, 59 aa, Homo Sapiens
MAATAVAAAVAGTESAQGPPGPAASLELWLNKATDPSMSEQDWSAIQNFCEQVNTDPNG

SEQ ID NO: 5893 - protein, 59 aa, Homo Sapiens; identical to SEQ ID NO: 5892

SEQ ID NO: 5894 - protein, 59 aa, Homo Sapiens; identical to SEQ ID NO: 5892

SEQ ID NO: 5895 - protein, 117 aa, Homo Sapiens
MAATAVAAAVAGTESAQGPPGPAASLELWLNKATDPSMSEQDWSAIQNFCEQVNTDPNGPTHAPWLLAHKIQSPQEKEALYALTPGGEPGTTGFPPSPGGPVSVQVLEMCMNHCGEK

SEQ ID NO: 5896 - protein, 613 aa, Homo Sapiens
MAATAVAAAVAGTESAQGPPGPAASLELWLNKATDPSMSEQDWSAIQNFCEQVNTDPNGPTHAPWLLAHKIQSPQEKEALYALTVLEMCMNHCGEKFHSEVAKFRFLNELIKVLSPKYLGSWATGKVKGRVIEILFSWTVWFPEDIKIRDAYQMLKKQGIIKQDPKLPVDKILPPPSPWPKSSIFDADEEKSKLLTRLLKSNHPEDLQAANRLIKNLVKEEQEKSEKVSKRVSAVEEVRSHVKVLQEMLSMYRRPGQAPPDQEALQVVYERCEKLRPTLFRLASDTTDDDDALAEILQANDLLTQGVLLYKQVMEGRVTFGNRVTSSLGDIPVSRVFQNPAGCMKTCPLIDLEVDNGPAQMGTVVPSLLHQDLAALGISDAPVTGMVSGQNCCEEKRNPSSSTLPGGGVQNPSADRNLLDLLSAQPAPCPLNYVSQKSVPKEVPPGTKSSPGWSWEAGPLAPSPSSQNTPLAQVFVPLESVKPSSLPPLIVYDRNGFRILLHFSQTGAPGHPEVQVLLLTMMSTAPQPVWDIMFQVAVPKSMRVKLQPASSSKLPAFSPLMPPAVISQMLLLDNPHKEPIRLRYKLTFNQGGQPFSEVGEVKDFPDLAVLGAA

SEQ ID NO: 5897 - protein, 223 aa, Homo Sapiens
MAATAVAAAVAGTESAQGPPGPAASLELWLNKATDPSMSEQDWSAIQNFCEQVNTDPNGPTHAPWLLAHKIQSPQEKEALYALTVLEMCMNHCGEKFHSEVAKFRFLNELIKVLSPKYLGSWATGKVKGRVIEILFSWTVWFPEDIKIRDAYQMLKKQGIIKQDPKLPVDKILPPPSPWPKSSIFDADEEKSKLLTRLLKSNHPEDLQAAVLKVAVVYGITPF

SEQ ID NO: 5898 - protein, 49 aa, Homo Sapiens
MAATAVAAAVAGTESAQGPPGPAASLELWLSDHRPKHVGTGLVSYPEFL

SEQ ID NO: 5899 - protein, 125 aa, Homo Sapiens
MVKLPFSLSLQLANSCPSPEDKATDPSMSEQDWSAIQNFCEQVNTDPNGPTHAPWLLAHKIQSPQEKEALYALTVLEMCMNHCGEKFHSEVAKFRFLNELIKVLSPKYLGSWATGKVKGRVIEIL

SEQ ID NO: 5900 - protein, 129 aa, Homo Sapiens
  misc_feature (1)..(1): Xaa can be any naturally occurring amino acid
XAVAGTESAQGPPGPAASLELWLNKATDPSMSEQDWSAIQNFCEQVNTDPNGPTHAPWLLAHKIQSPQEKEALYALTCPHRLEAGLALVPAQSPASDYQPGGEPGTTGFPPSPGGPVSVQVLEMCMNHC

SEQ ID NO: 5901 - protein, 318 aa, Homo Sapiens
MASPGCLLCVLGLLLCGAASLELSRPHGDTAKKPIIGILMQKCRNKVMKNYGRYYIAASYVKYLESAGARVVPVRLDLTEKDYEILFKSINGILFPGGSVDLRRSDYAKVAKIFYNLSIQSFDDGDYFPVWGTCLGFEELSLLISGECLLTATDTVDVAMPLNFTGGQLHSRMFQNFPTELLLSLAVEPLTANFHKWSLSVKNFTMNEKLKKFFNVLTTNTDGKIEFISTMEGYKYPVYGVQWHPEKAPYEWKNLDGISHAPNAVKTAFYLAEFFVNEARKNNHHFKSESEEEKALIYQFSPIYTGNISSFQQCYIFD

SEQ ID NO: 5902 - protein, 30 aa, Homo Sapiens
MKKKLVVLGLLAVVLVLVIVGLCLWLPSAS

SEQ ID NO: 5903 - protein, 37 aa, Homo Sapiens
MKKKLVVLGLLAVVLVLVIVGLCLWLPSASKEPDNHV

SEQ ID NO: 5904 - protein, 68 aa, Homo Sapiens
MKKKLVVLGLLAVVLVLVIVGLCLWLPSASKEPDNHVYTRAAVAADAKQCSKIGRDALRDGGSAVDAA

SEQ ID NO: 5905 - protein, 80 aa, Homo Sapiens
MKKKLVVLGLLAVVLVLVIVGLCLWLPSASKEPDNHVYTRAAVAADAKQCSKIGRDALRDGGSAVDAAIAALLCVGLMNA

SEQ ID NO: 5906 - protein, 98 aa, Homo Sapiens
MKKKLVVLGLLAVVLVLVIVGLCLWLPSASKEPDNHVYTRAAVAADAKQCSKIGRDALRDGGSAVDAAIAALLCVGLMNAHSMGIGGGLFLTIYNSTT

SEQ ID NO: 5907 - protein, 109 aa, Homo Sapiens
MKKKLVVLGLLAVVLVLVIVGLCLWLPSASKEPDNHVYTRAAVAADAKQCSKIGRDALRDGGSAVDAAIAALLCVGLMNAHSMGIGGGLFLTIYNSTTRKAEVINAREV

SEQ ID NO: 5908 - protein, 111 aa, Homo Sapiens
MKKKLVVLGLLAVVLVLVIVGLCLWLPSASKEPDNHVYTRAAVAADAKQCSKIGRDALRDGGSAVDAAIAALLCVGLMNAHSMGIGGGLFLTIYNSTTRKAEVINAREVAP

SEQ ID NO: 5909 - protein, 116 aa, Homo Sapiens
MKKKLVVLGLLAVVLVLVIVGLCLWLPSASKEPDNHVYTRAAVAADAKQCSKIGRDALRDGGSAVDAAIAALLCVGLMNAHSMGIGGGLFLTIYNSTTRKAEVINAREVAPRLAFA

SEQ ID NO: 5910 - protein, 120 aa, Homo Sapiens
MKKKLVVLGLLAVVLVLVIVGLCLWLPSASKEPDNHVYTRAAVAADAKQCSKIGRDALRDGGSAVDAAIAALLCVGLMNAHSMGIGGGLFLTIYNSTTRKAEVINAREVAPRLAFATMFN

SEQ ID NO: 5911 - protein, 126 aa, Homo Sapiens
MKKKLVVLGLLAVVLVLVIVGLCLWLPSASKEPDNHVYTRAAVAADAKQCSKIGRDALRDGGSAVDAAIAALLCVGLMNAHSMGIGGGLFLTIYNSTTRKAEVINAREVAPRLAFATMFNSSEQSQ

SEQ ID NO: 5912 - protein, 126 aa, Homo Sapiens; identical to SEQ ID NO: 5911

SEQ ID NO: 5913 - protein, 127 aa, Homo Sapiens
MKKKLVVLGLLAVVLVLVIVGLCLWLPSASKEPDNHVYTRAAVAADAKQCSKIGRDALRDGGSAVDAAIAALLCVGLMNAHSMGIGGGLFLTIYNSTTRKAEVINAREVAPRLAFATMFNSSEQSQK

SEQ ID NO: 5914 - protein, 174 aa, Homo Sapiens
MKKKLVVLGLLAVVLVLVIVGLCLWLPSASKEPDNHVYTRAAVAADAKQCSKIGRDALRDGGSAVDAAIAALLCVGLMNAHSMGIGGGLFLTIYNSTTRKAEVINAREVAPRLAFATMFNSSEQSQKGGLSVAVPGEIRGYELAHQRHGRLPWARLFQPSIQLARQGFPVGKGL

SEQ ID NO: 5915 - protein, 569 aa, Homo Sapiens
MKKKLVVLGLLAVVLVLVIVGLCLWLPSASKEPDNHVYTRAAVAADAKQCSKIGRDALRDGGSAVDAAIAALLCVGLMNAHSMGIGGGLFLTIYNSTTRKAEVINAREVAPRLAFATMFNSSEQSQKGGLSVAVPGEIRGYELAHQRHGRLPWARLFQPSIQLARQGFPVGKGLAAALENKRTVIEQQPVLCEVFCRDRKVLREGERLTLPQLADTYETLAIEGAQAFYNGSLTAQIVKDIQAAGGIVTAEDLNNYRAELIEHPLNISLGDVVLYMPSAPLSGPVLALILNILKGYNFSRESVESPEQKGLTYHRIVEAFRFAYAKRTLLGDPKFVDVTEVVRNMTSEFFAAQLRAQISDDTTHPISYYKPEFYTPDDGGTAHLSVVAEDGSAVSATSTINLYFGSKVRSPVSGILFNNEMDDFSSPSITNEFGVPPSPANFIQPGKQPLSSMCPTIMVGQDGQVRMVVGAAGGTQITTATALAIIYNLWFGYDVKRAVEEPRLHNQLLPNVTTVERNIDQAVTAALETRHHHTQIASTFIAVVQAIVRTAGGWAAASDSRKGGEPAGY

SEQ ID NO: 5916 - protein, 366 aa, Homo Sapiens
MKKKLVVLGLLAVVLVLVIVGLCLWLPSASKEPDNHVYTRAAVAADAKQCSKIGRDALRDGGSAVDAAIAALLCVGLMNAHSMGIGGGLFLTIYNSTTRKAEVINAREVAPRLAFATMFNSSEQSQKGGLSVAVPGEIRGYELAHQRHGRLPWARLFQPSIQLARQGFPVGKGLAAALENKRTVIEQQPVLCEVFCRDRKVLREGERLTLPQLADTYETLAIEGAQAFYNGSLTAQIVKDIQAAGGIVTAEDLNNYRAELIEHPLNISLGDVVLYMPSAPLSGPVLALILNILKGYNFSRESVESPEQKGLTYHRIVEAFRFAYAKRTLLGDPKFVDVTEASSGVSAGGPQHDLRVLRCPAPGPDL

SEQ ID NO: 5917 - protein, 463 aa, Homo Sapiens
MKKKLVVLGLLAVVLVLVIVGLCLWLPSASKEPDNHVYTRAAVAADAKQCSKIGRDALRDGGSAVDAAIAALLCVGLMNAHSMGIGGGLFLTIYNSTTRKAEVINAREVAPRLAFATMFNSSEQSQKGGLSVAVPGEIRGYELAHQRHGRLPWARLFQPSIQLARQGFPVGKGLAAALENKRTVIEQQPVLCEVFCRDRKVLREGERLTLPQLADTYETLAIEGAQAFYNGSLTAQIVKDIQAAGGIVTAEDLNNYRAELIEHPLNISLGDVVLYMPSAPLSGPVLALILNILKGYNFSRESVESPEQKGLTYHRIVEAFRFAYAKRTLLGDPKFVDVTEVVRNMTSEFFAAQLRAQISDDTTHPISYYKPEFYTPDDGGTAHLSVVAEDGSAVSATSTINLYFGSKVRSPVSGILFNNEMDDFSSPSITNEFGVPPSPANFIQPGKQPLSSMCPTIMVGQDG

SEQ ID NO: 5918 - protein, 569 aa, Homo Sapiens; identical to SEQ ID NO: 5915

SEQ ID NO: 5919 - protein, 569 aa, Homo Sapiens; identical to SEQ ID NO: 5915

SEQ ID NO: 5920 - protein, 218 aa, Homo Sapiens
MTSEFFAAQLRAQISDDTTHPISYYKPEFYTPDDGGTAHLSVVAEDGSAVSATSTINLYFGSKVRSPVSGILFNNEMDDFSSPSITNEFGVPPSPANFIQPGKQPLSSMCPTIMVGQDGQPPSHADHTPMPQAIIYNLWFGYDVKRAVEEPRLHNQLLPNVTTVERNIDQAVTAALETRHHHTQIASTFIAVVQAIVRTAGGWAAASDSRKGGEPAGY

SEQ ID NO: 5921 - protein, 225 aa, Homo Sapiens
MTSEFFAAQLRAQISDDTTHPISYYKPEFYTPDDGGTAHLSVVAEDGSAVSATSTINLYFGSKVRSPVSGILFNNEMDDFSSPSITNEFGVPPSPANFIQPGKQPLSSMCPTIMVGQDGQVRMVVGAAGGTQITTATALAIIYNLWFGYDVKRAVEEPRLHNQLLPNVTTVERNIDQAVTAALETRHHHTQIASTFIAVVQAIVRTAGGWAAASDSRKGGEPAGY

SEQ ID NO: 5922 - protein, 225 aa, Homo Sapiens; identical to SEQ ID NO: 5921

SEQ ID NO: 5923 - protein, 225 aa, Homo Sapiens; identical to SEQ ID NO: 5921

SEQ ID NO: 5924 - protein, 252 aa, Homo Sapiens
MTSEFFAAQLRAQISDDTTHPISYYKPEFYTPDDGGTAHLSVVAEDGSAVSATSTINLYFGSKVRSPVSGILFNNEMDDFSSPSITNEFGVPPSPANFIQPGKQPLSSMCPTIMVGQDGQVRMVVGAAGGTQITTATALVCVTPFLPGRAHPAQPPSHADHTPMPQAIIYNLWFGYDVKRAVEEPRLHNQLLPNVTTVERNIDQAVTAALETRHHHTQIASTFIAVVQAIVRTAGGWAAASDSRKGGEPAGY

SEQ ID NO: 5925 - protein, 554 aa, Homo Sapiens
MARGYGATVSLVLLGLGLALAVIVLAVVLSRHQAPCGPQAFAHAAVAADSKVCSDIGRAILQQQGSPVDATIAALVCTSVVNPQSMGLGGGVIFTIYNVTTGAQWIGVPGELRGYAEAHRRHGRLPWAQLFQPTIALLRGGHVVAPVLSRFLHNSILRPSLQASTLRQLFFNGTEPLRPQDPLPWPALATTLETVATEGVEVFYTGRLGQMLVEDIAKEGSQLTLQDLAKFQPEVVDALEVPLGDYTLYSPPPPAGGAILSFILNVLRGFNFSTESMARPEGRVNVYHHLVETLKFAKGQRWRLGDPRSHPKLQNASRDLLGETLAQLIRQQIDGRGDHQLSHYSLAEAWGHGTGTSHVSVLGEDGSAVAATSTINTPFGAMVYSPRTGIILNNELLDLCERCPRGSGTTPSPVSGDRVGGAPGRCWPPVPGERSPSSMVPSILINKAQGSKLVIGGAGGELIISAVAQAIMSKLWLGFDLRAAIAAPILHVNSKGCVEYEPNFSQEVQRGLQDRGQNQTQRPFFLNVVQAVSQEGACVYAVSDLRKSGEAAGY

SEQ ID NO: 5926 - protein, 586 aa, Homo Sapiens
MARGYGATVSLVLLGLGLALAVIVLAVVLSRHQAPCGPQAFAHAAVAADSKVCSDIGRAILQQQGSPVDATIAALVCTSVVNPQSMGLGGGVIFTIYNVTTGKVEVINARETVPASHAPSLLDQCAQALPLGTGAQWIGVPGELRGYAEAHRRHGRLPWAQLFQPTIALLRGGHVVAPVLSRFLHNSILRPSLQASTLRQLFFNGTEPLRPQDPLPWPALATTLETVATEGVEVFYTGRLGQMLVEDIAKEGSQLTLQDLAKFQPEVVDALEVPLGDYTLYSPPPPAGGAILSFILNVLRGFNFSTESMARPEGRVNVYHHLVETLKFAKGQRWRLGDPRSHPKLQNASRDLLGETLAQLIRQQIDGRGDHQLSHYSLAEAWGHGTGTSHVSVLGEDGSAVAATSTINTPFGAMVYSPRTGIILNNELLDLCERCPRGSGTTPSPVSGDRVGGAPGRCWPPVPGERSPSSMVPSILINKAQGSKLVIGGAGGELIISAVAQAIMSKLWLGFDLRAAIAAPILHVNSKGCVEYEPNFSQEVQRGLQDRGQNQTQRPFFLNVVQAVSQEGACVYAVSDLRKSGEAAGY

SEQ ID NO: 5927 - protein, 587 aa, Homo Sapiens
MARGYGATVSLVLLGLGLALAVIVLAVVLSRHQAPCGPQAFAHAAVAADSKVCSDIGRAILQQQGSPVDATIAALVCTSVVNPQSMGLGGGVIFTIYNVTTGKVEVINARETVPASHAPSLLDQCAQALPLGTGAQWIGVPGELRGYAEAHRRHGRLPWAQLFQPTIALLRGGHVVAPVLSRFLHNSILRPSLQASTLRQLFFNGTEPLRPQDPLPWPALATTLETVATEGVEVFYTGRLGQMLVEDIAKEGSQLTLQDLAKFQPEVVDALEVPLGDYTLYSPPPPAGGAILSFILNVLRGFNFSTESMARPEGRVNVYHHLVETLKFAKGQRWRLGDPRSHPKLQNASRDLLGETLAQLIRQQIDGRGDHQLSHYSLAEAWGHGTGTSHVSVLGEDGSAVAATSTINTPFGAMVYSPRTGIILNNELLDLCERCPRGSGTTPSPAVSGDRVGGAPGRCWPPVPGERSPSSMVPSILINKAQGSKLVIGGAGGELIISAVAQAIMSKLWLGFDLRAAIAAPILHVNSKGCVEYEPNFSQEVQRGLQDRGQNQTQRPFFLNVVQAVSQEGACVYAVSDLRKSGEAAGY

SEQ ID NO: 5928 - protein, 73 aa, Homo Sapiens
MARGYGATVSLVLLGLGLALAVIVLAVVLSRHQAPCGPQAFAHAAVAADSKVCSDIGRGPVDRGARGAPWLCR

SEQ ID NO: 5929 - protein, 220 aa, Homo Sapiens
  misc_feature (1)..(1): Xaa can be any naturally occurring amino acid
XSAVAATSTINTPFGAMVYSPRTGIILNNELLDLCERCPRGSGTTPSPVSGDRVGGAPGRCWPPVPGERSPSSMVPSILINKAQGSKLVIGGAGGELIISAVAQAIMSKLWLGFDLRAAIAAPILHVNSKGCVEYEPNFSQKQDLAALPRLVSNSWPQVILLPQPPKLLALQEVQRGLQDRGQNQTQRPFFLNVVQAVSQEGACVYAVSDLRKSGEAAGY

SEQ ID NO: 5930 - protein, 30 aa, Homo Sapiens
MATEAGRWQPPDWADLQADLQQVRHKLTQR

SEQ ID NO: 5931 - protein, 217 aa, Homo Sapiens
MATGSRTSLLLAFGLLCLPWLQEGSAFPTIPLSRLFDNAMLRAHRLHQLAFDTYQEFEEAYIPKEQKYSFLQNPQTSLCFSESIPTPSNREETQQKSNLELLRISLLLIQSWLEPVQFLRSVFANSLVYGASDSNVYDLLKDLEEGIQTLMGRLEDGSPRTGQIFKQTYSKFDTNSHNDDALLKNYGLLYCFRKDMDKVETFLRIVQCRSVEGSCGF

SEQ ID NO: 5932 - protein, 177 aa, Homo Sapiens
MATGSRTSLLLAFGLLCLPWLQEGSAFPTIPLSRLFDNAMLRAHRLHQLAFDTYQEFNLELLRISLLLIQSWLEPVQFLRSVFANSLVYGASDSNVYDLLKDLEEGIQTLMGRLEDGSPRTGQIFKQTYSKFDTNSHNDDALLKNYGLLYCFRKDMDKVETFLRIVQCRSVEGSCGF

SEQ ID NO: 5933 - protein, 202 aa, Homo Sapiens
MATGSRTSLLLAFGLLCLPWLQEGSAFPTIPLSRLFDNAMLRAHRLHQLAFDTYQEFNPQTSLCFSESIPTPSNREETQQKSNLELLRISLLLIQSWLEPVQFLRSVFANSLVYGASDSNVYDLLKDLEEGIQTLMGRLEDGSPRTGQIFKQTYSKFDTNSHNDDALLKNYGLLYCFRKDMDKVETFLRIVQCRSVEGSCGF

SEQ ID NO: 5934 - protein, 122 aa, Homo Sapiens
MATGSRTSLLLAFGLLCLPWLQEGSAFPTIPLSRLFDNAMLRAHRLHQLAFDTYQEFRLEDGSPRTGQIFKQTYSKFDTNSHNDDALLKNYGLLYCFRKDMDKVETFLRIVQCRSVEGSCGF

SEQ ID NO: 5935 - protein, 245 aa, Homo Sapiens
MAAGSRTSLLLAFGLLCLSWLQEGSAFPTIPLSRLFDNAMLRARRLYQLAYDTYQEFEEAYILKEQKYSFLQNPQTSLCFSESIPTPSNRVKTQQKSNLELLRISLLLIQSWLEPVQLLRSVFANSLVYGASDSNVYRHLKDLEEGIQTLIGWKMAAPGLGRSSISPTASLTQNRTTMTHCSRTTGCSTASGRTWTRSRHSCASCSAALWRAAVASSCPGGIPVTPPQCLSWSWKVLLQCPPALS

SEQ ID NO: 5936 - protein, 217 aa, Homo Sapiens
MAAGSRTSLLLAFGLLCLSWLQEGSAFPTIPLSRLFDNAMLRARRLYQLAYDTYQEFEEAYILKEQKYSFLQNPQTSLCFSESIPTPSNRVKTQQKSNLELLRISLLLIQSWLEPVQLLRSVFANSLVYGASDSNVYRHLKDLEEGIQTLMWRLEDGSPRTGQIFNQSYSKFDTKSHNDDALLKNYGLLYCFRKDMDKVETFLRIVQCRSVEGSCGF

SEQ ID NO: 5937 - protein, 256 aa, Homo Sapiens
MAAGSRTSLLLAFGLLCLSWLQEGSAFPTIPLSRLFDNAMLRARRLYQLAYDTYQEFEEAYILKEQKYSFLQNPQTSLCFSESIPTPSNRVKTQQKSNLELLRISLLLIQSWLEPVQLLRSVFANSLVYGASDSNVYRHLKDLEEGIQTLMWVRVAPGIPNPGAPLASRDWGEKHCCPLFSSQALTQENSPYSSFPLVNPPGLSLQPGGEGGKWMNERGREQCPSAWPLLLFLHFAEAGRWQPPDWADLQSVLQQV

SEQ ID NO: 5938 - protein, 177 aa, Homo Sapiens
MAAGSRTSLLLAFGLLCLSWLQEGSAFPTIPLSRLFDNAMLRARRLYQLAYDTYQEFNLELLRISLLLIQSWLEPVQLLRSVFANSLVYGASDSNVYRHLKDLEEGIQTLMWRLEDGSPRTGQIFNQSYSKFDTKSHNDDALLKNYGLLYCFRKDMDKVETFLRIVQCRSVEGSCGF

SEQ ID NO: 5939 - protein, 202 aa, Homo Sapiens
MAAGSRTSLLLAFGLLCLSWLQEGSAFPTIPLSRLFDNAMLRARRLYQLAYDTYQEFNPQTSLCFSESIPTPSNRVKTQQKSNLELLRISLLLIQSWLEPVQLLRSVFANSLVYGASDSNVYRHLKDLEEGIQTLMWRLEDGSPRTGQIFNQSYSKFDTKSHNDDALLKNYGLLYCFRKDMDKVETFLRIVQCRSVEGSCGF

SEQ ID NO: 5940 - protein, 130 aa, Homo Sapiens
MLLWPLLLLLLLLPTLALLRQQRSQDARLSWLAGLQHRVAWGALVWAATWQRRRLEQSTLHVHQSQQQALRWCLQGAQRPHCSLRRSTDISTFRNHLPLTKASQTQQEDSGEQPLPPTSNQDLGEASLQA

SEQ ID NO: 5941 - protein, 146 aa, Homo Sapiens
MLLWPLLLLLLLLPTLALLRQQRSQDARLSWLAGLQHRVAWGALVWAATWQRRRLEQSTLHVHQSQQQALRWCLQGAQRPHCSLRRSTDISTFRNHLPLTKASQTQQEDSGEQPLPPTSNQDLGEASLQATLLGLAALNKAYPEVL

SEQ ID NO: 5942 - protein, 530 aa, Homo Sapiens
MLLWPLLLLLLLLPTLALLRQQRSQDARLSWLAGLQHRVAWGALVWAATWQRRRLEQSTLHVHQSQQQALRWCLQGAQRPHCSLRRSTDISTFRNHLPLTKASQTQQEDSGEQPLPPTSNQDLGEASLQATLLGLAALNKAYPEVLAQGRTARVTLTSPWPRPLPWPGNTLGQVGTPGTKDPRALLLDALRSPGLRALEAGTAVELLDVFLGLETDGEELAGAIAAGNPGAPLRERAAELREALEQGPRGLALRLWPKLQVVVTLDAGGQAEAVAALGALWCQGLAFFSPAYAASGGVLGLNLQPEQPHGLYLLPPGAPFIELLPVKEGTQEEAASTLLLAEAQQGKEYELVLTDRASLTRCRLGDVVRVVGAYNQCPVVRFICRLDQTLSVRGEDIGEDLFSEALGRAVGQWAGAKLLDHGCVESSILDSSAGSAPHYEVFVALRGLRNLSEENRDKLDHCLQEASPRYKSLRFWGSVGPARVHLVGQGAFRALRAALAACPSSPFPPAMPRVLRHRHLAQCLQERVVS

SEQ ID NO: 5943 - protein, 474 aa, Homo Sapiens
MLLWPLLLLLLLLPTLALLRQQRSQDARLSWLAGLQHRVAWGALVWAATWQRRRLEQSTLHVHQSQQQALRWCLQGAQRPHCSLRRSTDISTFRNHLPLTKASQTQQEDSGEQPLPPTSNQDLGEASLQATLLGLAALNKAYPEVLAQGRTARVTLTSPWPRPLPWPGNTLGQVGTPGTKDPRALLLDALRSPGLRALEAGTAVELLDVFLGLETDGEELAGAIAAGNPGAPLRERAAELREALEQGPRGLALRLWPKLQVVVTLDAGGQAEAVAALGALWCQGLAFFSPAYAASGGVLGLNLQPEQPHGLYLLPPGAPFIELLPVKEGTQEEAASTLLLAEAQQGKEYELVLTDRASLTRCRLGDVVRVVGAYNQCPVVRFICRLDQTLSVRGEDIGEDLFSEALGRAVGQWAGAKLLDHGCVESSILEWGRTDRAEDTRLGSCPFTGSMCAHGVYSQIPLRALLPTTRCLWR

SEQ ID NO: 5944 - protein, 474 aa, Homo Sapiens; identical to SEQ ID NO: 5943

SEQ ID NO: 5945 - protein, 530 aa, Homo Sapiens; identical to SEQ ID NO: 5942

SEQ ID NO: 5946 - protein, 479 aa, Homo Sapiens
MLLWPLLLLLLLLPTLALLRQQRSQDARLSWLAGLQHRVAWGALVWAATWQRRRLEQSTLHVHQSQQQALRWCLQGAQRPHCSLRRSTDISTFRNHLPLTKASQTQQEDSGEQPLPPTSNQDLGEASLQATLLGLAALNKAYPEVLAQGRTARVTLTSPWPRPLPWPGNTLGQVGTPGTKDPRALLLDALRSPGLRALEAGTAVELLDVFLGLETDGEELAGAIAAGNPGAPLRERAAELREALEQGPRGLALRLWPKLQVVVTLDAGGQAEAVAALGALWCQGLAFFSPAYAASGGVLGLNLQPEQPHGLYLLPPGAPFIELLPVKEGTQEEAASTLLLAEAQQGKEYELVLTDRASLTRCRLGDVVRVVGAYNQCPVVRFICRLDQTLSVRGEDIGEDLFSEALGRAVGQWAGAKLLDHGCVESSILDSSAGSAPHYEVFVALRGLRNLSEENRDKILASGSALGKREWTPAQPFPH

SEQ ID NO: 5947 - protein, 112 aa, Homo Sapiens
MLLWPLLLLLLLLPTLALLRQQRSQDARLSWLAGLQHRVAWGALVWAATWQRRRLEQSTLHVHQSQQQALRWCLQGAQRPHCSLRRSTGSHQSCLKLLGNWLPEAFLLSLGL

SEQ ID NO: 5948 - protein, 107 aa, Homo Sapiens
MPLWVFFFVILTLSNSSHCSPPPPLTLRMRRYADAIFTNSYRKVLGQLSARKLLQDIMSRQQGESNQERGARARLGRQVDSMWAEQKQMELESILVALLQKHRNSQG

SEQ ID NO: 5949 - protein, 108 aa, Homo Sapiens
MPLWVFFFVILTLSNSSHCSPPPPLTLRMRRYADAIFTNSYRKVLGQLSARKLLQDIMSRQQGESNQERGARARLGRQVDSMWAEQKQMELESILVALLQKHSRNSQG

SEQ ID NO: 5950 - protein, 108 aa, Homo Sapiens; identical to SEQ ID NO: 5949

SEQ ID NO: 5951 - protein, 207 aa, Homo Sapiens
MAMGEGAGQVGERGGSMQGLCGRLPFRHHDQLQLAVGRSRLPELPPGLHLPQLKESLLVAGSRWLGAARALHWHVGELQTGLRGHRVLGPGRHLPLLVDHQRAHCPLGRGELWAFSQYYPHPGEETGASSGQPPYPVSVLASLQVDTFPDPTLWNSLHHLQLPARQCWPGHPPPPGAGTGFLPGIRRLGLRCRFLGRSFDCQPPRGS

SEQ ID NO: 5952 - protein, 423 aa, Homo Sapiens
MDRRMWGAHVFCVLSPLPTVLGHMHPECDFITQLREDESACLQAAEEMPNTTLGCPATWDGLLCWPTAGSGEWVTLPCPDFFSHFSSESGAVKRDCTITGWSEPFPPYPVACPVPLELLAEEESYFSTVKIIYTVGHSISIVALFVAITILVALRRLHCPRNYVHTQLFTTFILKAGAVFLKDAALFHSDDTDHCSFSTVLCKVSVAASHFATMTNFSWLLAEAVYLNCLLASTSPSSRRAFWWLVLAGWGLPVLFTGTWVSCKLAFEDIACWDLDDTSPYWWIIKGPIVLSVGVNFGLFLNIIRILVRKLEPAQGSLHTQSQYWRLSKSTLFLIPLFGIHYIIFNFLPDNAGLGIRLPLELGLGSFQGFIVAILYCFLNQEVRTEISRKWHGHDPELLPAWRTRAKWTTPSRSAAKVLTSMC

SEQ ID NO: 5953 - protein, 151 aa, Homo Sapiens
MLPFSTATTLTTAASPLAARALHWHVGELQTGLRGHRVLGPGRHLPLLVDHQRAHCPLGRGELWAFSQYYPHPGEETGASSGQPPYPVSVLASLQVDTFPDPTLWNSLHHLQLPARQCWPGHPPPPGAGTGFLPGLHCCHPLLLPQPRGED

SEQ ID NO: 5954 - protein, 145 aa, Homo Sapiens
MVPGTPSPLLGRGKELWLESLACLPGAVKRDCTITGWSEPFPPYPVACPVPLELLAEEESYFSTVKIIYTVGHSISIVALFVAITILVALRRLHCPRNYVHTQLFTTFILKAGAVFLKDAALFHSDDTDHCSFSTGCPCSSLARG

SEQ ID NO: 5955 - protein, 359 aa, Homo Sapiens
MVPGTPSPLLGRGKELWLESLACLPGAVKRDCTITGWSEPFPPYPVACPVPLELLAEEESYFSTVKIIYTVGHSISIVALFVAITILVALRRLHCPRNYVHTQLFTTFILKAGAVFLKDAALFHSDDTDHCSFSTVLCKVSVAASHFATMTNFSWLLAEAVYLNCLLASTSPSSRRAFWWLVLAGWGLPVLFTGTWVSCKLAFEDIACWDLDDTSPYWWIIKGPIVLSVGVNFGLFLNIIRILVRKLEPAQGSLHTQSQYWRLSKSTLFLIPLFGIHYIIFNFLPDNAGLGIRLPLELGLGSFQGFIVAILYCFLNQEVRTEISRKWHGHDPELLPAWRTRAKWTTPSRSAAKVLTSMC

SEQ ID NO: 5956 - protein, 68 aa, Homo Sapiens
MVPGTPSPLLGRGKELWLESLACLPGAVKRDCTITGWSEPFPPYPVACPVPLELLAEEGCPCSSLARG

SEQ ID NO: 5957 - protein, 66 aa, Homo Sapiens
MFTCWWSYLRSTLAAVPGEASRVQFNAPFDVGIKLSGVQYQQHSQALGKFLQDILWEEAKEAPADK

SEQ ID NO: 5958 - protein, 105 aa, Homo Sapiens
MFTCWWSYLRSTLAAVPGEASRVQQRKESKKPPAKLQPRALAGWLRPEDGGQAEGAEDELEVRFNAPFDVGIKLSGVQYQQHSQALGKFLQDILWEEAKEAPADK

SEQ ID NO: 5959 - protein, 104 aa, Homo Sapiens
MFTCWWSYLRSTLAAVPGEASRVQRKESKKPPAKLQPRALAGWLRPEDGGQAEGAEDELEVRFNAPFDVGIKLSGVQYQQHSQALGKFLQDILWEEAKEAPADK

SEQ ID NO: 5960 - protein, 40 aa, Homo Sapiens
MFTCWWSYLRSTLAAVPGEASRVQRPQPTSDRPQALLTSL

SEQ ID NO: 5961 - protein, 33 aa, Homo Sapiens
MPSPGTVCSLLLLGMLWLDLAMAGSSFLSPEHQ

SEQ ID NO: 5962 - protein, 117 aa, Homo Sapiens
MPSPGTVCSLLLLGMLWLDLAMAGSSFLSPEHQRVQQRKESKKPPAKLQPRALAGWLRPEDGGQAEGAEDELEVRFNAPFDVGIKLSGVQYQQHSQALGKFLQDILWEEAKEAPADK

SEQ ID NO: 5963 - protein, 117 aa, Homo Sapiens; identical to SEQ ID NO: 5962

SEQ ID NO: 5964 - protein, 117 aa, Homo Sapiens; identical to SEQ ID NO: 5962

SEQ ID NO: 5965 - protein, 91 aa, Homo Sapiens
MPSPGTVCSLLLLGMLWLDLAMAGSSFLSPEHQRVQQRKESKKPPAKLQPRALAGWLRPEDGGQAEGAEDELEVRRPQPTSDRPQALLTSL

SEQ ID NO: 5966 - protein, 116 aa, Homo Sapiens
MPSPGTVCSLLLLGMLWLDLAMAGSSFLSPEHQRVQRKESKKPPAKLQPRALAGWLRPEDGGQAEGAEDELEVRFNAPFDVGIKLSGVQYQQHSQALGKFLQDILWEEAKEAPADK

SEQ ID NO: 5967 - protein, 116 aa, Homo Sapiens; identical to SEQ ID NO: 5966

SEQ ID NO: 5968 - protein, 48 aa, Homo Sapiens
MAWFALYLLSLLWATAGTSTQTQSSCCEYDVFPRRSGKQLPWGRGCDL

SEQ ID NO: 5969 - protein, 417 aa, Homo Sapiens
MAWFALYLLSLLWATAGTSTQTQSSCSVPSAQEPLVNGIQVLMENSVTSSAYPNPSILIAMNLAGAYNLKAQKLLTYQLMSSDNNDLTIGQLGLTIMALTSSCRDPGDKVSILQRQMENWAPSSPNAEASAFYGPSLAILALCQKNSEATLPIAVRFAKTLLANSSPFNVDTGAMATLALTCMYNKIPVGSEEGYRSLFGQVLKDIVEKISMKIKDNGIIGDIYSTGLAMQALSVTPEPSKKEWNCKKTTDMILNEIKQGKFHNPMSIAQILPSLKGKTYLDVPQVTCSPDHEVQPTLPSNPGPGPTSASNITVIYTINNQLRGVELLFNETINVSVKSGSVLLVVLEEAQRKNPMFKFETTMTSWGLVVSSINNIAENVNHKTYWQFLSGVTPLNEGVADYIPFNHEHITANFTQY

SEQ ID NO: 5970 - protein, 153 aa, Homo Sapiens
MVATKTFALLLLSLFLAVGLGEKKEGHFSALPSLPVGSHAKVSSPQPRGPRYAEGTFISDYSIAMDKIHQQDFVNWLLAQKGKKNDWKHNITQREARALELASQANRKEEEAVEPQSSPAKNPSDEDLLRDLLIQELLACLLDQTNLCRLRSR

SEQ ID NO: 5971 - protein, 199 aa, Homo Sapiens
MLAYSSVHCFREDKMKFTIVFAGLLGVFLAPALANYNINVNDDNNNAGSGQQSVSVNNEHNVANVDNNNGWDSWNSIWDYGNGFAATRLFQKKTCIVHKMNKEVMPSIQSLDALVKEKKLQGKGPGGPPPKGLMYSVNPNKVDDLSKFGKNIANMCRGIPTYMAEEMQEASLFFYSGTCYTTSVLWIVDISFCGDTVEN

SEQ ID NO: 5972 - protein, 184 aa, Homo Sapiens
MKILVAFLVVLTIFGIQSHGYEVFNIISPSNNGGNVQETVTIDNEKNTAIINIHAGSCSSTTIFDYKHGYIASRVLSRRACFILKMDHQNIPPLNNLQWYIYEKQALDNMFSSKYTWVKYNPLESLIKDVDWFLLGSPIEKLCKHIPLYKGEVVENTHNVGAGGCAKAGLLGILGISICADIHV

SEQ ID NO: 5973 - protein, 161 aa, Homo Sapiens
MKILVAFLVVLTIFGIQSHGYEVFNIISPSNNGGNVQETVTIDNEKNTAIINIHAGSCSSTTIFDYKHGYIASRVLSRRACFILKMDHQNIPPLNNLQWYIYEKQALDNMFSSKYTWVKYNPLESLIKDVDWFLLGSPIEKLCKHIPLYKGEVVENTREYQ

SEQ ID NO: 5974 - protein, 429 aa, Homo Sapiens
MQLRNPELHLGCALALRFLALVSWDIPGARALDNGLARTPTMGWLHWERFMCNLDCQEEPDSCISEKLFMEMAELMVSEGWKDAGYEYLCIDDCWMAPQRDSEGRLQADPQRFPHGIRQLANYVHSKGLKLGIYADVGNKTCAGFPGSFGYYDIDAQTFADWGVDLLKFDGCYCDSLENLADGYKHMSLALNRTGRSIVYSCEWPLYMWPFQKPNYTEIRQYCNHWRNFADIDDSWKSIKSILDWTSFNQERIVDVAGPGGWNDPDMLVIGNFGLSWNQQVTQMALWAIMAAPLFMSNDLRHISPQAKALLQDKDVIAINQDPLGKQGYQLRQGDNFEVWERPLSGLAWAVAMINRQEIGGPRSYTIAVASLGKGVACNPACFITQLLPVKRKLGFYEWTSRLRSHINPTGTVLLQLENTMQMSLKDLL

SEQ ID NO: 5975 - protein, 222 aa, Homo Sapiens
MQLRNPELHLGCALALRFLALVSWDIPGARALDNGLARTPTMGWLHWERFMCNLDCQEEPDSCISEKLFMEMAELMVSEGWKDAGYEYLCIDDCWMAPQRDSEGRLQADPQRFPHGIRQLANYVHSKGLKLGIYADVGNKTCAGFPGSFGYYDIDAQTFADWGVDLLKFDGCYCDSLENLADGYKHMSLALNRTGRSIVYSCEWPLYMWPFQKSSTLFGSIC

SEQ ID NO: 5976 - protein, 84 aa, Homo Sapiens
MFEIDYSRDSFLKDGQPFRYISGSIHYSRVPRFYWKDRLLKMKMAGLNAIQTLPGSCGQVVGSPSAQDEASPLSEWRASYNSAG

SEQ ID NO: 5977 - protein, 102 aa, Homo Sapiens
MFEIDYSRDSFLKDGQPFRYISGSIHYSRVPRFYWKDRLLKMKMAGLNAIQTYVPWNFHEPWPGQYQFSEDHDVEYFLRLAHELGLLVILRPGPYICAEWEM

SEQ ID NO: 5978 - protein, 647 aa, Homo Sapiens
MFEIDYSRDSFLKDGQPFRYISGSIHYSRVPRFYWKDRLLKMKMAGLNAIQTYVPWNFHEPWPGQYQFSEDHDVEYFLRLAHELGLLVILRPGPYICAEWEMGGLPAWLLEKESILLRSSDPDYLAAVDKWLGVLLPKMKPLLYQNGGPVITVQVENEYGSYFACDFDYLRFLQKRFRHHLGDDVVLFTTDGAHKTFLKCGALQGLYTTVDFGTGSNITDAFLSQRKCEPKGPLINSEFYTGWLDHWGQPHSTIKTEAVASSLYDILARGASVNLYMFIGGTNFAYWNGANSPYAAQPTSYDYDAPLSEAGDLTEKYFALRNIIQKFEKVPEGPIPPSTPKFAYGKVTLEKLKTVGAALDILCPSGPIKSLYPLTFIQVKQHYGFVLYRTTLPQDCSNPAPLSSPLNGVHDRAYVAVDGIPQGVLERNNVITLNITGKAGATLDLLVENMGRVNYGAYINDFKGLVSNLTLSSNILTDWTIFPLDTEDAVCSHLGGWGHRDSGHHDEAWAHNSSNYTLPAFYMGNFSIPSGIPDLPQDTFIQFPGWTKGQVWINGFNLGRYWPARGPQLTLFVPQHILMTSAPNTITVLELEWAPCSSDDPELCAVTFVDRPVIGSSVTYDHPSKPVEKRLMPPPPQKNKDSWLDHV

SEQ ID NO: 5979 - protein, 114 aa, Homo Sapiens
MGGLPAWLLEKESILLRSSDPDYLAAVDKWLGVLLPKMKPLLYQNGGPVITVQVENEYGSYFACDFDYLRFLQKRFRHHLGDDVVLFTTDGAHKTFLKCGALQGLYTTVDFGTG

SEQ ID NO: 5980 - protein, 41 aa, Homo Sapiens
MPGFLVRILPLLLVLLLLGPTRGLRITWQLWTSGWESFCPR

SEQ ID NO: 5981 - protein, 546 aa, Homo Sapiens
MPGFLVRILPLLLVLLLLGPTRGLRNATQRMFEIDYSRDSFLKDGQPFRYISGSIHYSRVPRFYWKDRLLKMKMAGLNAIQTLPGSCGQVVGSPSAQDEASPLSEWRASYNSAGSNITDAFLSQRKCEPKGPLINSEFYTGWLDHWGQPHSTIKTEAVASSLYDILARGASVNLYMFIGGTNFAYWNGANSPYAAQPTSYDYDAPLSEAGDLTEKYFALRNIIQKFEKVPEGPIPPSTPKFAYGKVTLEKLKTVGAALDILCPSGPIKSLYPLTFIQVKQHYGFVLYRTTLPQDCSNPAPLSSPLNGVHDRAYVAVDGIPQGVLERNNVITLNITGKAGATLDLLVENMGRVNYGAYINDFKGLVSNLTLSSNILTDWTIFPLDTEDAVCSHLGGWGHRDSGHHDEAWAHNSSNYTLPAFYMGNFSIPSGIPDLPQDTFIQFPGWTKGQVWINGFNLGRYWPARGPQLTLFVPQHILMTSAPNTITVLELEWAPCSSDDPELCAVTFVDRPVIGSSVTYDHPSKPVEKRLMPPPPQKNKDSWLDHV

SEQ ID NO: 5982 - protein, 677 aa, Homo Sapiens
MPGFLVRILPLLLVLLLLGPTRGLRNATQRMFEIDYSRDSFLKDGQPFRYISGSIHYSRVPRFYWKDRLLKMKMAGLNAIQTYVPWNFHEPWPGQYQFSEDHDVEYFLRLAHELGLLVILRPGPYICAEWEMGGLPAWLLEKESILLRSSDPDYLAAVDKWLGVLLPKMKPLLYQNGGPVITVQVENEYGSYFACDFDYLRFLQKRFRHHLGDDVVLFTTDGAHKTFLKCGALQGLYTTVDFGTGSNITDAFLSQRKCEPKGPLINSEFYTGWLDHWGQPHSTIKTEAVASSLYDILARGASVNLYMFIGGTNFAYWNGANSPYAAQPTSYDYDAPLSEAGDLTEKYFALRNIIQKFEKVPEGPIPPSTPKFAYGKVTLEKLKTVGAALDILCPSGPIKSLYPLTFIQVKQHYGFVLYRTTLPQDCSNPAPLSSPLNGVHDRAYVAVDGIPQGVLERNNVITLNITGKAGATLDLLVENMGRVNYGAYINDFKGLVSNLTLSSNILTDWTIFPLDTEDAVCSHLGGWGHRDSGHHDEAWAHNSSNYTLPAFYMGNFSIPSGIPDLPQDTFIQFPGWTKGQVWINGFNLGRYWPARGPQLTLFVPQHILMTSAPNTITVLELEWAPCSSDDPELCAVTFVDRPVIGSSVTYDHPSKPVEKRLMPPPPQKNKDSWLDHV

SEQ ID NO: 5983 - protein, 147 aa, Homo Sapiens
MPGFLVRILPLLLVLLLLGPTRGLRSRFLPWAFHLPRQAPKSQLPLHKRGTKTAPNEHASSNRSGRRRRRQQWNATQRMFEIDYSRDSFLKDGQPFRYISGSIHYSRVPRFYWKDRLLKMKMAGLNAIQTYVPWNFHEPWPGQYQFS

SEQ ID NO: 5984 - protein, 185 aa, Homo Sapiens
MPGFLVRILPLLLVLLLLGPTRGLRVENEYGSYFACDFDYLRFLQKRFRHHLGDDVVLFTTDGAHKTFLKCGALQGLYTTVDFGTGSNITDAFLSQRKCEPKGPLINSEFYTGWLDHWGQPHSTIKTEAVASSLYDILARGASVNLYMFIGGTNFAYWNGANSPYAAQPTSYDYDAPLSEAGDLT

SEQ ID NO: 5985 - protein, 9 aa, Homo Sapiens
MAPKKLSCL

SEQ ID NO: 5986 - protein, 26 aa, Homo Sapiens
MAPKKLSCLRSLLLPLSLTLLLPQAD

SEQ ID NO: 5987 - protein, 114 aa, Homo Sapiens
MAPKKLSCLRSLLLPLSLTLLLPQADTRSFVVDRGHDRFLLDGAPFRYVSGSLHYFRVPRVLWADRLLKMRWSGLNAIQFYVPWNYHEPQPGVYNFNGSRDLIAFLNEAALANL

SEQ ID NO: 5988 - protein, 564 aa, Homo Sapiens
MAPKKLSCLRSLLLPLSLTLLLPQADTRSFVVDRGHDRFLLDGAPFRYVSGSLHYFRVPRVLWADRLLKMRWSGLNAIQFYVPWNYHEPQPGVYNFNGSRDLIAFLNEAALANLLVILRPGPYICAEWEMGGLPSWLLRKPEIHLRTSDPADNMTKIFTLLRKYEPHGPLVNSEYYTGWLDYWGQNHSTRSVSAVTKGLENMLKLGASVNMYMFHGGTNFGYWNGADKKGRFLPITTSYDYDAPISEAGDPTPKLFALRDVISKFQEVPLGPLPPPSPKMMLGPVTLHLVGHLLAFLDLLCPRGPIHSILPMTFEAVKQDHGFMLYRTYMTHTIFEPTPFWVPNNGVHDRAYVMVDGVFQGVVERNMRDKLFLTGKLGSKLDILVENMGRLSFGSNSSDFKGLLKPPILGQTILTQWMMFPLKIDNLVKWWFPLQLPKWPYPQAPSGPTFYSKTFPILGSVGDTFLYLPGWTKGQVWINGFNLGRYWTKQGPQQTLYVPRFLLFPRGALNKITLLELEDVPLQPQVQFLDKPILNSTSTLHRTHINSLSADTLSASEPMELSGH

SEQ ID NO: 5989 - protein, 654 aa, Homo Sapiens
MAPKKLSCLRSLLLPLSLTLLLPQADTRSFVVDRGHDRFLLDGAPFRYVSGSLHYFRVPRVLWADRLLKMRWSGLNAIQFYVPWNYHEPQPGVYNFNGSRDLIAFLNEAALANLLVILRPGPYICAEWEMGGLPSWLLRKPEIHLRTSDPDFLAAVDSWFKVLLPKIYPWLYHNGGNIISIQVENEYGSYRACDFSYMRHLAGLFRALLGEKILLFTTDGPEGLKCGSLRGLYTTVDFGPADNMTKIFTLLRKYEPHGPLVNSEYYTGWLDYWGQNHSTRSVSAVTKGLENMLKLGASVNMYMFHGGTNFGYWNGADKKGRFLPITTSYDYDAPISEAGDPTPKLFALRDVISKFQEVPLGPLPPPSPKMMLGPVTLHLVGHLLAFLDLLCPRGPIHSILPMTFEAVKQDHGFMLYRTYMTHTIFEPTPFWVPNNGVHDRAYVMVDGVFQGVVERNMRDKLFLTGKLGSKLDILVENMGRLSFGSNSSDFKGLLKPPILGQTILTQWMMFPLKIDNLVKWWFPLQLPKWPYPQAPSGPTFYSKTFPILGSVGDTFLYLPGWTKGQVWINGFNLGRYWTKQGPQQTLYVPRFLLFPRGALNKITLLELEDVPLQPQVQFLDKPILNSTSTLHRTHINSLSADTLSASEPMELSGH

SEQ ID NO: 5990 - protein, 654 aa, Homo Sapiens; identical to SEQ ID NO: 5989

SEQ ID NO: 5991 - protein, 50 aa, Homo Sapiens
MAPKKLSCLRSLLLPLSLTLLLPQTGPRSAMCLAACTTFGYRGCFGPTGF

SEQ ID NO: 5992 - protein, 185 aa, Homo Sapiens
  misc_feature (1)..(1): Xaa can be any naturally occurring amino acid
XKMRWSGLNAIQFYVPWNYHEPQPGVYNFNGSRDLIAFLNEAALANLLVILRPGPYICAEWEMGGLPSWLLRKPEIHLRTSDPDFLAAVDSWFKVLLPKIYPWLYHNGGNIISIQVENEYGSYRACDFSYMRHLAGLFRALLGEKILLFTTDGPEGLKCGSLRGLYTTVDFGPGLKQGLGVESGE

SEQ ID NO: 5993 - protein, 636 aa, Homo Sapiens
MTTWSLRRRPARTLGLLLLVVLGFLVLRRLDWSTLVPLRLRHRQLGLQAKGWNFMLEDSTFWIFGGSIHYFRVPREYWRDRLLKMKACGLNTLTTYVPWNLHEPERGKFDFSGNLDLEAFVLMAAEIGLWVILRPGPYICSEMDLGGLPSWLLQDPGMRLRTTYKGFTEAVDLYFDHLMSRVVPLQYKRGGPIIAVQVENEYGSYNKDPAYMPYVKKALEDRGIVELLLTSDNKDGLSKGIVQGVLATINLQSTHELQLLTTFLFNVQGTQPKMVMEYWTGWFDSWGGPHNILDSSEVLKTVSAIVDAGSSINLYMFHGGTNFGFMNGAMHFHDYKSDVTSYDYDAVLTEAGDYTAKYMKLRDFFGSISGIPLPPPPDLLPKMPYEPLTPVLYLSLWDALKYLGEPIKSEKPINMENLPVNGGNGQSFGYILYETSITSSGILSGHVHDRGQVFVNTVSIGFLDYKTTKIAVPLIQGYTVLRILVENRGRVNYGENIDDQRKGLIGNLYLNDSPLKNFRIYSLDMKKSFFQRFGLDKWSSLPETPTLPAFFLGSLSISSTPCDTFLKLEGWEKGVVFINGQNLGRYWNIGPQKTLYLPGPWLSSGINQVIVFEETMAGPALQFTETPHLGRNQYIK

SEQ ID NO: 5994 - protein, 636 aa, Homo Sapiens; identical to SEQ ID NO: 5993

SEQ ID NO: 5995 - protein, 553 aa, Homo Sapiens
MNHVAKQQSEEAFPQEQQKAPPVVGGFNSNVGSKVLGLKYEEIDCLINDEHTIKGRREGNEVFLPFTWVEKYFDVYGKVVQYDGYDRFEFSHSYSKVYAQRAPYHPDGVFMSFEGYNVEVRDRVKCISGVEGVPLSTQWGPQGYFYPIQIAQYGLSHYSKNLTEKPPHIEVYETAEDRDKNKPNDWTVPKGCFMANVADKSRFTNVKQFIAPETSEGVSLQLGNTKDFIISFDLKFLTNGSVSVVLETTEKNQLFTIHYVSNAQLIAFKERDIYYGIGPRTSWSTVTRDLVTDLRKGVGLSNTKAVKPTKIMPKKVVRLIAKGKGFLDNITISTTAHMAAFFAASDWLVRNQDEKGGWPIMVTRKLGEGFKSLEPGWYSAMAQGQAISTLVRAYLLTKDHIFLNSALRATAPYKFLSEQHGVKAVFMNKHDWYEEYPTTPSSFVLNGFMYSLIGLYDLKETAGEKLGKEARSLYERGMESLKAMLPLYDTGSGTIYDLRHFMLGIAPNLARWDYHTTHINQLQLLSTIDESPVFKEFVKRWKSYLKGSRAKHN

SEQ ID NO: 5996 - protein, 617 aa, Homo Sapiens
MRCLAARVNYKTLIIICALFTLVTVLLWNKCSSDKAIQFPRRSSSGFRVDGFEKRAAASESNNYMNHVAKQQSEEAFPQEQQKAPPVVGGFNSNVGSKVLGLKYEEIDCLINDEHTIKGRREGNEVFLPFTWVEKYFDVYGKVVQYDGYDRFEFSHSYSKVYAQRAPYHPDGVFMSFEGYNVEVRDRVKCISGVEGVPLSTQWGPQGYFYPIQIAQYGLSHYSKNLTEKPPHIEVYETAEDRDKNKPNDWTVPKGCFMANVADKSRFTNVKQFIAPETSEGVSLQLGNTKDFIISFDLKFLTNGSVSVVLETTEKNQLFTIHYVSNAQLIAFKERDIYYGIGPRTSWSTVTRDLVTDLRKGVGLSNTKAVKPTKIMPKKVVRLIAKGKGFLDNITISTTAHMAAFFAASDWLVRNQDEKGGWPIMVTRKLGEGFKSLEPGWYSAMAQGQAISTLVRAYLLTKDHIFLNSALRATAPYKFLSEQHGVKAVFMNKHDWYEEYPTTPSSFVLNGFMYSLIGLYDLKETAGEKLGKEARSLYERGMESLKAMLPLYDTGSGTIYDLRHFMLGIAPNLARWDYHTTHINQLQLLSTIDESPVFKEFVKRWKSYLKGSRAKHN

SEQ ID NO: 5997 - protein, 1192 aa, Homo Sapiens
MAACGRVRRMFRLSAALHLLLLFAAGAEKLPGQGVHSQGQGPGANFVSFVGQAGGGGPAGQQLPQLPQSSQLQQQQQQQQQQQQPQPPQPPFPAGGPPARRGGAGAGGGWKLAEEESCREDVTRVCPKHTWSNNLAVLECLQDVRELLWNYKLNLTTDPKFESVAREVCKSTITEIKECADEPVGKGYMVSCLVDHRGNITEYQCHQYITKMTAIIFSDYRLICGFMDDCKNDINILKCGSIRLGEKDAHSQGEVVSCLEKGLVKEAEEREPKIQVSELCKKAILRVAELSSDDFHLDRHLYFACRDDRERFCENTQAGEGRVYKCLFNHKFEESMSEKCREALTTRQKLIAQDYKVSYSLAKSCKSDLKKYRCNVENLPRSREARLSYLLMCLESAVHRGRQVSSECQGEMLDYRRMLMEDFSLSPEIILSCRGEIEHHCSGLHRKGRTLHCLMKVVRGEKGNLGMNCQQALQTLIQETDPGADYRIDRALNEACESVIQTACKHIRSGDPMILSCLMEHLYTEKMVEDCEHRLLELQYFISRDWKLDPVLYRKCQGDASRLCHTHGWNETSEFMPQGAVFSCLYRHAYRTEEQGRRLSRECRAEVQRILHQRAMDVKLDPALQDKCLIDLGKWCSEKTETGQELECLQDHLDDLVVECRDIVGNLTELESEDIQIEALLMRACEPIIQNFCHDVADNQIDSGDLMECLIQNKHQKDMNEKCAIGVTHFQLVQMKDFRFSYKFKMACKEDVLKLCPNIKKKVDVVICLSTTVRNDTLQEAKEHRVSLKCRRQLRVEELEMTEDIRLEPDLYEACKSDIKNFCSAVQYGNAQIIECLKENKKQLSTRCHQKVFKLQETEMMDPELDYTLMRVCKQMIKRFCPEADSKTMLQCLKQNKNSELMDPKCKQMITKRQITQNTDYRLNPMLRKACKADIPKFCHGILTKAKDDSELEGQVISCLKLRYADQRLSSDCEDQIRIIIQESALDYRLDPQLQLHCSDEISSLCAEEAAAQEQTGQVEECLKVNLLKIKTELCKKEVLNMLKESKADIFVDPVLHTACALDIKHHCAAITPGRGRQMSCLMEALEDKRVRLQPECKKRLNDRIEMWSYAAKVAPADGFSDLAMQVMTSPSKNYILSVISGSICILFLIGLMCGRITKRVTRELKDRLQYRSETMAYKGLVWSQDVTGSPA

SEQ ID NO: 5998 - protein, 1203 aa, Homo Sapiens
MAACGRVRRMFRLSAALHLLLLFAAGAEKLPGQGVHSQGQGPGANFVSFVGQAGGGGPAGQQLPQLPQSSQLQQQQQQQQQQQQPQPPQPPFPAGGPPARRGGAGAGGGWKLAEEESCREDVTRVCPKHTWSNNLAVLECLQDVREPENEISSDCNHLLWNYKLNLTTDPKFESVAREVCKSTITEIKECADEPVGKGYMVSCLVDHRGNITEYQCHQYITKMTAIIFSDYRLICGFMDDCKNDINILKCGSIRLGEKDAHSQGEVVSCLEKGLVKEAEEREPKIQVSELCKKAILRVAELSSDDFHLDRHLYFACRDDRERFCENTQAGEGRVYKCLFNHKFEESMSEKCREALTTRQKLIAQDYKVSYSLAKSCKSDLKKYRCNVENLPRSREARLSYLLMCLESAVHRGRQVSSECQGEMLDYRRMLMEDFSLSPEIILSCRGEIEHHCSGLHRKGRTLHCLMKVVRGEKGNLGMNCQQALQTLIQETDPGADYRIDRALNEACESVIQTACKHIRSGDPMILSCLMEHLYTEKMVEDCEHRLLELQYFISRDWKLDPVLYRKCQGDASRLCHTHGWNETSEFMPQGAVFSCLYRHAYRTEEQGRRLSRECRAEVQRILHQRAMDVKLDPALQDKCLIDLGKWCSEKTETGQELECLQDHLDDLVVECRDIVGNLTELESEDIQIEALLMRACEPIIQNFCHDVADNQIDSGDLMECLIQNKHQKDMNEKCAIGVTHFQLVQMKDFRFSYKFKMACKEDVLKLCPNIKKKVDVVICLSTTVRNDTLQEAKEHRVSLKCRRQLRVEELEMTEDIRLEPDLYEACKSDIKNFCSAVQYGNAQIIECLKENKKQLSTRCHQKVFKLQETEMMDPELDYTLMRVCKQMIKRFCPEADSKTMLQCLKQNKNSELMDPKCKQMITKRQITQNTDYRLNPMLRKACKADIPKFCHGILTKAKDDSELEGQVISCLKLRYADQRLSSDCEDQIRIIIQESALDYRLDPQLQLHCSDEISSLCAEEAAAQEQTGQVEECLKVNLLKIKTELCKKEVLNMLKESKADIFVDPVLHTACALDIKHHCAAITPGRGRQMSCLMEALEDKRVRLQPECKKRLNDRIEMWSYAAKVAPADGFSDLAMQVMTSPSKNYILSVISGSICILFLIGLMCGRITKRVTRELKDRLQYRSETMAYKGLVWSQDVTGSPA

SEQ ID NO: 5999 - protein, 1179 aa, Homo Sapiens
MAACGRVRRMFRLSAALHLLLLFAAGAEKLPGQGVHSQGQGPGANFVSFVGQAGGGGPAGQQLPQLPQSSQLQQQQQQQQQQQQPQPPQPPFPAGGPPARRGGAGAGGGWKLAEEESCREDVTRVCPKHTWSNNLAVLECLQDVREPENEISSDCNHLLWNYKLNLTTDPKFESVAREVCKSTITEIKECADEPVGKGYMVSCLVDHRGNITEYQCHQYITKMTAIIFSDYRLICGFMDDCKNDINILKCGSIRLGEKDAHSQGEVVSCLEKGLVKEAEEREPKIQVSELCKKAILRVAELSSDDFHLDRHLYFACRDDRERFCENTQAGEGRVYKCLFNHKFEESMSEKCREALTTRQKLIAQDYKVSYSLAKSCKSDLKKYRCNVENLPRSREARLSYLLMCLESAVHRGRQVSSECQGEMLDYRRMLMEDFSLSPEIILSCRGEIEHHCSGLHRKGRTLHCLMKVVRGEKGNLGMNCQQALQTLIQETDPGADYRIDRALNEACESVIQTACKHIRSGDPMILSCLMEHLYTEKMVEDCEHRLLELQYFISRDWKLDPVLYRKCQGDASRLCHTHGWNETSEFMPQGAVFSCLYRHAYRTEEQGRRLSRECRAEVQRILHQRAMDVKLDPALQDKCLIDLGKWCSEKTETGQELECLQDHLDDLVVECRDIVGNLTELESEDIQIEALLMRACEPIIQNFCHDVADNQIDSGDLMECLIQNKHQKDMNEKCAIGVTHFQLVQMKDFRFSYKFKMACKEDVLKLCPNIKKKVDVVICLSTTVRNDTLQEAKEHRVSLKCRRQLRVEELEMTEDIRLEPDLYEACKSDIKNFCSAVQYGNAQIIECLKENKKQLSTRCHQKVFKLQETEMMDPELDYTLMRVCKQMIKRFCPEADSKTMLQCLKQNKNSELMDPKCKQMITKRQITQNTDYRLNPMLRKACKADIPKFCHGILTKAKDDSELEGQVISCLKLRYADQRLSSDCEDQIRIIIQESALDYRLDPQLQLHCSDEISSLCAEEAAAQEQTGQVEECLKVNLLKIKTELCKKEVLNMLKESKADIFVDPVLHTACALDIKHHCAAITPGRGRQMSCLMEALEDKRVRLQPECKKRLNDRIEMWSYAAKVAPADGFSDLAMQVMTSPSKNYILSVISGSICILFLIGLMCGRITKRVTRELKDR

SEQ ID NO: 6000 - protein, 698 aa, Homo Sapiens
MAACGRVRRMFRLSAALHLLLLFAAGAEKLPGQGVHSQGQGPGANFVSFVGQAGGGGPAGQQLPQLPQSSQLQQQQQQQQQQQQPQPPQPPFPAGGPPARRGGAGAGGGWKLAEEESCREDVTRVCPKHTWSNNLAVLECLQDVREPENEISSDCNHLLWNYKLNLTTDPKFESVAREVCKSTITEIKECADEPVGKGYMVSCLVDHRGNITEYQCHQYITKMTAIIFSDYRLICGFMDDCKNDINILKCGSIRLGEKDAHSQGEVVSCLEKGLVKEAEEREPKIQVSELCKKAILRVAELSSDDFHLDRHLYFACRDDRERFCENTQAGEGRVYKCLFNHKFEESMSEKCREALTTRQKLIAQDYKVSYSLAKSCKSDLKKYRCNVENLPRSREARLSYLLMCLESAVHRGRQVSSECQGEMLDYRRMLMEDFSLSPEIILSCRGEIEHHCSGLHRKGRTLHCLMKVVRGEKGNLGMNCQQALQTLIQETDPGADYRIDRALNEACESVIQTACKHIRSGDPMILSCLMEHLYTEKMVEDCEHRLLELQYFISRDWKLDPVLYRKCQGDASRLCHTHGWNETSEFMPQGAVFSCLYRHAYRTEEQGRRLSRECRAEVQRILHQRAMDVKLDPALQDKCLIDLGKWCSEKTETGQELECLQDHLDDLVVECRDIVGNLTELESEAEREYVFKNLPFKV

SEQ ID NO: 6001 - protein, 305 aa, Homo Sapiens
MAACGRVRRMFRLSAALHLLLLFAAGAEKLPGQGVHSQGQGPGANFVSFVGQAGGGGPAGQQLPQLPQSSQLQQQQQQQQQQQQPQPPQPPFPAGGPPARRGGAGAGGGWKLAEEESCREDVTRVCPKHTWSNNLAVLECLQDVREPENEISSDCNHLLWNYKLNLTTDPKFESVAREVCKSTITEIKECADEPVGKGYMVSCLVDHRGNITEYQCHQYITKMTAIIFSDYRLICGFMDDCKNDINILKCGSIRLGEKDAHSQDTPTALRNREGGSHGSAELKSKGSYTSVPWMSSWILPSRISA

SEQ ID NO: 6002 - protein, 698 aa, Homo Sapiens; identical to SEQ ID NO: 6000

SEQ ID NO: 6003 - protein, 152 aa, Homo Sapiens
MAACGRVRRMFRLSAALHLLLLFAAGAEKLPGQGVHSQGQGPGANFVSFVGQPPFPAGGPPARRGGAGAGGGWKLAEEESCREDVTRVCPKHTWSNNLAVLECLQDVREPENEISSDCNHLLWNYKLNLTTDPKFESVAREVCKSTITEIKE

SEQ ID NO: 6004 - protein, 74 aa, Homo Sapiens
MVSCLVDHRGNITEYQCHQYITKMTAIIFSDYRLICGFMDDCKNDINILKCGSIRLGEKDAHSQGEVVSCLEKG

SEQ ID NO: 6005 - protein, 148 aa, Homo Sapiens
MRVTLATIAWMVSFVSNYSHTANILPDIENEDFIKDCVRIHNKFRSEVKPTASDMLYMTWDPALAQIAKAWASNCQFSHNTRLKPPHKLHPNFTSLGENIWTGSVPIFSVSSAITNWYDEIQDYDFKTRICKKVCGHYTQRELPNLAI

SEQ ID NO: 6006 - protein, 238 aa, Homo Sapiens
MRVTLATIAWMVSFVSNYSHTANILPDIENEDFIKDCVRIHNKFRSEVKPTASDMLYMTWDPALAQIAKAWASNCQFSHNTRLKPPHKLHPNFTSLGENIWTGSVPIFSVSSAITNWYDEIQDYDFKTRICKKVCGHYTQVSQERGRDPNPKRGFLNLARENPGLFGQIVTKLAAQFNFALKFLALTLFPMEHILYATTDQEGITQLGHIREEPPAVPAPIMTSVWTISVLTDSETKS

SEQ ID NO: 6007 - protein, 266 aa, Homo Sapiens
MRVTLATIAWMVSFVSNYSHTANILPDIENEDFIKDCVRIHNKFRSEVKPTASDMLYMTWDPALAQIAKAWASNCQFSHNTRLKPPHKLHPNFTSLGENIWTGSVPIFSVSSAITNWYDEIQDYDFKTRICKKVCGHYTQVVWADSYKVGCAVQFCPKVSGFDALSNGAHFICNYGPGGNYPTWPYKRGATCSACPNNDKCLDNLCVNRQRDQVKRYYSVVYPGWPIYPRNRYTSLFLIVNSVILILSVIITILVQHKYPNLVLLD

SEQ ID NO: 6008 - protein, 89 aa, Homo Sapiens
MTKSRTMTSRLGYAKKSVATTLRLFGQIVTKLAAQFNFALKFLALTLFPMEHILYATTDQEGITQLGHIREEPPAVPAPIMTSVWTISV

SEQ ID NO: 6009 - protein, 233 aa, Homo Sapiens
MALKNKFSCLWILGLCLVATTSSKIPSITDPHFIDNCIEAHNEWRGKVNPPAADMKYMIWDKGLAKMAKAWANQCKFEHNDCLDKSYKCYAAFEYVGENIWLGGIKSFTPRHAITAWYNETQFYDFDSLSCSRVCGHYTQLVWANSFYVGCAVAMCPNLGGASTAIFVCNYGPAGNFANMPPYVRGESCSLCSKEEKCVKNLCKNPFLKPTGRAPQQTAFNPFSLGFLLLRIF

SEQ ID NO: 6010 - protein, 242 aa, Homo Sapiens
MALKNKFSCLWILGLCLVATTSSKIPSITDPHFIDNCIEAHNEWRGKVNPPAADMKYMIWDKGLAKMAKAWANQCKFEHNDCLDKSYKCYAAFEYVGENIWLGGIKSFTPRHAITAWYNETQFYDFDSLSCSRVCGHYTQLVWANSFYVGCAVAMCPNLGGASTAIFVCNYGPAGNFANMPPYVRGESCSLCSKEEKCVKNLCRTPQLIIPNQNPFLKPTGRAPQQTAFNPFSLGFLLLRIF

SEQ ID NO: 6011 - protein, 57 aa, Homo Sapiens
MSLLKLILLRVPCRATACQKGLTTQTFPLSPQSPKGQLAACSNKMSFLFRAEEKIHF

SEQ ID NO: 6012 - protein, 39 aa, Homo Sapiens
  misc_feature (1)..(1): Xaa can be any naturally occurring amino acid
XLSPQSPKGQLAACSNKMSFLFRAEEGLHNLLYLTKIHF

SEQ ID NO: 6013 - protein, 56 aa, Homo Sapiens
MMVQRLGLISPPASQVSTACNQISPSLQRAMNAANLNIPPSDTRKCGKHGKVPSTK

SEQ ID NO: 6014 - protein, 89 aa, Homo Sapiens
MMVQRLGLISPPASQVSTACNQISPSLQRAMNAANLNIPPSDTRSLISRESLASTTLSLTESQSASSMKQEWSQGYRALPSLSNHGSQN

SEQ ID NO: 6015 - protein, 89 aa, Homo Sapiens; identical to SEQ ID NO: 6014

SEQ ID NO: 6016 - protein, 89 aa, Homo Sapiens; identical to SEQ ID NO: 6014

SEQ ID NO: 6017 - protein, 775 aa, Homo Sapiens
MMVQRLGLISPPASQVSTACNQISPSLQRAMNAANLNIPPSDTRSLISRESLASTTLSLTESQSASSMKQEWSQGYRALPSLSNHGSQNGLDLGDLLSLPPGTSMSSNSVSNSLPSYLFGTESSHSPYPSPRHSSTRSHSARSKKRALSLSPLSDGIGIDFNTIIRTSPTSLVAYINGSRASPANLSPQPEVYGHFLGVRGSCIPQPRPVPGSQKGVLVAPGGLALPAYGEDGALEHERMQQLEHGGLQPGLVNHMVVQHGLPGPDSQSAGLFKTERLEEFPGSTVDLPPAPPLPPLPPPPGPPPPYHAHAHLHHPELGPHAQQLALPQATLDDDGEMDGIGGKHCCRWIDCSALYDQQEELVRHIEKVHIDQRKGEDFTCFWAGCPRRYKPFNARYKLLIHMRVHSGEKPNKCTFEGCEKAFSRLENLKIHLRSHTGEKPYLCQHPGCQKAFSNSSDRAKHQRTHLDTKPYACQIPGCTKRYTDPSSLRKHVKAHSSKEQQARKKLRSSTELHPDLLTDCLTVQSLQPATSPRDAAAEGTVGRSPGPGPDLYSAPIFSSNYSSRSGTAAGAVPPPHPVSHPSPGHNVQGSPHNPSSQLPPLTAVDAGAERFAPSAPSPHHISPRRVPAPSSILQRTQPPYTQQPSGSHLKSYQPETNSSFQPNGIHVHGFYGQLQKFCPPHYPDSQRIVPPVSSCSVVPSFEDCLVPTSMGQASFDVFHRAFSTHSGITVYDLPSSSSSLFGESLRSGAEDATFLQISTVDRCPSQLSSVYTEG

SEQ ID NO: 6018 - protein, 244 aa, Homo Sapiens
MNGRSCSMSLHRTSGTPQGPRMVSGHHIPAIRAHSGTPGPSPCGSTSSPTMASLANNLHLKMPSGGGMAPQNNVAESRIHLPALSPRRQMLTNGKPRFQVTQAGGMSGSHTLKPKQQEFGSPFPPNPGKGALGFGPQCKSIGKGSCNNLVVTSSPMMVQRLGLISPPASQVSTACNQISPSLQRAMNAANLNIPPSDTRSLISRESLASTTLSLTESQSASSMKQEWSQGYRALPSLSNHGSQN

SEQ ID NO: 6019 - protein, 244 aa, Homo Sapiens; identical to SEQ ID NO: 6018

SEQ ID NO: 6020 - protein, 930 aa, Homo Sapiens
MNGRSCSMSLHRTSGTPQGPRMVSGHHIPAIRAHSGTPGPSPCGSTSSPTMASLANNLHLKMPSGGGMAPQNNVAESRIHLPALSPRRQMLTNGKPRFQVTQAGGMSGSHTLKPKQQEFGSPFPPNPGKGALGFGPQCKSIGKGSCNNLVVTSSPMMVQRLGLISPPASQVSTACNQISPSLQRAMNAANLNIPPSDTRSLISRESLASTTLSLTESQSASSMKQEWSQGYRALPSLSNHGSQNGLDLGDLLSLPPGTSMSSNSVSNSLPSYLFGTESSHSPYPSPRHSSTRSHSARSKKRALSLSPLSDGIGIDFNTIIRTSPTSLVAYINGSRASPANLSPQPEVYGHFLGVRGSCIPQPRPVPGSQKGVLVAPGGLALPAYGEDGALEHERMQQLEHGGLQPGLVNHMVVQHGLPGPDSQSAGLFKTERLEEFPGSTVDLPPAPPLPPLPPPPGPPPPYHAHAHLHHPELGPHAQQLALPQATLDDDGEMDGIGGKHCCRWIDCSALYDQQEELVRHIEKVHIDQRKGEDFTCFWAGCPRRYKPFNARYKLLIHMRVHSGEKPNKCTFEGCEKAFSRLENLKIHLRSHTGEKPYLCQHPGCQKAFSNSSDRAKHQRTHLDTKPYACQIPGCTKRYTDPSSLRKHVKAHSSKEQQARKKLRSSTELHPDLLTDCLTVQSLQPATSPRDAAAEGTVGRSPGPGPDLYSAPIFSSNYSSRSGTAAGAVPPPHPVSHPSPGHNVQGSPHNPSSQLPPLTAVDAGAERFAPSAPSPHHISPRRVPAPSSILQRTQPPYTQQPSGSHLKSYQPETNSSFQPNGIHVHGFYGQLQKFCPPHYPDSQRIVPPVSSCSVVPSFEDCLVPTSMGQASFDVFHRAFSTHSGITVYDLPSSSSSLFGESLRSGAEDATFLQISTVDRCPSQLSSVYTEG

SEQ ID NO: 6021 - protein, 142 aa, Homo Sapiens
MNGRSCSMSLHRTSGTPQGPRMVSGHHIPAIRAHSGTPGPSPCGSTSSPTMASLANNLHLKMPSGGGMAPQNNVAESRIHLPALSPRRQMLTNGKPRFQVTQAGGMSGSHTLKPKQQEFGSPFPPNPGKGPLFRVSLWRPRP

SEQ ID NO: 6022 - protein, 75 aa, Homo Sapiens
FNLTFGASTGPGYWDQHYLSWSMLLGVGFPPVDGLSPLVLGIMAVALGAPGLMLLGGGLVLLLHHKKYSEYQSIN

SEQ ID NO: 6023 - protein, 320 aa, Homo Sapiens
MRGSVECTWGWGHCAPSPLLLWTLLLFAAPFGLLGEKTRQLLEFDSTNVSDTAAKPLGRPYPPYSLADFSWNNITDSLDPATLSATFQGHPMNDPTRTFANGSLAFRVQAFSRSSRPAQPPRLLHTADTCQLEVALIGASPRGNRSLFGLEVATLGQGPDCPSMQEQHSIDDEYAPAVFQLDQLLWGSLPSGFAQWRPVAYSQKPGGRESALPCQASPLHPALAYSLPQSPIVRAFFGSQNNFCAFNLTFGASTGPGYWDQHYLSWSMLLGVGFPPVDGLSPLVLGIMAVALGAPGLMLLGGGLVLLLHHKKYSEYQSIN

SEQ ID NO: 6024 - protein, 183 aa, Homo Sapiens [sequence omitted]

SEQ ID NO: 6025 - protein, 89 aa, Homo Sapiens
MRGSVECTWGWGHCAPSPLLLWTLLLFAAPFGLLGEKTRQVRRLGENQGEECRGESSSQLEGGTKDWGKAFGKTISSILLGRFLLEQHH

SEQ ID NO: 6026 - protein, 130 aa, Homo Sapiens
MRGSVECTWGWGHCAPSPLLLWTLLLFAAPFGLLGEKTRQVSLEVIPNWLGPLQNLLHIRAVGTNSTLHYVWSSLGPLAVVMVATNTPHSTLSVNWSLLLSPEPDGGLMVLPKDSIQFSSALVFTRGSCC

SEQ ID NO: 6027 - protein, 406 aa, Homo Sapiens
MRGSVECTWGWGHCAPSPLLLWTLLLFAAPFGLLGEKTRQVSLEVIPNWLGPLQNLLHIRAVGTNSTLHYVWSSLGPLAVVMVATNTPHSTLSVNWSLLLSPEPDGGLMVLPKDSIQFSSALVFTRLLEFDSTNVSDTAAKPLGRPYPPYSLADFSWNNITDSLDPATLSATFQGHPMNDPTRTFANGSLAFRVQAFSRSSRPAQPPRLLHTADTCQLEVALIGASPRGNRSLFGLEVATLGQGPDCPSMQEQHSIDDEYAPAVFQLDQLLWGSLPSGFAQWRPVAYSQKPGGRESALPCQASPLHPALAYSLPQSPIVRAFFGSQNNFCAFNLTFGASTGPGYWDQHYLSWSMLLGVGFPPVDGLSPLVLGIMAVALGAPGLMLLGGGLVLLLHHKKYSEYQSIN

SEQ ID NO: 6028 - protein, 331 aa, Homo Sapiens
MRGSVECTWGWGHCAPSPLLLWTLLLFAAPFGLLGEKTRQVSLEVIPNWLGPLQNLLHIRAVGTNSTLHYVWSSLGPLAVVMVATNTPHSTLSVNWSLLLSPEPDGGLMVLPKDSIQFSSALVFTRLLEFDSTNVSDTAAKPLGRPYPPYSLADFSWNNITDSLDPATLSATFQGHPMNDPTRTFANGSLAFRVQAFSRSSRPAQPPRLLHTADTCQLEVALIGASPRGNRSLFGLEVATLGQGPDCPSMQEQHSIDDEYAPAVFQVDAPGCGLPSSGRLVPTSPGHHGSGPGCPRAHAARGRLGSAAAPQEVLRVPVHKLRPALWREGHY

SEQ ID NO: 6029 - protein, 325 aa, Homo Sapiens
MVATNTPHSTLSVNWSLLLSPEPDGGLMVLPKDSIQFSSALVFTRLLEFDSTNVSDTAAKPLGRPYPPYSLADFSWNNITDSLDPATLSATFQGHPMNDPTRTFANGSLAFRVQAFSRSSRPAQPPRLLHTADTCQLEVALIGASPRGNRSLFGLEVATLGQGPDCPSMQEQHSIDDEYAPAVFQLDQLLWGSLPSGFAQWRPVAYSQKPGGRESALPCQASPLHPALAYSLPQSPIVRAFFGSQNNFCAFNLTFGASTGPGYWDQHYLSWSMLLGVGFPPVDGLSPLVLGIMAVALGAPGLMLLGGGLVLLLHHKKYSEYQSIN

SEQ ID NO: 6030 - protein, 111 aa, Homo Sapiens
  misc_feature (1)..(1): Xaa can be any naturally occurring amino acid
XPSMQEQHSIDDEYAPAVFQSPIVRAFFGSQNNFCAFNLTFGASTGPGYWDQHYLSWSMLLGVGFPPVDGLSPLVLGIMAVALGAPGLMLLGGGLVLLLHHKKYSEYQSIN

SEQ ID NO: 6031 - protein, 46 aa, Homo Sapiens
MKFLLTTAFLILISLWVEEAYSKEKSSKKGKGKKKQYLCPSERLYH

SEQ ID NO: 6032 - protein, 46 aa, Homo Sapiens; identical to SEQ ID NO: 6031

SEQ ID NO: 6033 - protein, 56 aa, Homo Sapiens
MKFLLTTAFLILISLWVEEAYSKEKSSKKGKGKKKQYLCPSLVRPDAKKFVLLSLI

SEQ ID NO: 6034 - protein, 497 aa, Homo Sapiens
MKFLLTTAFLILISLWVEEAYSKEKSSKKGKGKKKQYLCPSQQSAEDLARVPANSTSNILNRLLVSYDPRIRPNFKGIPVDVVVNIFINSFGSIQETTMDYRVNIFLRQKWNDPRLKLPSDFRGSDALTVDPTMYKCLWKPDLFFANEKSANFHDVTQENILLFIFRDGDVLVSMRLSITLSCPLDLTLFPMDTQRCKMQLESFGYTTDDLRFIWQSGDPVQLEKIALPQFDIKKEDIEYGNCTKYYKGTGYYTCVEVIFTLRRQVGFYMMGVYAPTLLIVVLSWLSFWINPDASAARVPLGIFSVLSLASECTTLAAELPKVSYVKALDVWLIACLLFGFASLVEYAVVQVMLNNPKRVEAEKARIAKAEQADGKGGNVAKKNTVNGTGTPVHISTLQVGETRCKKVCTSKSDLRSNDFSIVGSLPRDFELSNYDCYGKPIEVNNGLGKSQAKNNKKPPPAKPVIPTAAKRIDLYARALFPFCFLFFNVIYWSIYL

SEQ ID NO: 6035 - protein, 497 aa, Homo Sapiens; identical to SEQ ID NO: 6034

SEQ ID NO: 6036 - protein, 303 aa, Homo Sapiens
MKFLLTTAFLILISLWVEEAYSKEKSSKKGKGKKKQYLCPSQQSAEDLARVPANSTSNILNRLLVSYDPRIRPNFKGIPVDVVVNIFINSFGSIQETTMDYRVNIFLRQKWNDPRLKLPSDFRGSDALTVDPTMYKCLWKPDLFFANEKSANFHDVTQENILLFIFRDGDVLVSMRLSITLSCPLDLTLFPMDTQRCKMQLESFGYTTDDLRFIWQSGDPVQLEKIALPQFDIKKEDIEYGNCTKYYKGTGYYTCVEVIFTLRRQVGFYMMGVYAPTLLIVVLSWLSFWINPDASAARVPLGW

SEQ ID NO: 6037 - protein, 182 aa, Homo Sapiens
AKSGVAGGILLVVPNVMGMMCWSPPLDKMGNSVKGIHFCHDLVSLCNFHNYDNLRHFAKKLDPRREGGDQRVKSVINLLFAAYTGDVSALRRFALSAMDMEQRDYDSRTALHVAAAEGGITLPWMKHCTLDTMMYLKFSKNTKSSTHLKEILTTGRKIKPSIRILMDCCNGLKSQDLNHLPI

SEQ ID NO: 6038 - protein, 114 aa, Homo Sapiens
ESAKKQSGGKVADYIPQLAKFSPDLWGVSVCTVDGQRHSTGDTKVPFCLQSCVKPLKYAIAVNDLGTEYVHRYVGKEPSGLRFNKLFLNEDDKPHNPMVNAGAIVVTSLIKDWW

SEQ ID NO: 6039 - protein, 169 aa, Homo Sapiens
MAATLANGGFCPITGERVLSPEAVRNTLSLMHSCGMYDFSGQFAFHVGLPAKSGVAGGILLVVPNVMGMMCWSPPLDKMGNSVKGIHFCHDLVSLCNFHNYDNLRHFAKKLDPRREGGDQRHSFGPLDYESLQQELALKETVWKKVSPESNEDISTTVVYRMESLGEKS

SEQ ID NO: 6040 - protein, 164 aa, Homo Sapiens
MAATLANGGFCPITGERVLSPEAVRNTLSLMHSCGMYDFSGQFAFHVGLPAKSGVAGGILLVVPNVMGMMCWSPPLDKMGNSVKGIHFCHDLVSLCNFHNYDNLRHFAKKLDPRREGGDQRVKSVINLLFAAYTGDVSALRRFALSAMDMEQRDYDSRTALHVA

SEQ ID NO: 6041 - protein, 103 aa, Homo Sapiens
MGMMCWSPPLDKMGNSVKGIHFCHDLVSLCNFHNYDNLRHFAKKLDPRREGGDQRHSFGPLDYESLQQELALKETVWKKVSPESNEDISTTVVYRMESLGEKS

SEQ ID NO: 6042 - protein, 174 aa, Homo Sapiens
MGMMCWSPPLDKMGNSVKGIHFCHDLVSLCNFHNYDNLRHFAKKLDPRREGGDQRVKSVINLLFAAYTGDVSALRRFALSAMDMEQRDYDSRTALHVAAAEGHVEVVKFLLEACKVNPFPKDRWNNTPMDEALHFGHHDVFKILQEYQVQYTPQGDSDNGKENQTVHKNLDGLL

SEQ ID NO: 6043 - protein, 669 aa, Homo Sapiens
MMRLRGSGMLRDLLLRSPAGVSATLRRAQPLVTLCRRPRGGGRPAAGPAAAARLHPWWGGGGWPAEPLARGLSSSPSEILQELGKGSTHPQPGVSPPAAPAAPGPKDGPGETDAFGNSEGKELVASGENKIKQGLLPSLEDLLFYTIAEGQEKIPVHKFITALKSTGLRTSDPRLKECMDMLRLTLQTTSDGVMLDKDLFKKCVQSNIVLLTQAFRRKFVIPDFMSFTSHIDELYESAKKQSGGKVADYIPQLAKFSPDLWGVSVCTVDGQRHSTGDTKVPFCLQSCVKPLKYAIAVNDLGTEYVHRYVGKEPSGLRFNKLFLNEDDKPHNPMVNAGAIVVTSLIKQGVNNAEKFDYVMQFLNKMAGNEYVGFSNATFQSERESGDRNFAIGYYLKEKKCFPEGTDMVGILDFYFQLCSIEVTCESASVMAATLANGGFCPITGERVLSPEAVRNTLSLMHSCGMYDFSGQFAFHVGLPAKSGVAGGILLVVPNVMGMMCWSPPLDKMGNSVKGIHFCHDLVSLCNFHNYDNLRHFAKKLDPRREGGDQRVKSVINLLFAAYTGDVSALRRFALSAMDMEQRDYDSRTALHVAAAEGHVEVVKFLLEACKVNPFPKDRWNNTPMDEALHFGHHDVFKILQEYQVQYTPQGDSDNGKENQTVHKNLDGLL

SEQ ID NO: 6044 - protein, 598 aa, Homo Sapiens
MMRLRGSGMLRDLLLRSPAGVSATLRRAQPLVTLCRRPRGGGRPAAGPAAAARLHPWWGGGGWPAEPLARGLSSSPSEILQELGKGSTHPQPGVSPPAAPAAPGPKDGPGETDAFGNSEGKELVASGENKIKQGLLPSLEDLLFYTIAEGQEKIPVHKFITALKSTGLRTSDPRLKECMDMLRLTLQTTSDGVMLDKDLFKKCVQSNIVLLTQAFRRKFVIPDFMSFTSHIDELYESAKKQSGGKVADYIPQLAKFSPDLWGVSVCTVDGQRHSTGDTKVPFCLQSCVKPLKYAIAVNDLGTEYVHRYVGKEPSGLRFNKLFLNEDDKPHNPMVNAGAIVVTSLIKQGVNNAEKFDYVMQFLNKMAGNEYVGFSNATFQSERESGDRNFAIGYYLKEKKCFPEGTDMVGILDFYFQLCSIEVTCESASVMAATLANGGFCPITGERVLSPEAVRNTLSLMHSCGMYDFSGQFAFHVGLPAKSGVAGGILLVVPNVMGMMCWSPPLDKMGNSVKGIHFCHDLVSLCNFHNYDNLRHFAKKLDPRREGGDQRHSFGPLDYESLQQELALKETVWKKVSPESNEDISTTVVYRMESLGEKS

SEQ ID NO: 6045 - protein, 276 aa, Homo Sapiens
MNSKRMLLLVLFAFSLMLVERYFRNHQVEELRLSDWFHPRKRPDVITKTDWLAPVLWEGTFDRRVLEKHYRRRNITVGLAVFATGRFAEEYLRPFLHSANKHFMTGYRVIFYIMVDAFFKLPDIEPSPLRTFKAFKVGTERWWLDGPLVHVKSLGEHIASHIQDEVDFLFSMAANQVFQNEFGVETLGPLVAQLHAWWYFRNTKNFPYERRPTSAACIPFGQGDFYYGNLMVGGTPHNILDFIKEYLNGVIHDIKNGLNSTYEKHLNKYFYLNKPT

SEQ ID NO: 6046 - protein, 307 aa, Homo Sapiens
MNSKRMLLLVLFAFSLMLVERYFRNHQVEELRLSDWFHPRKRPDVITKTDWLAPVLWEGTFDRRVLEKHYRRRNITVGLAVFATGRFAEEYLRPFLHSANKHFMTGYRVIFYIMVDAFFKLPDIEPSPLRTFKAFKVGTERWWLDGPLVHVKSLGEHIASHIQDEVDFLFSMAANQVFQNEFGVETLGPLVAQLHAWWYFRNTKNFPYERRPTSAACIPFGQGDFYYGNLMVGGTPHNILDFIKEYLNGVIHDIKNGLNSTYEKHLNKYFYLNKPTLLSPAYSWDLAFSPPPQIQYVKVAHDSQRKL

SEQ ID NO: 6047 - protein, 291 aa, Homo Sapiens
MGVAARPPALRHWFSHSIPLAIFALLLLYLSVRSLGARSGCGPRAQPCVPGETAPFQVRQESGTLEAPERKQPPCLGPRGMLGRMMRRFHASLKPEGDVGLSPYLAGWRALVEFLTPLGSVFAFATREAFTKVTDLEARVHGPDAEHYWSLVAMAAWERRAGLLEQPGAAPRDPTRSSGSRTLLLLHRALRWSQLCLHRVATGALGGPDAGVQCSDAYRAALGPHHPWLVRQTARLAFLAFPGRRRLLELACPGATEAEARAALVRAAGTLEDVYNRTQSLLAERGLLQLA

SEQ ID NO: 6048 - protein, 558 aa, Homo Sapiens
MYRYLGEALLLSRAGPAALGSASADSAALLGWARGQPAAAPQPGLALAARRHYSEAVADREDDPNFFKMVEGFFDRGASIVEDKLVEDLRTRESEEQKRNRVRGILRIIKPCNHVLSLSFPIRRDDGSWEVIEGYRAQHSQHRTPCKGGIRYSTDVSVDEVKALASLMTYKCAVVDVPFGGAKAGVKINPKNYTDNELEKITRRFTMELAKKGFIGPGIDVPAPDMSTGEREMSWIADTYASTIGHYDINAHACVTGKPISQGGIHGRISATGRGVFHGIENFINEASYMSILGMTPGFGDKTFVVQGFGNVGLHSMRYLHRFGAKCIAVGESDGSIWNPDGIDPKELEDFKLQHGSILGFPKAKPYEGSILEADCDILIPAASEKQLTKSNAPRVKAKIIAEGANGPTTPEADKIFLERNIMVIPDLYLNAGGVTVSYFEWLKNLNHVSYGRLTFKYERDSNYHLLMSVQESLERKFGKHGGTIPIVPTAEFQDRISGASEKDIVHSGLAYTMERSARQIMRTAMKYNLGLDLRTAAYVNAIEKVFKVYNEAGVTFT

SEQ ID NO: 6049 - protein, 193 aa, Homo Sapiens
MQSLMQAPLLIALGLLLAAPAQAHLKKPSQLSSFSWDNCDEGKDPAVIRSLTLEPDPIIVPGNVTLSVMGSTSVPLSSPLKVDLVLEKEVAGLWIKIPCTDYIGSCTFEHFCDVLDMLIPTGEPCPEPLRTYGLPCHCPFKEGTYSLPKSEFVVPDLELPSWLTTGNYRIESVLSSSGKRLGCIKIAASLKGI

SEQ ID NO: 6050 - protein, 146 aa, Homo Sapiens
MSWVEAAGVSSTALEDRIVAKHEEVPEVSVQYEEKFQNHHKLPSQLSSFSWDNCDEGKDPAVIRSLTLEPDPIIVPGNVTLSVMGSTSVPLSSPLKVDLVLEKEVAGLWIKIPCTDYIGSCTFEHFCDVLDMLIPTGEPCPEPLRT

SEQ ID NO: 6051 - protein, 104 aa, Homo Sapiens
  misc_feature (1)..(1): Xaa can be any naturally occurring amino acid
XKDPAVIRSLTLEPDPIIVPGNVTLSVMGSTSVPLSSPLKVDLVLEKEVAGLWIKIPCTDYIGSCTFEHFCDVLDMLIPTGEPCPEPLRTYGLPCHCPFKEVST

SEQ ID NO: 6052 - protein, 118 aa, Homo Sapiens
MLLFALLLAMELPLVAASATMRAQWTYSLRCHDCAVINDFNCPNIRVCPYHIRRCMTISIQLSSGDRAAVCPGPHPTFFQPGAWIPTQVTDSKHQPLPAHLTRRHPLHGPGNILPSAI

SEQ ID NO: 6053 - protein, 158 aa, Homo Sapiens
MLLFALLLAMELPLVAASATMRAQWTYSLRCHDCAVINDFNCPNIRVCPYHIRRCMTISIRINSRELLVYKNCTNNCTFVYAAEQPPEAPGKIFKTNSFYWVCCCNSMVCNAGGPTNLERDMLPDEVTEEELPEGTVRLGVSKLLLSFASIIVSNILP

SEQ ID NO: 6054 - protein, 625 aa, Homo Sapiens
MARPVDPQRSPDPTFRSSTRHSGKLEPMEATAHLLRKQCPSRLNSPAWEASGLHWSSLDSPVGSMQALRPSAQHSWSPEPSVVPDQAWEDTALHQKKLCPLSLTSLPREAAVNFSYRSQTLLQEAQVLQGSPELLPRSPKPSGLQRLAPEEATALPLRRLCHLSLMEKDLGTTAHPRGFPELSHKSTAAASSRQSRPRVRSASLPPRTRLPSGSQAPSAAHPKRLSDLLLTSRAAAPGWRSPDPRSRLAAPPLGSTTLPSTWTAPQSRLTARPSRSPEPQIRESEQRDPQLRRKQQRWKEPLMPRREEKYPLRGTDPLPPGQPQRIPLPGQPLQPQPILTPGQPQKIPTPGQHQPILTPGHSQPIPTPGQPLPPQPIPTPGRPLTPQPIPTPGRPLTPQPIQMPGRPLRLPPPLRLLRPGQPMSPQLRQTQGLPLPQPLLPPGQPKSAGRPLQPLPPGPDARSISDPPAPRSRLPIRLLRGLLARLPGGASPRAAAAAACTTMKGWPAATMTPAETSPTMGPPDASAGFSIGEIAAAESPSATYSATFSCKPSGAASVDLRVPSPKPRALSRSRRYPWRRSADRCAKKPWRSGPRSAQRRNAVSSSTNNSRTKRWATCVRTACCF

SEQ ID NO: 6055 - protein, 245 aa, Homo Sapiens
MDRRSRAQQWRRARHNYNDLCPPIGRRAATALLWLSCSIALLRALATSNARAQQRAAAQQRRSFLNAHHRSGAQVFPESPESESDHEHEEADLELSLPECLEYEEEFDYETESETESEIESETDFETEPETAPTTEPETEPEDDRGPVVPKHSTFGQSLTQRLHALKLRSPDASPSRAPPSTQEPQSPREGEELKPEDKDPRDPEESKEPKEEKQRRRCKPKKPTRRDASPESPSKKGPIPIRRH

SEQ ID NO: 6056 - protein, 245 aa, Homo Sapiens; identical to SEQ ID NO: 6055

SEQ ID NO: 6057 - protein, 245 aa, Homo Sapiens; identical to SEQ ID NO: 6055

SEQ ID NO: 6058 - protein, 158 aa, Homo Sapiens
MGCLGNSKTEDQRNEEKAQREANKKIEKQLQEALNLFKSIWNNRWLRTISVILFLNKQDLLAEKVLAGKSKIEDYFPEFARYTTPEDATPEPGEDPRVTRAKYFIRDEFLRISTASGDGRHYCYPHFTCAVDTENIRRVFNDCRDIIQRMHLRQYELL

SEQ ID NO: 6059 - protein, 379 aa, Homo Sapiens
MGCLGNSKTEDQRNEEKAQREANKKIEKQLQKDKQVYRATHRLLLLGAGESGKSTIVKQMRILHVNGFNGDEKATKVQDIKNNLKEAIETIVAAMSNLVPPVELANPENQFRVDYILSVMNVPDFDFPPEFYEHAKALWEDEGVRACYERSNEYQLIDCAQYFLDKIDVIKQADYVPSDQDLLRCRVLTSGIFETKFQVDKVNFHMFDVGGQRDERRKWIQCFNDVTAIIFVVASSSYNMVIREDNQTNRLQEALNLFKSIWNNRWLRTISVILFLNKQDLLAEKVLAGKSKIEDYFPEFARYTTPEDATPEPGEDPRVTRAKYFIRDEFLRISTASGDGRHYCYPHFTCAVDTENIRRVFNDCRDIIQRMHLRQYELL

SEQ ID NO: 6060 - protein, 380 aa, Homo Sapiens
MGCLGNSKTEDQRNEEKAQREANKKIEKQLQKDKQVYRATHRLLLLGAGESGKSTIVKQMRILHVNGFNGDSEKATKVQDIKNNLKEAIETIVAAMSNLVPPVELANPENQFRVDYILSVMNVPDFDFPPEFYEHAKALWEDEGVRACYERSNEYQLIDCAQYFLDKIDVIKQADYVPSDQDLLRCRVLTSGIFETKFQVDKVNFHMFDVGGQRDERRKWIQCFNDVTAIIFVVASSSYNMVIREDNQTNRLQEALNLFKSIWNNRWLRTISVILFLNKQDLLAEKVLAGKSKIEDYFPEFARYTTPEDATPEPGEDPRVTRAKYFIRDEFLRISTASGDGRHYCYPHFTCAVDTENIRRVFNDCRDIIQRMHLRQYELL

SEQ ID NO: 6061 - protein, 394 aa, Homo Sapiens
MGCLGNSKTEDQRNEEKAQREANKKIEKQLQKDKQVYRATHRLLLLGAGESGKSTIVKQMRILHVNGFNGEGGEEDPQAARSNSDGEKATKVQDIKNNLKEAIETIVAAMSNLVPPVELANPENQFRVDYILSVMNVPDFDFPPEFYEHAKALWEDEGVRACYERSNEYQLIDCAQYFLDKIDVIKQADYVPSDQDLLRCRVLTSGIFETKFQVDKVNFHMFDVGGQRDERRKWIQCFNDVTAIIFVVASSSYNMVIREDNQTNRLQEALNLFKSIWNNRWLRTISVILFLNKQDLLAEKVLAGKSKIEDYFPEFARYTTPEDATPEPGEDPRVTRAKYFIRDEFLRISTASGDGRHYCYPHFTCAVDTENIRRVFNDCRDIIQRMHLRQYELL

SEQ ID NO: 6062 - protein, 87 aa, Homo Sapiens
MGCLGNSKTEDQRNEEKAQREANKKIEKQLQKDKQVYRATHRLLLLGAGESGKSTIVKQMRILHVNGFNGEGGEEDPQAARSNSDGI

SEQ ID NO: 6063 - protein, 395 aa, Homo Sapiens
MGCLGNSKTEDQRNEEKAQREANKKIEKQLQKDKQVYRATHRLLLLGAGESGKSTIVKQMRILHVNGFNGEGGEEDPQAARSNSDGSEKATKVQDIKNNLKEAIETIVAAMSNLVPPVELANPENQFRVDYILSVMNVPDFDFPPEFYEHAKALWEDEGVRACYERSNEYQLIDCAQYFLDKIDVIKQADYVPSDQDLLRCRVLTSGIFETKFQVDKVNFHMFDVGGQRDERRKWIQCFNDVTAIIFVVASSSYNMVIREDNQTNRLQEALNLFKSIWNNRWLRTISVILFLNKQDLLAEKVLAGKSKIEDYFPEFARYTTPEDATPEPGEDPRVTRAKYFIRDEFLRISTASGDGRHYCYPHFTCAVDTENIRRVFNDCRDIIQRMHLRQYELL

SEQ ID NO: 6064 - protein, 1023 aa, Homo Sapiens
MGVRNCLYGNNMSGQRDIPPEIGEQPEQPPLEAPGAAAPGAGPSPAEEMETEPPHNEPIPVENDGEACGPPEVSRPNFQVLNPAFREAGAHGSYSPPPEEAMPFEAEQPSLGGFWPTLEQPGFPSGVHAGLEAFGPALMEPGAFSGARPGLGGYSPPPEEAMPFEFDQPAQRGCSQLLLQVPDLAPGGPGAAGVPGAPPEEPQALRPAKAGSRGGYSPPPEETMPFELDGEGFGDDSPPPGLSRVIAQVDGSSQFAAVAASSAVRLTPAANAPPLWVPGAIGSPSQEAVRPPSNFTGSSPWMEISGPPFEIGSAPAGVDDTPVNMDSPPIALDGPPIKVSGAPDKRERAERPPVEEEAAEMEGAADAAEGGKVPSPGYGSPAAGAASADTAARAAPAAPADPDSGATPEDPDSGTAPADPDSGAFAADPDSGAAPAAPADPDSGAAPDAPADPDSGAAPDAPADPDAGAAPEAPAAPAAAETRAAHVAPAAPDAGAPTAPAASATRAAQVRRAASAAPASGARRKIHLRPPSPEIQAADPPTPRPTRASAWRGKSESSRGRRVYYDEGVASSDDDSSGDESDDGTSGCLRWFQHRRNRRRRKPQRNLLRNFLVQAFGGCFGRSESPQPKASRSLKVKKVPLAEKRRQMRKEALEKRAQKRAEKKRSKLIDKQLQDEKMGYMCTHRLLLLGAGESGKSTIVKQMRILHVNGFNGDSEKATKVQDIKNNLKEAIETIVAAMSNLVPPVELANPENQFRVDYILSVMNVPDFDFPPEFYEHAKALWEDEGVRACYERSNEYQLIDCAQYFLDKIDVIKQADYVPSDQDLLRCRVLTSGIFETKFQVDKVNFHMFDVGGQRDERRKWIQCFNDVTAIIFVVASSSYNMVIREDNQTNRLQEALNLFKSIWNNRWLRTISVILFLNKQDLLAEKVLAGKSKIEDYFPEFARYTTPEDATPEPGEDPRVTRAKYFIRDEFLRISTASGDGRHYCYPHFTCAVDTENIRRVFNDCRDIIQRMHLRQYELL

SEQ ID NO: 6065 - protein, 720 aa, Homo Sapiens [sequence omitted]

SEQ ID NO: 6066 - protein, 1037 aa, Homo Sapiens
MGVRNCLYGNNMSGQRDIPPEIGEQPEQPPLEAPGAAAPGAGPSPAEEMETEPPHNEPIPVENDGEACGPPEVSRPNFQVLNPAFREAGAHGSYSPPPEEAMPFEAEQPSLGGFWPTLEQPGFPSGVHAGLEAFGPALMEPGAFSGARPGLGGYSPPPEEAMPFEFDQPAQRGCSQLLLQVPDLAPGGPGAAGVPGAPPEEPQALRPAKAGSRGGYSPPPEETMPFELDGEGFGDDSPPPGLSRVIAQVDGSSQFAAVAASSAVRLTPAANAPPLWVPGAIGSPSQEAVRPPSNFTGSSPWMEISGPPFEIGSAPAGVDDTPVNMDSPPIALDGPPIKVSGAPDKRERAERPPVEEEAAEMEGAADAAEGGKVPSPGYGSPAAGAASADTAARAAPAAPADPDSGATPEDPDSGTAPADPDSGAFAADPDSGAAPAAPADPDSGAAPDAPADPDSGAAPDAPADPDAGAAPEAPAAPAAAETRAAHVAPAAPDAGAPTAPAASATRAAQVRRAASAAPASGARRKIHLRPPSPEIQAADPPTPRPTRASAWRGKSESSRGRRVYYDEGVASSDDDSSGDESDDGTSGCLRWFQHRRNRRRRKPQRNLLRNFLVQAFGGCFGRSESPQPKASRSLKVKKVPLAEKRRQMRKEALEKRAQKRAEKKRSKLIDKQLQDEKMGYMCTHRLLLLGAGESGKSTIVKQMRILHVNGFNGEGGEEDPQAARSNSDGEKATKVQDIKNNLKEAIETIVAAMSNLVPPVELANPENQFRVDYILSVMNVPDFDFPPEFYEHAKALWEDEGVRACYERSNEYQLIDCAQYFLDKIDVIKQADYVPSDQDLLRCRVLTSGIFETKFQVDKVNFHMFDVGGQRDERRKWIQCFNDVTAIIFVVASSSYNMVIREDNQTNRLQEALNLFKSIWNNRWLRTISVILFLNKQDLLAEKVLAGKSKIEDYFPEFARYTTPEDATPEPGEDPRVTRAKYFIRDEFLRISTASGDGRHYCYPHFTCAVDTENIRRVFNDCRDIIQRMHLRQYELL

SEQ ID NO: 6067 - protein, 120 aa, Homo Sapiens
MRILHVNGFNGEGGEEDPQAARSNSDGEKATKVQDIKNNLKEAIETIVAAMSNLVPPVELANPENQFRVDYILSVMNVPDFDFPPEFYEHAKALWEDEGVRACYERSNEYQLIDCAQYFL

SEQ ID NO: 6068 - protein, 160 aa, Homo Sapiens
MRILHVNGFNGEGGEEDPQAARSNSDGEKATKVQDIKNNLKEAIETIVAAMSNLVPPVELANPENQFRVDYILSVMNVPDFDFPPEFYEHAKALWEDEGVRACYERSNEYQLIDCAQYFLDKIDVIKQADYVPSDQDLLRCRVLTSGIFETKFQVDKVNF

SEQ ID NO: 6069 - protein, 166 aa, Homo Sapiens
PESESDHEHEEADLELSLPECLEYEEEFDYETESETESEIESETDFETEPETAPTTEPETEPEDDRGPVVPKHSTFGQSLTQRLHALKLRSPDASPSRAPPSTQEPQSPREGEELKPEDKDPRDPEESKEPKEEKQRRRCKPKKPTRRDASPESPSKKGPIPIRRH

SEQ ID NO: 6070 - protein, 193 aa, Homo Sapiens
PKASRSLKVKKVPLAEKRRQMRKEALEKRAQKRAEKKRSKLIDKQLQDEKMGYMCTHRLLLLGAGESGKSTIVKQMRILHVNGFNGEGGEEDPQAARSNSDGSEKATKVQDIKNNLKEAIETIVAAMSNLVPPVELANPENQFRVDYILSVMNVPDFDFPPEFYEHAKALWEDEGVRACYERSNEYQLIDCAQ

SEQ ID NO: 6071 - protein, 61 aa, Homo Sapiens
QRNEEKAQREANKKIEKQLQKDKQVYRATHRLLLLGAGESGKSTIVKQMRILHVNGFNGEI

SEQ ID NO: 6072 - protein, 199 aa, Homo Sapiens
  misc_feature (1)..(1): Xaa can be any naturally occurring amino acid
XAFGGCFGRSESPQPKASRSLKVKKVPLAEKRRQMRKEALEKRAQKRAEKKRSKLIDKQLQDEKMGYMCTHRLLLLGAGESGKSTIVKQMRILHVNGFNGDEKATKVQDIKNNLKEAIETIVAAMSNLVPPVELANPENQFRVDYILSVMNVPDFDFPPEFYEHAKALWEDEGVRACYERSNEYQLIDCAQYFLDKIDV

SEQ ID NO: 6073 - protein, 184 aa, Homo Sapiens
  misc_feature (1)..(1): Xaa can be any naturally occurring amino acid
XGRRVYYDEGVASSDDDSSGDESDDGTSGCLRWFQHRRNRRRRKPQRNLLRNFLVQAFGGCFGRSESPQPKASRSLKVKKVPLAEKRRQMRKEALEKRAQKRAEKKRSKLIDKQLQDEKMGYMCTHRLLLLGRKVVPSDTEGRFRLDRPAPATVSWTGRGFSVSSLLIRSPNPPAFTVEKPDTQ

SEQ ID NO: 6074 - protein, 113 aa, Homo Sapiens
  misc_feature (1)..(1): Xaa can be any naturally occurring amino acid
XTTEPETEPEDDRGPVVPKHSTFGQSLTQRLHALKLRSPDASPSRAPPSTQEPQSPREGEELKPEDKDPRDPEESKEPKEEKQRRRCKPKKPTRRDASPESPSKKGPIPIRRH

SEQ ID NO: 6075 - protein, 93 aa, Homo Sapiens
  misc_feature (1)..(1): Xaa can be any naturally occurring amino acid
XVPLAEKRRQMRKEALEKRAQKRAEKKRSKLIDKQLQDEKMGYMCTHRLLLLGAGESGKSTIVKQMRILHVNGFNGEGGEEDPQAARSNSDGI

SEQ ID NO: 6076 - protein, 172 aa, Homo Sapiens
MATWALLLLAAMLLGNPGLEVSVSPKGKNTSGRESGFGWAIWMEGLVFSRLSPEYYDLARAHLRDEEKSCPCLAQEGPQGDLLTKTQELGRDYRTCLTIVQKLKKMVDKPTQRSVSNAATRVCRTGRSRWRDVCRNFMRRYQSRVTQGLVAGETAQQICEDLRLCIPSTGPL

SEQ ID NO: 6077 - protein, 145 aa, Homo Sapiens
MATWALLLLAAMLLGNPGLVFSRLSPEYYDLARAHLRDEEKSCPCLAQEGPQGDLLTKTQELGRDYRTCLTIVQKLKKMVDKPTQRSVSNAATRVCRTGRSRWRDVCRNFMRRYQSRVTQGLVAGETAQQICEDLRLCIPSTGPL

SEQ ID NO: 6078 - protein, 130 aa, Homo Sapiens
MEGLVFSRLSPEYYDLARAHLRDEEKSCPCLAQEGPQGDLLTKTQELGRDYRTCLTIVQKLKKMVDKPTQRSVSNAATRVCRTGRSRWRDVCRNFMRRYQSRVTQGLVAGETAQQICEDLRLCIPSTGPL

SEQ ID NO: 6079 - protein, 187 aa, Homo Sapiens
  misc_feature (1)..(1): Xaa can be any naturally occurring amino acid
XHLRDEEKSCPCLAQEGPQGDLLTKTQELGRDYRTCLTIVQKLKKMVDKPTQRSVSNAATRVCRTGRSRWRDVCRNFMRRYQSRVTQGLVAGETAQQICEDLRLCIPSTGPTTCSGCRLASRMCLWVPSEPSHLVLWKKHRLLSSDPGNLSNLCRLLASSIQNPLSSLPPLTPSAVLPSHENKVSSK

SEQ ID NO: 6080 - protein, 76 aa, Homo Sapiens
MAAGLARLLLLLGLSAGGPAPAGAAKMKVVEEPNAFGVNNPFLPQASRLQAKRDPSPVSETGFHRVSQDGLDLLTS

SEQ ID NO: 6081 - protein, 76 aa, Homo Sapiens; identical to SEQ ID NO: 6080

SEQ ID NO: 6082 - protein, 61 aa, Homo Sapiens
MAAGLARLLLLLGLSAGGPAPAGAAKMKVVEEPNAFGVNNPFLPQASRLQAKRDPSPVSGE

SEQ ID NO: 6083 - protein, 305 aa, Homo Sapiens
MAAGLARLLLLLGLSAGGPAPAGAAKMKVVEEPNAFGVNNPFLPQASRLQAKRDPSPVSGPVHLFRLSGKCFSLVESTYKYEFCPFHNVTQHEQTFRWNAYSGILGIWHEWEIANNTFTGMWMRDGDACRSRSRQSKVELACGKSNRLAHVSEPSTCVYALTFETPLVCHPHALLVYPTLPEALQRQWDQVEQDLADELITPQGHEKLLRTLFEDAGYLKTPEENEPTQLEGGPDSLGFETLENCRKAHKELSKEIKRLKGLLTQHGIPYTRPTETSNLEHLGHETPRAKSPEQLRGDPGLRGSL

SEQ ID NO: 6084 - protein, 185 aa, Homo Sapiens
  misc_feature (1)..(1): Xaa can be any naturally occurring amino acid
XRLLLLLGLSAGGEWPGRPRPQAPRALCTPASPLTVSLPVGPAPAGAAKMKVVEEPNAFGVNNPFLPQASRLQAKRDPSPVSGPVHLFRLSGKCFSLVESTYKYEFCPFHNVTQHEQTFRWNAYSGILGIWHEWEIANNTFTGMWMRDGDACRSRSRQSKVELACGKSNRLAHVSEPSTCVYALT

SEQ ID NO: 6085 - protein, 92 aa, Homo Sapiens
MKPIQKLLAGLILLTWCVEGCSSQHWSYGLRPGGKRDAENLIDSFQEIVKEVGQLAETQRFECTTHQPRSPLRDLKGALESLIEEETGQKKI

SEQ ID NO: 6086 - protein, 92 aa, Homo Sapiens; identical to SEQ ID NO: 6085

SEQ ID NO: 6087 - protein, 113 aa, Homo Sapiens
MASSRRGLLLLLLLTAHLGPSEAQHWSHGWYPGGKRALSSAQDPQNALRPPAGSPVQTAHGLPSDALAPLDDSMPWEGRTTAQWSLHRKRHLARTLLTAAREPRPAPPSSNKV

SEQ ID NO: 6088 - protein, 113 aa, Homo Sapiens; identical to SEQ ID NO: 6087

SEQ ID NO: 6089 - protein, 120 aa, Homo Sapiens
MASSRRGLLLLLLLTAHLGPSEAQHWSHGWYPGGKRALSSAQDPQNALRPPGRALDTAAGSPVQTAHGLPSDALAPLDDSMPWEGRTTAQWSLHRKRHLARTLLTAAREPRPAPPSSNKV

SEQ ID NO: 6090 - protein, 112 aa, Homo Sapiens
MASSRRGLLLLLLLTAHLGPSEAQHWSHGWYPGGKRALSSAQDPQNALRPPGSPVQTAHGLPSDALAPLDDSMPWEGRTTAQWSLHRKRHLARTLLTAAREPRPAPPSSNKV

SEQ ID NO: 6091 - protein, 496 aa, Homo Sapiens
MDNYLLLQTPLKKTKALIGEMGMTFSSAYVPSALCCPSRASILTGKYPHNHHVVNNTLEGNCSSKSWQKIQEPNTFPAILRSMCGYQTFFAGKYLNEYGAPDAGGLEHVPLGWSYWYALEKNSKYYNYTLSINGKARKHGENYSVDYLTDVLANVSLDFLDYKSNFEPFFMMIATPAPHSPWTAAPQYQKAFQNVFAPRNKNFNIHGTNKHWLIRQAKTPMTNSSIQFLDNAFRKRWQTLLSVDDLVEKLVKRLEFTGELNNTYIFYTSDNGYHTGQFSLPIDKRQLYEFDIKVPLLVRGPGIKPNQTSKMLVANIDLGPTILDIAGYDLNKTQMDGMSLLPILRGASNLTWRSDVLVEYQGEGRNVTDPTCPSLSPGVSQCFPDCVCEDAYNNTYACVRTMSALWNLQYCEFDDQEVFVEVYNLTADPDQITNIAKTIDPELLGKMNYRLMMLQSCSGPTCRTPGVFDPGYRFDPRLMFSNRGSVRTRRFSKHLL

SEQ ID NO: 6092 - protein, 248 aa, Homo Sapiens
MGMTFSSAYVPSALCCPSRASILTGKYPHNHHVVNNTLEGNCSSKSWQKIQEPNTFPAILRSMCGYQTFFAGKYLNEYGAPDAGGLEHVPLGWSYWYALEKNSKYYNYTLSINGKARKHGENYSVDYLTDVLANVSLDFLDYKSNFEPFFMMIATPAPHSPWTAAPQYQKAFQNVFAPRNKNFNIHGTNKHWLIRQAKTPMTNSSIQFLDNAFRKRWQTLLSVDDLVEKLVKRLEFTGELNNTYIFYT

SEQ ID NO: 6093 - protein, 584 aa, Homo Sapiens
MRLLPLAPGRLRRGSPRHLPSCSPALLLLVLGGCLGVFGVAAGTRRPNVVLLLTDDQDEVLGGMAFSEYSTTNCQTGLQGEELGQEHLRTYLEPSRTPLKKTKALIGEMGMTFSSAYVPSALCCPSRASILTGKYPHNHHVVNNTLEGNCSSKSWQKIQEPNTFPAILRSMCGYQTFFAGKYLNEYGAPDAGGLEHVPLGWSYWYALEKNSKYYNYTLSINGKARKHGENYSVDYLTDVLANVSLDFLDYKSNFEPFFMMIATPAPHSPWTAAPQYQKAFQNVFAPRNKNFNIHGTNKHWLIRQAKTPMTNSSIQFLDNAFRKRWQTLLSVDDLVEKLVKRLEFTGELNNTYIFYTSDNGYHTGQFSLPIDKRQLYEFDIKVPLLVRGPGIKPNQTSKMLVANIDLGPTILDIAGYDLNKTQMDGMSLLPILRGASNLTWRSDVLVEYQGEGRNVTDPTCPSLSPGVSQCFPDCVCEDAYNNTYACVRTMSALWNLQYCEFDDQEVFVEVYNLTADPDQITNIAKTIDPELLGKMNYRLMMLQSCSGPTCRTPGVFDPGYRFDPRLMFSNRGSVRTRRFSKHLL

SEQ ID NO: 6094 - protein, 552 aa, Homo Sapiens
MRLLPLAPGRLRRGSPRHLPSCSPALLLLVLGGCLGVFGVAAGTRRPNVVLLLTDDQDEVLGGMTPLKKTKALIGEMGMTFSSAYVPSALCCPSRASILTGKYPHNHHVVNNTLEGNCSSKSWQKIQEPNTFPAILRSMCGYQTFFAGKYLNEYGAPDAGGLEHVPLGWSYWYALEKNSKYYNYTLSINGKARKHGENYSVDYLTDVLANVSLDFLDYKSNFEPFFMMIATPAPHSPWTAAPQYQKAFQNVFAPRNKNFNIHGTNKHWLIRQAKTPMTNSSIQFLDNAFRKRWQTLLSVDDLVEKLVKRLEFTGELNNTYIFYTSDNGYHTGQFSLPIDKRQLYEFDIKVPLLVRGPGIKPNQTSKMLVANIDLGPTILDIAGYDLNKTQMDGMSLLPILRGASNLTWRSDVLVEYQGEGRNVTDPTCPSLSPGVSQCFPDCVCEDAYNNTYACVRTMSALWNLQYCEFDDQEVFVEVYNLTADPDQITNIAKTIDPELLGKMNYRLMMLQSCSGPTCRTPGVFDPGYRFDPRLMFSNRGSVRTRRFSKHLL

SEQ ID NO: 6095 - protein, 532 aa, Homo Sapiens
MRLLPLAPGRLRRGSPRHLPSCSPALLLLVLGGCLGVFGVAAGTRRPNVVLLLTDDQDEVLGGMYVPSALCCPSRASILTGKYPHNHHVVNNTLEGNCSSKSWQKIQEPNTFPAILRSMCGYQTFFAGKYLNEYGAPDAGGLEHVPLGWSYWYALEKNSKYYNYTLSINGKARKHGENYSVDYLTDVLANVSLDFLDYKSNFEPFFMMIATPAPHSPWTAAPQYQKAFQNVFAPRNKNFNIHGTNKHWLIRQAKTPMTNSSIQFLDNAFRKRWQTLLSVDDLVEKLVKRLEFTGELNNTYIFYTSDNGYHTGQFSLPIDKRQLYEFDIKVPLLVRGPGIKPNQTSKMLVANIDLGPTILDIAGYDLNKTQMDGMSLLPILRGASNLTWRSDVLVEYQGEGRNVTDPTCPSLSPGVSQCFPDCVCEDAYNNTYACVRTMSALWNLQYCEFDDQEVFVEVYNLTADPDQITNIAKTIDPELLGKMNYRLMMLQSCSGPTCRTPGVFDPGYRFDPRLMFSNRGSVRTRRFSKHLL

SEQ ID NO: 6096 - protein, 303 aa, Homo Sapiens
  misc_feature (1)..(1): Xaa can be any naturally occurring amino acid
XYNYTLSINGKARKHGENYSVDYLTDVLANVSLDFLDYKSNFEPFFMMIATPAPHSPWTAAPQYQKAFQNVFAPRNKNFNIHGTNKHWLIRQAKTPMTNSSIQFLDNAFRKRWQTLLSVDDLVEKLVKRLEFTGELNNTYIFYTSDNGYHTGQFSLPIDKRQLYEFDIKVPLLVRGPGIKPNQTSKRGASNLTWRSDVLVEYQGEGRNVTDPTCPSLSPGVSQCFPDCVCEDAYNNTYACVRTMSALWNLQYCEFDDQEVFVEVYNLTADPDQITNIAKTIDPELLGKMNYRLMMLQSCSGPT

SEQ ID NO: 6097 - protein, 80 aa, Homo Sapiens
MMGLGNGRRSMKSPPLVLAALVACIIVLGFNYWIASSRSVDLQTRIMELEGRVRRAAAERGAVELKKNEFQGELEKQREQ

SEQ ID NO: 6098 - protein, 121 aa, Homo Sapiens
MMGLGNGRRSMKSPPLVLAALVACIIVLGFNYWIASSRSVDLQTRIMELEGRVRRAAAERGAVELKKNEFQGELEKQREQLDKIQSSHNFQLESVNKLYQDEKAVLVNNITTGERLIRVLQ

SEQ ID NO: 6099 - protein, 401 aa, Homo Sapiens
MMGLGNGRRSMKSPPLVLAALVACIIVLGFNYWIASSRSVDLQTRIMELEGRVRRAAAERGAVELKKNEFQGELEKQREQLDKIQSSHNFQLESVNKLYQDEKAVLVNNITTGERLIRVLQDQLKTLQRNYGRLQQDVLQFQKNQTNLERKFSYDLSQCINQMKEVKEQCEERIEEVTKKGNEAVASRDLSENNDQRQQLQALSEPQPRLQAAGLPHTEVPQGKGNVLGNSKSQTPAPSSEVVLDSKRQVEKEETNEIQVVNEEPQRDRLPQEPGREQVVEDRPVGGRGFGGAGELGQTPQVQAALSVSQENPEMEGPERDQLVIPDGQEEEQEAAGEGRNQQKLRGEDDYNMDENEAESETDKQAALAGNDRNIDVFNVEDQKRDTINLLDQREKRNHTL

SEQ ID NO: 6100 - protein, 401 aa, Homo Sapiens; identical to SEQ ID NO: 6099

SEQ ID NO: 6101 - protein, 105 aa, Homo Sapiens
MMGLGNGRRSMKSPPLVLAALVACIIVLGFNYWIASSRSVDLQTRIMELEGRVRRAAAERGAVELKKNEFQGELEKQREQLDKIQSSHNFQLESVNKLYQDEKTS

SEQ ID NO: 6102 - protein, 246 aa, Homo Sapiens
MSWAAVLAVAAARFGHFWGCRWPGPMAQGWAGFSEEELRRLKQTKDPFEPQRRLPAKKSRQQLQREKALVEQSQKLGLQDGSTSLLPEQLLSAPKQRVNVQKPPFSSPTLPSHFTLTSPVGDGQPQGIESQPKELGLENSHDGHNNVEILPPKPDCKLEKKKVELQEKSRWEVLQQEQRLMEEKNKRKKALLAKAIAERSKRTQAETMKLKRIQKELQALDDMVSADIGILRNRIDQASLDYSYAR

SEQ ID NO: 6103 - protein, 394 aa, Homo Sapiens
MSWAAVLAVAAARFGHFWGCRWPGPMAQGWAGFSEEELRRLKQTKDPFEPQRRLPAKKSRQQLQREKALVEQSQKLGLQDGSTSLLPEQLLSAPKQRVNVQKPPFSSPTLPSHFTLTSPVGDGQPQGIESQPKELGLENSHDGHNNVEILPPKPDCKLEKKKVELQEKSRWEVLQQEQRLMEEKNKRKKALLAKAIAERSKRTQAETMKLKRIQKELQALDDMVSADIGILRNRIDQASLDYSYARKRFDRAEAEYIAAKLDIQRKTEIKEQLTEHLCTIIQQNELRKAKKLEELMQQLDVEADEETLELEVEVERLLHEQEVESRRPVVRLERPFQPAEESVTLEFAKENRKCQEQAVSPKVDDQCGNSSSIPFLSPNCPNQEGNDISAALAT

SEQ ID NO: 6104 - protein, 126 aa, Homo Sapiens
  misc_feature (1)..(1): Xaa can be any naturally occurring amino acid
XSWAAVLAVAAARFGHFWGCRWPGPMAQGWAGFSEEELRRLKQTKGYKCPGLWSDSSRLMRRQTTKLCDSRYCKNLLQRQEEPHSAGDWMELGKISQSLCVSRGAFSRTKEKSTKDMNRYFLEKEI

SEQ ID NO: 6105 - protein, 59 aa, Homo Sapiens
MALLHSGRVLPGIAAAFHPGLAAAASARARQRPRLPQKIWTRNTCPLGDWLNFARHLQN

SEQ ID NO: 6106 - protein, 430 aa, Homo Sapiens
MALLHSGRVLPGIAAAFHPGLAAAASARASSWWTHVEMGPPDPILGVTEAFKRDTNSKKMNLGVGAYRDDNGKPYVLPSVRKAEAQIAAKNLDKEYLPIGGLAEFCKASAELALGENSEVLKSGRFVTVQTISGTGALRIGASFLQRFFKFSRDVFLPKPTWGNHTPIFRDAGMQLQGYRYYDPKTCGFDFTGAVEDISKIPEQSVLLLHACAHNPTGVDPRPEQWKEIATVVKKRNLFAFFDMAYQGFASGDGDKDAWAVRHFIEQGINVCLCQSYAKNMGLYGERVGAFTMVCKDADEAKRVESQLKILIRPMYSNPPLNGARIAAAILNTPDLRKQWLQEVKVMADRIIGMRTQLVSNLKKEGSTHNWQHITDQIGMFCFTGLKPEQVERLIKEFSIYMTKDGRISVAGVTSSNVGYLAHAIHQVTK

SEQ ID NO: 6107 - protein, 387 aa, Homo Sapiens
MALLHSGRVLPGIAAAFHPGLAAAASARASSWWTHVEMGPPDPILGVTEAFKRDTNSKKMNLGVGAYRDDNGKPYVLPSVRKFVTVQTISGTGALRIGASFLQRFFKFSRDVFLPKPTWGNHTPIFRDAGMQLQGYRYYDPKTCGFDFTGAVEDISKIPEQSVLLLHACAHNPTGVDPRPEQWKEIATVVKKRNLFAFFDMAYQGFASGDGDKDAWAVRHFIEQGINVCLCQSYAKNMGLYGERVGAFTMVCKDADEAKRVESQLKILIRPMYSNPPLNGARIAAAILNTPDLRKQWLQEVKVMADRIIGMRTQLVSNLKKEGSTHNWQHITDQIGMFCFTGLKPEQVERLIKEFSIYMTKDGRISVAGVTSSNVGYLAHAIHQVTK

SEQ ID NO: 6108 - protein, 145 aa, Homo Sapiens
MPHLMERMVGSGLLWLALVSCILTQASAVQRDPSTVEDKCEKACRPEEECLALNSTWGCFCRQDLNSSDVHSLQPQLDCGPREIKVKVDKCLLGGLGLGEEVIAYLRDPNCSSILQTEERNWVSVTSPVQASACRNILERNQTHA

SEQ ID NO: 6109 - protein, 387 aa, Homo Sapiens
MPHLMERMVGSGLLWLALVSCILTQASAVQRDPSTVEDKCEKACRPEEECLALNSTWGCFCRQDLNSSDVHSLQPQLDCGPREIKVKVDKCLLGGLGLGEEVIAYLRDPNCSSILQTEERNWVSVTSPVQASACRNILERNQTHAIYKNTLSLVNDFIIRDTILNINFQCAYPLDMKVSLQAALQPIVSSLNVSVDGNGEFIVRMALFQDQNYTNPYEGDAVELSVESVLYVGAILEQGDTSRFNLVLRNCYATPTEDKADLVKYFIIRNSCSNQRDSTIHVEENGQSSESRFSVQMFMFAGHYDLVFLHCEIHLCDSLNEQCQPSCSRSQVRSEVPAIDLARVLDLGPITRRGAQSPGVMNGTPSTAGFLVAWPMVLLTVLLAWLF

SEQ ID NO: 6110 - protein, 163 aa, Homo Sapiens
MPHLMERMVGSGLLWLALVSCILTQASAVQRGEGGVRMSETCVQVHRCQTDAPMWLNGTHPALGDGITNHTACAHWSGNCCFWKTEVLVKACPGGYHVYRLEGTPWCNLRYCTDPSTVEDKCEKACRPEEECLALNSTWGCFCRQDLNSSDVHSLQPQLDCGP

SEQ ID NO: 6111 - protein, 128 aa, Homo Sapiens
MPHLMERMVGSGLLWLALVSCILTQASAVQRGYGNPIEASSYGLDLDCGAPGTPEAHVCFDPCQNYTLLDEPFRSTENSAGSQGCDKNMSGWYRFVGEGGVRMSETCVQVHRCQTDAPMWLNGTHPAL

SEQ ID NO: 6112 - protein, 534 aa, Homo Sapiens
MPHLMERMVGSGLLWLALVSCILTQASAVQRGYGNPIEASSYGLDLDCGAPGTPEAHVCFDPCQNYTLLDEPFRSTENSAGSQGCDKNMSGWYRFVGEGGVRMSETCVQVHRCQTDAPMWLNGTHPALGDGITNHTACAHWSGNCCFWKTEVLVKACPGGYHVYRLEGTPWCNLRYCTDPSTVEDKCEKACRPEEECLALNSTWGCFCRQDLNSSDVHSLQPQLDCGPREIKVKVDKCLLGGLGLGEEVIAYLRDPNCSSILQTEERNWVSVTSPVQASACRNILERNQTHAIYKNTLSLVNDFIIRDTILNINFQCAYPLDMKVSLQAALQPIVSSLNVSVDGNGEFIVRMALFQDQNYTNPYEGDAVELSVESVLYVGAILEQGDTSRFNLVLRNCYATPTEDKADLVKYFIIRNSCSNQRDSTIHVEENGQSSESRFSVQMFMFAGHYDLVFLHCEIHLCDSLNEQCQPSCSRSQVRSEVPAIDLARVLDLGPITRRGAQSPGVMNGTPSTAGFLVAWPMVLLTVLLAWLF

SEQ ID NO: 6113 - protein, 537 aa, Homo Sapiens
MPHLMERMVGSGLLWLALVSCILTQASAVQRGYGNPIEASSYGLDLDCGAPGTPEAHVCFDPCQNYTLLDEPFRSTENSAGSQGCDKNMSGWYRFVGEGGVRMSETCVQVHRCQTDAPMWLNGTHPALGDGITNHTACAHWSGNCCFWKTEVLVKACPGGYHVYRLEGTPWCNLRYCTVPRDPSTVEDKCEKACRPEEECLALNSTWGCFCRQDLNSSDVHSLQPQLDCGPREIKVKVDKCLLGGLGLGEEVIAYLRDPNCSSILQTEERNWVSVTSPVQASACRNILERNQTHAIYKNTLSLVNDFIIRDTILNINFQCAYPLDMKVSLQAALQPIVSSLNVSVDGNGEFIVRMALFQDQNYTNPYEGDAVELSVESVLYVGAILEQGDTSRFNLVLRNCYATPTEDKADLVKYFIIRNSCSNQRDSTIHVEENGQSSESRFSVQMFMFAGHYDLVFLHCEIHLCDSLNEQCQPSCSRSQVRSEVPAIDLARVLDLGPITRRGAQSPGVMNGTPSTAGFLVAWPMVLLTVLLAWLF

SEQ ID NO: 6114 - protein, 390 aa, Homo Sapiens
MPHLMERMVGSGLLWLALVSCILTQASAVQRVPRDPSTVEDKCEKACRPEEECLALNSTWGCFCRQDLNSSDVHSLQPQLDCGPREIKVKVDKCLLGGLGLGEEVIAYLRDPNCSSILQTEERNWVSVTSPVQASACRNILERNQTHAIYKNTLSLVNDFIIRDTILNINFQCAYPLDMKVSLQAALQPIVSSLNVSVDGNGEFIVRMALFQDQNYTNPYEGDAVELSVESVLYVGAILEQGDTSRFNLVLRNCYATPTEDKADLVKYFIIRNSCSNQRDSTIHVEENGQSSESRFSVQMFMFAGHYDLVFLHCEIHLCDSLNEQCQPSCSRSQVRSEVPAIDLARVLDLGPITRRGAQSPGVMNGTPSTAGFLVAWPMVLLTVLLAWLF

SEQ ID NO: 6115 - protein, 141 aa, Homo Sapiens
MSGWYRFVGEGGVRMSETCVQVHRCQTDAPMWLNGTHPALGDGITNHTACAHWSGNCCFWKTEVLVKACPGGYHVYRLEGTPWCNLRYCTDPSTVEDKCEKACRPEEECLALNSTWGCFCRQDLNSSDVHSLQPQLDCGPR

SEQ ID NO: 6116 - protein, 42 aa, Homo Sapiens
  misc_feature (1)..(1): Xaa can be any naturally occurring amino acid
XERMVGSGLLWLALVSCILTQASAVQRGKYSAHLASQMSRKT

SEQ ID NO: 6117 - protein, 117 aa, Homo Sapiens
MKRSLAGRYRCSYQNGSLWSLPSDQLELVATGVFAKPSLSAQPGPAVSSGGDVTLQCQTRYGFDQFALYKEGDPAPYKNPERWYRASFPIITVTAAHSGTYRCYSFSSRDPYLWSAP

SEQ ID NO: 6118 - protein, 321 aa, Homo Sapiens
MSPSPTALFCLGLCLGRVPAQSGPLPKPSLQALPSSLVPLEKPVTLRCQGPPGVDLYRLEKLSSSRYQDQAVLFIPAMKRSLAGRYRCSYQNGSLWSLPSDQLELVATGVFAKPSLSAQPGPAVSSGGDVTLQCQTRYGFDQFALYKEGDPAPYKNPERWYRASFPIITVTAAHSGTYRCYSFSSRDPYLWSAPSDPLELVVTEFSEATAELTVSFTNEVFTTETSRSITASPKESDSPAGPARQYYTKGNLVRICLGAVILIILAGFLAEDWHSRRKRLRHRGRAVQRPLPPLPPLPLTRKSNGGQDGGRQDVHSRGLCS

SEQ ID NO: 6119 - protein, 620 aa, Homo Sapiens
MSPSPTALFCLGLCLGRVPAQSGPLPKPSLQALPSSLVPLEKPVTLRCQGPPGVDLYRLEKLSSSRYQDQAVLFIPAMKRSLAGRYRCSYQNGSLWSLPSDQLELVATGVFAKPSLSAQPGPAVSSGGDVTLQCQTRYGFDQFALYKEGDPAPYKNPERWYRASFPIITVTAAHSGTYRCYSFSSRDPYLWSAPSDPLELVVTGTSVTPSRLPTEPPSPVAEFSEATAELTVSFTNEVFTTETSRSITASPKESDSPAGESCPPVLHQGQPGPDMPRGCDPNNPGGVSGRGLAQPEEAPAAQGQGCAEAASAPPAPPADPEIKRGSGWRPTGCSQPRVMFMTAEPQARSYPREGSWHGRRLKDWRVWSVEAGGQRLQLWKRGHAASSWCSIREPFGQCLSVCLPLCLRAPSIWDGRNLWRPHPPPCTLWMTWYPGWTTYWPLSSTSLIWAPDGSLRFPALRVDSVPSSVQNPPVLPFGPLCSCLVFPRNSHPHSISHCGLTNLLSSLRTGLAGSLGMSFIFLSVKLARCPLPFTLENKISLCNMVKPHLYQQNKKTQKLARCGGASLYSQQLRGLRWENGLSLGGRGCSELRSHHCTLARVTKPDFVSKNTGMNMSITLI

SEQ ID NO: 6120 - protein, 339 aa, Homo Sapiens
MSPSPTALFCLGLCLGRVPAQSGPLPKPSLQALPSSLVPLEKPVTLRCQGPPGVDLYRLEKLSSSRYQDQAVLFIPAMKRSLAGRYRCSYQNGSLWSLPSDQLELVATGVFAKPSLSAQPGPAVSSGGDVTLQCQTRYGFDQFALYKEGDPAPYKNPERWYRASFPIITVTAAHSGTYRCYSFSSRDPYLWSAPSDPLELVVTGTSVTPSRLPTEPPSPVAEFSEATAELTVSFTNEVFTTETSRSITASPKESDSPAGPARQYYTKGNLVRICLGAVILIILAGFLAEDWHSRRKRLRHRGRAVQRPLPPLPPLPLTRKSNGGQDGGRQDVHSRGLCS

SEQ ID NO: 6121 - protein, 134 aa, Homo Sapiens
MSALRPLLLLLLPLCPGPGPGPGSEAKVTRSCAETRQVLGARGYSLNLIPPALISGEHLRVCPQEYTCCSSETEQRLIRETEATFRGLVEDSGSFLVHTLAARHRKFDDNPDPGGCPSLCAGPGDWKKCGQRSA

SEQ ID NO: 6122 - protein, 579 aa, Homo Sapiens
MSALRPLLLLLLPLCPGPGPGPGSEAKVTRSCAETRQVLGARGYSLNLIPPALISGEHLRVCPQEYTCCSSETEQRLIRETEATFRGLVEDSGSFLVHTLAARHRKFDEFFLEMLSVAQHSLTQLFSHSYGRLYAQHALIFNGLFSRLRDFYGESGEGLDDTLADFWAQLLERVFPLLHPQYSFPPDYLLCLSRLASSTDGSLQPFGDSPRRLRLQITRTLVAARAFVQGLETGRNVVSEALKVPVSEGCSQALMRLIGCPLCRGVPSLMPCQGFCLNVVRGCLSSRGLEPDWGNYLDGLLILADKLQGPFSFELTAESIGVKISEGLMYLQENSAKVSAQVFQECGPPDPVPARNRRAPPPREEAGRLWSMVTEEERPTTAAGTNLHRLVWELRERLARMRGFWARLSLTVCGDSRMAADASLEAAPCWTGAGRGRYLPPVVGGSPAEQVNNPELKVDASGPDVPTRRRRLQLRAATARMKTAALGHDLDGQDADEDASGSGGGQQYADDWMAGAVAPPARPPRPPYPPRRDGSGGKGGGGSARYNQGRSRSGGASIGFHTQTILILSLSALALLGPR

SEQ ID NO: 6123 - protein, 320 aa, Homo Sapiens [sequence omitted]

SEQ ID NO: 6124 - protein, 572 aa, Homo Sapiens
MDAQTWPVGFRCLLLLALVGSARSEGVQTCEEVRKLFQWRLLGAVRGLPDSPRAGPDLQVCISKKPTCCTRKMEERYQIAARQDMQQFLQTSSSTLKFLISRNAAAFQETLETLIKQAENYTSILFCSTYRNMALEAAASVQEFFTDVGLYLFGADVNPEEFVNRFFDSLFPLVYNHLINPGVTDSSLEYSECIRMARRDVSPFGNIPQRVMGQMGRSLLPSRTFLQALNLGIEVINTTDYLHFSKECSRALLKMQYCPHCQGLALTKPCMGYCLNVMRGCLAHMAELNPHWHAYIRSLEELSDAMHGTYDIGHVLLNFHLLVNDAVLQAHLNGQKLLEQVNRICGRPVRTPTQSPRCSFDQSKEKHGMKTTTRNSEETLANRRKEFINSLRLYRSFYGGLADQLCANELAAADGLPCWNGEDIVKSYTQRVVGNGIKAQSGNPEVKVKGIDPVINQIIDKLKHVVQLLQGRSPKPDKWELLQLGSGGGMVEQVSGDCDDEDGCGGSGSGEVKRTLKITDWMPDDMNFSDVKQIHQTDTGSTLDTTGAGCAVATESMTFTLISVVMLLPGIW

SEQ ID NO: 6125 - protein, 51 aa, Homo Sapiens
  misc_feature (1)..(1): Xaa can be any naturally occurring amino acid
XMPDDMNFSDVKQIHQTDTGSTLDTTGAGCAVATESMTFTLISVVMLLPGI

SEQ ID NO: 6126 - protein, 263 aa, Homo Sapiens
DAMLLVAERLEGPFNIESVMDPIDVKISEAIMNMQENSMQVSAKVFQGCGQPKPAPALRSARSAPENFNTRFRPYNPEERPTTAAGTSLDRLVTDIKEKLKLSKKVWSALPYTICKDESVTAGTSNEEECWNGHSKARYLPEIMNDGLTNQINNPEVDVDITRPDTFIRQQIMALRVMTNKLKNAYNGNDVNFQDTSDESSGSGSGSGCMDDVCPTEFEFVTTEAPAVDPDRREVDSSAAQRGHSLLSWSLTCIVLALQRLCR

SEQ ID NO: 6127 - protein, 555 aa, Homo Sapiens
MPSWIGAVILPLLGLLLSLPAGADVKARSCGEVRQAYGAKGFSLADIPYQEIAGEHLRICPQEYTCCTTEMEDKLSQQSKLEFENLVEETSHFVRTTFVSRHKKFDEFFRELLENAEKSLNDMFVRTYGMLYMQNSEVFQDLFTELKRYYTGGNVNLEEMLNDFWARLLERMFQLINPQYHFSEDYLECVSKYTDQLKPFGDVPRKLKIQVTRAFIAARTFVQGLTVGREVANRVSKVSPTPGCIRALMKMLYCPYCRGLPTVRPCNNYCLNVMKGCLANQADLDTEWNLFIDAMLLVAERLEGPFNIESVMDPIDVKISEAIMNMQENSMQVSAKVFQGCGQPKPAPALRSARSAPENFNTRFRPYNPEERPTTAAGTSLDRLVTDIKEKLKLSKKVWSALPYTICKDESVTAGTSNEEECWNGHSKARYLPEIMNDGLTNQINNPEVDVDITRPDTFIRQQIMALRVMTNKLKNAYNGNDVNFQDTSDESSGSGSGSGCMDDVCPTEFEFVTTEAPAVDPDRREVDSSAAQRGHSLLSWSLTCIVLALQRLCR

SEQ ID NO: 6128 - protein, 109 aa, Homo Sapiens
MAFQKAVKGTILVGGGALATVLGLSQFAHYRRKQMNLAYVKAADCISEPVNREPPSREAQLLTLQNTSEFDILVIGGGATGSGCALDAVTRGLKTALVERDDFSSGTSS

SEQ ID NO: 6129 - protein, 727 aa, Homo Sapiens
MAFQKAVKGTILVGGGALATVLGLSQFAHYRRKQMNLAYVKAADCISEPVNREPPSREAQLLTLQNTSEFDILVIGGGATGSGCALDAVTRGLKTALVERDDFSSGTSSRSTKLIHGGVRYLQKAIMKLDIEQYRMVKEALHERANLLEIAPHLSAPLPIMLPVYKWWQLPYYWVGIKLYDLVAGSNCLKSSYVLSKSRALEHFPMLQKDKLVGAIVYYDGQHNDARMNLAIALTAARYGAATANYMEVVSLLKKTDPQTGKVRVSGARCKDVLTGQEFDVRAKCVINATGPFTDSVRKMDDKDAAAICQPSAGVHIVMPGYYSPESMGLLDPATSDGRVIFFLPWQKMTIAGTTDTPTDVTHHPIPSEEDINFILNEVRNYLSCDVEVRRGDVLAAWSGIRPLVTDPKSADTQSISRNHVVDISESGLITIAGGKWTTYRSMAEDTINAAVKTHNLKAGPSRTVGLFLQGGKDWSPTLYIRLVQDYGLESEVAQHLAATYGDKAFEVAKMASVTGKRWPIVGVRLVSEFPYIEAEVKYGIKEYACTAVDMISRRTRLAFLNVQAAEEALPRIVELMGRELNWDDYKKQEQLETARKFLYYEMGYKSRSEQLTDRSEISLLPSDIDRYKKRFHKFDADQKGFITIVDVQRVLESINVQMDENTLHEILNEVDLNKNGQVELNEFLQLMSAIQKGRVSGSRLAILMKTAEENLDRRVPIPVDRSCGGL

SEQ ID NO: 6130 - protein, 727 aa, Homo Sapiens; identical to SEQ ID NO: 6129

SEQ ID NO: 6131 - protein, 727 aa, Homo Sapiens; identical to SEQ ID NO: 6129

SEQ ID NO: 6132 - protein, 727 aa, Homo Sapiens; identical to SEQ ID NO: 6129

SEQ ID NO: 6133 - protein, 379 aa, Homo Sapiens
MAFQKAVKGTILVGGGALATVLGLSQFAHYRRKQMNLAYVKAADCISEPVNREPPSREAQLLTLQNTSEFDILVIGGGATGSGCALDAVTRGLKTALVERDDFSSGTSSRSTKLIHGGVRYLQKAIMKLDIEQYRMVKEALHERANLLEIAPHLSAPLPIMLPVYKWWQLPYYWVGIKLYDLVAGSNCLKSSYVLSKSRALEHFPMLQKDKLVGAIVYYDGQHNDARMNLAIALTAARYGAATANYMEVVSLLKKTDPQTGKVRVSGARCKDVLTGQEFDVRAKCVINATGPFTDSVRKMDDKDAAAICQPSAGVHIVMPGYYSPESMGLLDPATSDGRVIFFLPWQKMTIAGTTDTPTDVTHHPIPSEEDINFILNEV

SEQ ID NO: 6134 - protein, 56 aa, Homo Sapiens
MAFQKAVKGTILVGGGALATVLGLSQFAHYRRKQNIVLSGELRNEECILLRKCGKT

SEQ ID NO: 6135 - protein, 56 aa, Homo Sapiens; identical to SEQ ID NO: 6134

SEQ ID NO: 6136 - protein, 601 aa, Homo Sapiens
MKLDIEQYRMVKEALHERANLLEIAPHLSAPLPIMLPVYKWWQLPYYWVGIKLYDLVAGSNCLKSSYVLSKSRALEHFPMLQKDKLVGAIVYYDGQHNDARMNLAIALTAARYGAATANYMEVVSLLKKTDPQTGKVRVSGARCKDVLTGQEFDVRAKCVINATGPFTDSVRKMDDKDAAAICQPSAGVHIVMPGYYSPESMGLLDPATSDGRVIFFLPWQKMTIAGTTDTPTDVTHHPIPSEEDINFILNEVRNYLSCDVEVRRGDVLAAWSGIRPLVTDPKSADTQSISRNHVVDISESGLITIAGGKWTTYRSMAEDTINAAVKTHNLKAGPSRTVGLFLQGGKDWSPTLYIRLVQDYGLESEVAQHLAATYGDKAFEVAKMASVTGKRWPIVGVRLVSEFPYIEAEVKYGIKEYACTAVDMISRRTRLAFLNVQAAEEALPRIVELMGRELNWDDYKKQEQLETARKFLYYEMGYKSRSEQLTDRSEISLLPSDIDRYKKRFHKFDADQKGFITIVDVQRVLESINVQMDENTLHEILNEVDLNKNGQVELNEFLQLMSAIQKGRVSGSRLAILMKTAEENLDRRVPIPVDRSCGGL

SEQ ID NO: 6137 - protein, 73 aa, Homo Sapiens
MDVTSQARGVGLEMYPGTAQPAAPNTTSPELNLSHPLLGTALANGTGELSEHQQYVIGLFLSCLYTIFLFPIG

SEQ ID NO: 6138 - protein, 375 aa, Homo Sapiens
MDVTSQARGVGLEMYPGTAQPAAPNTTSPELNLSHPLLGTALANGTGELSEHQQYVIGLFLSCLYTIFLFPIGFVGNILILVVNISFREKMTIPDLYFINLAVADLILVADSLIEVFNLHERYYDIAVLCTFMSLFLQVNMYSSVFFLTWMSFDRYIALARAMRCSLFRTKHHARLSCGLIWMASVSATLVPFTAVHLQHTDEACFCFADVREVQWLEVTLGFIVPFAIIGLCYSLIVRVLVRAHRHRGLRPRRQKALRMILAVVLVFFVCWLPENVFISVHLLQRTQPGAAPCKQSFRHAHPLTGHIVNLAAFSNSCLNPLIYSFLGETFRDKLRLYIEQKTNLPALNRFCHAALKAVIPDSTEQSDVRFSSAV

SEQ ID NO: 6139 - protein, 375 aa, Homo Sapiens; identical to SEQ ID NO: 6138

SEQ ID NO: 6140 - protein, 375 aa, Homo Sapiens; identical to SEQ ID NO: 6138

SEQ ID NO: 6141 - protein, 375 aa, Homo Sapiens; identical to SEQ ID NO: 6138

SEQ ID NO: 6142 - protein, 408 aa, Homo Sapiens
MDVTSQARGVGLEMYPGTAQPAAPNTTSPELNLSHPLLGTALANGTGELSEHQQYVIGLFLSCLYTIFLFPIGFVGNILILVVNISFREKMTIPDLYFINLAVADLILVADSLIEVFNLHERYYDIAVLCTFMSLFLQVNMYSSVFFLTWMSFDRYIALARAMRCSLFRTKHHARLSCGLIWMASVSATLVPFTAVHLQHTDEACFCFADVREVQWLEVTLGFIVPFAIIGLCYSLIVRVLVRAHRHRGLRPRRQKALRMILAVVLVFFVCWLPENVFISVHLLQRTQPGAAPCKQSFRHAHPLTHGHVMSLNCGQMWLLAPRGLARVTLAWSPWGCLGNLTTGHLALLTQNCYNPKALAPQGPKASGDQPVTQLLPANPACRCTCLPLQETFLTPSTRKATRRGHCG

SEQ ID NO: 6143 - protein, 176 aa, Homo Sapiens
MSLNCGQMWLLAPRGLARVTLAWSPWGCLGNLTTGHLALLTQNCYNPKALAPQGPKASGDQPVTQLLPANPACRCTCLPLQETFLSVLHLPGWQQWRCAASPGPRGAAALGPEQQEGPSVERPPSAPGWFSHCLLTSTWQLHSCGLGPCELPCGLVGCQDNEILQHLWLTNLFLQK

SEQ ID NO: 6144 - protein, 129 aa, Homo Sapiens
MPMASPQTLVLYLLVLAVTEAWGQEAVIPGCHLHPFNVTVRSDRQGTCQGSHVAQACVGHCESSAFPSRYSVLVASGYRHNITSVSQCCTISGLKKVKVQLQCVGSRREELEIFTARACQCDMCRLSRY

SEQ ID NO: 6145 - protein, 129 aa, Homo Sapiens; identical to SEQ ID NO: 6144

SEQ ID NO: 6146 - protein, 118 aa, Homo Sapiens
MPMASPQTLVLYLLVLAVTEAWGQEAVIPGCHLHPFNVTVRSDRQGTCQGSHVAQACVGHCESSAFPSRYSVLVASGYRHNITSVSQCCTISGLKKVRRARARWMDAGVAGRPERWRS

SEQ ID NO: 6147 - protein, 130 aa, Homo Sapiens
MKLAFLFLGPMALLLLAGYGCVLGASSGNLRTFVGCAVREFTFLAKKPGCRGLRITTDACWGRCETWEKPILEPPYIEAHHRVCTYNETKQVTVKLPNCAPGVDPFYTYPVAIRCDCGACSTATTECETI

SEQ ID NO: 6148 - protein, 130 aa, Homo Sapiens; identical to SEQ ID NO: 6147

SEQ ID NO: 6149 - protein, 184 aa, Homo Sapiens
MKALGAVLLALLLFGRPGRGQTQQEEEEEDEDHGPDDYDEEDEDEVEEEETNRLPGGRSRVLLRCYTCKSLPRDERCNLTQNCSHGQTCTTLIAHGNTESGLLTTHSTWCTDSCQPITKTVEGTQVTMTCCQSSLCNVPPWQSSRVQDPTGKGAGGPRGSSETVGAALLLNLLAGLGAMGARRP

SEQ ID NO: 6150 - protein, 840 aa, Homo Sapiens
MSAFRLWPGLLIMLGSLCHRGSPCGLSTHVEIGHRALEFLQLHNGRVNYRELLLEHQDAYQAGIVFPDCFYPSICKGGKFHDVSESTHWTPFLNASVHYIRENYPLPWEKDTEKLVAFLFGITSHMAADVSWHSLGLEQGFLRTMGAIDFHGSYSEAHSAGDFGGDVLSQFEFNFNYLARRWYVPVKDLLGIYEKLYGRKVITENVIVDCSHIQFLEMYGEMLAVSKLYPTYSTKSPFLVEQFQEYFLGGLDDMAFWSTNIYHLTSFMLENGTSDCNLPENPLFIACGGQQNHTQGSKMQKNDFHRNLTTSLTESVDRNINYTERGVFFSVNSWTPDSMSFIYKALERNIRTMFIGGSQLSQKHVSSPLASYFLSFPYARLGWAMTSADLNQDGHGDLVVGAPGYSRPGHIHIGRVYLIYGNDLGLPPVDLDLDKEAHRILEGFQPSGRFGSALAVLDFNVDGVPDLAVGAPSVGSEQLTYKGAVYVYFGSKQGGMSSSPNITISCQDIYCNLGWTLLAADVNGDSEPDLVIGSPFAPGGGKQKGIVAAFYSGPSLSDKEKLNVEAANWTVRGEEDFSWFGYSLHGVTVDNRTLLLVGSPTWKNASRLGHLLHIRDEKKSLGRVYGYFPPNGQSWFTISGDKAMGKLGTSLSSGHVLMNGTLKQVLLVGAPTYDDVSKVAFLTVTLHQGGATRMYALTSDAQPLLLSTFSGDRRFSRFGGVLHLSDLDDDGLDEIIMAAPLRIADVTSGLIGGEDGRVYVYNGKETTLGDMTGKCKSWITPCPEEKAQYVLISPEASSRFGSSLITVRSKAKNQVVIAAGRSSLGARLSGALHVYSLGSD

SEQ ID NO: 6151 - protein, 560 aa, Homo Sapiens
MECLYYFLGFLLLAARLPLDAAKRFHDVLGNERPSAYMREHNQLNGWSSDENDWNEKLYPVWKRGDMRWKNSWKGGRVQAVLTSDSPALVGSNITFAVNLIFPRCQKEDANGNIVYEKNCRNEAGLSADPYVYNWTAWSEDSDGENGTGQSHHNVFPDGKPFPHHPGWRRWNFIYVFHTLGQYFQKLGRCSVRVSVNTANVTLGPQLMEVTVYRRHGRAYVPIAQVKDVYVVTDQIPVFVTMFQKNDRNSSDETFLKDLPIMFDVLIHDPSHFLNYSTINYKWSFGDNTGLFVSTNHTVNHTYVLNGTFSLNLTVKAAAPGPCPPPPPPPRPSKPTPSLGPAGDNPLELSRIPDENCQINRYGHFQATITIVEGILEVNIIQMTDVLMPVPWPESSLIDFVVTCQGSIPTEVCTIISDPTCEITQNTVCSPVDVDEMCLLTVRRTFNGSGTYCVNLTLGDDTSLALTSTLISVPDRDPASPLRMANSALISVGCLAIFVTVISLLVYKKHKEYNPIENSPGNVVRSKGLSVFLNRAKAVFFPGNQEKDPLLKNQEFKGVS

SEQ ID NO: 6152 - protein, 572 aa, Homo Sapiens
MECLYYFLGFLLLAARLPLDAAKRFHDVLGNERPSAYMREHNQLNGWSSDENDWNEKLYPVWKRGDMRWKNSWKGGRVQAVLTSDSPALVGSNITFAVNLIFPRCQKEDANGNIVYEKNCRNEAGLSADPYVYNWTAWSEDSDGENGTGQSHHNVFPDGKPFPHHPGWRRWNFIYVFHTLGQYFQKLGRCSVRVSVNTANVTLGPQLMEVTVYRRHGRAYVPIAQVKDVYVVTDQIPVFVTMFQKNDRNSSDETFLKDLPIMFDVLIHDPSHFLNYSTINYKWSFGDNTGLFVSTNHTVNHTYVLNGTFSLNLTVKAAAPGPCPPPPPPPRPSKPTPSLATTLKSYDSNTPGPAGDNPLELSRIPDENCQINRYGHFQATITIVEGILEVNIIQMTDVLMPVPWPESSLIDFVVTCQGSIPTEVCTIISDPTCEITQNTVCSPVDVDEMCLLTVRRTFNGSGTYCVNLTLGDDTSLALTSTLISVPDRDPASPLRMANSALISVGCLAIFVTVISLLVYKKHKEYNPIENSPGNVVRSKGLSVFLNRAKAVFFPGNQEKDPLLKNQEFKGVS

SEQ ID NO: 6153 - protein, 206 aa, Homo Sapiens
MECLYYFLGFLLLAARLPLDAAKRFHDVLGNERPSAYMREHNQLNGWSSDENDWNEKLYPVWKRGDMRWKNSWKGGRVQAVLTSDSPALVGSNITFAVNLIFPRCQKEDANGNIVYEKNCRNEAGLSADPYVYNWTAWSEDSDGENGTGQSHHNVFPDGKPFPHHPGWRRWNFIYVFHTLGWLLQTPKLLLYLSLKFQPSLFLLYN

SEQ ID NO: 6154 - protein, 588 aa, Homo Sapiens
MARGGAGAEEASLRSNALSWLACGLLALLANAWIILSISAKQQKHKPLELLLCFLAGTHILMAAVPLTTFAVVQLRRQASSDYDWNESICKVFVSTYYTLALATCFTVASLSYHRMWMVRWPVNYRLSNAKKQALHAVMGIWMVSFILSTLPSIGWHNNGERYYARGCQFIVSKIGLGFGVCFSLLLLGGIVMGLVCVAITFYQTLWARPRRARQARRVGGGGGTKAGGPGALGTRPAFEVPAIVVEDARGKRRSSLDGSESAKTSLQVTNLVSAIVFLYDSLTGVPILVVSFFSLKSDSAPPWMVLAVLWCSMAQTLLLPSFIWSCERYRADVRTVWEQCVAIMSEEDGDDDGGCDDYAEGRVCKVRFDANGATGPGSRDPAQVKLLPGRHMLFPPLERVHYLQVPLSRRLSHDETNIFSTPREPGSFLHKWSSSDDIRVLPAQSRALGGPPEYLGQRHRLEDEEDEEEAEGGGLASLRQFLESGVLGSGGGPPRGPGFFREEITTFIDETPLPSPTASPGHSPRRPRPLGLSPRRLSLGSPESRAVGLPLGLSAGRRCSLTGGEESARAWGGSWGPGNPIFPQLTL

SEQ ID NO: 6155 - protein, 304 aa, Homo Sapiens
MLSTGVVSFFSLKSDSAPPWMVLAVLWCSMAQTLLLPSFIWSCERYRADVRTVWEQCVAIMSEEDGDDDGGCDDYAEGRVCKVRFDANGATGPGSRDPAQVKLLPGRHMLFPPLERVHYLQVPLSRRLSHDETNIFSTPREPGSFLHKWSSSDDIRVLPAQSRALGGPPEYLGQRHRLEDEEDEEEAEGGGLASLRQFLESGVLGSGGGPPRGPGFFREEITTFIDETPLPSPTASPGHSPRRPRPLGLSPRRLSLGSPESRAVGLPLGLSAGRRCSLTGGEESARAWGGSWGPGNPIFPQLTL

SEQ ID NO: 6156 - protein, 284 aa, Homo Sapiens
MVLAVLWCSMAQTLLLPSFIWSCERYRADVRTVWEQCVAIMSEEDGDDDGGCDDYAEGRVCKVRFDANGATGPGSRDPAQVKLLPGRHMLFPPLERVHYLQVPLSRRLSHDETNIFSTPREPGSFLHKWSSSDDIRVLPAQSRALGGPPEYLGQRHRLEDEEDEEEAEGGGLASLRQFLESGVLGSGGGPPRGPGFFREEITTFIDETPLPSPTASPGHSPRRPRPLGLSPRRLSLGSPESRAVGLPLGLSAGRRCSLTGGEESARAWGGSWGPGNPIFPQLTL

SEQ ID NO: 6157 - protein, 228 aa, Homo Sapiens
  misc_feature (1)..(1): Xaa can be any naturally occurring amino acid
XITFYQTLWARPRRARQARRVGGGGGTKAGGPGALGTRPAFEVPAIVVEDARGKRRSSLDGSESAKTSLQVTNLVVSFFSLKSDSAPPWMVLAVLWCSMAQTLLLPSFIWSCERYRADVRTVWEQCVAIMSEEDGDDDGGCDDYAEGRVCKVRFDANGATGPGSRDPAQVKLLPGRHMLFPPLERVHYLQLKKLDLAAAAAHTFFVANPMHLQMREDMAKYRRMSGVR

SEQ ID NO: 6158 - protein, 138 aa, Homo Sapiens
MARLLQASCLLSLLLAGFVSQSRGQEKSKAPRQMGNPQMDCHGGISGTIYEYGALTIDGEEYIPFKQYAGKYVLFVNVASYGLTGQYIELNALQEELAPFGLVILGFPCNQFGKQEPGENSEILPTLKYVRPGGGFVP

SEQ ID NO: 6159 - protein, 62 aa, Homo Sapiens
MARLLQASCLLSLLLAGFVSQSRGQEKSKAPRQMGNPQVRETSTPFAAPSAAGTPPPTVVVS

SEQ ID NO: 6160 - protein, 72 aa, Homo Sapiens
MARLLQASCLLSLLLAGFVSQSRGQEKSKMDCHGGISGTIYEYGALTIDGEEYIPFKQYAGKYVLFVNVASY

SEQ ID NO: 6161 - protein, 225 aa, Homo Sapiens
MARLLQASCLLSLLLAGFVSQSRGQEKSKMDCHGGISGTIYEYGALTIDGEEYIPFKQYAGKYVLFVNVASYGLTGQYIELNALQEELAPFGLVILGFPCNQFGKQEPGENSEILPTLKYVRPGGGFVPNFQLFEKGDVNGEKEQKFYTFLKNSCPPTSELLGTSDRLFWEPMKVHDIRWNFEKFLVGPDGIPIMRWHHRTTVSNVKMDILSYMRRQAALGVKRK

SEQ ID NO: 6162 - protein, 225 aa, Homo Sapiens; identical to SEQ ID NO: 6161

SEQ ID NO: 6163 - protein, 99 aa, Homo Sapiens
MARLLQASCLLSLLLAGFVSQSRGQEKSKNMHYRKSLHHSVWSFWAFPATNLENRNQERTQRSFLPSSMSDQVEALSLISSSLRKGMSMERKSRNSTLS

SEQ ID NO: 6164 - protein, 170 aa, Homo Sapiens
  misc_feature (1)..(1): Xaa can be any naturally occurring amino acid
XCHGGISGTIYEYGALTIDGEEYIPFKQYAGKYVLFVNVASYGLTGQYIELNALQEELAPFGLVILGFPCNQFGKQEPGENSEILPTLKTPVLPPRSSWVHLTASSGNPRFTTSAGTLRSSWWGQMVYPSCAGTTGPRSATSRWTSCPTGGRQPWGSRGSNRPSHPMSTM

SEQ ID NO: 6165 - protein, 79 aa, Homo Sapiens
  misc_feature (1)..(1): Xaa can be any naturally occurring amino acid
XFGKQEPGENSEILPTLKYVRPGGGFVPNFQLFEKGDVNGEKEQKFYTFLKGQAIPQEGLGRKRVRGPQARLTLLLSLL

SEQ ID NO: 6166 - protein, 174 aa, Homo Sapiens
MCASRDDWRCARSMHEFSAKDIDGHMVNLDKYRGFVCIVTNVASQGKTEVNYTQLVDLHARYAECGLRILAFPCNQFGKQEPGSNEEIKEFAAGYNVKFDMFSKICVNGDDAHPLWKWMKIQPKGKGILGKTAWGLWGAAGDAHVHVLLFQCHQVELHQVPHRQERLRGEALRT

SEQ ID NO: 6167 - protein, 240 aa, Homo Sapiens
MCASRDDWRCARSMHEFSAKDIDGHMVNLDKYRGFVCIVTNVASQGKTEVNYTQLVDLHARYAECGLRILAFPCNQFGKQEPGSNEEIKEFAAGYNVKFDMFSKICVNGDDAHPLWKWMKIQPKGKGILGNAIKWNFTKFGHRLSTVPHRQERLRGEALRTHGGAPGDREGPAPLFLAPQVCGPARAPAHALGAFHRHSRPACKPAGGADPKIQRAPRRRKVPWPAGLGSAPPPLATLWE

SEQ ID NO: 6168 - protein, 169 aa, Homo Sapiens
MCASRDDWRCARSMHEFSAKDIDGHMVNLDKYRGFVCIVTNVASQGKTEVNYTQLVDLHARYAECGLRILAFPCNQFGKQEPGSNEEIKEFAAGYNVKFDMFSKICVNGDDAHPLWKWMKIQPKGKGILGNAIKWNFTKFLIDKNGCVVKRYGPMEEPLVIEKDLPHYF

SEQ ID NO: 6169 - protein, 133 aa, Homo Sapiens
MGRAGAGSPGRRRQRCQSRGRRRPRAPRRRKAPACRRRRARRRRKKPCPRSLRPEIHECPKSQDPCASRDDWRCARSMHEFSAKDIDGHMVNLDKGFVCIVTNVASQGKTEVNYTQLVDLHARYAECGLRILA

SEQ ID NO: 6170 - protein, 233 aa, Homo Sapiens
MGRAGAGSPGRRRQRCQSRGRRRPRAPRRRKAPACRRRRARRRRKKPCPRSLRPEIHECPKSQDPCASRDDWRCARSMHEFSAKDIDGHMVNLDKYRGFVCIVTNVASQGKTEVNYTQLVDLHARYAECGLRILAFPCNQFGKQEPGSNEEIKEFAAGYNVKFDMFSKICVNGDDAHPLWKWMKIQPKGKGILGNAIKWNFTKFLIDKNGCVVKRYGPMEEPLVIEKDLPHYF

SEQ ID NO: 6171 - protein, 179 aa, Homo Sapiens
MGRAGAGSPGRRRQRCQSRGRRRPRAPRRRKAPACRRRRARRRRKKPCPRSLRPEIHECPKSQDPCASRDDWRCARSMHEFSAKDIDGHMVNLDKYRGFVCIVTNVASQGKTEVNYTQLVDLHARYAECGLRILAFPCNQFGKQEPGSNEEIKEFAAGYNVKFDMFSKICVNGDDAHPL

SEQ ID NO: 6172 - protein, 154 aa, Homo Sapiens
MHEFSAKDIDGHMVNLDKYRGFVCIVTNVASQGKTEVNYTQLVDLHARYAECGLRILAFPCNQFGKQEPGSNEEIKEFAAGYNVKFDMFSKICVNGDDAHPLWKWMKIQPKGKGILGNAIKWNFTKFLIDKNGCVVKRYGPMEEPLVIEKDLPH

SEQ ID NO: 6173 - protein, 196 aa, Homo Sapiens
MSLGRLCRLLKPALLCGALAAPGLAGTMCASRDDWRCARSMHEFSAKDIDGHMVNLDKYRGFVCIVTNVASQGKTEVNYTQLVDLHARYAECGLRILAFPCNQFGKQEPGSNEEIKEFAAGYNVKFDMFSKICVNGDDAHPLWKWMKIQPKGKGILGNAIKWNFTKFLIDKNGCVVKRYGPMEEPLVIEKDLPHYF

SEQ ID NO: 6174 - protein, 196 aa, Homo Sapiens; identical to SEQ ID NO: 6173

SEQ ID NO: 6175 - protein, 177 aa, Homo Sapiens
MSLGRLCRLLKPALLCGALAAPGLAGTMCASRDDWRCARSMHEFSAKDIDGHMVNLDKYRGFVCIVTNVASQGKTEVNYTQLVDLHARYAECGLRILAFPCNQFGKQEPGSNEEIKEFAAGYNVKFDMFSKICVNGDDAHPLWKWMKIQPKGKGILGNSSSTRTAAWSATDPWRSPW

SEQ ID NO: 6176 - protein, 166 aa, Homo Sapiens
YAECGLRILAFPCNQFGKQEPGSNEEIKEFAAGYNVKFDMFSKICVNGDDAHPLWKWMKIQPKGKGILGNAIKWNFTKFLIDKNGCVVKRYGPMEEPLLHKCVAPPEPLPTPLEPSTGTHDGLPANLLVGQTRKSSVHPAGGRSHGLLGLARRPHPWLPCGNKQTN

SEQ ID NO: 6177 - protein, 221 aa, Homo Sapiens
MTTQLRVVHLLPLLLACFVQTSPKQEKMKMDCHKDEKGTIYDYEAIALNKNEYVSFKQYVGKHILFVNVATYCGLTAQYPELNALQEELKPYGLVVLGFPCNQFGKQEPGDNKEILPGLKYVRPGGGFVPSFQLFEKGDVNGEKEQKVFSFLKHSCPHPSEILGTFKSISWDPVKVHDIRWNFEKFLVGPDGIPVMRWSHRATVSSVKTDILAYLKQFKTK

SEQ ID NO: 6178 - protein, 100 aa, Homo Sapiens
MTTQLRVVHLLPLLLACFVQTSPKQEKMKMDCHKDEKGTIYDYEAIALNKNEYVSFKQYVGKHILFVNVATYCGLTAQYPGMSVQGEDLYLVSSFLRKGM

SEQ ID NO: 6179 - protein, 220 aa, Homo Sapiens
MFQQFQASCLVLFFLVGFAQQTLKPQNRKVDCNKGVTGTIYEYGALTLNGEEYIQFKQFAGKHVLFVNVAAYGLAAQYPELNALQEELKNFGVIVLAFPCNQFGKQEPGTNSEILLGLKYVCPGSGFVPSFQLFEKGDVNGEKEQKVFTFLKNSCPPTSDLLGSSSQLFWEPMKVHDIRWNFEKFLVGPDGVPVMHWFHQAPVSTVKSDILEYLKQFNTH

SEQ ID NO: 6180 - protein, 179 aa, Homo Sapiens
MFQQFQASCLVLFFLVGFAQQTLKPQNRKVDCNKGVTGTIYEYGALTLNGEEYIQFKQFAGKHVLFVNVAAYGLAAQYPELNALQEELKNFGVIVLAFPCNQFGKQEPGTNSEILLGLKTPALRPLIFWAHQANSSGSPRSMISAGTLRNFWWGPMESLSCIGSTRLQSAQSSQTSWST

SEQ ID NO: 6181 - protein, 220 aa, Homo Sapiens; identical to SEQ ID NO: 6179

SEQ ID NO: 6182 - protein, 187 aa, Homo Sapiens
MVAATVAAAWLLLWAAACAQQEQDFYDFKAVNIRGKLVSLEKYRGSVSLVVNVASECGFTDQHYRALQQLQRDLGPHHFNVLAFPCNQFGQQEPDSNKEIESFARRTYSVSFPMFSKIAVTGTGAHPAFKYLAQTSGKEPTWNFWKYLVAPDGKVVGAWDPTVSVEEVRPQITALVRKLILLKREDL

SEQ ID NO: 6183 - protein, 42 aa, Homo Sapiens
MSRTAYTVGALLLLLGTLLPAAEGKKKGSQGAIPPPAKRPCM

SEQ ID NO: 6184 - protein, 143 aa, Homo Sapiens
MSRTAYTVGALLLLLGTLLPAAEGKKKGSQGAIPPPDKALHVTERKYLKRDWCKTQPLKQTIHEEGCNSRTIINRFCYGQCNSFYIPRHIRKEEGSFQSCSFCKPKKFTTMMVTLNCPELQPPTKKKRVTRVKQCRCISIDLD

SEQ ID NO: 6185 - protein, 184 aa, Homo Sapiens
MSRTAYTVGALLLLLGTLLPAAEGKKKGSQGAIPPPDKAQHNDSEQTQSPQQPGSRNRGRGQGRGTAMPGEEVLESSQEALHVTERKYLKRDWCKTQPLKQTIHEEGCNSRTIINRFCYGQCNSFYIPRHIRKEEGSFQSCSFCKPKKFTTMMVTLNCPELQPPTKKKRVTRVKQCRCISIDLD

SEQ ID NO: 6186 - protein, 168 aa, Homo Sapiens
MFWKLSLSLFLVAVLVKVAEARKNRPAGAIPSPYKDGSSNNSERWQHQIKEVLASSQEALVVTERKYLKSDWCKTQPLRQTVSEEGCRSRTILNRFCYGQCNSFYIPRHVKKEEESFQSCAFCKPQRVTSVLVELECPGLDPPFRLKKIQKVKQCRCMSVNLSDSDKQ

SEQ ID NO: 6187 - protein, 81 aa, Homo Sapiens
MMRVNGDDDSVAALSFLYDYYMGPKEKRILSSSTGGRNDQGKRYYHGMEYETDLTPLESPTHLMKFLTENVSGTPEYPDLL

SEQ ID NO: 6188 - protein, 556 aa, Homo Sapiens
MMRVNGDDDSVAALSFLYDYYMGPKEKRILSSSTGGRNDQGKRYYHGMEYETDLTPLESPTHLMKFLTENVSGTPEYPDLLKKNNLMSLEGALPTPGKAAPLPAGPSKLEAGSVDSYLLPTTDMYDNGSLNSLFESIHGVPPTQRWQPDSTFKDDPQESMLFPDILKTSPEPPCPEDYPSLKSDFEYTLGSPKAIHIKSGESPMAYLNKGQFYPVTLRTPAGGKGLALSSNKVKSVVMVVFDNEKVPVEQLRFWKHWHSRQPTAKQRVIDVADCKENFNTVEHIEEVAYNALSFVWNVNEEAKVFIGVNCLSTDFSSQKGVKGVPLNLQIDTYDCGLGTERLVHRAVCQIKIFCDKGAERKMRDDERKQFRRKVKCPDSSNSGVKGCLLSGFRGNETTYLRPETDLETPPVLFIPNVHFSSLQRSGGAAPSAGPSSSNRLPLKRTCSPFTEEFEPLPSKQAKEGDLQRVLLYVRRETEEVFDALMLKTPDLKGLRNAISEKYGFPEENIYKVYKKCKRGILVNMDNNIIQHYSNHVAFLLDMGELDGKIQIILKEL

SEQ ID NO: 6189 - protein, 626 aa, Homo Sapiens
MSNELDFRSVRLLKNDPVNLQKFSYTSEDEAWKTYLENPLTAATKAMMRVNGDDDSVAALSFLYDYYMGPKEKRILSSSTGGRNDQGKRYYHGMEYETDLTPLESPTHLMKFLTENVSGTPEYPDLLKKNNLMSLEGALPTPGKAAPLPAGPSKLEAGSVDSYLLPTTDMYDNGSLNSLFESIHGVPPTQRWQPDSTFKDDPQESMLFPDILKTSPEPPCPEDYPSLKSDFEYTLGSPKAIHIKSGESPMAYLNKGQFYPVTLRTPAGGKGLALSSNKVKSVVMVVFDNEKVPVEQLRFWKHWHSRQPTAKQRVIDVADCKENFNTVEHIEEVAYNALSFVWNVNEEAKVFIGVNCLSTDFSSQKGVKGVPLNLQIDTYDCGLGTERLVHRAVCQIKIFCDKGAERKMRDDERKQFRRKVKCPDSSNSGVKGCLLSGFRGNETTYLRPETDLETPPVLFIPNVHFSSLQRSGGAAPSAGPSSSNRLPLKRTCSPFTEEFEPLPSKQAKEGDLQRVLLYVRRETEEVFDALMLKTPDLKGLRNAISEKYGFPEENIYKVYKKCKRGETSLLHPRLSRHPPPDCLECSHPVTQVRNMGFGDGFWRQRDLDSNPSPTTVNSLHFTVNSE

SEQ ID NO: 6190 - protein, 602 aa, Homo Sapiens
MSNELDFRSVRLLKNDPVNLQKFSYTSEDEAWKTYLENPLTAATKAMMRVNGDDDSVAALSFLYDYYMGPKEKRILSSSTGGRNDQGKRYYHGMEYETDLTPLESPTHLMKFLTENVSGTPEYPDLLKKNNLMSLEGALPTPGKAAPLPAGPSKLEAGSVDSYLLPTTDMYDNGSLNSLFESIHGVPPTQRWQPDSTFKDDPQESMLFPDILKTSPEPPCPEDYPSLKSDFEYTLGSPKAIHIKSGESPMAYLNKGQFYPVTLRTPAGGKGLALSSNKVKSVVMVVFDNEKVPVEQLRFWKHWHSRQPTAKQRVIDVADCKENFNTVEHIEEVAYNALSFVWNVNEEAKVFIGVNCLSTDFSSQKGVKGVPLNLQIDTYDCGLGTERLVHRAVCQIKIFCDKGAERKMRDDERKQFRRKVKCPDSSNSGVKGCLLSGFRGNETTYLRPETDLETPPVLFIPNVHFSSLQRSGGAAPSAGPSSSNRLPLKRTCSPFTEEFEPLPSKQAKEGDLQRVLLYVRRETEEVFDALMLKTPDLKGLRNAISEKYGFPEENIYKVYKKCKRGILVNMDNNIIQHYSNHVAFLLDMGELDGKIQIILKEL

SEQ ID NO: 6191 - protein, 607 aa, Homo Sapiens
MWMNSILPIFLFRSVRLLKNDPVNLQKFSYTSEDEAWKTYLENPLTAATKAMMRVNGDDDSVAALSFLYDYYMGPKEKRILSSSTGGRNDQGKRYYHGMEYETDLTPLESPTHLMKFLTENVSGTPEYPDLLKKNNLMSLEGALPTPGKAAPLPAGPSKLEAGSVDSYLLPTTDMYDNGSLNSLFESIHGVPPTQRWQPDSTFKDDPQESMLFPDILKTSPEPPCPEDYPSLKSDFEYTLGSPKAIHIKSGESPMAYLNKGQFYPVTLRTPAGGKGLALSSNKVKSVVMVVFDNEKVPVEQLRFWKHWHSRQPTAKQRVIDVADCKENFNTVEHIEEVAYNALSFVWNVNEEAKVFIGVNCLSTDFSSQKGVKGVPLNLQIDTYDCGLGTERLVHRAVCQIKIFCDKGAERKMRDDERKQFRRKVKCPDSSNSGVKGCLLSGFRGNETTYLRPETDLETPPVLFIPNVHFSSLQRSGGAAPSAGPSSSNRLPLKRTCSPFTEEFEPLPSKQAKEGDLQRVLLYVRRETEEVFDALMLKTPDLKGLRNAISEKYGFPEENIYKVYKKCKRGILVNMDNNIIQHYSNHVAFLLDMGELDGKIQIILKEL

SEQ ID NO: 6192 - protein, 52 aa, Homo Sapiens
MWMNSILPIFLVPRRSGYCPPALGAGMTKERGTTMAWNMRRTSLPLKAPHTS

SEQ ID NO: 6193 - protein, 48 aa, Homo Sapiens
MQKIMHISVLLSPVLWGLIFGVSSNSIQIGGLFPRGADQEYSAFRVGM

SEQ ID NO: 6194 - protein, 125 aa, Homo Sapiens
MQKIMHISVLLSPVLWGLIFGVSSNSIQIGGLFPRGADQEYSAFRVGMVQFSTSEFRLTPHIDNLEVANSFAVTNAFCSQFSRGVYAIFGFYDKKSVNTITSFCGTLHVSFITPSFPTDGTHPFV

SEQ ID NO: 6195 - protein, 883 aa, Homo Sapiens
MQKIMHISVLLSPVLWGLIFGVSSNSIQIGGLFPRGADQEYSAFRVGMVQFSTSEFRLTPHIDNLEVANSFAVTNAFCSQFSRGVYAIFGFYDKKSVNTITSFCGTLHVSFITPSFPTDGTHPFVIQMRPDLKGALLSLIEYYQWDKFAYLYDSDRGLSTLQAVLDSAAEKKWQVTAINVGNINNDKKDEMYRSLFQDLELKKERRVILDCERDKVNDIVDQVITIGKHVKGYHYIIANLGFTDGDLLKIQFGGANVSGFQIVDYDDSLVSKFIERWSTLEEKEYPGAHTTTIKYTSALTYDAVQVMTEAFRNLRKQRIEISRRGNAGDCLANPAVPWGQGVEIERALKQVQVEGLSGNIKFDQNGKRINYTINIMELKTNGPRKIGYWSEVDKMVVTLTELPSGNDTSGLENKTVVVTTILESPYVMMKKNHEMLEGNERYEGYCVDLAAEIAKHCGFKYKLTIVGDGKYGARDADTKIWNGMVGELVYGKADIAIAPLTITLVREEVIDFSKPFMSLGISIMIKKPQKSKPGVFSFLDPLAYEIWMCIVFAYIGVSVVLFLVSRFSPYEWHTEEFEDGRETQSSESTNEFGIFNSLWFSLGAFMQQGCDISPRSLSGRIVGGVWWFFTLIIISSYTANLAAFLTVERMVSPIESAEDLSKQTEIAYGTLDSGSTKEFFRRSKIAVFDKMWTYMRSAEPSVFVRTTAEGVARVRKSKGKYAYLLESTMNEYIEQRKPCDTMKVGGNLDSKGYGIATPKGSSLRNAVNLAVLKLNEQGLLDKLKNKWWYDKGECGSGGGDSKEKTSALSLSNVAGVFYILVGGLGLAMLVALIEFCYKSRAEAKRMKVAKNAQNINPSSSQNSQNFATYKEGYNVYGIESVKI

SEQ ID NO: 6196 - protein, 883 aa, Homo Sapiens
MQKIMHISVLLSPVLWGLIFGVSSNSIQIGGLFPRGADQEYSAFRVGMVQFSTSEFRLTPHIDNLEVANSFAVTNAFCSQFSRGVYAIFGFYDKKSVNTITSFCGTLHVSFITPSFPTDGTHPFVIQMRPDLKGALLSLIEYYQWDKFAYLYDSDRGLSTLQAVLDSAAEKKWQVTAINVGNINNDKKDEMYRSLFQDLELKKERRVILDCERDKVNDIVDQVITIGKHVKGYHYIIANLGFTDGDLLKIQFGGANVSGFQIVDYDDSLVSKFIERWSTLEEKEYPGAHTTTIKYTSALTYDAVQVMTEAFRNLRKQRIEISRRGNAGDCLANPAVPWGQGVEIERALKQVQVEGLSGNIKFDQNGKRINYTINIMELKTNGPRKIGYWSEVDKMVVTLTELPSGNDTSGLENKTVVVTTILESPYVMMKKNHEMLEGNERYEGYCVDLAAEIAKHCGFKYKLTIVGDGKYGARDADTKIWNGMVGELVYGKADIAIAPLTITLVREEVIDFSKPFMSLGISIMIKKPQKSKPGVFSFLDPLAYEIWMCIVFAYIGVSVVLFLVSRFSPYEWHTEEFEDGRETQSSESTNEFGIFNSLWFSLGAFMQQGCDISPRSLSGRIVGGVWWFFTLIIISSYTANLAAFLTVERMVSPIESAEDLSKQTEIAYGTLDSGSTKEFFRRSKIAVFDKMWTYMRSAEPSVFVRTTAEGVARVRKSKGKYAYLLESTMNEYIEQRKPCDTMKVGGNLDSKGYGIATPKGSSLRTPVNLAVLKLSEQGVLDKLKNKWWYDKGECGAKDSGSKEKTSALSLSNVAGVFYILVGGLGLAMLVALIEFCYKSRAEAKRMKVAKNAQNINPSSSQNSQNFATYKEGYNVYGIESVKI

SEQ ID NO: 6197 - protein, 901 aa, Homo Sapiens
MQKIMHISVLLSPVLWGLIFGVSSNSIQIGGLFPRGADQEYSAFRVGMVQFSTSEFRLTPHIDNLEVANSFAVTNAFCSQFSRGVYAIFGFYDKKSVNTITSFCGTLHVSFITPSFPTDGTHPFVIQMRPDLKGALLSLIEYYQWDKFAYLYDSDRGLSTLQAVLDSAAEKKWQVTAINVGNINNDKKDEMYRSLFQDLELKKERRVILDCERDKVNDIVDQVITIGKHVKGYHYIIANLGFTDGDLLKIQFGGANVSGFQIVDYDDSLVSKFIERWSTLEEKEYPGAHTTTIKYTSALTYDAVQVMTEAFRNLRKQRIEISRRGNAGDCLANPAVPWGQGVEIERALKQVQVEGLSGNIKFDQNGKRINYTINIMELKTNGPRKIGYWSEVDKMVVTLTELPSGNDTSGLENKTVVVTTILESPYVMMKKNHEMLEGNERYEGYCVDLAAEIAKHCGFKYKLTIVGDGKYGARDADTKIWNGMVGELVYGKADIAIAPLTITLVREEVIDFSKPFMSLGISIMIKKPQKSKPGVFSFLDPLAYEIWMCIVFAYIGVSVVLFLVSRFSPYEWHTEEFEDGRETQSSESTNEFGIFNSLWFSLGAFMQQGCDISPRSLSGRIVGGVWWFFTLIIISSYTANLAAFLTVERMVSPIESAEDLSKQTEIAYGTLDSGSTKEFFRRSKIAVFDKMWTYMRSAEPSVFVRTTAEGVARVRKSKGKYAYLLESTMNEYIEQRKPCDTMKVGGNLDSKGYGIATPKGSSLRNAVNLAVLKLNEQGLLDKLKNKWWYDKGECGSGGGDSKEKTSALSLSNVAGVFYILVGGLGLAMLVALIEFCYKSRAEAKRMKMTLNDAMRNKARLSITGSTGENGRVMTPEFPKAVHAVPYVSPGMGMNVSVTDLS

SEQ ID NO: 6198 - protein, 105 aa, Homo Sapiens
MRPDLKGALLSLIEYYQWDKFAYLYDSDRGLSTLQAVLDSAAEKKWQVTAINVGNINNDKKDEMYRSLFQDLELKKERRVILDCERDKVNDIVDQVITIGKHVKG

SEQ ID NO: 6199 - protein, 57 aa, Homo Sapiens
MVQFSTSEFRLTPHIDNLEVANSFAVTNAFCSQFSRGVYAIFGFYDKKSVNTITSFC

SEQ ID NO: 6200 - protein, 145 aa, Homo Sapiens
MVQFSTSEFRLTPHIDNLEVANSFAVTNAFCSQFSRGVYAIFGFYDKKSVNTITSFCGTLHVSFITPSFPTDGTHPFVIQMRPDLKGALLSLIEYYQWDKFAYLYDSDRGLSTLQAVLDSAAEKKWQVTAINVGNINNDKKDEMY

SEQ ID NO: 6201 - protein, 730 aa, Homo Sapiens
MVQFSTSEFRLTPHIDNLEVANSFAVTNAFCSQFSRGVYAIFGFYDKKSVNTITSFCGTLHVSFITPSFPTDGTHPFVIQMRPDLKGALLSLIEYYQWDKFAYLYDSDRGLSTLQAVLDSAAEKKWQVTAINVGNINNDKKDEMYRSLFQDLELKKERRVILDCERDKVNDIVDQVITIGKHVKGYHYIIANLGFTDGDLLKIQFGGANVSGFQIVDYDDSLVSKFIERWSTLEEKEYPGAHTTTIKYTSALTYDAVQVMTEAFRNLRKQRIEISRRGNAGDCLANPAVPWGQGVEIERALKQVQVEGLSGNIKFDQNGKRINYTINIMELKTNGPRKIGYWSEVDKMVVTLTELPSGNDTSGLENKTVVVTTILESPYVMMKKNHEMLEGNERYEGYCVDLAAEIAKHCGFKYKLTIVGDGKYGARDADTKIWNGMVGELVYGKADIAIAPLTITLVREEVIDFSKPFMSLGISIMIKKPQKSKPGVFSFLDPLAYEIWMCIVFAYIGVSVVLFLVSRFSPYEWHTEEFEDGRETQSSESTNEFGIFNSLWFSLGAFMQQGCDISPRSLSGRIVGGVWWFFTLIIISSYTANLAAFLTVERMVSPIESAEDLSKQTEIAYGTLDSGSTKEFFRRSKIAVFDKMWTYMRSAEPSVFVRTTAEGVARVRKSKGKYAYLLESTMNEYIEQRKPCDTMKVGGNLDSKGYGIATPKGSSLSGVTFKTLLFVCCG

SEQ ID NO: 6202 - protein, 836 aa, Homo Sapiens
MVQFSTSEFRLTPHIDNLEVANSFAVTNAFCSQFSRGVYAIFGFYDKKSVNTITSFCGTLHVSFITPSFPTDGTHPFVIQMRPDLKGALLSLIEYYQWDKFAYLYDSDRGLSTLQAVLDSAAEKKWQVTAINVGNINNDKKDEMYRSLFQDLELKKERRVILDCERDKVNDIVDQVITIGKHVKGYHYIIANLGFTDGDLLKIQFGGANVSGFQIVDYDDSLVSKFIERWSTLEEKEYPGAHTTTIKYTSALTYDAVQVMTEAFRNLRKQRIEISRRGNAGDCLANPAVPWGQGVEIERALKQVQVEGLSGNIKFDQNGKRINYTINIMELKTNGPRKIGYWSEVDKMVVTLTELPSGNDTSGLENKTVVVTTILESPYVMMKKNHEMLEGNERYEGYCVDLAAEIAKHCGFKYKLTIVGDGKYGARDADTKIWNGMVGELVYGKADIAIAPLTITLVREEVIDFSKPFMSLGISIMIKKPQKSKPGVFSFLDPLAYEIWMCIVFAYIGVSVVLFLVSRFSPYEWHTEEFEDGRETQSSESTNEFGIFNSLWFSLGAFMQQGCDISPRSLSGRIVGGVWWFFTLIIISSYTANLAAFLTVERMVSPIESAEDLSKQTEIAYGTLDSGSTKEFFRRSKIAVFDKMWTYMRSAEPSVFVRTTAEGVARVRKSKGKYAYLLESTMNEYIEQRKPCDTMKVGGNLDSKGYGIATPKGSSLRTPVNLAVLKLSEQGVLDKLKNKWWYDKGECGAKDSGSKEKTSALSLSNVAGVFYILVGGLGLAMLVALIEFCYKSRAEAKRMKVAKNAQNINPSSSQNSQNFATYKEGYNVYGIESVKI

SEQ ID NO: 6203 - protein, 836 aa, Homo Sapiens; identical to SEQ ID NO: 6202

SEQ ID NO: 6204 - protein, 214 aa, Homo Sapiens
  misc_feature (1)..(1): Xaa can be any naturally occurring amino acid
XLDSGSTKEFFRRSKIAVFDKMWTYMRSAEPSVFVRTTAEGVARVRKSKGKYAYLLESTMNEYIEQRKPCDTMKVGGNLDSKGYGIATPKGSSLRTPVNLAVLKLSEQGVLDKLKNKWWYDKGECGAKDSGSKEKTSALSLSNVAGVFYILVGGLGLAMLVALIEFCYKSRAEAKRMKVAKNAQNINPSSSQNSQNFATYKEGYNVYGIESVKI

SEQ ID NO: 6205 - protein, 144 aa, Homo Sapiens
MARQKKMGQSVLRAVFFLVLGLLGHSHGGFPNTISIGGLFMRNTVQEHSAFRFAVQLYNTNQNTTEKPFHLNYHVDHLDSSNSFSVTNACPAERDYLPWPGSIRENNWTALPCCKDHGLLHLKCSPGGARQNWAYCIWGVTGEL

SEQ ID NO: 6206 - protein, 144 aa, Homo Sapiens; identical to SEQ ID NO: 6205

SEQ ID NO: 6207 - protein, 894 aa, Homo Sapiens
MARQKKMGQSVLRAVFFLVLGLLGHSHGGFPNTISIGGLFMRNTVQEHSAFRFAVQLYNTNQNTTEKPFHLNYHVDHLDSSNSFSVTNAFCSQFSRGVYAIFGFYDQMSMNTLTSFCGALHTSFVTPSFPTDADVQFVIQMRPALKGAILSLLGHYKWEKFVYLYDTERGFSILQAIMEAAVQNNWQVTARSVGNIKDVQEFRRIIEEMDRRQEKRYLIDCEVERINTILEQVVILGKHSRGYHYMLANLGFTDILLERVMHGGANITGFQIVNNENPMVQQFIQRWVRLDEREFPEAKNAPLKYTSALTHDAILVIAEAFRYLRRQRVDVSRRGSAGDCLANPAVPWSQGIDIERALKMVQVQGMTGNIQFDTYGRRTNYTIDVYEMKVSGSRKAGYWNEYERFVPFSDQQISNDSASSENRTIVVTTILESPYVMYKKNHEQLEGNERYEGYCVDLAYEIAKHVRIKYKLSIVGDGKYGARDPETKIWNGMVGELVYGRADIAVAPLTITLVREEVIDFSKPFMSLGISIMIKKPQKSKPGVFSFLDPLAYEIWMCIVFAYIGVSVVLFLVSRFSPYEWHLEDNNEEPRDPQSPPDPPNEFGIFNSLWFSLGAFMQQGCDISPRSLSGRIVGGVWWFFTLIIISSYTANLAAFLTVERMVSPIESAEDLAKQTEIAYGTLDSGSTKEFFRRSKIAVYEKMWSYMKSAEPSVFTKTTADGVARVRKSKGKFAFLLESTMNEYIEQRKPCDTMKVGGNLDSKGYGVATPKGSALRTPVNLAVLKLSEQGILDKLKNKWWYDKGECGAKDSGSKDKTSALSLSNVAGVFYILVGGLGLAMMVALIEFCYKSRAESKRMKLTKNTQNFKPAPATNTQNYATYREGYNVYGTESVKI

SEQ ID NO: 6208 - protein, 824 aa, Homo Sapiens
MARQKKMGQSVLRAVFFLVLGLLGHSHGGFPNTISIGGLFMRNTVQEHSAFRFAVQLYNTNQNTTEKPFHLNYHVDHLDSSNSFSVTNAFCSQFSRGVYAIFGFYDQMSMNTLTSFCGALHTSFVTPSFPTDADVQFVIQMRPALKGAILSLLGHYKWEKFVYLYDTERGFSILQAIMEAAVQNNWQVTARSVGNIKDVQEFRRIIEEMDRRQEKRYLIDCEVERINTILEQVVILGKHSRGYHYMLANLGFTDILLERVMHGGANITGFQIVNNENPMVQQFIQRWVRLDEREFPEAKNAPLKYTSALTHDAILVIAEAFRYLRRQRVDVSRRGSAGDCLANPAVPWSQGIDIERALKMVQVQGMTGNIQFDTYGRRTNYTIDVYEMKVSGSRKAGYWNEYERFVPFSDQQISNDSASSENRTIVVTTILESPYVMYKKNHEQLEGNERYEGYCVDLAYEIAKHVRIKYKLSIVGDGKYGARDPETKIWNGMVGELVYGRADIAVAPLTITLVREEVIDFSKPFMSLGISIMIKKPQKSKPGVFSFLDPLAYEIWMCIVFAYIGVSVVLFLVSRFSPYEWHLEDNNEEPRDPQSPPDPPNEFGIFNSLWFSLGAFMQQGCDISPRSLSGRIVGGVWWFFTLIIISSYTANLAAFLTVERMVSPIESAEDLAKQTEIAYGTLDSGSTKEFFRRSKIAVYEKMWSYMKSAEPSVFTKTTADGVARVRKSKGKFAFLLESTMNEYIEQRKPCDTMKVGGNLDSKGYGVATPKGSALRNAVNLAVLKLNEQGLLDKLKNKWWYDKGECGSGGGDSKNACKPCSIETQ

SEQ ID NO: 6209 - protein, 894 aa, Homo Sapiens
MARQKKMGQSVLRAVFFLVLGLLGHSHGGFPNTISIGGLFMRNTVQEHSAFRFAVQLYNTNQNTTEKPFHLNYHVDHLDSSNSFSVTNAFCSQFSRGVYAIFGFYDQMSMNTLTSFCGALHTSFVTPSFPTDADVQFVIQMRPALKGAILSLLGHYKWEKFVYLYDTERGFSILQAIMEAAVQNNWQVTARSVGNIKDVQEFRRIIEEMDRRQEKRYLIDCEVERINTILEQVVILGKHSRGYHYMLANLGFTDILLERVMHGGANITGFQIVNNENPMVQQFIQRWVRLDEREFPEAKNAPLKYTSALTHDAILVIAEAFRYLRRQRVDVSRRGSAGDCLANPAVPWSQGIDIERALKMVQVQGMTGNIQFDTYGRRTNYTIDVYEMKVSGSRKAGYWNEYERFVPFSDQQISNDSASSENRTIVVTTILESPYVMYKKNHEQLEGNERYEGYCVDLAYEIAKHVRIKYKLSIVGDGKYGARDPETKIWNGMVGELVYGRADIAVAPLTITLVREEVIDFSKPFMSLGISIMIKKPQKSKPGVFSFLDPLAYEIWMCIVFAYIGVSVVLFLVSRFSPYEWHLEDNNEEPRDPQSPPDPPNEFGIFNSLWFSLGAFMQQGCDISPRSLSGRIVGGVWWFFTLIIISSYTANLAAFLTVERMVSPIESAEDLAKQTEIAYGTLDSGSTKEFFRRSKIAVYEKMWSYMKSAEPSVFTKTTADGVARVRKSKGKFAFLLESTMNEYIEQRKPCDTMKVGGNLDSKGYGVATPKGSALRNAVNLAVLKLNEQGLLDKLKNKWWYDKGECGSGGGDSKDKTSALSLSNVAGVFYILVGGLGLAMMVALIEFCYKSRAESKRMKLTKNTQNFKPAPATNTQNYATYREGYNVYGTESVKI

SEQ ID NO: 6210 - protein, 894 aa, Homo Sapiens; identical to SEQ ID NO: 6209

SEQ ID NO: 6211 - protein, 82 aa, Homo Sapiens
MRIISRQIVLLFSGFWGLAMGAFPSSVQIGGLFIRNTDQEYTAFRLAIFLHNTSPNASEAPFNLVPHVDNIETANSFAVTNA

SEQ ID NO: 6212 - protein, 82 aa, Homo Sapiens; identical to SEQ ID NO: 6211

SEQ ID NO: 6213 - protein, 82 aa, Homo Sapiens; identical to SEQ ID NO: 6211

SEQ ID NO: 6214 - protein, 84 aa, Homo Sapiens
MRIISRQIVLLFSGFWGLAMGAFPSSVQIGGLFIRNTDQEYTAFRLAIFLHNTSPNASEAPFNLVPHVDNIETANSFAVTNACK

SEQ ID NO: 6215 - protein, 225 aa, Homo Sapiens
MRIISRQIVLLFSGFWGLAMGAFPSSVQIGGLFIRNTDQEYTAFRLAIFLHNTSPNASEAPFNLVPHVDNIETANSFAVTNAFCSQYSRGVFAIFGLYDKRSVHTLTSFCSALHISLITPSFPTEGESQFVLQLRPSLRGALLSLLDHYEWNCFVFLYDTDRGLVISTTPLASNCMPSSVVHSWLYVLYNKSINSITACLLGPSTELNVFNYLIADSNLNNGNYI

SEQ ID NO: 6216 - protein, 902 aa, Homo Sapiens
MRIISRQIVLLFSGFWGLAMGAFPSSVQIGGLFIRNTDQEYTAFRLAIFLHNTSPNASEAPFNLVPHVDNIETANSFAVTNAFCSQYSRGVFAIFGLYDKRSVHTLTSFCSALHISLITPSFPTEGESQFVLQLRPSLRGALLSLLDHYEWNCFVFLYDTDRGYSILQAIMEKAGQNGWHVSAICVENFNDVSYRQLLEELDRRQEKKFVIDCEIERLQNILEQIVSVGKHVKGYHYIIANLGFKDISLERFIHGGANVTGFQLVDFNTPMVIKLMDRWKKLDQREYPGSETPPKYTSALTYDGVLVMAETFRSLRRQKIDISRRGNAGDCLANPAAPWGQGIDMERTLKQVRIQGLTGNVQFDHYGRRVNYTMDVFELKSTGPRKVGYWNDMDKLVLIQDVPTLGNDTAAIENRTVVVTTIMESPYVMYKKNHEMFEGNDKYEGYCVDLASEIAKHIGIKYKIAIVPDGKYGARDADTKIWNGMVGELVYGKAEIAIAPLTITLVREEVIDFSKPFMSLGISIMIKKPQKSKPGVFSFLDPLAYEIWMCIVFAYIGVSVVLFLVSRFSPYEWHTEEPEDGKEGPSDQPPNEFGIFNSLWFSLGAFMQQGCDISPRSLSGRIVGGVWWFFTLIIISSYTANLAAFLTVERMVSPIESAEDLAKQTEIAYGTLDSGSTKEFFRRSKIAVYEKMWTYMRSAEPSVFTRTTAEGVARVRKSKGKFAFLLESTMNEYIEQRKPCDTMKVGGNLDSKGYGVATPKGSSLRTPVNLAVLKLSEAGVLDKLKNKWWYDKGECGPKDSGSKDKTSALSLSNVAGVFYILVGGLGLAMLVALIEFCYKSRAEAKRMKLTFSEAIRNKARLSITGSVGENGRVLTPDCPKAVHTGTAIRQSSGLAVIASDLP

SEQ ID NO: 6217 - protein, 433 aa, Homo Sapiens
MRIISRQIVLLFSGFWGLAMGAFPSSVQIGGLFIRNTDQEYTAFRLAIFLHNTSPNASEAPFNLVPHVDNIETANSFAVTNAFCSQYSRGVFAIFGLYDKRSVHTLTSFCSALHISLITPSFPTEGESQFVLQLRPSLRGALLSLLDHYEWNCFVFLYDTDRGYSILQAIMEKAGQNGWHVSAICVENFNDVSYRQLLEELDRRQEKKFVIDCEIERLQNILEQIVSVGKHVKGYHYIIANLGFKDISLERFIHGGANVTGFQLVDFNTPMVIKLMDRWKKLDQREYPGSETPPKYTSALTYDGVLVMAETFRSLRRQKIDISRRGNAGDCLANPAAPWGQGIDMERTLKQVRIQGLTGNVQFDHYGRRVNYTMDVFELKSTGPRKVGYWNDMDKLVLIQDVPTLGNDTAAIENRTVVVTTIMPLMKNPILRN

SEQ ID NO: 6218 - protein, 884 aa, Homo Sapiens
MRIISRQIVLLFSGFWGLAMGAFPSSVQIGGLFIRNTDQEYTAFRLAIFLHNTSPNASEAPFNLVPHVDNIETANSFAVTNAFCSQYSRGVFAIFGLYDKRSVHTLTSFCSALHISLITPSFPTEGESQFVLQLRPSLRGALLSLLDHYEWNCFVFLYDTDRGYSILQAIMEKAGQNGWHVSAICVENFNDVSYRQLLEELDRRQEKKFVIDCEIERLQNILEQIVSVGKHVKGYHYIIANLGFKDISLERFIHGGANVTGFQLVDFNTPMVIKLMDRWKKLDQREYPGSETPPKYTSALTYDGVLVMAETFRSLRRQKIDISRRGNAGDCLANPAAPWGQGIDMERTLKQVRIQGLTGNVQFDHYGRRVNYTMDVFELKSTGPRKVGYWNDMDKLVLIQDVPTLGNDTAAIENRTVVVTTIMESPYVMYKKNHEMFEGNDKYEGYCVDLASEIAKHIGIKYKIAIVPDGKYGARDADTKIWNGMVGELVYGKAEIAIAPLTITLVREEVIDFSKPFMSLGISIMIKKPQKSKPGVFSFLDPLAYEIWMCIVFAYIGVSVVLFLVSRFSPYEWHTEEPEDGKEGPSDQPPNEFGIFNSLWFSLGAFMQQGCDISPRSLSGRIVGGVWWFFTLIIISSYTANLAAFLTVERMVSPIESAEDLAKQTEIAYGTLDSGSTKEFFRRSKIAVYEKMWTYMRSAEPSVFTRTTAEGVARVRKSKGKFAFLLESTMNEYIEQRKPCDTMKVGGNLDSKGYGVATPKGSSLRNAVNLAVLKLNEQGLLDKLKNKWWYDKGECGSGGGDSKDKTSALSLSNVAGVFYILVGGLGLAMLVALIEFCYKSRAEAKRMKVAKSAQTFNPTSSQNTQNLATYREGYNVYGTESIKI

SEQ ID NO: 6219 - protein, 433 aa, Homo Sapiens; identical to SEQ ID NO: 6217

SEQ ID NO: 6220 - protein, 902 aa, Homo Sapiens; identical to SEQ ID NO: 6216

SEQ ID NO: 6221 - protein, 884 aa, Homo Sapiens; identical to SEQ ID NO: 6218

SEQ ID NO: 6222 - protein, 104 aa, Homo Sapiens
  misc_feature (1)..(1): Xaa can be any naturally occurring amino acid
XVARVRKSKGKFAFLLESTMNEYIEQRKPCDTMKVGGNLDSKGYGVATPKGSSLRNAVNLAVLKLNEQGLLDKLKNKWWYDKGECGSGGGDSKNSCKPCRFETQ

SEQ ID NO: 6223 - protein, 180 aa, Homo Sapiens
CSHEMAAGILKQALAMGMMTEYYHYIFTTLTDAALMYDAVHVVSVAVQQFPQMTVSSLQCNRHKPWRFGTRFMSLIKEAHWEGLTGRITFNKTNGLRTDFDLDVISLKEEGLEKIGTWDPASGLNMTESQKGKPANITDSLSNRSLIVTTILEEPYVLFKKSDKPLYGNDRFEGYCIDLL

SEQ ID NO: 6224 - protein, 854 aa, Homo Sapiens
GGIFEYVESGPMGAEELAFRFAVNTINRNRTLLPNTTLTYDTQKINLYDSFEASKKACDQLSLGVAAIFGPSHSSSANAVQSICNALGVPHIQTRWKHQVSDNKDSFYVSLYPDFSSLSRAILDLVQFFKWKTVTVVYDDSTGLIRLQELIKAPSRYNLRLKIRQLPADTKDAKPLLKEMKRGKEFHVIFDCSHEMAAGILKQALAMGMMTEYYHYIFTTLDLFALDVEPYRYSGVNMTGFRILNTENTQVSSIIEKWSMERLQAPPKPDSGLLDGFMTTDAALMYDAVHVVSVAVQQFPQMTVSSLQCNRHKPWRFGTRFMSLIKEAHWEGLTGRITFNKTNGLRTDFDLDVISLKEEGLEKIGTWDPASGLNMTESQKGKPANITDSLSNRSLIVTTILEEPYVLFKKSDKPLYGNDRFEGYCIDLLRELSTILGFTYEIRLVEDGKYGAQDDANGQWNGMVRELIDHKADLAVAPLAITYVREKVIDFSKPFMTLGISILYRKPNGTNPGVFSFLNPLSPDIWMYILLAYLGVSCVLFVIARFSPYEWYNPHPCNPDSDVVENNFTLLNSFWFGVGALMQQGSELMPKALSTRIVGGIWWFFTLIIISSYTANLAAFLTVERMESPIDSADDLAKQTKIEYGAVEDGATMTFFKKSKISTYDKMWAFMSSRRQSVLVKSNEEGIQRVLTSDYAFLMESTTIEFVTQRNCNLTQIGGLIDSKGYGVGTPMGSPYRDKITIAILQLQEEGKLHMMKEKWWRGNGCPEEESKEASALGVQNIGGIFIVLAAGLVLSVFVAVGEFLYKSKKNAQLEKRAKTKLPQDYVFLPILESVSISTVLSSSPSSSSLSSCS

SEQ ID NO: 6225 - protein, 870 aa, Homo Sapiens
GGIFEYVESGPMGAEELAFRFAVNTINRNRTLLPNTTLTYDTQKINLYDSFEASKKACDQLSLGVAAIFGPSHSSSANAVQSICNALGVPHIQTRWKHQVSDNKDSFYVSLYPDFSSLSRAILDLVQFFKWKTVTVVYDDSTGLIRLQELIKAPSRYNLRLKIRQLPADTKDAKPLLKEMKRGKEFHVIFDCSHEMAAGILKQALAMGMMTEYYHYIFTTLDLFALDVEPYRYSGVNMTGFRILNTENTQVSSIIEKWSMERLQAPPKPDSGLLDGFMTTDAALMYDAVHVVSVAVQQFPQMTVSSLQCNRHKPWRFGTRFMSLIKEAHWEGLTGRITFNKTNGLRTDFDLDVISLKEEGLEKIGTWDPASGLNMTESQKGKPANITDSLSNRSLIVTTILEEPYVLFKKSDKPLYGNDRFEGYCIDLLRELSTILGFTYEIRLVEDGKYGAQDDANGQWNGMVRELIDHKADLAVAPLAITYVREKVIDFSKPFMTLGISILYRKPNGTNPGVFSFLNPLSPDIWMYILLAYLGVSCVLFVIARFSPYEWYNPHPCNPDSDVVENNFTLLNSFWFGVGALMQQGSELMPKALSTRIVGGIWWFFTLIIISSYTANLAAFLTVERMESPIDSADDLAKQTKIEYGAVEDGATMTFFKKSKISTYDKMWAFMSSRRQSVLVKSNEEGIQRVLTSDYAFLMESTTIEFVTQRNCNLTQIGGLIDSKGYGVGTPMGSPYRDKITIAILQLQEEGKLHMMKEKWWRGNGCPEEESKEASALGVQNIGGIFIVLAAGLVLSVFVAVGEFLYKSKKNAQLEKRSFCSAMVEELRMSLKCQRRLKHKPQAPVIVKTEEVINMHTFNDRRLPGKETMA

SEQ ID NO: 6226 - protein, 831 aa, Homo Sapiens
GGIFEYVESGPMGAEELAFRFAVNTINRNRTLLPNTTLTYDTQKINLYDSFEASKKACDQLSLGVAAIFGPSHSSSANAVQSICNALGVPHIQTRWKHQVSDNKDSFYVSLYPDFSSLSRAILDLVQFFKWKTVTVVYDDSTGLIRLQELIKAPSRYNLRLKIRQLPADTKDAKPLLKEMKRGKEFHVIFDCSHEMAAGILKQALAMGMMTEYYHYIFTTLDLFALDVEPYRYSGVNMTGFRILNTENTQVSSIIEKWSMERLQAPPKPDSGLLDGFMTTDAALMYDAVHVVSVAVQQFPQMTVSSLQCNRHKPWRFGTRFMSLIKEAHWEGLTGRITFNKTNGLRTDFDLDVISLKEEGLEKIGTWDPASGLNMTESQKGKPANITDSLSNRSLIVTTILEEPYVLFKKSDKPLYGNDRFEGYCIDLLRELSTILGFTYEIRLVEDGKYGAQDDANGQWNGMVRELIDHKADLAVAPLAITYVREKVIDFSKPFMTLGISILYRKPNGTNPGVFSFLNPLSPDIWMYILLAYLGVSCVLFVIARFSPYEWYNPHPCNPDSDVVENNFTLLNSFWFGVGALMQQGSELMPKALSTRIVGGIWWFFTLIIISSYTANLAAFLTVERMESPIDSADDLAKQTKIEYGAVEDGATMTFFKKSKISTYDKMWAFMSSRRQSVLVKSNEEGIQRVLTSDYAFLMESTTIEFVTQRNCNLTQIGGLIDSKGYGVGTPMGSPYRDKITIAILQLQEEGKLHMMKEKWWRGNGCPEEESKEASALGVQNIGGIFIVLAAGLVLSVFVAVGEFLYKSKKNAQLEKESSIWLVPPYHPDTV

SEQ ID NO: 6227 - protein, 182 aa, Homo Sapiens
IGTWDPASGLNMTESQKGKPANITDSLSNRSLIVTTILEEPYVLFKKSDKPLYGNDRFEGYCIDLLRELSTILGFTYEIRLVEDGKYGAQDDANGQWNGMVRELIDHKADLAVAPLAITYVREKVIDFSKPFMTLGISILYRKPNGTNPGVFSFLNPLSPDIWMYILLAYLGVSCVLFVIAR

SEQ ID NO: 6228 - protein, 892 aa, Homo Sapiens
MKIIFPILSNPVFRRTVKLLLCLLWIGYSQGTTHVLRFGGIFEYVESGPMGAEELAFRFAVNTINRNRTLLPNTTLTYDTQKINLYDSFEASKKACDQLSLGVAAIFGPSHSSSANAVQSICNALGVPHIQTRWKHQVSDNKDSFYVSLYPDFSSLSRAILDLVQFFKWKTVTVVYDDSTGLIRLQELIKAPSRYNLRLKIRQLPADTKDAKPLLKEMKRGKEFHVIFDCSHEMAAGILKQALAMGMMTEYYHYIFTTLDLFALDVEPYRYSGVNMTGFRILNTENTQVSSIIEKWSMERLQAPPKPDSGLLDGFMTTDAALMYDAVHVVSVAVQQFPQMTVSSLQCNRHKPWRFGTRFMSLIKEAHWEGLTGRITFNKTNGLRTDFDLDVISLKEEGLEKIGTWDPASGLNMTESQKGKPANITDSLSNRSLIVTTILEEPYVLFKKSDKPLYGNDRFEGYCIDLLRELSTILGFTYEIRLVEDGKYGAQDDANGQWNGMVRELIDHKADLAVAPLAITYVREKVIDFSKPFMTLGISILYRKPNGTNPGVFSFLNPLSPDIWMYILLAYLGVSCVLFVIARFSPYEWYNPHPCNPDSDVVENNFTLLNSFWFGVGALMQQGSELMPKALSTRIVGGIWWFFTLIIISSYTANLAAFLTVERMESPIDSADDLAKQTKIEYGAVEDGATMTFFKKSKISTYDKMWAFMSSRRQSVLVKSNEEGIQRVLTSDYAFLMESTTIEFVTQRNCNLTQIGGLIDSKGYGVGTPMGSPYRDKITIAILQLQEEGKLHMMKEKWWRGNGCPEEESKEASALGVQNIGGIFIVLAAGLVLSVFVAVGEFLYKSKKNAQLEKRAKTKLPQDYVFLPILESVSISTVLSSSPSSSSLSSCS

SEQ ID NO: 6229 - protein, 353 aa, Homo Sapiens
MKIIFPILSNPVFRRTVKLLLCLLWIGYSQGTTHVLRFGGIFEYVESGPMGAEELAFRFAVNTINRNRTLLPNTTLTYDTQKINLYDSFEASKKACDQLSLGVAAIFGPSHSSSANAVQSICNALGVPHIQTRWKHQVSDNKDSFYVSLYPDFSSLSRAILDLVQFFKWKTVTVVYDDSTGLIRLQELIKAPSRYNLRLKIRQLPADTKDAKPLLKEMKRGKEFHVIFDCSHEMAAGILKQALAMGMMTEYYHYIFTTLDLFALDVEPYRYSGVNMTGFRILNTENTQVSSIIEKWSMERLQAPPKPDSGLLDGFMTMEFHSCCPGWSAMARSQLTATSASWVQAILLPQPPE

SEQ ID NO: 6230 - protein, 869 aa, Homo Sapiens
MKIIFPILSNPVFRRTVKLLLCLLWIGYSQGTTHVLRFGGIFEYVESGPMGAEELAFRFAVNTINRNRTLLPNTTLTYDTQKINLYDSFEASKKACDQLSLGVAAIFGPSHSSSANAVQSICNALGVPHIQTRWKHQVSDNKDSFYVSLYPDFSSLSRAILDLVQFFKWKTVTVVYDDSTGLIRLQELIKAPSRYNLRLKIRQLPADTKDAKPLLKEMKRGKEFHVIFDCSHEMAAGILKQALAMGMMTEYYHYIFTTLDLFALDVEPYRYSGVNMTGFRILNTENTQVSSIIEKWSMERLQAPPKPDSGLLDGFMTTDAALMYDAVHVVSVAVQQFPQMTVSSLQCNRHKPWRFGTRFMSLIKEAHWEGLTGRITFNKTNGLRTDFDLDVISLKEEGLEKIGTWDPASGLNMTESQKGKPANITDSLSNRSLIVTTILEEPYVLFKKSDKPLYGNDRFEGYCIDLLRELSTILGFTYEIRLVEDGKYGAQDDANGQWNGMVRELIDHKADLAVAPLAITYVREKVIDFSKPFMTLGISILYRKPNGTNPGVFSFLNPLSPDIWMYILLAYLGVSCVLFVIARFSPYEWYNPHPCNPDSDVVENNFTLLNSFWFGVGALMQQGSELMPKALSTRIVGGIWWFFTLIIISSYTANLAAFLTVERMESPIDSADDLAKQTKIEYGAVEDGATMTFFKKSKISTYDKMWAFMSSRRQSVLVKSNEEGIQRVLTSDYAFLMESTTIEFVTQRNCNLTQIGGLIDSKGYGVGTPMGSPYRDKITIAILQLQEEGKLHMMKEKWWRGNGCPEEESKEASALGVQNIGGIFIVLAAGLVLSVFVAVGEFLYKSKKNAQLEKESSIWLVPPYHPDTV

SEQ ID NO: 6231 - protein, 908 aa, Homo Sapiens
MKIIFPILSNPVFRRTVKLLLCLLWIGYSQGTTHVLRFGGIFEYVESGPMGAEELAFRFAVNTINRNRTLLPNTTLTYDTQKINLYDSFEASKKACDQLSLGVAAIFGPSHSSSANAVQSICNALGVPHIQTRWKHQVSDNKDSFYVSLYPDFSSLSRAILDLVQFFKWKTVTVVYDDSTGLIRLQELIKAPSRYNLRLKIRQLPADTKDAKPLLKEMKRGKEFHVIFDCSHEMAAGILKQALAMGMMTEYYHYIFTTLDLFALDVEPYRYSGVNMTGFRILNTENTQVSSIIEKWSMERLQAPPKPDSGLLDGFMTTDAALMYDAVHVVSVAVQQFPQMTVSSLQCNRHKPWRFGTRFMSLIKEAHWEGLTGRITFNKTNGLRTDFDLDVISLKEEGLEKIGTWDPASGLNMTESQKGKPANITDSLSNRSLIVTTILEEPYVLFKKSDKPLYGNDRFEGYCIDLLRELSTILGFTYEIRLVEDGKYGAQDDANGQWNGMVRELIDHKADLAVAPLAITYVREKVIDFSKPFMTLGISILYRKPNGTNPGVFSFLNPLSPDIWMYILLAYLGVSCVLFVIARFSPYEWYNPHPCNPDSDVVENNFTLLNSFWFGVGALMQQGSELMPKALSTRIVGGIWWFFTLIIISSYTANLAAFLTVERMESPIDSADDLAKQTKIEYGAVEDGATMTFFKKSKISTYDKMWAFMSSRRQSVLVKSNEEGIQRVLTSDYAFLMESTTIEFVTQRNCNLTQIGGLIDSKGYGVGTPMGSPYRDKITIAILQLQEEGKLHMMKEKWWRGNGCPEEESKEASALGVQNIGGIFIVLAAGLVLSVFVAVGEFLYKSKKNAQLEKRSFCSAMVEELRMSLKCQRRLKHKPQAPVIVKTEEVINMHTFNDRRLPGKETMA

SEQ ID NO: 6232 - protein, 46 aa, Homo Sapiens
ANLAAFMIQEEYVDQVSGLSDKKMRTLRLRRSIFPKVTKLVTEPGF

SEQ ID NO: 6233 - protein, 35 aa, Homo Sapiens
MKPRAECCSPKFWLVLAVLAVSGSRARSQKSPPSI

SEQ ID NO: 6234 - protein, 35 aa, Homo Sapiens; identical to SEQ ID NO: 6233

SEQ ID NO: 6235 - protein, 1484 aa, Homo Sapiens [sequence omitted]

SEQ ID NO: 6236 - protein, 70 aa, Homo Sapiens [sequence omitted]

SEQ ID NO: 6237 - protein, 435 aa, Homo Sapiens
MGSLLALLALLLLWGAVAEGPAKKVLTLEGDLVLGGLFPVHQKGGPAEDCGPVNEHRGIQRLEAMLFALDRINRDPHLLPGVRLGAHILDSCSKDTHALEQALDFVRASLSRGADGSRHICPDGSYATHGDAPTAITGVIGGSYSDVSIQVANLLRLFQIPQISYASTSAKLSDKSRYDYFARTVPPDFFQAKAMAEILRFFNWTYVSTVASEGDYGETGIEAFELEARARNICVATSEKVGRAMSRAAFEGVVRALLQKPSARVAVLFTRSEDARELLAASQRLNASFTWVASDGWGALESVVAGSEGAAEGAITIELASYPISDFASYFQSLDPWNNSRNPWFREFWEQRFRCSFRQRDCAAHSLRAVPFEQESKIMFVVNAVYAMAHALHNMHRALCPNTTRLCDAMRPVNGRRLYKDFVLNVKFDGDLKVS

SEQ ID NO: 6238 - protein, 872 aa, Homo Sapiens [sequence omitted]

SEQ ID NO: 6239 - protein, 594 aa, Homo Sapiens
MGSLLALLALLLLWGAVAEGPAKKVLTLEGDLVLGGLFPVHQKGGPAEDCGPVNEHRGIQRLEAMLFALDRINRDPHLLPGVRLGAHILDSCSKDTHALEQALDFVRASLSRGADGSRHICPDGSYATHGDAPTAITGVIGGSYSDVSIQVANLLRLFQIPQISYASTSAKLSDKSRYDYFARTVPPDFFQAKAMAEILRFFNWTYVSTVASEGDYGETGIEAFELEARARNICVATSEKVGRAMSRAAFEGVVRALLQKPSARVAVLFTRSEDARELLAASQRLNASFTWVASDGWGALESVVAGSEGAAEGAITIELASYPISDFASYFQSLDPWNNSRNPWFREFWEQRFRCSFRQRDCAAHSLRAVPFEQESKIMFVVNAVYAMAHALHNMHRALCPNTTRLCDAMRPVNGRRLYKDFVLNVKFDAPFRPADTHNEVRFDRFGDGIGRYNIFTYLRAGSGRYRYQKTRKCPENFNEAKFIGFTMYTTCIIWLAFLPIFYVTSSDYRVQTTTMCVSVSLSGSVVLGCLFAPKLHIILFQPQKNVVSHRAPTSRFGSAAARASSSLGQGSGSQFVPTVCNGREVVDSTTSSL

SEQ ID NO: 6240 - protein, 81 aa, Homo Sapiens
MKMLTRLQVLTLALFSKGFLLSLGDHNFLRREIKIEGDLVLGGLFPINEKGTGTEECGRINEDRGIQRLEAMLFAIDEINK

SEQ ID NO: 6241 - protein, 87 aa, Homo Sapiens
MKMLTRLQVLTLALFSKGFLLSLGDHNFLRREIKIEGDLVLGGLFPINEKGTGTEECGRINEDRGIQRLEAMLFAIDEINKDDYLLP

SEQ ID NO: 6242 - protein, 879 aa, Homo Sapiens
MKMLTRLQVLTLALFSKGFLLSLGDHNFLRREIKIEGDLVLGGLFPINEKGTGTEECGRINEDRGIQRLEAMLFAIDEINKDDYLLPGVKLGVHILDTCSRDTYALEQSLEFVRASLTKVDEAEYMCPDGSYAIQENIPLLIAGVIGGSYSSVSIQVANLLRLFQIPQISYASTSAKLSDKSRYDYFARTVPPDFYQAKAMAEILRFFNWTYVSTVASEGDYGETGIEAFEQEARLRNICIATAEKVGRSNIRKSYDSVIRELLQKPNARVVVLFMRSDDSRELIAAASRANASFTWVASDGWGAQESIIKGSEHVAYGAITLELASQPVRQFDRYFQSLNPYNNHRNPWFRDFWEQKFQCSLQNKRNHRRVCDKHLAIDSSNYEQESKIMFVVNAVYAMAHALHKMQRTLCPNTTKLCDAMKILDGKKLYKDYLLKINFTAPFNPNKDADSIVKFDTFGDGMGRYNVFNFQNVGGKYSYLKVGHWAETLSLDVNSIHWSRNSVPTSQCSDPCAPNEMKNMQPGDVCCWICIPCEPYEYLADEFTCMDCGSGQWPTADLTGCYDLPEDYIRWEDAWAIGPVTIACLGFMCTCMVVTVFIKHNNTPLVKASGRELCYILLFGVGLSYCMTFFFIAKPSPVICALRRLGLGSSFAICYSALLTKTNCIARIFDGVKNGAQRPKFISPSSQVFICLGLILVQIVMVSVWLILEAPGTRRYTLAEKRETVILKCNVKDSSMLISLTYDVILVILCTVYAFKTRKCPENFNEAKFIGFTMYTTCIIWLAFLPIFYVTSSDYRVQTTTMCISVSLSGFVVLGCLFAPKVHIILFQPQKNVVTHRLHLNRFSVSGTGTTYSQSSASTYVPTVCNGREVLDSTTSSL

SEQ ID NO: 6243 - protein, 537 aa, Homo Sapiens
MKMLTRLQVLTLALFSKGFLLSLGDHNFLRREIKIEGDLVLGGLFPINEKGTGTEECGRINEDRGIQRLEAMLFAIDEINKDDYLLPGVKLGVHILDTCSRDTYALEQSLEFVRASLTKVDEAEYMCPDGSYAIQENIPLLIAGVIGGSYSSVSIQVANLLRLFQIPQISYASTSAKLSDKSRYDYFARTVPPDFYQAKAMAEILRFFNWTYVSTVASEGDYGETGIEAFEQEARLRNICIATAEKVGRSNIRKSYDSVIRELLQKPNARVVVLFMRSDDSRELIAAASRANASFTWVASDGWGAQESIIKGSEHVAYGAITLELASQPVRQFDRYFQSLNPYNNHRNPWFRDFWEQKFQCSLQNKRNHRRVCDKHLAIDSSNYEQESKIMFVVNAVYAMAHALHKMQRTLCPNTTKLCDAMKILDGKKLYKDYLLKINFTGADDNHVHLCQPEWLCGLGLFVCTQGSHHPVSTPEECCHTQTAPQQVQCQWNWDHILSVLCKHVCANGVQWAGSPRLHHLISVIVNCSSVLVFLDC

SEQ ID NO: 6244 - protein, 171 aa, Homo Sapiens
MSQSPGAGSPPPLPPRSAPVPARSCRCEVANLLRLFQIPQISYASTSAKLSDKSRYDYFARTVPPDFYQAKAMAEILRFFNWTYVSTVASEGDYGETGIEAFEQEARLRNICIATAEKVGRSNIRKSYDSVIRELLQKPNARVVVLFMRSDDSRELIAAASRANASFTWVA

SEQ ID NO: 6245 - protein, 1212 aa, Homo Sapiens
MVLLLILSVLLLKEDVRGSAQSSERRVVAHMPGDIIIGALFSVHHQPTVDKVHERKCGAVREQYGIQRVEAMLHTLERINSDPTLLPNITLGCEIRDSCWHSAVALEQSIEFIRDSLISSEEEEGLVRCVDGSSSSFRSKKPIVGVIGPGSSSVAIQVQNLLQLFNIPQIAYSATSMDLSDKTLFKYFMRVVPSDAQQARAMVDIVKRYNWTYVSAVHTEGNYGESGMEAFKDMSAKEGICIAHSYKIYSNAGEQSFDKLLKKLTSHLPKARVVACFCEGMTVRGLLMAMRRLGLAGEFLLLGSDGWADRYDVTDGYQREAVGGITIKLQSPDVKWFDDYYLKLRPETNHRNPWFQEFWQHRFQCRLEGFPQENSKYNKTCNSSLTLKTHHVQDSKMGFVINAIYSMAYGLHNMQMSLCPGYAGLCDAMKPIDGRKLLESLMKTNFTGVSGDTILFDENGDSPGRYEIMNFKEMGKDYFDYINVGSWDNGELKMDDDEVWSKKSNIIRSVCSEPCEKGQIKVIRKGEVSCCWTCTPCKENEYVFDEYTCKACQLGSWPTDDLTGCDLIPVQYLRWGDPEPIAAVVFACLGLLATLFVTVVFIIYRDTPVVKSSSRELCYIILAGICLGYLCTFCLIAKPKQIYCYLQRIGIGLSPAMSYSALVTKTNRIARILAGSKKKICTKKPRFMSACAQLVIAFILICIQLGIIVALFIMEPPDIMHDYPSIREVYLICNTTNLGVVTPLGYNGLLILSCTFYAFKTRNVPANFNEAKYIAFTMYTTCIIWLAFVPIYFGSNYKIITMCFSVSLSATVALGCMFVPKVYIILAKPERNVRSAFTTSTVVRMHVGDGKSSSAASRSSSLVNLWKRRGSSGETLRYKDRRLAQHKSEIECFTPKGSMGNGGRATMSSSNGKSVTWAQNEKSSRGQHLWQRLSIHINKKENPNQTAVIKPFPKSTESRGLGAGAGAGGSAGGVGATGGAGCAGAGPGGPESPDAGPKALYDVAEAEEHFPAPARPRSPSPISTLSHRAGSASRTDDDVPSLHSEPVARSSSSQGSLMEQISSVVTRFTANISELNSMMLSTAAPSPGVGAPLCSSYLIPKEIQLPTTMTTFAEIQPLPAIEVTGGAQPAAGAQAAGDAARESPAAGPEAAAAKPDLEELVALTPPSPFRDSVDSGSTTPNSPVSESALCIPSSPKYDTLIIRDYTQSSSSL

SEQ ID NO: 6246 - protein, 1180 aa, Homo Sapiens
MVLLLILSVLLLKEDVRGSAQSSERRVVAHMPGDIIIGALFSVHHQPTVDKVHERKCGAVREQYGIQRVEAMLHTLERINSDPTLLPNITLGCEIRDSCWHSAVALEQSIEFIRDSLISSEEEEGLVRCVDGSSSSFRSKKPIVGVIGPGSSSVAIQVQNLLQLFNIPQIAYSATSMDLSDKTLFKYFMRVVPSDAQQARAMVDIVKRYNWTYVSAVHTEGNYGESGMEAFKDMSAKEGICIAHSYKIYSNAGEQSFDKLLKKLTSHLPKARVVACFCEGMTVRGLLMAMRRLGLAGEFLLLGSDGWADRYDVTDGYQREAVGGITIKLQSPDVKWFDDYYLKLRPETNHRNPWFQEFWQHRFQCRLEGFPQENSKYNKTCNSSLTLKTHHVQDSKMGFVINAIYSMAYGLHNMQMSLCPGYAGLCDAMKPIDGRKLLESLMKTNFTGVSGDTILFDENGDSPGRYEIMNFKEMGKDYFDYINVGSWDNGELKMDDDEVWSKKSNIIRSVCSEPCEKGQIKVIRKGEVSCCWTCTPCKENEYVFDEYTCKACQLGSWPTDDLTGCDLIPVQYLRWGDPEPIAAVVFACLGLLATLFVTVVFIIYRDTPVVKSSSRELCYIILAGICLGYLCTFCLIAKPKQIYCYLQRIGIGLSPAMSYSALVTKTNRIARILAGSKKKICTKKPRFMSACAQLVIAFILICIQLGIIVALFIMEPPDIMHDYPSIREVYLICNTTNLGVVTPLGYNGLLILSCTFYAFKTRNVPANFNEAKYIAFTMYTTCIIWLAFVPIYFGSNYKIITMCFSVSLSATVALGCMFVPKVYIILAKPERNVRSAFTTSTVVRMHVGDGKSSSAASRSSSLVNLWKRRGSSGETLSSNGKSVTWAQNEKSSRGQHLWQRLSIHINKKENPNQTAVIKPFPKSTESRGLGAGAGAGGSAGGVGATGGAGCAGAGPGGPESPDAGPKALYDVAEAEEHFPAPARPRSPSPISTLSHRAGSASRTDDDVPSLHSEPVARSSSSQGSLMEQISSVVTRFTANISELNSMMLSTAAPSPGVGAPLCSSYLIPKEIQLPTTMTTFAEIQPLPAIEVTGGAQPAAGAQAAGDAARESPAAGPEAAAAKPDLEELVALTPPSPFRDSVDSGSTTPNSPVSESALCIPSSPKYDTLIIRDYTQSSSSL

SEQ ID NO: 6247 - protein, 1180 aa, Homo Sapiens; identical to SEQ ID NO: 6246

SEQ ID NO: 6248 - protein, 298 aa, Homo Sapiens
MVLLLILSVLLLKEDVRGSAQSSERRVVAHMPGDIIIGALFSVHHQPTVDKVHERKCGAVREQYGIQRVEAMLHTLERINSDPTLLPNITLGCEIRDSCWHSAVALEQSIEFIRDSLISSEEEEGLVRCVDGSSSSFRSKKPIVGVIGPGSSSVAIQVQNLLQLFNIPQIAYSATSMDLSDKTLFKYFMRVVPSDAQQARAMVDIVKRYNWTYVSAVHTEGRGTKKEEMRKRDQTLMLSFMRCVFLRFEEIRWNDSLVYDALENENIQVLSLCFPSSAVIQINTFLSPIALINRLNVT

SEQ ID NO: 6249 - protein, 87 aa, Homo Sapiens
  misc_feature (1)..(1): Xaa can be any naturally occurring amino acid
XQIAYSATSMDLSDKTLFKYFMRVVPSDAQQARAMVDIVKRYNWTYVSAVHTEGRGTKKEEMRKRDQTLMLSFMRFKLFSCLSLQRS

SEQ ID NO: 6250 - protein, 37 aa, Homo Sapiens
MWTLVSWVALTAGLVAGTRCPDGQFCPVACCLDPGGA

SEQ ID NO: 6251 - protein, 62 aa, Homo Sapiens
MWTLVSWVALTAGLVAGTRCPDGQFCPVACCLDPGGASYSCCRPLLDKWPTTLSRHLGGPCQ

SEQ ID NO: 6252 - protein, 172 aa, Homo Sapiens
MWTLVSWVALTAGLVAGTRCPDGQFCPVACCLDPGGASYSCCRPLLDKWPTTLSRHLGGPCQVDAHCSAGHSCIFTVSGTSSCCPFPEASCCEDRVHCCPHGAFCDLVHTRCITPTGTHPLAKKLPAQRTNRAVALSSSVMCPDARSRCPDGSTCCELPSGKYGCCPMPNAT

SEQ ID NO: 6253 - protein, 111 aa, Homo Sapiens
MWTLVSWVALTAGLVAGTRCPDGQFCPVACCLDPGGASYSCCRPLLDKWPTTLSRHLGGPCQVDAHCSAGHSCIFTVSGTSSCCPFPEAVACGDGHHCCPRGFHCSADGRS

SEQ ID NO: 6254 - protein, 135 aa, Homo Sapiens
MWTLVSWVALTAGLVAGTRCPDGQFCPVACCLDPGGASYSCCRPLLDKWPTTLSRHLGGPCQVDAHCSAGHSCIFTVSGTSSCCPFPEAVACGDGHHCCPRGFHCSADGRSCFQRSGNNSVGAIQCPDSQFECPD

SEQ ID NO: 6255 - protein, 136 aa, Homo Sapiens
MWTLVSWVALTAGLVAGTRCPDGQFCPVACCLDPGGASYSCCRPLLDKWPTTLSRHLGGPCQVDAHCSAGHSCIFTVSGTSSCCPFPEAVACGDGHHCCPRGFHCSADGRSCFQRSGNNSVGAIQCPDSQFECPDF

SEQ ID NO: 6256 - protein, 142 aa, Homo Sapiens
MWTLVSWVALTAGLVAGTRCPDGQFCPVACCLDPGGASYSCCRPLLDKWPTTLSRHLGGPCQVDAHCSAGHSCIFTVSGTSSCCPFPEAVACGDGHHCCPRGFHCSADGRSCFQRSGNNSVGAIQCPDSQFECPDFSTCCVM

SEQ ID NO: 6257 - protein, 149 aa, Homo Sapiens
MWTLVSWVALTAGLVAGTRCPDGQFCPVACCLDPGGASYSCCRPLLDKWPTTLSRHLGGPCQVDAHCSAGHSCIFTVSGTSSCCPFPEAVACGDGHHCCPRGFHCSADGRSCFQRSGNNSVGAIQCPDSQFECPDFSTCCVMVDGSWGC

SEQ ID NO: 6258 - protein, 163 aa, Homo Sapiens
MWTLVSWVALTAGLVAGTRCPDGQFCPVACCLDPGGASYSCCRPLLDKWPTTLSRHLGGPCQVDAHCSAGHSCIFTVSGTSSCCPFPEAVACGDGHHCCPRGFHCSADGRSCFQRSGNNSVGAIQCPDSQFECPDFSTCCVMVDGSWGCCPMPQASCCEDRVH

SEQ ID NO: 6259 - protein, 593 aa, Homo Sapiens
MWTLVSWVALTAGLVAGTRCPDGQFCPVACCLDPGGASYSCCRPLLDKWPTTLSRHLGGPCQVDAHCSAGHSCIFTVSGTSSCCPFPEAVACGDGHHCCPRGFHCSADGRSCFQRSGNNSVGAIQCPDSQFECPDFSTCCVMVDGSWGCCPMPQASCCEDRVHCCPHGAFCDLVHTRCITPTGTHPLAKKLPAQRTNRAVALSSSVMCPDARSRCPDGSTCCELPSGKYGCCPMPNATCCSDHLHCCPQDTVCDLIQSKCLSKENATTDLLTKLPAHTVGDVKCDMEVSCPDGYTCCRLQSGAWGCCPFTQAVCCEDHIHCCPAGFTCDTQKGTCEQGPHQVPWMEKAPAHLSLPDPQALKRDVPCDNVSSCPSSDTCCQLTSGEWGCCPIPEAVCCSDHQHCCPQGYTCVAEGQCQRGSEIVAGLEKMPARRASLSHPRDIGCDQHTSCPVGQTCCPSLGGSWACCQLPHAVCCEDRQHCCPAGYTCNVKARSCEKEVVSAQPATFLARSPHVGVKDVECGEGHFCHDNQTCCRDNRQGWACCPYRQGVCCADRRHCCPAGFRCAARGTKCLRREAPRWDAPLRDPALRQLL

SEQ ID NO: 6260 - protein, 438 aa, Homo Sapiens
MWTLVSWVALTAGLVAGTRCPDGQFCPVACCLDPGGASYSCCRPLLDKWPTTLSRHLGGPCQVDAHCSAGHSCIFTVSGTSSCCPFPEAVACGDGHHCCPRGFHCSADGRSCFQRSGNNSVGAIQCPDSQFECPDFSTCCVMVDGSWGCCPMPQASCCEDRVHCCPHGAFCDLVHTRCITPTGTHPLAKKLPAQRTNRAVALSSSVMCPDARSRCPDGSTCCELPSGKYGCCPMPNATCCSDHLHCCPQDTVCDLIQSKCLSKENATTDLLTKLPAHTVGDVKCDMEVSCPDGYTCCRLQSGAWGCCPFTQAVCCEDHIHCCPAGFTCDTQKGTCEQGPHQVPWMEKAPAHLSLPDPQALKRDVPCDNVSSCPSSDTCCRDNRQGWACCPYRQGVCCADRRHCCPAGFRCAARGTKCLRREAPRWDAPLRDPALRQLL

SEQ ID NO: 6261 - protein, 436 aa, Homo Sapiens
MWTLVSWVALTAGLVAGTRCPDGQFCPVACCLDPGGASYSCCRPLLDKWPTTLSRHLGGPCQVDAHCSAGHSCIFTVSGTSSCCPFPEAVACGDGHHCCPRGFHCSADGRSCFQRSGNNSVGAIQCPDSQFECPDFSTCCVMVDGSWGCCPMPQAVCCEDHIHCCPAGFTCDTQKGTCEQGPHQVPWMEKAPAHLSLPDPQALKRDVPCDNVSSCPSSDTCCQLTSGEWGCCPIPEAVCCSDHQHCCPQGYTCVAEGQCQRGSEIVAGLEKMPARRASLSHPRDIGCDQHTSCPVGQTCCPSLGGSWACCQLPHAVCCEDRQHCCPAGYTCNVKARSCEKEVVSAQPATFLARSPHVGVKDVECGEGHFCHDNQTCCRDNRQGWACCPYRQGVCCADRRHCCPAGFRCAARGTKCLRREAPRWDAPLRDPALRQLL

SEQ ID NO: 6262 - protein, 189 aa, Homo Sapiens
MWTLVSWVALTAGLVAGTRCPDGQFCPVACCLDPGGASYSCCRPLLDKWPTTLSRHLGGPCQVDAHCSAGHSCIFTVSGTSSCCPFPEAVACGDGHHCCPRGFHCSADGRSCFQRSGNNSVGAIQCPDSQFECPDFSTCCVMVDGSWGCCPMPQGALLSARCLLRPGSHPLHHTHGHPPPGKEAPCPED

SEQ ID NO: 6263 - protein, 191 aa, Homo Sapiens
MWTLVSWVALTAGLVAGTRCPDGQFCPVACCLDPGGASYSCCRPLLDKWPTTLSRHLGGPCQVDAHCSAGHSCIFTVSGTSSCCPFPEIKGPCQCRFLCVPQAVACGDGHHCCPRGFHCSADGRSCFQRSGNNSVGAIQCPDSQFECPDFSTCCVMVDGSWGCCPMPQASCCEDRVHCCPHGAFCDLVHTR

SEQ ID NO: 6264 - protein, 388 aa, Homo Sapiens
  misc_feature (1)..(1): Xaa can be any naturally occurring amino acid
XAKKLPAQRTNRAVALSSSVMCPDARSRCPDGSTCCELPSGKYGCCPMPNATCCSDHLHCCPQDTVCDLIQSKCLSKENATTDLLTKLPAHTVGDVKCDMEVSCPDGYTCCRLQSGAWGCCPFTQAVCCEDHIHCCPAGFTCDTQKGTCEQGPHQVPWMEKAPAHLSLPDPQALKRDVPCDNVSSCPSSDTCCQLTSGEWGCCPIPEAVCCSDHQHCCPQGYTCVAEGQCQRGSEIVAGLEKMPARRASLSHPRDIGCDQHTSCPVGQTCCPSLGGSWACCQLPHAVCCEDRQHCCPAGYTCNVKARSCEKEVVSAQPATFLARSPHVGVKDVECGEGHFCHDNQTCCRDNRQGWACCPYRQVSANPHPGAGYGQGPGPTSSNPLAPL

SEQ ID NO: 6265 - protein, 110 aa, Homo Sapiens
  misc_feature (1)..(1): Xaa can be any naturally occurring amino acid
XCPSLGGSWACCQLPHAVCCEDRQHCCPAGYTCNVKARSCEKEVVSAQPATFLARSPHVGVKDVECGEGHFCHDNQTCCRDNRQGWACCPYRQPGVPSVCAGRPRAGTPL

SEQ ID NO: 6266 - protein, 138 aa, Homo Sapiens
MRGRELPLVLLALVLCLAPRGRAVPLPAGGGTVLTKMYPRGNHWAVGHLMGKKSTGESSSVSERGSLKQQLREYIRWEEAARNLLGLIEAKENRNHQPPQPKALGNQQPSWDSEDSSNFKDLVDSLLQVLNVKEGTPS

SEQ ID NO: 6267 - protein, 141 aa, Homo Sapiens
MRGRELPLVLLALVLCLAPRGRAVPLPAGGGTVLTKMYPRGNHWAVGHLMGKKSTGESSSVSERGSLKQQLREYIRWEEAARNLLGLIEAKENRNHQPPQPKALGNQQPSWDSEDSSNFKDVGSKGKGSQREGRNPQLNQQ

SEQ ID NO: 6268 - protein, 148 aa, Homo Sapiens
MRGRELPLVLLALVLCLAPRGRAVPLPAGGGTVLTKMYPRGNHWAVGHLMGKKSTGESSSVSERGSLKQQLREYIRWEEAARNLLGLIEAKENRNHQPPQPKALGNQQPSWDSEDSSNFKDVGSKGKVGRLSAPGSQREGRNPQLNQQ

SEQ ID NO: 6269 - protein, 96 aa, Homo Sapiens
  misc_feature (1)..(1): Xaa can be any naturally occurring amino acid
XHLMGKKSTGESSSVSERGSLKQQLREYIRWEEAARNLLGLIEAKENRNHQPPQPKALGNQQPSWDSEDSSNFKDVGSKGKDSLLQVLNVKEGTPS

SEQ ID NO: 6270 - protein, 35 aa, Homo Sapiens
  misc_feature (1)..(1): Xaa can be any naturally occurring amino acid
XISSLRGIQRIAATSKILSAPGSQREGRNPQLNQQ

SEQ ID NO: 6271 - protein, 496 aa, Homo Sapiens
MFAKATRNFLREVDADGDLIAVSNLNDSDKLQLLSLVTKKKRFWCWQRPKYQFLSLTLGDVLIEDQFPSPVVVESDFVKYEGKFANHVSGTLETALGKVKLNLGGSSRVESQSSFGTLRKQEVDLQQLIRDSAERTINLRNPVLQQVLEGRNEVLCVLTQKITTMQKCVISEHMQVEEKCGGIVGIQTKTVQVSATEDGNVTKDSNVVLEIPAATTIAYGVIELYVKLDGQFEFCLLRGKQGGFENKKRIDSVYLDPLVFREFAFIDMPDAAHGISSQDGPLSVLKQATLLLERNFHPFAELPEPQQTALSDIFQAVLFDDELLMVLEPVCDDLVSGLSPTVAVLGELKPRQQQDLVAFLQLVGCSLQGGCPGPEDAGSKQLFMTAYFLVSALAEMPDSAAALLGTCCKLQIIPTLCHLLRALSDDGVSDLEDPTLTPLKDTERFGIVQRLFASADISLERLKSSVKAVILKDSKVFPLLLCITLNGLCALGREHS

SEQ ID NO: 6272 - protein, 356 aa, Homo Sapiens
MFAKATRNFLREVDADGDLIAVSNLNDSDKLQLLSLVTKKKRFWCWQRPKYQFLSLTLGDVLIEDQFPSPVVVESDFVKYEGKFANHVSGTLETALGKVKLNLGGSSRVESQSSFGTLRKQEVDLQQLIRDSAERTINLRNPVLQQVLEGRNEVLCVLTQKITTMQKCVISEHMQVEEKCGGIVGIQTKTVQVSATEDGNVTKDSNVVLEIPAATTIAYGVIELYVKLDGQFEFCLLRGKQGGFENKKRIDSVYLDPLVFREFAFIDMPDAAHGISSQDGPLSVLKQATLLLERNFHPFAELPEPQQTALSDIFQAVLFDDELLMVLEPVVSPETSQGSVFTGVFWNRGGGRMELC

SEQ ID NO: 6273 - protein, 496 aa, Homo Sapiens; identical to SEQ ID NO: 6271

SEQ ID NO: 6274 - protein, 496 aa, Homo Sapiens; identical to SEQ ID NO: 6271

SEQ ID NO: 6275 - protein, 332 aa, Homo Sapiens
MQKCVISEHMQVEEKCGGIVGIQTKTVQVSATEDGNVTKDSNVVLEIPAATTIAYGVIELYVKLDGQFEFCLLRGKQGGFENKKRIDSVYLDPLVFREFAFIDMPDAAHGISSQDGPLSVLKQATLLLERNFHPFAELPEPQQTALSDIFQAVLFDDELLMVLEPVCDDLVSGLSPTVAVLGELKPRQQQDLVAFLQLVGCSLQGGCPGPEDAGSKQLFMTAYFLVSALAEMPDSAAALLGTCCKLQIIPTLCHLLRALSDDGVSDLEDPTLTPLKDTERFGIVQRLFASADISLERLKSSVKAVILKDSKVFPLLLCITLNGLCALGREHS

SEQ ID NO: 6276 - protein, 332 aa, Homo Sapiens; identical to SEQ ID NO: 6275

SEQ ID NO: 6277 - protein, 55 aa, Homo Sapiens
QLFMTAYFLVSALAEMPDSAAALLGTCCKLQIIPTLCHLVSNLPGGTLEWIGMGK

SEQ ID NO: 6278 - protein, 155 aa, Homo Sapiens
  misc_feature (1)..(1): Xaa can be any naturally occurring amino acid
XAATTIAYGVIELYVKLDGQFEFCLLRGKQGGFENKKRIDSVYLDPLVFREFAFIDMPDAAHGISSQDGPLSVLKQATLLLERNFHPFAELPEPQQTALSDIFQAVLFDDELLMVLEPVKDILGRSSSLTLSCTNGESHTSCQPSSHPDSVSSLS

SEQ ID NO: 6279 - protein, 192 aa, Homo Sapiens
  misc_feature (1)..(1): Xaa can be any naturally occurring amino acid
XEEKCGGIVGIQTKTVQVSATEDGNVTKDSNVVLEIPAATTIAYGVIELYVKLDGQFEFCLLRGKQGGFENKKRIDSVYLDPLVFREFAFIDMPDAAHGISSQDGPLSVLKQATLLLERNFHPFAELPEPQQTALSDIFQAVLFDDELLMVLEPVQKDILGRSSSLTLSCTNGESHTSCQPSSHPDSVSSLS

SEQ ID NO: 6280 - protein, 211 aa, Homo Sapiens
MAKMELSKAFSGQRTLLSAILSMLSLSFSTTSLLSNYWFVGTQKVPKPLCEKGLAAKCFDMPVSLDGDTNTSTQEVVQYNWETGDDRFSFRSFRSGMWLSCEETVEEPAKSEMEEELKKCVYLHLYLLLCHLALLHPQSWKQFRALRSSGTAAAKGERCRSFIELTPPAKRGEKGLLEFATLQGPCHPTLRFGGKRLMEKASLPSPPLGLC

SEQ ID NO: 6281 - protein, 298 aa, Homo Sapiens
MAKMELSKAFSGQRTLLSAILSMLSLSFSTTSLLSNYWFVGTQKVPKPLCEKGLAAKCFDMPVSLDGDTNTSTQEVVQYNWETGDDRFSFRSFRSGMWLSCEETVEEPALLHPQSWKQFRALRSSGTAAAKGERCRSFIELTPPAKRGLLGMVAHMMYSQVFQATVNLGPEDWRPHVWNYGWAFYMAWLSFTCCMASAVTTFNTYTRMVLEFKCKHSKSFKENPNCLPHHHQCFPRRLSSAAPTVGPLTSYHQYHNQPIHSVSEGVDFYSELRNKGFQRGASQELKEAVRSSVEEEQC

SEQ ID NO: 6282 - protein, 326 aa, Homo Sapiens
MAKMELSKAFSGQRTLLSAILSMLSLSFSTTSLLSNYWFVGTQKVPKPLCEKGLAAKCFDMPVSLDGDTNTSTQEVVQYNWETGDDRFSFRSFRSGMWLSCEETVEEPGERCRSFIELTPPAKREILWLSLGTQITYIGLQFISFLLLLTDLLLTGNPACGLKLSAFAAVSSVLSGLLGMVAHMMYSQVFQATVNLGPEDWRPHVWNYGWAFYMAWLSFTCCMASAVTTFNTYTRMVLEFKCKHSKSFKENPNCLPHHHQCFPRRLSSAAPTVGPLTSYHQYHNQPIHSVSEGVDFYSELRNKGFQRGASQELKEAVRSSVEEEQC

SEQ ID NO: 6283 - protein, 285 aa, Homo Sapiens
MAKMELSKAFSGQRTLLSAILSMLSLSFSTTSLLSNYWFVGTQKVPKPLCEKGLAAKCFDMPVSLDGDTNTSTQEVVQYNWETGDDRFSFRSFRSGMWLSCEETVEEPGERCRSFIELTPPAKRGEKGLLEFATLQGPCHPTLRFGGKRLMEKASLPSPPLGLCGKNPMVIPGNADHLHRTSIHQLPPATNRLATHWEPCLWAQTERLCCCFLCPVRSPGDGGPHDVFTSLPSDCQLGSRRLETTCLELWLGLLHGLALLHLLHGVGCHHLQHVHQDGAGVQVQA

SEQ ID NO: 6284 - protein, 275 aa, Homo Sapiens
MAKMELSKAFSGQRTLLSAILSMLSLSFSTTSLLSNYWFVGTQKVPKPLCEKGLAAKCFDMPVSLDGDTNTSTQEVVQYNWETGDDRFSFRSFRSGMWLSCEETVEEPGERCRSFIELTPPAKRGLLGMVAHMMYSQVFQATVNLGPEDWRPHVWNYGWAFYMAWLSFTCCMASAVTTFNTYTRMVLEFKCKHSKSFKENPNCLPHHHQCFPRRLSSAAPTVGPLTSYHQYHNQPIHSVSEGVDFYSELRNKGFQRGASQELKEAVRSSVEEEQC

SEQ ID NO: 6285 - protein, 220 aa, Homo Sapiens
MSDPSQLTQNVCLTQEMELSKAFSGQRTLLSAILSMLSLSFSTTSLLSNYWFVGTQKVPKPLCEKGLAAKCFDMPVSLDGDTNTSTQEVVQYNWETGDDRFSFRSFRSGMWLSCEETVEEPAKSEMEEELKKCVYLHLYLLLCHLALLHPQSWKQFRALRSSGTAAAKGERCRSFIELTPPAKREILWLSLGTQITYIGLQFISFLLLLTDLLLTGNPAC

SEQ ID NO: 6286 - protein, 321 aa, Homo Sapiens
MSDPSQLTQNVCLTQEMELSKAFSGQRTLLSAILSMLSLSFSTTSLLSNYWFVGTQKVPKPLCEKGLAAKCFDMPVSLDGDTNTSTQEVVQYNWETGDDRFSFRSFRSGMWLSCEETVEEPALLHPQSWKQFRALRSSGTAAAKGERCRSFIELTPPAKRGEKGLLEFATLQGPCHPTLRFGGKRLMEKASLPSPPLGLCGKNPMVIPGNADHLHRTSIHQLPPATNRLATHWEPCLWAQTERLCCCFLCPVRSPGDGGPHDVFTSLPSDCQLGSRRLETTCLELWLGLLHGLALLHLLHGVGCHHLQHVHQDGAGVQVQA

SEQ ID NO: 6287 - protein, 339 aa, Homo Sapiens
MSDPSQLTQNVCLTQEMELSKAFSGQRTLLSAILSMLSLSFSTTSLLSNYWFVGTQKVPKPLCEKGLAAKCFDMPVSLDGDTNTSTQEVVQYNWETGDDRFSFRSFRSGMWLSCEETVEEPGERCRSFIELTPPAKREILWLSLGTQITYIGLQFISFLLLLTDLLLTGNPACGLKLSAFAAVSSVLSGLLGMVAHMMYSQVFQATVNLGPEDWRPHVWNYGWAFYMAWLSFTCCMASAVTTFNTYTRMVLEFKCKHSKSFKENPNCLPHHHQCFPRRLSSAAPTVGPLTSYHQYHNQPIHSVSEGVDFYSELRNKGFQRGASQELKEAVRSSVEEEQC

SEQ ID NO: 6288 - protein, 236 aa, Homo Sapiens
MSDPSQLTQNVCLTQEMELSKAFSGQRTLLSAILSMLSLSFSTTSLLSNYWFVGTQKVPKPLCEKGLAAKCFDMPVSLDGDTNTSTQEVVQYNWETGDDRFSFRSFRSGMWLSCEETVEEPGERCRSFIELTPPAKRGEKGLLEFATLQGPCHPTLRFGGKRLMEKASLPSPPLGLCGKNPMVIPGNADHLHRTSIHQLPPATNRLATHWEPCLWAQTERLCCCFLCPVRSPGDGG

SEQ ID NO: 6289 - protein, 748 aa, Homo Sapiens
MAEEEALRGNSDPWPNSMVVEHPEFLKAGKEPGLQIWRVEKFDLVPVPTNLYGDFFTGDAYVILKTVQLRNGNLQYDLHYWLGNECSQDESGAAAIFTVQLDDYLNGRAVQHREVQGFESATFLGYFKSGLKYKKGGVASGFKHVVPNEVVVQRLFQVKGRRVVRATEVPVSWESFNNGDCFILDLGNNIHQWCGSNSNRYERLKATQVSKGIRDNERSGRARVHVSEEGTEPEAMLQVLGPKPALPAGTEDTAKEDAANRKLAKLYKVSNGAGTMSVSLVADENPFAQGALKSEDCFILDHGKDGKIFVWKGKQANTEERKAALKTASDFITKMDYPKQTQVSVLPEGGETPLFKQFFKNWRDPDQTDGLGLSYLSSHIANVERVPFDAATLHTSTAMAAQHGMDDDGTGQKQIWRIEGSNKVPVDPATYGQFYGGDSYIILYNYRHGGRQGQIIYNWQGAQSTQDEVAASAILTAQLDEELGGTPVQSRVVQGKEPAHLMSLFGGKPMIIYKGGTSREGGQTAPASTRLFQVRANSAGATRAVEVLPKAGALNSNDAFVLKTPSAAYLWVGTGASEAEKTGAQELLRVLRAQPVQVAEGSEPDGFWEALGGKAAYRTSPRLKDKKMDAHPPRLFACSNKIGRFVIEEVPGELMQEDLATDDVMLLDTWDQVFVWVGKDSQEEEKTEALTSAKRYIETDPANRDRRTPITVVKQGFEPPSFVGWFLGWDDDYWSVDPLDRAMAELAA

SEQ ID NO: 6290 - protein, 782 aa, Homo Sapiens
MAPHRPAPALLCALSLALCALSLPVRAATASRGASQAGAPQGRVPEARPNSMVVEHPEFLKAGKEPGLQIWRVEKFDLVPVPTNLYGDFFTGDAYVILKTVQLRNGNLQYDLHYWLGNECSQDESGAAAIFTVQLDDYLNGRAVQHREVQGFESATFLGYFKSGLKYKKGGVASGFKHVVPNEVVVQRLFQVKGRRVVRATEVPVSWESFNNGDCFILDLGNNIHQWCGSNSNRYERLKATQVSKGIRDNERSGRARVHVSEEGTEPEAMLQVLGPKPALPAGTEDTAKEDAANRKLAKLYKVSNGAGTMSVSLVADENPFAQGALKSEDCFILDHGKDGKIFVWKGKQANTEERKAALKTASDFITKMDYPKQTQVSVLPEGGETPLFKQFFKNWRDPDQTDGLGLSYLSSHIANVERVPFDAATLHTSTAMAAQHGMDDDGTGQKQIWRIEGSNKVPVDPATYGQFYGGDSYIILYNYRHGGRQGQIIYNWQGAQSTQDEVAASAILTAQLDEELGGTPVQSRVVQGKEPAHLMSLFGGKPMIIYKGGTSREGGQTAPASTRLFQVRANSAGATRAVEVLPKAGALNSNDAFVLKTPSAAYLWVGTGASEAEKTGAQELLRVLRAQPVQVAEGSEPDGFWEALGGKAAYRTSPRLKDKKMDAHPPRLFACSNKIGRFVIEEVPGELMQEDLATDDVMLLDTWDQVFVWVGKDSQEEEKTEALTSAKRYIETDPANRDRRTPITVVKQGFEPPSFVGWFLGWDDDYWSVDPLDRAMAELAA

SEQ ID NO: 6291 - protein, 232 aa, Homo Sapiens
MEKLFCCFPNSMVVEHPEFLKAGKEPGLQIWRVEKFDLVPVPTNLYGDFFTGDAYVILKTVQLRNGNLQYDLHYWLGNECSQDESGAAAIFTVQLDDYLNGRAVQHREVQGFESATFLGYFKSGLKYKKGGVASGFKHVVPNEVVVQRLFQVKGRRVVRATEVPVSWESFNNGDCFILDLGNNIHQWCGSNSNRYERLKATQVSKGIRDNERSGRARVHVSEEGTEPEAMLQ

SEQ ID NO: 6292 - protein, 742 aa, Homo Sapiens
MEKLFCCFPNSMVVEHPEFLKAGKEPGLQIWRVEKFDLVPVPTNLYGDFFTGDAYVILKTVQLRNGNLQYDLHYWLGNECSQDESGAAAIFTVQLDDYLNGRAVQHREVQGFESATFLGYFKSGLKYKKGGVASGFKHVVPNEVVVQRLFQVKGRRVVRATEVPVSWESFNNGDCFILDLGNNIHQWCGSNSNRYERLKATQVSKGIRDNERSGRARVHVSEEGTEPEAMLQVLGPKPALPAGTEDTAKEDAANRKLAKLYKVSNGAGTMSVSLVADENPFAQGALKSEDCFILDHGKDGKIFVWKGKQANTEERKAALKTASDFITKMDYPKQTQVSVLPEGGETPLFKQFFKNWRDPDQTDGLGLSYLSSHIANVERVPFDAATLHTSTAMAAQHGMDDDGTGQKQIWRIEGSNKVPVDPATYGQFYGGDSYIILYNYRHGGRQGQIIYNWQGAQSTQDEVAASAILTAQLDEELGGTPVQSRVVQGKEPAHLMSLFGGKPMIIYKGGTSREGGQTAPASTRLFQVRANSAGATRAVEVLPKAGALNSNDAFVLKTPSAAYLWVGTGASEAEKTGAQELLRVLRAQPVQVAEGSEPDGFWEALGGKAAYRTSPRLKDKKMDAHPPRLFACSNKIGRFVIEEVPGELMQEDLATDDVMLLDTWDQVFVWVGKDSQEEEKTEALTSAKRYIETDPANRDRRTPITVVKQGFEPPSFVGWFLGWDDDYWSVDPLDRAMAELAA

SEQ ID NO: 6293 - protein, 767 aa, Homo Sapiens
MNTGLTRLLWPSWLPDGDMSHPQPELFLFPKAQPNSMVVEHPEFLKAGKEPGLQIWRVEKFDLVPVPTNLYGDFFTGDAYVILKTVQLRNGNLQYDLHYWLGNECSQDESGAAAIFTVQLDDYLNGRAVQHREVQGFESATFLGYFKSGLKYKKGGVASGFKHVVPNEVVVQRLFQVKGRRVVRATEVPVSWESFNNGDCFILDLGNNIHQWCGSNSNRYERLKATQVSKGIRDNERSGRARVHVSEEGTEPEAMLQVLGPKPALPAGTEDTAKEDAANRKLAKLYKVSNGAGTMSVSLVADENPFAQGALKSEDCFILDHGKDGKIFVWKGKQANTEERKAALKTASDFITKMDYPKQTQVSVLPEGGETPLFKQFFKNWRDPDQTDGLGLSYLSSHIANVERVPFDAATLHTSTAMAAQHGMDDDGTGQKQIWRIEGSNKVPVDPATYGQFYGGDSYIILYNYRHGGRQGQIIYNWQGAQSTQDEVAASAILTAQLDEELGGTPVQSRVVQGKEPAHLMSLFGGKPMIIYKGGTSREGGQTAPASTRLFQVRANSAGATRAVEVLPKAGALNSNDAFVLKTPSAAYLWVGTGASEAEKTGAQELLRVLRAQPVQVAEGSEPDGFWEALGGKAAYRTSPRLKDKKMDAHPPRLFACSNKIGRFVIEEVPGELMQEDLATDDVMLLDTWDQVFVWVGKDSQEEEKTEALTSAKRYIETDPANRDRRTPITVVKQGFEPPSFVGWFLGWDDDYWSVDPLDRAMAELAA

SEQ ID NO: 6294 - protein, 739 aa, Homo Sapiens
MPLCTPNSMVVEHPEFLKAGKEPGLQIWRVEKFDLVPVPTNLYGDFFTGDAYVILKTVQLRNGNLQYDLHYWLGNECSQDESGAAAIFTVQLDDYLNGRAVQHREVQGFESATFLGYFKSGLKYKKGGVASGFKHVVPNEVVVQRLFQVKGRRVVRATEVPVSWESFNNGDCFILDLGNNIHQWCGSNSNRYERLKATQVSKGIRDNERSGRARVHVSEEGTEPEAMLQVLGPKPALPAGTEDTAKEDAANRKLAKLYKVSNGAGTMSVSLVADENPFAQGALKSEDCFILDHGKDGKIFVWKGKQANTEERKAALKTASDFITKMDYPKQTQVSVLPEGGETPLFKQFFKNWRDPDQTDGLGLSYLSSHIANVERVPFDAATLHTSTAMAAQHGMDDDGTGQKQIWRIEGSNKVPVDPATYGQFYGGDSYIILYNYRHGGRQGQIIYNWQGAQSTQDEVAASAILTAQLDEELGGTPVQSRVVQGKEPAHLMSLFGGKPMIIYKGGTSREGGQTAPASTRLFQVRANSAGATRAVEVLPKAGALNSNDAFVLKTPSAAYLWVGTGASEAEKTGAQELLRVLRAQPVQVAEGSEPDGFWEALGGKAAYRTSPRLKDKKMDAHPPRLFACSNKIGRFVIEEVPGELMQEDLATDDVMLLDTWDQVFVWVGKDSQEEEKTEALTSAKRYIETDPANRDRRTPITVVKQGFEPPSFVGWFLGWDDDYWSVDPLDRAMAELAA

SEQ ID NO: 6295 - protein, 731 aa, Homo Sapiens
MVVEHPEFLKAGKEPGLQIWRVEKFDLVPVPTNLYGDFFTGDAYVILKTVQLRNGNLQYDLHYWLGNECSQDESGAAAIFTVQLDDYLNGRAVQHREVQGFESATFLGYFKSGLKYKKGGVASGFKHVVPNEVVVQRLFQVKGRRVVRATEVPVSWESFNNGDCFILDLGNNIHQWCGSNSNRYERLKATQVSKGIRDNERSGRARVHVSEEGTEPEAMLQVLGPKPALPAGTEDTAKEDAANRKLAKLYKVSNGAGTMSVSLVADENPFAQGALKSEDCFILDHGKDGKIFVWKGKQANTEERKAALKTASDFITKMDYPKQTQVSVLPEGGETPLFKQFFKNWRDPDQTDGLGLSYLSSHIANVERVPFDAATLHTSTAMAAQHGMDDDGTGQKQIWRIEGSNKVPVDPATYGQFYGGDSYIILYNYRHGGRQGQIIYNWQGAQSTQDEVAASAILTAQLDEELGGTPVQSRVVQGKEPAHLMSLFGGKPMIIYKGGTSREGGQTAPASTRLFQVRANSAGATRAVEVLPKAGALNSNDAFVLKTPSAAYLWVGTGASEAEKTGAQELLRVLRAQPVQVAEGSEPDGFWEALGGKAAYRTSPRLKDKKMDAHPPRLFACSNKIGRFVIEEVPGELMQEDLATDDVMLLDTWDQVFVWVGKDSQEEEKTEALTSAKRYIETDPANRDRRTPITVVKQGFEPPSFVGWFLGWDDDYWSVDPLDRAMAELAA

SEQ ID NO: 6296 - protein, 260 aa, Homo Sapiens
MVVEHPEFLKAGKEPGLQIWRVEKFDLVPVPTNLYGDFFTGDAYVILKTVQLRNGNLQYDLHYWLGNECSQDESGAAAIFTVQLDDYLNGRAVQHREVQGFESATFLGYFKSGLKYKKGGVASGFKHVVPNEVVVQRLFQVKGRRVVRATEVPVSWESFNNGDCFILDLGNNIHQWCGSNSNRYERLKATQVSKGIRDNERSGRARVHVSEEGTEPEAMLQVLGPKPALPAGTEDTAKEDAANRKLAKLYKVSNGAGTMS

SEQ ID NO: 6297 - protein, 67 aa, Homo Sapiens
  misc_feature (1)..(1): Xaa can be any naturally occurring amino acid
XKGGTSREGGQTAPASTRLFQVRANSAGATRAVEVISRSWNTEGIGLPETSQLNDQISRHRNGGRGW

SEQ ID NO: 6298 - protein, 329 aa, Homo Sapiens
MESFLTSMGKFMKLIPDHRPKDLESIIRPKCQVIYFPIRFPDVSRFMPKHKTTHLKKMLGLKGNGGAVLSMALPFQPEQRDSEDLLKNFNSECDTHCGLDTARQEYLGNSLRQESDLKKSTSSDNSSSHHGENKQNLTVDPCDILGGVDNQQRLLHIVWPHRWEHDKDPESFFKVLMHLKDLGLNFHVSVLGETFTDVPDIFSEAKKALGSSVLHWGYLPSKDDYFQVLCMADVVISTAKHEFFGVAMLEAVYCGCYPLCPKDLVYPEIFPAEYLYSTPEQLSKRLQNFCKRPDIIRKHLYKGEIAPFSWAALHGKFRSLLTTEPREDL

SEQ ID NO: 6299 - protein, 426 aa, Homo Sapiens
MLTLHVWIWFGFMPCPNLMQNYNHQCCRTLFASSVLNLTELAALRPDLGKLKKILYFHENQLIYPVKKCQERDFQYGYNQILSCLVADVVVFNSVFNMESFLTSMGKFMKLIPDHRPKDLESIIRPKCQVIYFPIRFPDVSRFMPKHKTTHLKKMLGLKGNGGAVLSMALPFQPEQRDSEDLLKNFNSECDTHCGLDTARQEYLGNSLRQESDLKKSTSSDNSSSHHGENKQNLTVDPCDILGGVDNQQRLLHIVWPHRWEHDKDPESFFKVLMHLKDLGLNFHVSVLGETFTDVPDIFSEAKKALGSSVLHWGYLPSKDDYFQVLCMADVVISTAKHEFFGVAMLEAVYCGCYPLCPKDLVYPEIFPAEYLYSTPEQLSKRLQNFCKRPDIIRKHLYKGEIAPFSWAALHGKFRSLLTTEPREDL

SEQ ID NO: 6300 - protein, 66 aa, Homo Sapiens
MSILIIEAFYGGSHKQLVDLLQEELGDCVVYTLPAKKWHWRARTSALYFSQTIPISEHYRQSEITN

SEQ ID NO: 6301 - protein, 66 aa, Homo Sapiens; identical to SEQ ID NO: 6300

SEQ ID NO: 6302 - protein, 99 aa, Homo Sapiens
MSILIIEAFYGGSHKQLVDLLQEELGDCVVYTLPAKKWHWRARTSALYFSQTIPISEHYRTLFASSVLNLTELAALRPDLGKLKKILYFHENQLIYPVK

SEQ ID NO: 6303 - protein, 173 aa, Homo Sapiens
MSILIIEAFYGGSHKQLVDLLQEELGDCVVYTLPAKKWHWRARTSALYFSQTIPISEHYRTLFASSVLNLTELAALRPDLGKLKKILYFHENQLIYPVKKCQERDFQYGYNQILSCLVADVVVFNSVFNMESFLTSMGKFMKLIPDHRPKDLESIIRPKCQVIYFPIRFPDVS

SEQ ID NO: 6304 - protein, 340 aa, Homo Sapiens
MSILIIEAFYGGSHKQLVDLLQEELGDCVVYTLPAKKWHWRARTSALYFSQTIPISEHYRTLFASSVLNLTELAALRPDLGKLKKILYFHENQLIYPVKKCQERDFQYGYNQILSCLVADVVVFNSVFNMESFLTSMGKFMKLIPDHRPKDLESIIRPKCQVIYFPIRFPDVSREHDKDPESFFKVLMHLKDLGLNFHVSVLGETFTDVPDIFSEAKKALGSSVLHWGYLPSKDDYFQVLCMADVVISTAKHEFFGVAMLEAVYCGCYPLCPKDLVYPEIFPAEYLYSTPEQLSKRLQNFCKRPDIIRKHLYKGEIAPFSWAALHGKFRSLLTTEPREDL

SEQ ID NO: 6305 - protein, 376 aa, Homo Sapiens
MSILIIEAFYGGSHKQLVDLLQEELGDCVVYTLPAKKWHWRARTSALYFSQTIPISEHYRTLFASSVLNLTELAALRPDLGKLKKILYFHENQLIYPVKKCQERDFQYGYNQILSCLVADVVVFNSVFNMESFLTSMGKFMKLIPDHRPKDLESIIRPKCQVIYFPIRFPDVSRFMPKHKTTHLKKMLGLKGNGGAVLSMALPFQPEQRDSEDLLKNFNSECDTHCGLDTARQEYLGNSLRQESDLKKSTSSDNSSSHHGENKQNLTVDPCDILGGVDNQQRLLHIVWPHRWEHDKDPESFFKVLMHLKDLGLNFHVSVLGETFTDVPGWKLCTVGVTHFVLKIWFIPKYFQLNICILHLNSFQKGSRISARDQIL

SEQ ID NO: 6306 - protein, 458 aa, Homo Sapiens
MSILIIEAFYGGSHKQLVDLLQEELGDCVVYTLPAKKWHWRARTSALYFSQTIPISEHYRTLFASSVLNLTELAALRPDLGKLKKILYFHENQLIYPVKKCQERDFQYGYNQILSCLVADVVVFNSVFNMESFLTSMGKFMKLIPDHRPKDLESIIRPKCQVIYFPIRFPDVSRFMPKHKTTHLKKMLGLKGNGGAVLSMALPFQPEQRDSEDLLKNFNSECDTHCGLDTARQEYLGNSLRQESDLKKSTSSDNSSSHHGENKQNLTVDPCDILGGVDNQQRLLHIVWPHRWEHDKDPESFFKVLMHLKDLGLNFHVSVLGETFTDVPDIFSEAKKALGSSVLHWGYLPSKDDYFQVLCMADVVISTAKHEFFGVAMLEAVYCGCYPLCPKDLVYPEIFPAEYLYSTPEQLSKRLQNFCKRPDIIRKHLYKGEIAPFSWAALHGKFRSLLTTEPREDL

SEQ ID NO: 6307 - protein, 373 aa, Homo Sapiens
MSILIIEAFYGGSHKQLVDLLQEELGDCVVYTLPAKKWHWRARTSALYFSQTIPISEHYRTLFASSVLNLTELAALRPDLGKLKKILYFHENQLIYPVKKCQERDFQYGYNQILSCLVADVVVFNSVFNMESFLTSMGKFMKLIPDHRPKDLESIIRPKCQVIYFPIRFPDVSRFMPKHKTTHLKKMLGLKGNGGAVLSMALPFQPEQRDSEDLLKNFNSECDTHCGLDTARQEYLGNSLRQESDLKKSTSSDNSSSHHGENKQNLTVDPCDILGGVDNQQRLLHIVWPHRWLEAVYCGCYPLCPKDLVYPEIFPAEYLYSTPEQLSKRLQNFCKRPDIIRKHLYKGEIAPFSWAALHGKFRSLLTTEPREDL

SEQ ID NO: 6308 - protein, 376 aa, Homo Sapiens; identical to SEQ ID NO: 6305

SEQ ID NO: 6309 - protein, 458 aa, Homo Sapiens; identical to SEQ ID NO: 6306

SEQ ID NO: 6310 - protein, 458 aa, Homo Sapiens; identical to SEQ ID NO: 6306

SEQ ID NO: 6311 - protein, 458 aa, Homo Sapiens; identical to SEQ ID NO: 6306

SEQ ID NO: 6312 - protein, 236 aa, Homo Sapiens
MRTVSLCHPDWSALASSWLTAASTSWAQYGNFIDKLRLFTRGGSGGMGYPRLGGEGGKGGDVWVVAQNRMTLKQLKDRYPRKRFVAGVGANSKISALKGSKGKDCEIPVPVGISVTDENGKIIGELNKENDRILVAQGGLGGKLLTNFLPLKGQKRIIHLDLKLIADVGLVGFPNAGKSSLLSCVSHAKPAIADYAFTTLKPELGKIMYSDFKQISVADLPGLIEGAHMNKGMGHK

SEQ ID NO: 6313 - protein, 107 aa, Homo Sapiens
MRYGNFIDKLRLFTRGGSGGMGYPRLGGEGGKGGDVWVVAQNRMTLKQLKDRYPRKRFVAGVGANSKISALKGSKGKDCEIPVPVGISVTDENGKIIDSQMLENPLC

SEQ ID NO: 6314 - protein, 210 aa, Homo Sapiens
MRYGNFIDKLRLFTRGGSGGMGYPRLGGEGGKGGDVWVVAQNRMTLKQLKDRYPRKRFVAGVGANSKISALKGSKGKDCEIPVPVGISVTDENGKIIGELNKENDRILVAQGGLGGKLLTNFLPLKGQKRIIHLDLKLIADVGLVGFPNAGKSSLLSCVSHAKPAIADYAFTTLKPELGKIMYSDFKQISVADLPGLIEGAHMNKGMGHK

SEQ ID NO: 6315 - protein, 70 aa, Homo Sapiens
MRYGNFIDKLRLFTRGGSGGMGYPRLGGEGGKGGDVWVVAQNRMTLKQLKDRYPRKRFVAGVGANSKRTQ

SEQ ID NO: 6316 - protein, 308 aa, Homo Sapiens
MVHCSCVLFRKYGNFIDKLRLFTRGGSGGMGYPRLGGEGGKGGDVWVVAQNRMTLKQLKDRYPRKRFVAGVGANSKFPNAGKSSLLSCVSHAKPAIADYAFTTLKPELGKIMYSDFKQISVADLPGLIEGAHMNKGMGHKFLKHIERTRQLLFVVDISGFQLSSHTQYRTAFETIILLTKELELYKEELQTKPALLAVNKMDLPDAQDKFHELMSQLQNPKDFLHLFEKNMIPERTVEFQHIIPISAVTGEGIEELKNCIRKSLDEQANQENDALHKKQLLNLWISDTMSSTEPPSKHAVTTSKMDII

SEQ ID NO: 6317 - protein, 116 aa, Homo Sapiens
MVHCSCVLFRKYGNFIDKLRLFTRGGSGGMGYPRLGGEGGKGGDVWVVAQNRMTLKQLKDRYPRKRFVAGVGANSKISALKGSKGKDCEIPVPVGISVTDENGKIIDSQMLENPLC

SEQ ID NO: 6318 - protein, 387 aa, Homo Sapiens
MVHCSCVLFRKYGNFIDKLRLFTRGGSGGMGYPRLGGEGGKGGDVWVVAQNRMTLKQLKDRYPRKRFVAGVGANSKISALKGSKGKDCEIPVPVGISVTDENGKIIGELNKENDRILVAQGGLGGKLLTNFLPLKGQKRIIHLDLKLIADVGLVGFPNAGKSSLLSCVSHAKPAIADYAFTTLKPELGKIMYSDFKQISVADLPGLIEGAHMNKGMGHKFLKHIERTRQLLFVVDISGFQLSSHTQYRTAFETIILLTKELELYKEELQTKPALLAVNKMDLPDAQDKFHELMSQLQNPKDFLHLFEKNMIPERTVEFQHIIPISAVTGEGIEELKNCIRKSLDEQANQENDALHKKQLLNLWISDTMSSTEPPSKHAVTTSKMDII

SEQ ID NO: 6319 - protein, 243 aa, Homo Sapiens
MVHCSCVLFRKYGNFIDKLRLFTRGGSGGMGYPRLGGEGGKGGDVWVVAQNRMTLKQLKDRYPRKRFVAGVGANSKISALKGSKGKDCEIPVPVGISVTDENGKIIVTTLKPELGKIMYSDFKQISVADLPGLIEGAHMNKGMGHKFLKHIERTRQLLFVVDISGFQLSSHTQYRTAFETIILLTKELELYKEELQTKPALLAVNKMDLPDAQDKFHELMSQLQNPKDFLHLFEKNMIPERTV

SEQ ID NO: 6320 - protein, 79 aa, Homo Sapiens
MVHCSCVLFRKYGNFIDKLRLFTRGGSGGMGYPRLGGEGGKGGDVWVVAQNRMTLKQLKDRYPRKRFVAGVGANSKRTQ

SEQ ID NO: 6321 - protein, 115 aa, Homo Sapiens
MNAFLLSALCLLGAWAALAGGVTVQDGNFSFSLESVKKLKDLQEPQEPRVGKLRNFAPIPGEPVVPILCSNPNFPEELKPLCKEPNAQEILQRLEEIAEDPGTCEICAYAACTGC

SEQ ID NO: 6322 - protein, 112 aa, Homo Sapiens
MGCRAASGLLPGVAVVLLLLLQSTQSVYIQYQGFRVQLESMKKLSDLEAQWAPSPRLQAQSLLPAVCHHPALPQDLQPVCASQEASSIFKTLRTIANDDCELCVNVACTGCL

SEQ ID NO: 6323 - protein, 134 aa, Homo Sapiens
MARGSAVAWAALGPLLWGCALGLQGGMLYPQESPSRECKELDGLWSFRADFSDNRRRGFEEQWYRRPLWESGPTVDMPVPSSFNDISQDWRLRHFVGWVWYEREVILPERWTQDLRTRVVLRIGSAHSYAIVGW

SEQ ID NO: 6324 - protein, 144 aa, Homo Sapiens
MARGSAVAWAALGPLLWGCALGLQGGMLYPQESPSRECKELDGLWSFRADFSDNRRRGFEEQWYRRPLWESGPTVDMPVPSSFNDISQDWRLRHFVGWVWYEREVILPERWTQDLRTRVVLRIGSAHSYAIVVSQGLLCPEHIF

SEQ ID NO: 6325 - protein, 144 aa, Homo Sapiens; identical to SEQ ID NO: 6324

SEQ ID NO: 6326 - protein, 651 aa, Homo Sapiens
MARGSAVAWAALGPLLWGCALGLQGGMLYPQESPSRECKELDGLWSFRADFSDNRRRGFEEQWYRRPLWESGPTVDMPVPSSFNDISQDWRLRHFVGWVWYEREVILPERWTQDLRTRVVLRIGSAHSYAIVWVNGVDTLEHEGGYLPFEADISNLVQVGPLPSRLRITIAINNTLTPTTLPPGTIQYLTDTSKYPKGYFVQNTYFDFFNYAGLQRSVLLYTTPTTYIDDITVTTSVEQDSGLVNYQISVKGSNLFKLEVRLLDAENKVVANGTGTQGQLKVPGVSLWWPYLMHERPAYLYSLEVQLTAQTSLGPVSDFYTLPVGIRTVAVTKSQFLINGKPFYFHGVNKHEDADIRGKGFDWPLLVKDFNLLRWLGANAFRTSHYPYAEEVMQMCDRYGIVVIDECPGVGLALPQFFNNVSLHHHMQVMEEVVRRDKNHPAVVMWSVANEPASHLESAGYYLKMVIAHTKSLDPSRPVTFVSNSNYAADKGAPYVDVICLNSYYSWYHDYGHLELIQLQLATQFENWYKKYQKPIIQSEYGAETIAGFHQDPPLMFTEEYQKSLLEQYHLGLDQKRRKYVVGELIWNFADFMTEQSPTRVLGNKKGIFTRQRQPKSAAFLLRERYWKIANETRYPHSVAKSQCLENSLFT

SEQ ID NO: 6327 - protein, 505 aa, Homo Sapiens
MARGSAVAWAALGPLLWGCALGLQGGMLYPQESPSRECKELDGLWSFRADFSDNRRRGFEEQWYRRPLWESGPTVDMPVPSSFNDISQDWRLRHFVGWVWYEREVILPERWTQDLRTRVVLRIGSAHSYAIVWVNGVDTLEHEGGYLPFEADISNLVQVQLTAQTSLGPVSDFYTLPVGIRTVAVTKSQFLINGKPFYFHGVNKHEDADIRGKGFDWPLLVKDFNLLRWLGANAFRTSHYPYAEEVMQMCDRYGIVVIDECPGVGLALPQFFNNVSLHHHMQVMEEVVRRDKNHPAVVMWSVANEPASHLESAGYYLKMVIAHTKSLDPSRPVTFVSNSNYAADKGAPYVDVICLNSYYSWYHDYGHLELIQLQLATQFENWYKKYQKPIIQSEYGAETIAGFHQDPPLMFTEEYQKSLLEQYHLGLDQKRRKYVVGELIWNFADFMTEQSPTRVLGNKKGIFTRQRQPKSAAFLLRERYWKIANETRYPHSVAKSQCLENSLFT

SEQ ID NO: 6328 - protein, 195 aa, Homo Sapiens; identical to SEQ ID NO: 73

SEQ ID NO: 6329 - protein, 440 aa, Homo Sapiens
MRRYLRVVVLCVACGFCSLLYAFSQLAVSLEEGTGGGGGKPQAAVASWLAGGGRGAVRGAGVAGPAAHPGVSDRCKDFSLCYWNPYWMLPSDVCGMNCFWEAAFRYSLKIQPVEKMHLAVVACGERLEETMTMLKSAIIFSIKPLQFHIFAEDQLHHSFKGRLDNWSFLQTFNYTLYPITFPSENAAEWKKLFKPCASQRLFLPLILKEVDSLLYVDTDILFLRPVDDIWSLLKKFNSTQIAAMAPEHEEPRIGWYNRFARHPYYGKTGVNSGVMLMNMTRMRRKYFKNDMTTVRLQWGDILMPLLKKYKLNITWGDQDLLNIVFFHNPESLFVFPCQWNYRPDHCIYGSNCQEAEEGGIFILHGNRGVYHDDKQPAFRAVYEALRNCSFEDDNIRSLLKPLELELQKTVHTYCGKIYKIFIKQLAKSVRDRYARSPKEK

SEQ ID NO: 6330 - protein, 409 aa, Homo Sapiens
MRRYLRVVVLCVACGFCSLLYAFSQLAVSLEEGTGGGGGKPQAAVASWLAGGGRGAVRGAGVAGPAAHPGVSDRYSLKIQPVEKMHLAVVACGERLEETMTMLKSAIIFSIKPLQFHIFAEDQLHHSFKGRLDNWSFLQTFNYTLYPITFPSENAAEWKKLFKPCASQRLFLPLILKEVDSLLYVDTDILFLRPVDDIWSLLKKFNSTQIAAMAPEHEEPRIGWYNRFARHPYYGKTGVNSGVMLMNMTRMRRKYFKNDMTTVRLQWGDILMPLLKKYKLNITWGDQDLLNIVFFHNPESLFVFPCQWNYRPDHCIYGSNCQEAEEGGIFILHGNRGVYHDDKQPAFRAVYEALRNCSFEDDNIRSLLKPLELELQKTVHTYCGKIYKIFIKQLAKSVRDRYARSPKEK

SEQ ID NO: 6331 - protein, 164 aa, Homo Sapiens
MAPEHEIPKIGWYSRFARHPFYGSAGVNSGVMLMNLTRIRSTQFKNSMIPTGLAWEDMLYPLYQKYKNAITWGDQDLLNIIFYFNPECLYVFPCQWNYRPDHCMYGSNCREAEHEGVSVLHGNRGVYHDDKQPTFRALYEAIRDILRRGGKRKFVLSWISFFVM

SEQ ID NO: 6332 - protein, 443 aa, Homo Sapiens
MKLRSKAAALLLLALAALLLALLSLRAGRAEPPALPARPASAPQRHPAPVPARWPGPGALPGASPGVRRRRPPRPRPRAGRRGAARLEKLARRPGEPRSFQAVLPPELWIHLAVVACGNRLEETLVMLKSAVLFSHRKIQFHIFTEDSLKPEFDKQLRQWPDSYTKKFEHRIYPITFSVGNPQEWKKLFKPCAAQRLFLPVILKDVDSLLYVDTDVLFLRPVDDIWKLLRLFNSTQLAAMAPEHEIPKIGWYSRFARHPFYGSAGVNSGVMLMNLTRIRSTQFKNSMIPTGLAWEDMLYPLYQKYKNAITWGDQDLLNIIFYFNPECLYVFPCQWNYRPDHCMYGSNCREAEHEGVSVLHGNRGVYHDDKQPTFRALYEAIRDFPFQDNLFQSMYYPLQLKFLETVHTLCGRIPQVFLKQIEKTMKRAYEKHVIIHVGPNQMH

SEQ ID NO: 6333 - protein, 102 aa, Homo Sapiens
MLKSAVLFSHRKIQFHIFTEDSLKPEFDKQLRQWPDSYTKKFEHRIYPITFSVGNPQEWKKLFKPCAAQRLFLPVILKDVDSLLYVDTDVLFLRPVDDIWKL

SEQ ID NO: 6334 - protein, 65 aa, Homo Sapiens
MHTSTSSSVTKSYISSQTNGETGQLVHRFTVPAPVVIILIILCVMAGIIGTILLISYSIRRLIKA

SEQ ID NO: 6335 - protein, 121 aa, Homo Sapiens
MYGKIIFVLLLSEIVSISALSTTEVAMHTSTSSSVTKSYISSQTNDKHKRDTCPAHTANEVSEISVTTVSPPEKKNGETGQLVHRFTVPAPVVIILIILCVMAGIIGTILLISYSIRRLIK

SEQ ID NO: 6336 - protein, 91 aa, Homo Sapiens
MYGKIIFVLLLSEIVSISALSTTEVAMHTSTSSSVTKSYISSQTNGETGQLVHRFTVPAPVVIILIILCVMAGIIGTILLISYSIRRLIKA

SEQ ID NO: 6337 - protein, 62 aa, Homo Sapiens
MYGKIIFVLLLSEIVSISALSTTEVAMHTSTSSSVTKSYISSQTNGETGQLVHRFTVPVFAD

SEQ ID NO: 6338 - protein, 42 aa, Homo Sapiens
MYGKIIFVLLLSGDGANPENSGRRGQKAEGRARAKILKQEKL

SEQ ID NO: 6339 - protein, 58 aa, Homo Sapiens
MYGKIIFVLLLSGETGQLVHRFTVPAPVVIILIILCVMAGIIGTILLISYSIRRLIKA

SEQ ID NO: 6340 - protein, 45 aa, Homo Sapiens
MYGKIIFVLLLSGNFEHSAEGPSWLPLRRSPSTSTPLHLGAIPLI

SEQ ID NO: 6341 - protein, 45 aa, Homo Sapiens; identical to SEQ ID NO: 6340

SEQ ID NO: 6342 - protein, 45 aa, Homo Sapiens; identical to SEQ ID NO: 6340

SEQ ID NO: 6343 - protein, 262 aa, Homo Sapiens
MRNSYRFLASSLSVVVSLLLIPEDVCEKIIGGNEVTPHSRPYMVLLSLDRKTICAGALIAKDWVLTAAHCNLNKRSQVILGAHSITREEPTKQIMLVKKEFPYPCYDPATREGDLKLLQLMEKAKINKYVTILHLPKKGDDVKPGTMCQVAGWGRTHNSASWSDTLREVNITIIDRKVCNDRNHYNFNPVIGMNMVCAGSLRGGRDSCNGDSGSPLLCEGVFRGVTSFGLENKCGDPRGPGVYILLSKKHLNWIIMTIKGAV

SEQ ID NO: 6344 - protein, 44 aa, Homo Sapiens
MQECSELQLPFYQDPPSVMLDKLSAGMAEQQAILKKSQGDHRGT

SEQ ID NO: 6345 - protein, 35 aa, Homo Sapiens
MQPILLLLAFLLLPRADAAGEKGQADQSCAAPQAT

SEQ ID NO: 6346 - protein, 202 aa, Homo Sapiens
MQPILLLLAFLLLPRADAGEIIGGHEAKPHSRPYMAYLMIWDQKSLKRCGGFLIRDDFVLTAAHCWGRLERKAKRTRAVQPLRLPSNKAQVKPGQTCSVAGWGQTAPLGKHSHTLQEVKMTVQEDRKCESDLRHYYDSTIELCVGDPEIKKTSFKGDSGGPLVCNKVAQGIVSYGRNNGMPPRACTKVSSFVHWIKKTMKRY

SEQ ID NO: 6347 - protein, 202 aa, Homo Sapiens; identical to SEQ ID NO: 6346

SEQ ID NO: 6348 - protein, 247 aa, Homo Sapiens
MQPILLLLAFLLLPRADAGEIIGGHEAKPHSRPYMAYLMIWDQKSLKRCGGFLIRDDFVLTAAHCWGSSINVTLGAHNIKEQEPTQQFIPVKRPIPHPAYNPKNFSNDIMLLQLERKAKRTRAVQPLRLPSNKAQVKPGQTCSVAGWGQTAPLGKHSHTLQEVKMTVQEDRKCESDLRHYYDSTIELCVGDPEIKKTSFKGDSGGPLVCNKVAQGIVSYGRNNGMPPRACTKVSSFVHWIKKTMKRY

SEQ ID NO: 6349 - protein, 90 aa, Homo Sapiens
MQPILLLLAFLLLPRADAGEIIGGHEAKPHSRPYMAYLMIWDQKSLKRCGGFLIRDDFVLTAAHCWGSWRERPSGPELCSPSGYLATRPR

SEQ ID NO: 6350 - protein, 90 aa, Homo Sapiens; identical to SEQ ID NO: 6349

SEQ ID NO: 6351 - protein, 152 aa, Homo Sapiens
MQPILLLLAFLLLPRADQLERKAKRTRAVQPLRLPSNKAQVKPGQTCSVAGWGQTAPLGKHSHTLQEVKMTVQEDRKCESDLRHYYDSTIELCVGDPEIKKTSFKGDSGGPLVCNKVAQGIVSYGRNNGMPPRACTKVSSFVHWIKKTMKRY

SEQ ID NO: 6352 - protein, 235 aa, Homo Sapiens
MQTFPSGEIIGGHEAKPHSRPYMAYLMIWDQKSLKRCGGFLIRDDFVLTAAHCWGSSINVTLGAHNIKEQEPTQQFIPVKRPIPHPAYNPKNFSNDIMLLQLERKAKRTRAVQPLRLPSNKAQVKPGQTCSVAGWGQTAPLGKHSHTLQEVKMTVQEDRKCESDLRHYYDSTIELCVGDPEIKKTSFKGDSGGPLVCNKVAQGIVSYGRNNGMPPRACTKVSSFVHWIKKTMKRY

SEQ ID NO: 6353 - protein, 115 aa, Homo Sapiens
MQPFLLLLAFLLTPGAGTEEIIGGHEAKPHSRPYMAFVQFLQEKSRKRCGGILVRKDFVLTAAHCQGRGDSGGPLVCKDVAQGILSYGNKKGTPPGVYIKVSHFLPWIKRTMKRL

SEQ ID NO: 6354 - protein, 160 aa, Homo Sapiens
MQPFLLLLAFLLTPGAGTEEIIGGHEAKPHSRPYMAFVQFLQEKSRKRCGGILVRKDFVLTAAHCQGSSINVTLGAHNIKEQERTQQFIPVKRPIPHPAYNPKNFSNDIMLLQGDSGGPLVCKDVAQGILSYGNKKGTPPGVYIKVSHFLPWIKRTMKRL

SEQ ID NO: 6355 - protein, 246 aa, Homo Sapiens
MQPFLLLLAFLLTPGAGTEEIIGGHEAKPHSRPYMAFVQFLQEKSRKRCGGILVRKDFVLTAAHCQGSSINVTLGAHNIKEQERTQQFIPVKRPIPHPAYNPKNFSNDIMLLQLERKAKWTTAVRPLRLPSSKAQVKPGQLCSVAGWGYVSMSTLATTLQEVLLTVQKDCQCERLFHGNYSRATEICVGDPKKTQTGFKGDSGGPLVCKDVAQGILSYGNKKGTPPGVYIKVSHFLPWIKRTMKRL

SEQ ID NO: 6356 - protein, 264 aa, Homo Sapiens
MTKFSSFSLFFLIVGAYMTHVCFNMEIIGGKEVSPHSRPFMASIQYGGHHVCGGVLIDPQWVLTAAHCQYRFTKGQSPTVVLGAHSLSKNEASKQTLEIKKFIPFSRVTSDPQSNDIMLVKLQTAAKLNKHVKMLHIRSKTSLRSGTKCKVTGWGATDPDSLRPSDTLREVTVTVLSRKLCNSQSYYNGDPFITKDMVCAGDAKGQKDSCKGDSGGPLICKGVFHAIVSGGHECGVATKPGIYTLLTKKYQTWIKSNLVPPHTN

SEQ ID NO: 6357 - protein, 218 aa, Homo Sapiens
MASLQRNGSHLCGGVLVHPKWVLTAAHCLAQRMAQLRLVLGLHTLDSPGLTFHIKAAIQHPRYKPVPALENDLALLQLDGKVKPSRTIRPLALPSKRQVVAAGTRCSMAGWGLTHQGGRLSRVLRELDLQVLDTRMCNNSRFWNGSLSPSMVCLAADSKDQAPCKGDSGGPLVCGKGRVLARVLSFSSRVCTDIFKPPVATAVAPYVSWIRKVTGRSA

SEQ ID NO: 6358 - protein, 257 aa, Homo Sapiens
MEACVSSLLVLALGALSVGSSFGTQIIGGREVIPHSRPYMASLQRNGSHLCGGVLVHPKWVLTAAHCLAQRMAQLRLVLGLHTLDSPGLTFHIKAAIQHPRYKPVPALENDLALLQLDGKVKPSRTIRPLALPSKRQVVAAGTRCSMAGWGLTHQGGRLSRVLRELDLQVLDTRMCNNSRFWNGSLSPSMVCLAADSKDQAPCKGDSGGPLVCGKGRVLARVLSFSSRVCTDIFKPPVATAVAPYVSWIRKVTGRSA

SEQ ID NO: 6359 - protein, 802 aa, Homo Sapiens
MLAEPFNWHPGMWNMLIVAMCLALLGCLQAQELQGHVSIILLGATGDLAKKYLWQGLFQLYLDEAGRGHSFSFHGAALTAPKQGQELMAKALESLSCPKDMAPSHCAEHKDQFLQLSQYRQLKTAEDYQALNKDIEAQLQHAGLREAGRIFYFSVPPFAYEDIARNINSSCRPGPGAWLRVVLEKPFGHDHFSAQQLATELGTFFQEEEMYRVDHYLGKQAVAQILPFRDQNRKALDGLWNRHHVERVEIIMKETVDAEGRTSFYEEYGVIRDVLQNHLTEVLTLVAMELPHNVSSAEAVLRHKLQVFQALRGLQRGSAVVGQYQSYSEQVRRELQKPDSFHSLTPTFAAVLVHIDNLRWEGVPFILMSGKALDERVGYARILFKNQACCVQSEKHWAAAQSQCLPRQLVFHIGHGDLGSPAVLVSRNLFRPSLPSSWKEMEGPPGLRLFGSPLSDYYAYSPVRERDAHSVLLSHIFHGRKNFFITTENLLASWNFWTPLLESLAHKAPRLYPGGAENGRLLDFEFSSGRLFFSQQQPEQLVPGPGPAPMPSDFQVLRAKYRESPLVSAWSEELISKLANDIEATAVRAVRRFGQFHLALSGGSSPVALFQQLATAHYGFPWAHTHLWLVDERCVPLSDPESNFQGLQAHLLQHVRIPYYNIHPMPVHLQQRLCAEEDQGAQIYAREISALVANSSFDLVLLGMGADGHTASLFPQSPTGLDGEQLVVLTTSPSQPHRRMSLSLPLINRAKKVAVLVMGRMKREITTLVSRVGHEPKKWPISGVLPHSGQLVWYMDYDAFLG

SEQ ID NO: 6360 - protein, 791 aa, Homo Sapiens
MWNMLIVAMCLALLGCLQAQELQGHVSIILLGATGDLAKKYLWQGLFQLYLDEAGRGHSFSFHGAALTAPKQGQELMAKALESLSCPKDMAPSHCAEHKDQFLQLSQYRQLKTAEDYQALNKDIEAQLQHAGLREAGRIFYFSVPPFAYEDIARNINSSCRPGPGAWLRVVLEKPFGHDHFSAQQLATELGTFFQEEEMYRVDHYLGKQAVAQILPFRDQNRKALDGLWNRHHVERVEIIMKETVDAEGRTSFYEEYGVIRDVLQNHLTEVLTLVAMELPHNVSSAEAVLRHKLQVFQALRGLQRGSAVVGQYQSYSEQVRRELQKPDSFHSLTPTFAAVLVHIDNLRWEGVPFILMSGKALDERVGYARILFKNQACCVQSEKHWAAAQSQCLPRQLVFHIGHGDLGSPAVLVSRNLFRPSLPSSWKEMEGPPGLRLFGSPLSDYYAYSPVRERDAHSVLLSHIFHGRKNFFITTENLLASWNFWTPLLESLAHKAPRLYPGGAENGRLLDFEFSSGRLFFSQQQPEQLVPGPGPAPMPSDFQVLRAKYRESPLVSAWSEELISKLANDIEATAVRAVRRFGQFHLALSGGSSPVALFQQLATAHYGFPWAHTHLWLVDERCVPLSDPESNFQGLQAHLLQHVRIPYYNIHPMPVHLQQRLCAEEDQGAQIYAREISALVANSSFDLVLLGMGADGHTASLFPQSPTGLDGEQLVVLTTSPSQPHRRMSLSLPLINRAKKVAVLVMGRMKREITTLVSRVGHEPKKWPISGVLPHSGQLVWYMDYDAFLG

SEQ ID NO: 6361 - protein, 560 aa, Homo Sapiens
MFARMSDLHVLLLMALVGKTACGFSLMSLLESLDPDWTPDQYDYSYEDYNQEENTSSTLTHAENPDWYYTEDQADPCQPNPCEHGGDCLVHGSTFTCSCLAPFSGNKCQKVQNTCKDNPCGRGQCLITQSPPYYRCVCKHPYTGPSCSQVVPVCRPNPCQNGATCSRHKRRSKFTCACPDQFKGKFCEIGSDDCYVGDGYSYRGKMNRTVNQHACLYWNSHLLLQENYNMFMEDAETHGIGEHNFCRNPDADEKPWCFIKVTNDKVKWEYCDVSACSAQDVAYPEESPTEPSTKLPGFDSCGKTEIAERKIKRIYGGFKSTAGKHPWQASLQSSLPLTISMPQGHFCGGALIHPCWVLTAAHCTDIKTRHLKVVLGDQDLKKEEFHEQSFRVEKIFKYSHYNERDEIPHNDIALLKLKPVDGHCALESKYVKTVCLPDGSFPSGSECHISGWGVTETGKGSRQLLDAKVKLIANTLCNSRQLYDHMIDDSMICAGNLQKPGQDTCQGDSGGPLTCEKDGTYYVYGIVSWGLECGKRPGVYTQVTKFLNWIKATIKSESGF

SEQ ID NO: 6362 - protein, 534 aa, Homo Sapiens
MSLLESLDPDWTPDQYDYSYEDYNQEENTSSTLTHAENPDWYYTEDQADPCQPNPCEHGGDCLVHGSTFTCSCLAPFSGNKCQKVQNTCKDNPCGRGQCLITQSPPYYRCVCKHPYTGPSCSQVVPVCRPNPCQNGATCSRHKRRSKFTCACPDQFKGKFCEIGSDDCYVGDGYSYRGKMNRTVNQHACLYWNSHLLLQENYNMFMEDAETHGIGEHNFCRNPDADEKPWCFIKVTNDKVKWEYCDVSACSAQDVAYPEESPTEPSTKLPGFDSCGKTEIAERKIKRIYGGFKSTAGKHPWQASLQSSLPLTISMPQGHFCGGALIHPCWVLTAAHCTDIKTRHLKVVLGDQDLKKEEFHEQSFRVEKIFKYSHYNERDEIPHNDIALLKLKPVDGHCALESKYVKTVCLPDGSFPSGSECHISGWGVTETGKGSRQLLDAKVKLIANTLCNSRQLYDHMIDDSMICAGNLQKPGQDTCQGDSGGPLTCEKDGTYYVYGIVSWGLECGKRPGVYTQVTKFLNWIKATIKSESGF

SEQ ID NO: 6363 - protein, 459 aa, Homo Sapiens
MTILTYPFKNLPTASKWALRFSIRPLSCSSQLRAAPAVQTKTKKTLAKPNIRNVVVVDGVRTPFLLSGTSGLLHRTSVPKEVVDYIIFGTVIQEVKTSNVAREAALGAGFSDKTPAHTVTMACISANQAMTTGVGLIASGQCDVIVAGGVELMSDVPIRHSRKMRKLMLDLNKAKSMGQRLSLISKFRFNFLAPELPAVSEFSTSETMGHSADRLAAAFAVSRLEQDEYALRSHSLAKKAQDEGLLSDVVPFKVPGKDTVTKDNGIRPSSLEQMAKLKPAFIKPYGTVTAANSSFLTDGASAMLIMAEEKALAMGYKPKAYLRDFMYVSQDPKDQLLLGPTYATPKVLEKAGLTMNDIDAFEFHEAFSGQILANFKAMDSDWFAENYMGRKTKVGLPPLEKFNNWGGSLSLGHPFGATGCRLVMAAANRLRKEGGQYGLVAACAAGGQGHAMIVEAYPK

SEQ ID NO: 6364 - protein, 85 aa, Homo Sapiens
MTILTYPFKNLPTASKWALRFSIRPLSCSSQLRAAPAVQTKTKKTLAKPNIRNVVVVDGVRTPFLLSGTSYKDLMPHDLARAALT

SEQ ID NO: 6365 - protein, 351 aa, Homo Sapiens
MTILTYPFKNLPTASKWALRFSIRPLSCSSQLRAAPAVQTKTKKTLAKPNIRNVVVVDGVRTPFLLSGTSYKDLMPHDLARAALTGLLHRTSVPKEVVDYIIFGTVIQEVKTSNVAREAALGAGFSDKTPAHTVTMACISANQAMTTGKDTVTKDNGIRPSSLEQMAKLKPAFIKPYGTVTAANSSFLTDGASAMLIMAEEKALAMGYKPKAYLRDFMYVSQDPKDQLLLGPTYATPKVLEKAGLTMNDIDAFEFHEAFSGQILANFKAMDSDWFAENYMGRKTKVGLPPLEKFNNWGGSLSLGHPFGATGCRLVMAAANRLRKEGGQYGLVAACAAGGQGHAMIVEAYPK

SEQ ID NO: 6366 - protein, 150 aa, Homo Sapiens
MTILTYPFKNLPTASKWALRFSIRPLSCSSQLRAAPAVQTKTKKTLAKPNIRNVVVVDGVRTPFLLSGTSYKDLMPHDLARAALTGLLHRTSVPKEVVDYIIFGTVIQEVKTSNVAREAALGAGFSDKTPAHTVTMACISANQAMTTGVG

SEQ ID NO: 6367 - protein, 176 aa, Homo Sapiens
MTILTYPFKNLPTASKWALRFSIRPLSCSSQLRAAPAVQTKTKKTLAKPNIRNVVVVDGVRTPFLLSGTSYKDLMPHDLARAALTGLLHRTSVPKEVVDYIIFGTVIQEVKTSNVAREAALGAGFSDKTPAHTVTMACISANQAMTTGVGLIASGQCDVIVAGGVELMSDVPIRHS

SEQ ID NO: 6368 - protein, 474 aa, Homo Sapiens
MTILTYPFKNLPTASKWALRFSIRPLSCSSQLRAAPAVQTKTKKTLAKPNIRNVVVVDGVRTPFLLSGTSYKDLMPHDLARAALTGLLHRTSVPKEVVDYIIFGTVIQEVKTSNVAREAALGAGFSDKTPAHTVTMACISANQAMTTGVGLIASGQCDVIVAGGVELMSDVPIRHSRKMRKLMLDLNKAKSMGQRLSLISKFRFNFLAPELPAVSEFSTSETMGHSADRLAAAFAVSRLEQDEYALRSHSLAKKAQDEGLLSDVVPFKVPGKDTVTKDNGIRPSSLEQMAKLKPAFIKPYGTVTAANSSFLTDGASAMLIMAEEKALAMGYKPKAYLRDFMYVSQDPKDQLLLGPTYATPKVLEKAGLTMNDIDAFEFHEAFSGQILANFKAMDSDWFAENYMGRKTKVGLPPLEKFNNWGGSLSLGHPFGATGCRLVMAAANRLRKEGGQYGLVAACAAGGQGHAMIVEAYPK

SEQ ID NO: 6369 - protein, 452 aa, Homo Sapiens
MTLVSGWLLYGWIIAVQTKTKKTLAKPNIRNVVVVDGVRTPFLLSGTSYKDLMPHDLARAALTGLLHRTSVPKEVVDYIIFGTVIQEVKTSNVAREAALGAGFSDKTPAHTVTMACISANQAMTTGVGLIASGQCDVIVAGGVELMSDVPIRHSRKMRKLMLDLNKAKSMGQRLSLISKFRFNFLAPELPAVSEFSTSETMGHSADRLAAAFAVSRLEQDEYALRSHSLAKKAQDEGLLSDVVPFKVPGKDTVTKDNGIRPSSLEQMAKLKPAFIKPYGTVTAANSSFLTDGASAMLIMAEEKALAMGYKPKAYLRDFMYVSQDPKDQLLLGPTYATPKVLEKAGLTMNDIDAFEFHEAFSGQILANFKAMDSDWFAENYMGRKTKVGLPPLEKFNNWGGSLSLGHPFGATGCRLVMAAANRLRKEGGQYGLVAACAAGGQGHAMIVEAYPK

SEQ ID NO: 6370 - protein, 84 aa, Homo Sapiens
MALSSQIWAACLLLLLLLASLTSGSVFPQQTGQLAELQPQDRAGARASWMPMFQRRRRRDTHFPICIFCCGCCHRSKCGMCCKT

SEQ ID NO: 6371 - protein, 84 aa, Homo Sapiens; identical to SEQ ID NO: 6370

SEQ ID NO: 6372 - protein, 153 aa, Homo Sapiens
MKSLLLLVLISICWADHLSDNYTLDHDRAIHIQAENGPHLLVEAEQAKVFSHRGGNVTLPCKFYRDPTAFGSGIHKIRIKWTKLTSDYLKEVDVFVSMGYHKKTYGGYQGRVFLKGGSDSDASLVITDLTLEDYGRYKCEVIEGLEDDTVVVA

SEQ ID NO: 6373 - protein, 161 aa, Homo Sapiens
MKSLLLLVLISICWADHLSDNYTLDHDRAIHIQAENGPHLLVEAEQAKVFSHRGGNVTLPCKFYRDPTAFGSGIHKIRIKWTKLTSDYLKEVDVFVSMGYHKKTYGGYQGRVFLKGGSDSDASLVITDLTLEDYGRYKCEVIEGLEDDTVVVALDLQGMYL

SEQ ID NO: 6374 - protein, 169 aa, Homo Sapiens
MKSLLLLVLISICWADHLSDNYTLDHDRAIHIQAENGPHLLVEAEQAKVFSHRGGNVTLPCKFYRDPTAFGSGIHKIRIKWTKLTSDYLKEVDVFVSMGYHKKTYGGYQGRVFLKGGSDSDASLVITDLTLEDYGRYKCEVIEGLEDDTVVVALDLQGVVFPYFPRLGR

SEQ ID NO: 6375 - protein, 199 aa, Homo Sapiens
MKSLLLLVLISICWADHLSDNYTLDHDRAIHIQAENGPHLLVEAEQAKVFSHRGGNVTLPCKFYRDPTAFGSGIHKIRIKWTKLTSDYLKEVDVFVSMGYHKKTYGGYQGRVFLKGGSDSDASLVITDLTLEDYGRYKCEVIEGLEDDTVVVALDLQGVVFPYFPRLGRYNLNFHEAQQACLDQDAVIASFDQLYDAWR

SEQ ID NO: 6376 - protein, 354 aa, Homo Sapiens
MKSLLLLVLISICWADHLSDNYTLDHDRAIHIQAENGPHLLVEAEQAKVFSHRGGNVTLPCKFYRDPTAFGSGIHKIRIKWTKLTSDYLKEVDVFVSMGYHKKTYGGYQGRVFLKGGSDSDASLVITDLTLEDYGRYKCEVIEGLEDDTVVVALDLQGVVFPYFPRLGRYNLNFHEAQQACLDQDAVIASFDQLYDAWRGGLDWCNAGWLSDGSVQYPITKPREPCGGQNTVPGVRNYGFWDKDKSRYDVFCFTSNFNGRFYYLIHPTKLTYDEAVQACLNDGAQIAKVGQIFAAWKILGYDRCDAGWLADGSVRYPISRPRRRCSPTEAAVRFVGFPDKKHKLYGVYCFRAYN

SEQ ID NO: 6377 - protein, 258 aa, Homo Sapiens
MKSLLLLVLISICWADHLSDNYTLDHDRAIHIQAENGPHLLVEAEQAKVFSHRGGNVTLPCKFYRDPTAFGSGIHKIRIKWTKLTSDYLKEVDVFVSMGYHKKTYGGYQGRVFLKGGSDSDASLVITDLTLEDYGRYKCEVIEGLEDDTVVVALDLQGVVFPYFPRLGRYNLNFHEAQQACLDQDAVIASFDQLYDAWRGGLDWCNAGWLSDGSVQYPITKPREPCGGQNTVPGVRNYGFWDKDKSRYDVFCFTSNFN

SEQ ID NO: 6378 - protein, 182 aa, Homo Sapiens
MKSLLLLVLISICWADHLSDNYTLDHDRAIHIQENGPHLLVEAEQAKVFSHRGGNVTLPCKFYRDPTAFGSGIHKIRIKWTKLTSDYLKEVDVFVSMGYHKKTYGGYQGRVFLKGGSDSDASLVITDLTLEDYGRYKCEVIEGLEDDTVVVALDLQGVVFPYFPRLGRYNLNFHEAQQACLD

SEQ ID NO: 6379 - protein, 185 aa, Homo Sapiens
MPGWLTLPTLCRFLLWAFTIFHKAQGDPASHPGPHYLLPPIHEVIHSHRGATATLPCVLGTTPPSYKVRWSKVEPGELRETLILITNGLHARGYGPLGGRARMRRGHRLDASLVIAGVRLEDEGRYRCELINGIEDESVALTLSLEGVVFPYQPSRGRYQFNYYEAKQACEEQDGRLATYSQLYQ

SEQ ID NO: 6380 - protein, 340 aa, Homo Sapiens
MPGWLTLPTLCRFLLWAFTIFHKAQGDPASHPGPHYLLPPIHEVIHSHRGATATLPCVLGTTPPSYKVRWSKVEPGELRETLILITNGLHARGYGPLGGRARMRRGHRLDASLVIAGVRLEDEGRYRCELINGIEDESVALTLSLEGVVFPYQPSRGRYQFNYYEAKQACEEQDGRLATYSQLYQAWTEGLDWCNAGWLLEGSVRYPVLTARAPCGGRGRPGIRSYGPRDRMRDRYDAFCFTSALAGQVFFVPGRLTLSEAHAACRRRGAVVAKVGHLYAAWKFSGLDQCDGGWLADGSVRFPITTPRPRCGGLPDPGVRSFGFPRPQQAAYGTYCYAEN

SEQ ID NO: 6381 - protein, 226 aa, Homo Sapiens
MGLLLLVPLLLLPGSYGLPFYNGFYYSNSANDQNLGNGHGKDLLNGVKLVVETPEETLFTYQGASVILPCRYRYEPALVSPRRVRVKWWKLSENGAPEKDVLVAIGLRHRSFGDYQGRVHLRQDKEHDVSLEIQDLRLEDYGRYRCEVIDGLEDESGLVELELRAESQERGGNGQEVWSFLTSPPTGATSSTSTRASRSVQSRLRWWPPLSSSSGPGRRAWTGATR

SEQ ID NO: 6382 - protein, 360 aa, Homo Sapiens
MGLLLLVPLLLLPGSYGLPFYNGFYYSNSANDQNLGNGHGKDLLNGVKLVVETPEETLFTYQGASVILPCRYRYEPALVSPRRVRVKWWKLSENGAPEKDVLVAIGLRHRSFGDYQGRVHLRQDKEHDVSLEIQDLRLEDYGRYRCEVIDGLEDESGLVELELRGVVFPYQSPNGRYQFNFHEGQQVCAEQAAVVASFEQLFRAWEEGLDWCNAGWLQDATVQYPIMLPRQPCGGPGLAPGVRSYGPRHRRLHRYDVFCFATALKGRVYYLEHPEKLTLTEAREACQEDDATIAKVGQLFAAWKFHGLDRCDAGWLADGSVRYPVVHPHPNCGPPEPGVRSFGFPDPQSRLYGVYCYRQH

SEQ ID NO: 6383 - protein, 186 aa, Homo Sapiens
MGLLLLVPLLLLPGSYGLPFYNGFYYSNSANDQNLGNGHGKDLLNGVKLVVETPEETLFTYQGASVILPCRYRYEPALVSPRRVRVKWWKLSENGAPEKDVLVAIGLRHRSFGDYQGRVHLRQDKEHDVSLEIQDLRLEDYGRYRCEVIDGLEDESGLVELELRGWGCVSSHLSHMLGRQFGDRGR

SEQ ID NO: 6384 - protein, 422 aa, Homo Sapiens
MRKWRHREVNLPEVTQQDAVCPAPIPSPGLSAQTGLQKIWGTIHCQVCPGAPAWPGSPWHEEMGLLLLVPLLLLPGSYGLPFYNGFYYSNSANDQNLGNGHGKDLLNGVKLVVETPEETLFTYQGASVILPCRYRYEPALVSPRRVRVKWWKLSENGAPEKDVLVAIGLRHRSFGDYQGRVHLRQDKEHDVSLEIQDLRLEDYGRYRCEVIDGLEDESGLVELELRGVVFPYQSPNGRYQFNFHEGQQVCAEQAAVVASFEQLFRAWEEGLDWCNAGWLQDATVQYPIMLPRQPCGGPGLAPGVRSYGPRHRRLHRYDVFCFATALKGRVYYLEHPEKLTLTEAREACQEDDATIAKVGQLFAAWKFHGLDRCDAGWLADGSVRYPVVHPHPNCGPPEPGVRSFGFPDPQSRLYGVYCYRQH

SEQ ID NO: 6385 - protein, 402 aa, Homo Sapiens
MVCARAALGPGALWAAAWGVLLLTAPAGAQRGRKKVVHVLEGESGSVVVQTAPGQVVSHRGGTIVLPCRYHYEAAAHGHDGVRLKWTKVVDPLAFTDVFVALGPQHRAFGSYRGRAELQGDGPGDASLVLRNVTLQDYGRYECEVTNELEDDAGMVKLDLEGVVFPYHPRGGRYKLTFAEAQRACAEQDGILASAEQLHAAWRDGLDWCNAGWLRDGSVQYPVNRPREPCGGLGGTGSAGGGGDANGGLRNYGYRHNAEERYDAFCFTSNLPGRVFFLKPLRPVPFSGAARACAARGAAVAKVGQLFAAWKLQLLDRCTAGWLADGSARYPIVNPRARCGGRRPGVRSLGFPDATRRLFGVYCYRAPGAPDPAPGGWGWGWAGGGGWAGGARDPAAWTPLHV

SEQ ID NO: 6386 - protein, 334 aa, Homo Sapiens
MPLLGLLPRRAWASLLSQLLRPPCASCTGAVRCQSQDFDIAGQFDPMIPDAECLKIMCEILSGLQLGDFLIKMAWKDVRHEMVVKKGLAPEVADRIGDYVQCHGGVSLVEQMFQDPRLSQNKQALEGLGDLKLLFEYLTLFGIADKISFDLSLARGLDYYTGVIYEAVLLQTPTQAGEEPLNVGSVAAGGRYDGLVGMFDPKGHKVPCVGLSIGVERIFYIVEQRMKTKGEKVRTTETQVFVATPQKNFLQERLKLIAELWDSGIKAEMLYKNNPKLLTQLHYCESTGIPLVVIIGEQELKEGVIKIRSVASREEVAIKRENFVAEIQKRLSES

SEQ ID NO: 6387 - protein, 512 aa, Homo Sapiens
MPLLGLLPRRAWASLLSQLLRPPCASCTGAVRCQSQGEESLQVAEAVLTSQLKAHQEKPNFIIKTPKGTRDLSPQHMVVREKILDLVISCFKRHGAKGMDTPAFELKETLTEKYGEDSGLMYDLKDQGGELLSLRYDLTVPFARYLAMNKVKKMKRYHVGKVWRRESPTIVQGRYREFCQCDFDIAGQFDPMIPDAECLKIMCEILSGLQLGDFLIKVNDRRIVDGMFAVCGVPESKFRAICSSIDKLDKMAWKDVRHEMVVKKGLAPEVADRIGDYVQCHGGVSLVEQMFQDPRLSQNKQALEGLGDLKLLFEYLTLFGIADKISFDLSLARGLDYYTGVIYEAVLLQTPTQAGEEPLNVGSVAAGGRYDGLVGMFDPKGHKVPCVGLSIGVERIFYIVEQRMKTKGEKVRTTETQVFVATPQKNFLQERLKLIAELWDSGIKAEMLYKNNPKLLTQLHYCESTGIPLVVIIGEQELKEGVIKIRSVASREEVAIKRENFVAEIQKRLSES

SEQ ID NO: 6388 - protein, 512 aa, Homo Sapiens; identical to SEQ ID NO: 6387

SEQ ID NO: 6389 - protein, 99 aa, Homo Sapiens
MPLLGLLPRRAWASLLSQLLRPPCASCTGAVRCQSQGEESLQVGGQQGQRCHRSGQCPEKPHLTFILLPGCRGSVNIPTESTSRETKFYYQDPKGYQGS

SEQ ID NO: 6390 - protein, 99 aa, Homo Sapiens; identical to SEQ ID NO: 6389

SEQ ID NO: 6391 - protein, 481 aa, Homo Sapiens
MPLLGLLPRRAWASLLSQLLRPPCASCTGAVRCQSQGTRDLSPQHMVVREKILDLVISCFKRHGAKGMDTPAFELKETLTEKYGEDSGLMYDLKDQGGELLSLRYDLTVPFARYLAMNKVKKMKRYHVGKVWRRESPTIVQGRYREFCQCDFDIAGQFDPMIPDAECLKIMCEILSGLQLGDFLIKVNDRRIVDGMFAVCGVPESKFRAICSSIDKLDKMAWKDVRHEMVVKKGLAPEVADRIGDYVQCHGGVSLVEQMFQDPRLSQNKQALEGLGDLKLLFEYLTLFGIADKISFDLSLARGLDYYTGVIYEAVLLQTPTQAGEEPLNVGSVAAGGRYDGLVGMFDPKGHKVPCVGLSIGVERIFYIVEQRMKTKGEKVRTTETQVFVATPQKNFLQERLKLIAELWDSGIKAEMLYKNNPKLLTQLHYCESTGIPLVVIIGEQELKEGVIKIRSVASREEVAIKRENFVAEIQKRLSES

SEQ ID NO: 6392 - protein, 399 aa, Homo Sapiens
MPLLGLLPRRAWASLLSQLLRPPCASCTGAVRCQSQVAEAVLTSQLKAHQEKPNFIIKTPKGTRDLSPQHMVVREKILDLVISCFKRHGAKGMDTPAFELKDFDIAGQFDPMIPDAECLKIMCEILSGLQLGDFLIKMAWKDVRHEMVVKKGLAPEVADRIGDYVQCHGGVSLVEQMFQDPRLSQNKQALEGLGDLKLLFEYLTLFGIADKISFDLSLARGLDYYTGVIYEAVLLQTPTQAGEEPLNVGSVAAGGRYDGLVGMFDPKGHKVPCVGLSIGVERIFYIVEQRMKTKGEKVRTTETQVFVATPQKNFLQERLKLIAELWDSGIKAEMLYKNNPKLLTQLHYCESTGIPLVVIIGEQELKEGVIKIRSVASREEVAIKRENFVAEIQKRLSES

SEQ ID NO: 6393 - protein, 473 aa, Homo Sapiens
MPLLGLLPRRAWASLLSQLLRPPCASCTGAVRCQSQVAEAVLTSQLKAHQEKPNFIIKTPKGTRDLSPQHMVVREKILDLVISCFKRHGAKGMDTPAFELKETLTEKYGEDSGLMYDLKDQGGELLSLRYDLTVPFARYLAMNKVKKMKRYHVGKVWRRESPTIVQGRYREFCQCDFDIAGQFDPMIPDAECLKIMCEILSGLQLGDFLIKMAWKDVRHEMVVKKGLAPEVADRIGDYVQCHGGVSLVEQMFQDPRLSQNKQALEGLGDLKLLFEYLTLFGIADKISFDLSLARGLDYYTGVIYEAVLLQTPTQAGEEPLNVGSVAAGGRYDGLVGMFDPKGHKVPCVGLSIGVERIFYIVEQRMKTKGEKVRTTETQVFVATPQKNFLQERLKLIAELWDSGIKAEMLYKNNPKLLTQLHYCESTGIPLVVIIGEQELKEGVIKIRSVASREEVAIKRENFVAEIQKRLSES

SEQ ID NO: 6394 - protein, 506 aa, Homo Sapiens
MPLLGLLPRRAWASLLSQLLRPPCASCTGAVRCQSQVAEAVLTSQLKAHQEKPNFIIKTPKGTRDLSPQHMVVREKILDLVISCFKRHGAKGMDTPAFELKETLTEKYGEDSGLMYDLKDQGGELLSLRYDLTVPFARYLAMNKVKKMKRYHVGKVWRRESPTIVQGRYREFCQCDFDIAGQFDPMIPDAECLKIMCEILSGLQLGDFLIKVNDRRIVDGMFAVCGVPESKFRAICSSIDKLDKMAWKDVRHEMVVKKGLAPEVADRIGDYVQCHGGVSLVEQMFQDPRLSQNKQALEGLGDLKLLFEYLTLFGIADKISFDLSLARGLDYYTGVIYEAVLLQTPTQAGEEPLNVGSVAAGGRYDGLVGMFDPKGHKVPCVGLSIGVERIFYIVEQRMKTKGEKVRTTETQVFVATPQKNFLQERLKLIAELWDSGIKAEMLYKNNPKLLTQLHYCESTGIPLVVIIGEQELKEGVIKIRSVASREEVAIKRENFVAEIQKRLSES

SEQ ID NO: 6395 - protein, 506 aa, Homo Sapiens; identical to SEQ ID NO: 6394

SEQ ID NO: 6396 - protein, 506 aa, Homo Sapiens; identical to SEQ ID NO: 6394

SEQ ID NO: 6397 - protein, 160 aa, Homo Sapiens
MVVREKILDLVISCFKRHGAKGMDTPAFELKETLTEKYGEDSGLMYDLKDQGGELLSLRYDLTVPFARYLAMNKVKKMKRYHVGKVWRRESPTIVQGRYREFCQCDFDIAGQFDPMIPDAECLKIMCEILSGLQLGDFLIKESRYCHCFEWKGIDKHLGH

SEQ ID NO: 6398 - protein, 436 aa, Homo Sapiens
MVVREKILDLVISCFKRHGAKGMDTPAFELKETLTEKYGEDSGLMYDLKDQGGELLSLRYDLTVPFARYLAMNKVKKMKRYHVGKVWRRESPTIVQGRYREFCQCDFDIAGQFDPMIPDAECLKIMCEILSGLQLGDFLIKVNDRRIVDGMFAVCGVPESKFRAICSSIDKLDKMAWKDVRHEMVVKKGLAPEVADRIGDYVQCHGGVSLVEQMFQDPRLSQNKQALEGLGDLKLLFEYLTLFGIADKISFDLSLARGLDYYTGVIYEAVLLQTPTQAGEEPLNVGSVAAGGRYDGLVGMFDPKGHKVPCVGLSIGVERIFYIVEQRMKTKGEKVRTTETQVFVATPQKNFLQERLKLIAELWDSGIKAEMLYKNNPKLLTQLHYCESTGIPLVVIIGEQELKEGVIKIRSVASREEVAIKRENFVAEIQKRLSES

SEQ ID NO: 6399 - protein, 293 aa, Homo Sapiens
MVVREKILDLVISCFKRHGAKGMDTPAFELKETLTEKYGEDSGLMYDLKDQGGELLSLRYDLTVPFARYLAMNKVKKMKRYHVGKVWRRESPTIVQGRYREFCQCDFDIAGQFDPMIPDAECLKIMCEILSGLQLGDFLIKVNDRRIVDGMFAVCGVPESKFRAICSSIDKLDKMAWKDVRHEMVVKKGLAPEVADRIGDYVQCHGGVSLVEQMFQDPRLSQNKQALEGLGDLKLLFEYLTLFGIADKISFDLSLARGLDYYTGVIYEAVLLQTPTQAGEEPLNVGSVAAGGR

SEQ ID NO: 6400 - protein, 436 aa, Homo Sapiens; identical to SEQ ID NO: 6398

SEQ ID NO: 6401 - protein, 219 aa, Homo Sapiens
  misc_feature (1)..(1): Xaa can be any naturally occurring amino acid
XASLLSQLLRPPCASCTGAVRCQSQVAEAVLTSQLKAHQEKPNFIIKTPKGTRDLSPQHMVVREKILDLVISCFKRHGAKGMDTPAFELKETLTEKYGEDSGLMYDLKDQGGELLSLRYDLTVPFARYLAMNKVKKMKRYHVGKVWRRESPTIVQGRYREFCQCDFDIAGQFDPMIPDAECLKIMCEILSGLQLGDFLIKESRYCHCFEWKGIDKHLGH

SEQ ID NO: 6402 - protein, 223 aa, Homo Sapiens
MHPQVVILSLILHLADSVAGSVKVGGEAGPSVTLPCHYSGAVTSMCWNRGSCSLFTCQNGIVWTNGTHVTYRKDTRYKLLGDLSRRDVSLTIENTAVSDSGVYCCRVEHRGWFNDMKITVSLEIVPPKVTTTPIVTTVPTVTTVRTSTTVPTTTTVPMTTVPTTTVPTTMSIPTTTTVLTTMTVSTTTSVPTTTSIPTTTSVPVTTTVSTFVPPMPLPRQNHE

SEQ ID NO: 6403 - protein, 364 aa, Homo Sapiens
MHPQVVILSLILHLADSVAGSVKVGGEAGPSVTLPCHYSGAVTSMCWNRGSCSLFTCQNGIVWTNGTHVTYRKDTRYKLLGDLSRRDVSLTIENTAVSDSGVYCCRVEHRGWFNDMKITVSLEIVPPKVTTTPIVTTVPTVTTVRTSTTVPTTTTVPMTTVPTTTVPTTMSIPTTTTVLTTMTVSTTTSVPTTTSIPTTTSVPVTTTVSTFVPPMPLPRQNHEPVATSPSSPQPAETHPTTLQGAIRREPTSSPLYSYTTDGNDTVTESSDGLWNNNQTQLFLEHSLLTANTTKGIYAGVCISVLVLLALLGVIIAKKYFFKKEVQQLSVSFSSLQIKALQNAVEKEVQAEDNIYIENSLYATD

SEQ ID NO: 6404 - protein, 401 aa, Homo Sapiens
MHPQVVILSLILHLADSVAGSVKVGGEAGPSVTLPCHYSGAVTSMCWNRGSCSLFTCQNGIVWTNGTHVTYRKDTRYKLLGDLSRRDVSLTIENTAVSDSGVYCCRVEHRGWFNDMKITVSLEIVPPKVTTTPIVTTVPTVTTVRTSTTVPTTTTVPMTTVPTTTVPTTMSIPTTTTVLTTMTVSTTTSVPTTTSIPTTTSVPVTTTVSTFVPPMPLPRQNHEPVATSPSSPQPAETHPTTLQGAIRREPTSSPLYSYTTDGNDTVTESSDGLWNNNQTQLFLEHSLLTANTTKGIYAGVCISVLVLLALLGVIIAKMFHLAAFKLKLCKMQLKRKSKQKTISTLRIVFMPRTKTQWCSLRVYAHECRRLNRHQHIRRLLDPKTIFLFQFHLAFQHVSDTG

SEQ ID NO: 6405 - protein, 364 aa, Homo Sapiens; identical to SEQ ID NO: 6403

SEQ ID NO: 6406 - protein, 401 aa, Homo Sapiens; identical to SEQ ID NO: 6404

SEQ ID NO: 6407 - protein, 268 aa, Homo Sapiens
MGLSPSAPAVAVQASNASASPPSGCPMHEGKMKGCPVNTEPSGPTCEKKTYSVPAHQERAYEYVECPIRGTAAENKENLDPSNLMPPPNQTPAPDQPFALSTVREESSIPRADSEKKWVYPSEQMFWNAMLKKGWKWKDEDISQKDMYNIIRIHNQNNEQAWKEILKWEALHAAECPCGPSLIRFGGKAKEYSPRARIRSWMGYELPFDRHDWIINRCGTEVRYVIDYYDGGEVNKDYQFTILDVRPALDSLSAVWDRMKVAWWRWTS

SEQ ID NO: 6408 - protein, 268 aa, Homo Sapiens; identical to SEQ ID NO: 6407

SEQ ID NO: 6409 - protein, 268 aa, Homo Sapiens; identical to SEQ ID NO: 6407

SEQ ID NO: 6410 - protein, 131 aa, Homo Sapiens
MNLPSTKVSWAAVTLLLLLLLLPPALLSSGAAAQPLPDCCRQKTCSCRLYELLHGAGNHAAGILTLGKRRSGPPGLQGRLQRLLQASGNHAAGILTMGRRAGAEPAPRPCLGRRCSAPAAASVAPGGQSGI

SEQ ID NO: 6411 - protein, 223 aa, Homo Sapiens
MAAWGCVAALGAARGLCWRAARAAAGLQGRPARRCYAVGPAQPLPRNDFPRIEGVLLLGEPVRWETSLQLIMDVLLSNGSPGAGLATPPYPHLPVLASNMDLLWMAEAKMPSDNPMSDVYGANLFHQYLQKATHDGAPELGAGGTRQQQPSASQSCISILVCTGVYNPRNPQSTEPVLGGGEPPFHGHRDLCFSPGLMEASHVVNDVNEAVQLVFRKEGWALE

SEQ ID NO: 6412 - protein, 423 aa, Homo Sapiens
MAAWGCVAALGAARGLCWRAARAAAGLQGRPARRCYAVGPAQSPPTFGFLLDIDGVLVRGHRVIPAALKAFRRLVNSQGQLRVPVVFVTNAGNILQHSKAQELSALLGCEVDADQVILSHSPMKLFSEYHEKRMLVSGQGPVMENAQGLGFRNVVTVDELRMAFPLLDMVDLERRLKTTPLPRNDFPRIEGVLLLGEPVRWETSLQLIMDVLLSNGSPGAGLATPPYPHLPVLASNMDLLWMAEAKMPRFGHGTFLLCLETIYQKVTGKELRYEGLMGKPSILTYQYAEDLIRRQAERRGWAAPIRKLYAVGDNPMSDVYGANLFHQYLQKATHDGAPELGAGGTRQQQPSASQSCISILVCTGVYNPRNPQSTEPVLGGGEPPFHGHRDLCFSPGLMEASHVVNDVNEAVQLVFRKEGWALE

SEQ ID NO: 6413 - protein, 393 aa, Homo Sapiens
MYAWFFLPSFSQSPPTFGFLLDIDGVLVRGHRVIPAALKAFRRLVNSQGQLRVPVVFVTNAGNILQHSKAQELSALLGCEVDADQVILSHSPMKLFSEYHEKRMLVSGQGPVMENAQGLGFRNVVTVDELRMAFPLLDMVDLERRLKTTPLPRNDFPRIEGVLLLGEPVRWETSLQLIMDVLLSNGSPGAGLATPPYPHLPVLASNMDLLWMAEAKMPRFGHGTFLLCLETIYQKVTGKELRYEGLMGKPSILTYQYAEDLIRRQAERRGWAAPIRKLYAVGDNPMSDVYGANLFHQYLQKATHDGAPELGAGGTRQQQPSASQSCISILVCTGVYNPRNPQSTEPVLGGGEPPFHGHRDLCFSPGLMEASHVVNDVNEAVQLVFRKEGWALE

SEQ ID NO: 6414 - protein, 87 aa, Homo Sapiens
MELAHSLLLNEEAYNQLGEVQKAEFIFEWLRYLEKLLLATSRNDVREKQKTLVEQLLSLLNSSPGPPTRKLLAKNLAILYSIGDTFS

SEQ ID NO: 6415 - protein, 113 aa, Homo Sapiens
MELAHSLLLNEEAYNQLGEVQKAEFIFEWLRYLEKLLLATSRNDVREKQKTLVEQLLSLLNSSPGPPTRKLLAKNLAILYSIGDTFSVHEAIDKCNDLIRSKDDSPSYLPTKL

SEQ ID NO: 6416 - protein, 2046 aa, Homo Sapiens
MELAHSLLLNEEAYNQLGEVQKAEFIFEWLRYLEKLLLATSRNDVREKQKTLVEQLLSLLNSSPGPPTRKLLAKNLAILYSIGDTFSVHEAIDKCNDLIRSKDDSPSYLPTKLAAVVCLGSLYKKLGRILGNTFTDTVGNILKAMKSAESQGRYEIMLSLQNILNGLGAAAAPCHRDVYKAARSCLTDRSMAVRCAAAKCLLELQNEAIFMWSTDLDSVATLCFKSFEGSNYDVRISVSKLLGIILAKAVISKHPGTAASRQSIRRVSLEEVLELLGTGFLRGSSGFLRASGDMLKGTSSVSRDVRVGVTQAYVVFVSTLGGAWLEKNFAAFFSHILSLASPSHPKATQTQIDAVCCRRCVSFILRTTIGGLLGEKAQLAAVKDICQAIWKLKKVMDAVMSDGNLETRLGSTDVAASQHMLVCALQELGNLIHNLGTTAAPLLQDSSTGLLDSILSVILHPSISVRLAAAWCLHCIAVALPSYLTPLLDRCLERLTGHKSSPEAVTGFSFAVAALLGAVKHCPLGIPHGKGKIIMTLAEDLLCSAAQNSRLSAQRTQAGWLLISALMTLGPAVVSHHLARVLLLWKCVFPASPKDLETEKSRGDSFTWQVTLEGRAGALCAIKSFVSHCGDLLTEEVTQRLLPPLPCAVDLLTQLSSILKMYGSPLKTPSVVYRQRLYELLILLPPETYEGNLCAILRELAADLTAPDIQVAASTFLLPPLCHQDDLLILSPFLQETDHRFIEEQLLLGNGVACGSLEYDPYSIYEKDVEGDSVPKPLPPALSVISSASKLFGVVCAHVGETQRLLILEQLLDSIKHTKGARQQVVQLHVVSSVSSFLKYVAGSKGCLGPEEMKRFALTLVMGALESPNPLLRCAAAESWARLAQVVDDGAFTAGLAQVSFDKLKSARDVVTRTGHSLALGSLHRYLGGISSSQHLNSCIGILYTLAQDSTSPDVQTWALHSLSLIIDSAGPLYYVHVEPTLSLIIMLLLNVPPTHAEVHQSLGRCLNALITTLGPELQGNSTSISTLRTSCLLGCAVMQDNPDCLVQAQAISCLQQLHMFAPRHVNLSSLVSCLCVNLCSPYLLLRRAVLACLRQLVQREAAEVSEHAVMLAKDSREELTPDANIREVGLEGALLILLDKETDERLCHDIKETLNYMLTSMAVEKLSLWLKLCKDVLAASADFTAVTCVDTMQEEEGDKGDDASVLTTRRDEKSHPFTNPRWATRVFAAECVCRIINQCENANSAHFDIALAQEMKKRDSRNDFLVLHLADLIRMAFMAATDHSDQLRLSGLEMLLVVIRRFATVPEPEFPGHVILEQYQANVGAALRPAFTSETPPDVTAKACQVCSAWIASGVVSDLNDLRRVHQLLVSSLTKIQAGKEALSHLYNESASTMEILAVLKAWAEVYIIAVQRHKNHRQPLKTTTCLEDGIRNGSCSSDGLLDLVYADLGTLSRLWLAALQDFALLTLPSEFASQLPAEGGAFYTAETSENAKLHYYNSWALILHATALWLTSTGFVVADPDEGASNLSRPVTPTSMCQGSSSGATIKSPEDVYTDRFHLILGISVEFLCSLRSDATMESITACLHALQALLDVPWPRSKIGSDQDLGIELLNVLHRVILTRESPSIQLASLEVVRQIICAAQEHVKEKRRSAEVDDGAAEKETLPEFGEGKDTGGLVPGKSLVFATLELCVCILVRQLPELNPKLTGSPGVKATKPQILLEDGSRLVSAALVILSELPAVCSPEGSISILPTILYLTIGVLRETAVKLPGGQLSSTVAASLQALKGILSSPMARAEKSRTAWTDLLRSALTTILDCWDPVDETHQELDEVSLLTAITVFILSTSPEVTTIPCLQKRCIDKFKATLEIKDPVVQIKTYQLLHSIFQYPNPAVSYPYIYSLASCIMEKLQEIDKRKPENTAELEIFQEGIKVLETLVTVAEEHHRAQLVACLLPILISFLLDENSLGSATSIMRNLHDFALQNLMQIGPQYSSVFKSLVASSPALKARLEAAIKGNQESVKVKIPTSKYTKSPGKNSSIQLKTSFL

SEQ ID NO: 6417 - protein, 1599 aa, Homo Sapiens
  misc_feature (1)..(1): Xaa can be any naturally occurring amino acid
XGEKAQLAAVKDICQAIWKLKKVMDAVMSDGNLETRLGSTDVAASQHMLVCALQELGNLIHNLGTTAAPLLQDSSTGLLDSILSVILHPSISVRLAAAWCLHCIAVALPSYLTPLLDRCLERLTGHKSSPEAVTGFSFAVAALLGAVKHCPLGIPHGKGKIIMTLAEDLLCSAAQNSRLSAQRTQAGWLLISALMTLGPAVVSHHLARVLLLWKCVFPASPKDLETEKSRGDSFTWQVTLEGRAGALCAIKSFVSHCGDLLTEEVTQRLLPPLPCAVDLLTQLSSILKMYGSPLKTPSVVYRQRLYELLILLPPETYEGNLCAILRELAADLTAPDIQVAASTFLLPPLCHQDDLLILSPFLQETDHRFIEEQLLLGNGVACGSLEYDPYSIYEKDVEGDSVPKPLPPALSVISSASKLFGVVCAHVGETQRLLILEQLLDSIKHTKGARQQVVQLHVVSSVSSFLKYVAGSKGCLGPEEMKRFALTLVMGALESPNPLLRCAAAESWARLAQVVDDGAFTAGLAQVSFDKLKSARDVVTRTGHSLALGSLHRYLGGISSSQHLNSCIGILYTLAQDSTSPDVQTWALHSLSLIIDSAGPLYYVHVEPTLSLIIMLLLNVPPTHAEVHQSLGRCLNALITTLGPELQGNSTSISTLRTSCLLGCAVMQDNPDCLVQAQAISCLQQLHMFAPRHVNLSSLVSCLCVNLCSPYLLLRRAVLACLRQLVQREAAEVSEHAVMLAKDSREELTPDANIREVGLEGALLILLDKETDERLCHDIKETLNYMLTSMAVEKLSLWLKLCKDVLAASADFTAVTCVDTMQEEEGDKGDDASVLTTRRDEKSHPFTNPRWATRVFAAECVCRIINQCENANSAHFDIALAQEMKKRDSRNDFLVLHLADLIRMAFMAATDHSDQLRLSGLEMLLVVIRRFATVPEPEFPGHVILEQYQANVGAALRPAFTSETPPDVTAKACQVCSAWIASGVVSDLNDLRRVHQLLVSSLTKIQAGKEALSHLYNESASTMEILAVLKAWAEVYIIAVQRHKNHRQPLKTTTCLEDGIRNGSCSSDGLLDLVYADLGTLSRLWLAALQDFALLTLPSEFASQLPAEGGAFYTAETSENAKLHYYNSWALILHATALWLTSTGFVVADPDEGASNLSRPVTPTSMCQGSSSGATIKSPEDVYTDRFHLILGISVEFLCSLRSDATMESITACLHALQALLDVPWPRSKIGSDQDLGIELLNVLHRVILTRESPSIQLASLEVVRQIICAAQEHVKEKRRSAEVDDGAAEKETLPEFGEGKDTGGLVPGKSLVFATLELCVCILVRQLPELNPKLTGSPGVKATKPQILLEDGSRLVSAALVILSELPAVCSPEVDETHQELDEVSLLTAITVFILSTSPEVTTIPCLQKRCIDKFKATLEIKDPVVQIKTYQLLHSIFQYPNPAVSYPYIYSLASCIMEKLQEIDKRKPENTAELEIFQEGIKVLETLVTVAEEHHRAQLVACLLPILISFLLDENSLGSATSIMRNLHDFALQNLMQIGPQYSSVFKSLVASSPALKARLEAAIKGNQESVKVKIPTSKYTKSPGKNSSIQLKTSFL

SEQ ID NO: 6418 - protein, 124 aa, Homo Sapiens
  misc_feature (1)..(1): Xaa can be any naturally occurring amino acid
XLLLRRAVLACLRQLVQREAAEVSEHAVMLAKDSREELTPDANIREVGLEGALLILLDKETDERLCHDIKETLNYMLTSMAVEKLSLWLKLCKDVLAASAGKYWTLSVKIIKLKFETLHKIVYH

SEQ ID NO: 6419 - protein, 896 aa, Homo Sapiens
  misc_feature (1)..(1): Xaa can be any naturally occurring amino acid
XSHPKATQTQIDAVCCRRCVSFILRTTIGGLLGEKAQLAAVKDICQAIWKLKKVMDVAASQHMLVCALQELGNLIHNLGTTAAPLLQDSSTGLLDSILSVILHPSISVRLAAAWCLHCIAVALPSYLTPLLDRCLERLTGHKSSPEAVTGFSFAVAALLGAVKHCPLGIPHGKGKIIMTLAEDLLCSAAQNSRLSAQRTQAGWLLISALMTLGPAVVSHHLARVLLLWKCVFPASPKDLETEKSRGDSFTWQVTLEGRAGALCAIKSFVSHCGDLLTEEVTQRLLPPLPCAVDLLTQLSSILKMYGSPLKTPSVVYRQRLYELLILLPPETYEGNLCAILRELAADLTAPDIQVAASTFLLPPLCHQDDLLILSPFLQETDHRFIEEQLLLGNGVACGSLEYDPYSIYEKDVEGDSVPKPLPPALSVISSASKLFGVVCAHVGETQRLLILEQLLDSIKHTKGARQQVVQLHVVSSVSSFLKYVAGSKGCLGPEEMKRFALTLVMGALESPNPLLRCAAAESWARLAQVVDDGAFTAGLAQVSFDKLKSARDVVTRTGHSLALGSLHRYLGGISSSQHLNSCIGILYTLAQDSTSPDVQTWALHSLSLIIDSAGPLYYVHVEPTLSLIIMLLLNVPPTHAEVHQSLGRCLNALITTLGPELQGNSTSISTLRTSCLLGCAVMQDNPDCLVQAQAISCLQQLHMFAPRHVNLSSLVSCLCVNLCSPYLLLRRAVLACLRQLVQREAAEVSEHAVMLAKDSREELTPDANIREVGLEGALLILLDKETDERLCHDIKETLNYMLTSMAVEKLSLWLKLCKDVLAASADFTAVTCVDTMQEEEGDKGDDASVLTTRRDEKSHPFTNPRWATRVFAAECVCRIINQCENANSAHFDIALA

SEQ ID NO: 6420 - protein, 199 aa, Homo Sapiens
  misc_feature (1)..(1): Xaa can be any naturally occurring amino acid
XSLIIMLLLNVPPTHAEVHQSLGRCLNALITTLGPELQGNSTSISTLRTSCLLGCAVMQDNPDCLVQAQAISCLQQLHMFAPRHVNLSSLVSCLCEILLDNSVLVNLCSPYLLLRRAVLACLRQLVQREAAEVSEHAVMLAKDSREELTPDANIREVGLEGALLILLDKETDERLCHDIKETLNYMLTSMAVEKLSLWL

SEQ ID NO: 6421 - protein, 208 aa, Homo Sapiens
MESGHLLWALLFMQSLWPQLTDGATRVYYLGIRDVQWNYAPKGRNVITNQPLDSDIVASSFLKSDKNRIGGTYKKTIYKEYKDDSYTDEVAQPAWLGFLGPVLQAEVGDVILIHLKNFATRPYTIHPHGVFYEKDSEGSLYPDGSSGPLKADDSVPPGGSHIYNWTIPEGHAPTDADPACLTWIYHSHVDAPRDIATGLIGPLITCKR

SEQ ID NO: 6422 - protein, 1158 aa, Homo Sapiens
MESGHLLWALLFMQSLWPQLTDGATRVYYLGIRDVQWNYAPKGRNVITNQPLDSDIVASSFLKSDKNRIGGTYKKTIYKEYKDDSYTDEVAQPAWLGFLGPVLQAEVGDVILIHLKNFATRPYTIHPHGVFYEKDSEGSLYPDGSSGPLKADDSVPPGGSHIYNWTIPEGHAPTDADPACLTWIYHSHVDAPRDIATGLIGPLITCKRGALDGNSPPQRQDVDHDFFLLFSVVDENLSWHLNENIATYCSDPASVDKEDETFQESNRMHAINGFVFGNLPELNMCAQKRVAWHLFGMGNEIDVHTAFFHGQMLTTRGHHTDVANIFPATFVTAEMVPWEPGTWLISCQVNSHFRDGMQALYKVKSCSMAPPVDLLTGKVRQYFIEAHEIQWDYGPMGHDGSTGKNLREPGSISDKFFQKSSSRIGGTYWKVRYEAFQDETFQEKMHLEEDRHLGILGPVIRAEVGDTIQVVFYNRASQPFSMQPHGVFYEKDYEGTVYNDGSSYPGLVAKPFEKVTYRWTVPPHAGPTAQDPACLTWMYFSAADPIRDTNSGLVGPLLVCRAGALGADGKQKGVDKEFFLLFTVLDENKSWYSNANQAAAMLDFRLLSEDIEGFQDSNRMHAINGFLFSNLPRLDMCKGDTVAWHLLGLGTETDVHGVMFQGNTVQLQGMRKGAAMLFPHTFVMAIMQPDNLGTFEIYCQAGSHREAGMRAIYNVSQCPGHQATPRQRYQAARIYYIMAEEVEWDYCPDRSWEREWHNQSEKDSYGYIFLSNKDGLLGSRYKKAVFREYTDGTFRIPRPRTGPEEHLGILGPLIKGEVGDILTVVFKNNASRPYSVHAHGVLESTTVWPLAAEPGEVVTYQWNIPERSGPGPNDSACVSWIYYSAVDPIKDMYSGLVGPLAICQKGILEPHGGRSDMDREFALLFLIFDENKSWYLEENVATHGSQDPGSINLQDETFLESNKMHAINGKLYANLRGLTMYQGERVAWYMLAMGQDVDLHTIHFHAESFLYRNGENYRADVVDLFPGTFEVVEMVASNPGTWLMHCHVTDHVHAGMETLFTVFSRTEHLSPLTVITKETEKAVPPRDIEEGNVKMLGMQIPIKNVEMLASVLVAISVTLLLVVLALGGVVWYQHRQRKLRRNRRSILDDSFKLLSFKQ

SEQ ID NO: 6423 - protein, 811 aa, Homo Sapiens
MESGHLLWALLFMQSLWPQLTDGATRVYYLGIRDVQWNYAPKGRNVITNQPLDSDIVASSFLKSDKNRIGGTYKKTIYKEYKDDSYTDEVAQPAWLGFLGPVLQAEVGDVILIHLKNFATRPYTIHPHGVFYEKDSEGSLYPDGSSGPLKADDSVPPGGSHIYNWTIPEGHAPTDADPACLTWIYHSHVDAPRDIATGLIGPLITCKRGALDGNSPPQRQDVDHDFFLLFSVVDENLSWHLNENIATYCSDPASVDKEDETFQESNRMHAINGFVFGNLPELNMCAQKRVAWHLFGMGNEIDVHTAFFHGQMLTTRGHHTDVANIFPATFVTAEMVPWEPGTWLISCQVNSHFRDGMQALYKVKSCSMAPPVDLLTGKVRQYFIEAHEIQWDYGPMGHDGSTGKNLREPGSISDKFFQKSSSRIGGTYWKVRYEAFQDETFQEKMHLEEDRHLGILGPVIRAEVGDTIQVVFYNRASQPFSMQPHGVFYEKDYEGTVYNDDPIRDTNSGLVGPLLVCRAGALGADGKQKGVDKEFFLLFTVLDENKSWYSNANQAAAMLDFRLLSEDIEGFQDSNRMHAINGFLFSNLPRLDMCKGDTVAWHLLGLGTETDVHGVMFQGNTVQLQGMRKGAAMLFPHTFVMAIMQPDNLGTFEIYCQAGSHREAGMRAIYNVSQCPGHQATPRQRYQAARIYYIMAEEVEWDYCPDRSWEREWHNQSEKDSYGYIFLSNKDGLLGSRYKKAVFREYTDGTFRIPRPRTGPEEHLGILGPLIKGEVGDILTVVFKNNASRPYSVHAHGVLESTTVWPLAAEP

SEQ ID NO: 6424 - protein, 891 aa, Homo Sapiens
MHAINGFVFGNLPELNMCAQKRVAWHLFGMGNEIDVHTAFFHGQMLTTRGHHTDVANIFPATFVTAEMVPWEPGTWLISCQVNSHFRDGMQALYKVKSCSMAPPVDLLTGKVRQYFIEAHEIQWDYGPMGHDGSTGKNLREPGSISDKFFQKSSSRIGGTYWKVRYEAFQDETFQEKMHLEEDRHLGILGPVIRAEVGDTIQVVFYNRASQPFSMQPHGVFYEKDYEGTVYNDGSSYPGLVAKPFEKVTYRWTVPPHAGPTAQDPACLTWMYFSAADPIRDTNSGLVGPLLVCRAGALGADGKQKGVDKEFFLLFTVLDENKSWYSNANQAAAMLDFRLLSEDIEGFQDSNRMHAINGFLFSNLPRLDMCKGDTVAWHLLGLGTETDVHGVMFQGNTVQLQGMRKGAAMLFPHTFVMAIMQPDNLGTFEIYCQAGSHREAGMRAIYNVSQCPGHQATPRQRYQAARIYYIMAEEVEWDYCPDRSWEREWHNQSEKDSYGYIFLSNKDGLLGSRYKKAVFREYTDGTFRIPRPRTGPEEHLGILGPLIKGEVGDILTVVFKNNASRPYSVHAHGVLESTTVWPLAAEPGEVVTYQWNIPERSGPGPNDSACVSWIYYSAVDPIKDMYSGLVGPLAICQKGILEPHGGRSDMDREFALLFLIFDENKSWYLEENVATHGSQDPGSINLQDETFLESNKMHAINGKLYANLRGLTMYQGERVAWYMLAMGQDVDLHTIHFHAESFLYRNGENYRADVVDLFPGTFEVVEMVASNPGTWLMHCHVTDHVHAGMETLFTVFSRTEHLSPLTVITKETEKAVPPRDIEEGNVKMLGMQIPIKNVEMLASVLVAISVTLLLVVLALGGVVWYQHRQRKLRRNRRSILDDSFKLLSFKQ

SEQ ID NO: 6425 - protein, 1212 aa, Homo Sapiens
MTQTLPYHLSLLNVLFPGPCSRHFKFRRGKCAQPAWRKVSAPSQDLLITKVMWAMESGHLLWALLFMQSLWPQLTDGATRVYYLGIRDVQWNYAPKGRNVITNQPLDSDIVASSFLKSDKNRIGGTYKKTIYKEYKDDSYTDEVAQPAWLGFLGPVLQAEVGDVILIHLKNFATRPYTIHPHGVFYEKDSEGSLYPDGSSGPLKADDSVPPGGSHIYNWTIPEGHAPTDADPACLTWIYHSHVDAPRDIATGLIGPLITCKRGALDGNSPPQRQDVDHDFFLLFSVVDENLSWHLNENIATYCSDPASVDKEDETFQESNRMHAINGFVFGNLPELNMCAQKRVAWHLFGMGNEIDVHTAFFHGQMLTTRGHHTDVANIFPATFVTAEMVPWEPGTWLISCQVNSHFRDGMQALYKVKSCSMAPPVDLLTGKVRQYFIEAHEIQWDYGPMGHDGSTGKNLREPGSISDKFFQKSSSRIGGTYWKVRYEAFQDETFQEKMHLEEDRHLGILGPVIRAEVGDTIQVVFYNRASQPFSMQPHGVFYEKDYEGTVYNDGSSYPGLVAKPFEKVTYRWTVPPHAGPTAQDPACLTWMYFSAADPIRDTNSGLVGPLLVCRAGALGADGKQKGVDKEFFLLFTVLDENKSWYSNANQAAAMLDFRLLSEDIEGFQDSNRMHAINGFLFSNLPRLDMCKGDTVAWHLLGLGTETDVHGVMFQGNTVQLQGMRKGAAMLFPHTFVMAIMQPDNLGTFEIYCQAGSHREAGMRAIYNVSQCPGHQATPRQRYQAARIYYIMAEEVEWDYCPDRSWEREWHNQSEKDSYGYIFLSNKDGLLGSRYKKAVFREYTDGTFRIPRPRTGPEEHLGILGPLIKGEVGDILTVVFKNNASRPYSVHAHGVLESTTVWPLAAEPGEVVTYQWNIPERSGPGPNDSACVSWIYYSAVDPIKDMYSGLVGPLAICQKGILEPHGGRSDMDREFALLFLIFDENKSWYLEENVATHGSQDPGSINLQDETFLESNKMHAINGKLYANLRGLTMYQGERVAWYMLAMGQDVDLHTIHFHAESFLYRNGENYRADVVDLFPGTFEVVEMVASNPGTWLMHCHVTDHVHAGMETLFTVFSRTEHLSPLTVITKETEKAVPPRDIEEGNVKMLGMQIPIKNVEMLASVLVAISVTLLLVVLALGGVVWYQHRQRKLRRNRRSILDDSFKLLSFKQ

SEQ ID NO: 6426 - protein, 1160 aa, Homo Sapiens
MWAMESGHLLWALLFMQSLWPQLTDGATRVYYLGIRDVQWNYAPKGRNVITNQPLDSDIVASSFLKSDKNRIGGTYKKTIYKEYKDDSYTDEVAQPAWLGFLGPVLQAEVGDVILIHLKNFATRPYTIHPHGVFYEKDSEGSLYPDGSSGPLKADDSVPPGGSHIYNWTIPEGHAPTDADPACLTWIYHSHVDAPRDIATGLIGPLITCKRGALDGNSPPQRQDVDHDFFLLFSVVDENLSWHLNENIATYCSDPASVDKEDETFQESNRMHAINGFVFGNLPELNMCAQKRVAWHLFGMGNEIDVHTAFFHGQMLTTRGHHTDVANIFPATFVTAEMVPWEPGTWLISCQVNSHFRDGMQALYKVKSCSMAPPVDLLTGKVRQYFIEAHEIQWDYGPMGHDGSTGKNLREPGSISDKFFQKSSSRIGGTYWKVRYEAFQDETFQEKMHLEEDRHLGILGPVIRAEVGDTIQVVFYNRASQPFSMQPHGVFYEKDYEGTVYNDGSSYPGLVAKPFEKVTYRWTVPPHAGPTAQDPACLTWMYFSAADPIRDTNSGLVGPLLVCRAGALGADGKQKGVDKEFFLLFTVLDENKSWYSNANQAAAMLDFRLLSEDIEGFQDSNRMHAINGFLFSNLPRLDMCKGDTVAWHLLGLGTETDVHGVMFQGNTVQLQGMRKGAAMLFPHTFVMAIMQPDNLGTFEIYCQAGSHREAGMRAIYNVSQCPGHQATPRQRYQAARIYYIMAEEVEWDYCPDRSWEREWHNQSEKDSYGYIFLSNKDGLLGSRYKKAVFREYTDGTFRIPRPRTGPEEHLGILGPLIKGEVGDILTVVFKNNASRPYSVHAHGVLESTTVWPLAAEPGEVVTYQWNIPERSGPGPNDSACVSWIYYSAVDPIKDMYSGLVGPLAICQKGILEPHGGRSDMDREFALLFLIFDENKSWYLEENVATHGSQDPGSINLQDETFLESNKMHAINGKLYANLRGLTMYQGERVAWYMLAMGQDVDLHTIHFHAESFLYRNGENYRADVVDLFPGTFEVVEMVASNPGTWLMHCHVTDHVHAGMETLFTVFSRTEHLSPLTVITKETEKVPPRDIEEGNVKMLGMQIPIKNVEMLASVLVAISVTLLLVVLALGGVVWYQHRQRKLRRNRRSILDDSFKLLSFKQ

SEQ ID NO: 6427 - protein, 969 aa, Homo Sapiens
MWAMESGHLLWALLFMQSLWPQLTDGATRVYYLGIRDVQWNYAPKGRNVITNQPLDSDIVASSFLKSDKNRIGGTYKKTIYKEYKDDSYTDEVAQPAWLGFLGPVLQAEVGDVILIHLKNFATRPYTIHPHGVFYEKDSEGSLYPDGSSGPLKADDSVPPGGSHIYNWTIPEGHAPTDADPACLTWIYHSHVDAPRDIATGLIGPLITCKRGALDGNSPPQRQDVDHDFFLLFSVVDENLSWHLNENIATYCSDPASVDKEDETFQESNRMHAINGFVFGNLPELNMCAQKRVAWHLFGMGNEIDVHTAFFHGQMLTTRGHHTDVANIFPATFVTAEMVPWEPGTWLISCQVNSHFRDGMQALYKVKSCSMAPPVDLLTGKVRQYFIEAHEIQWDYGPMGHDGSTGKNLREPGSISDKFFQKSSSRIGGTYWKVRYEAFQDETFQEKMHLEEDRHLGILGPVIRAEVGDTIQVVFYNRASQPFSMQPHGVFYEKDYEGTVYNDGTFEIYCQAGSHREAGMRAIYNVSQCPGHQATPRQRYQAARIYYIMAEEVEWDYCPDRSWEREWHNQSEKDSYGYIFLSNKDGLLGSRYKKAVFREYTDGTFRIPRPRTGPEEHLGILGPLIKGEVGDILTVVFKNNASRPYSVHAHGVLESTTVWPLAAEPGEVVTYQWNIPERSGPGPNDSACVSWIYYSAVDPIKDMYSGLVGPLAICQKGILEPHGGRSDMDREFALLFLIFDENKSWYLEENVATHGSQDPGSINLQDETFLESNKMHAINGKLYANLRGLTMYQGERVAWYMLAMGQDVDLHTIHFHAESFLYRNGENYRADVVDLFPGTFEVVEMVASNPGTWLMHCHVTDHVHAGMETLFTVFSRTEHLSPLTVITKETEKAVPPRDIEEGNVKMLGMQIPIKNVEMLASVLVAISVTLLLVVLALGGVVWYQHRQRKLRRNRRSILDDSFKLLSFKQ

SEQ ID NO: 6428 - protein, 63 aa, Homo Sapiens
MWAMESGHLLWALLFMQSLWPQLTDGATRVYYLGIRDVQWNYAPKGRNVITNQPLDSDIYVKM

SEQ ID NO: 6429 - protein, 88 aa, Homo Sapiens
MTSSRLWFSLLLAAAFAGRATALWPWPQNFQTSDQRYVLYPNNFQFQYDVSSAAQPGCSVLDEAFQRYRDLLFGSGSWPRPYLTANMY

SEQ ID NO: 6430 - protein, 143 aa, Homo Sapiens
MTSSRLWFSLLLAAAFAGRATALWPWPQNFQTSDQRYVLYPNNFQFQYDVSSAAQPGCSVLDEAFQRYRDLLFGSGSWPRPYLTGKRHTLEKNVLVVSVVTPGCNQLPTLESVENYTLTINDDQCLLLSETVWGALRGCHGVQ

SEQ ID NO: 6431 - protein, 529 aa, Homo Sapiens
MTSSRLWFSLLLAAAFAGRATALWPWPQNFQTSDQRYVLYPNNFQFQYDVSSAAQPGCSVLDEAFQRYRDLLFGSGSWPRPYLTGKRHTLEKNVLVVSVVTPGCNQLPTLESVENYTLTINDDQCLLLSETVWGALRGLETFSQLVWKSAEGTFFINKTEIEDFPRFPHRGLLLDTSRHYLPLSSILDTLDVMAYNKLNVFHWHLVDDPSFPYESFTFPELMRKGSYNPVTHIYTAQDVKEVIEYARLRGIRVLAEFDTPGHTLSWGPGIPGLLTPCYSGSEPSGTFGPVNPSLNNTYEFMSTFFLEVSSVFPDFYLHLGGDEVDFTCWKSNPEIQDFMRKKGFGEDFKQLESFYIQTLLDIVSSYGKGYVVWQEVFDNKVKIQPDTIIQVWREDIPVNYMKELELVTKAGFRALLSAPWYLNRISYGPDWKDFYIVEPLAFEGTPEQKALVIGGEACMWGEYVDNTNLVPRLWPRAGAVAERLWSNKLTSDLTFAYERLSHFRCELLRRGVQAQPLNVGFCEQEFEQT

SEQ ID NO: 6432 - protein, 509 aa, Homo Sapiens
MTSSRLWFSLLLAAAFAGRATALWPWPQNFQTSDQRYVLYPNNFQFQYDVSSAAQPGCSVLDEAFQRYRDLLFGSGSWPRPYLTGKRHTLEKNVLVVSVVTPGCNQLPTLESVENYTLTINDDQCLLLSETVWGALRGLETFSQLVWKSAEGTFFINKTEIEDFPRFPHRGLLLDTSRHYLPLSSILDTLDVMAYNKLNVFHWHLVDDPSFPYESFTFPELMRKGSYNPVTHIYTAQDVKEVIEYARLRGIRVLAEFDTPGHTLSWGPGIPGLLTPCYSGSEPSGTFGPVNPSLNNTYEFMSTFFLEVSSVFPDFYLHLGGDEVDFTCWKSNPEIQDFMRKKGFGEDFKQLESFYIQTLLDIVSSYGKGYVVWQEVFDNKVKIQPDTIIQVWREDIPVNYMKELELVTKAGFRALLSAPWYLNRISYGPDWKDFYIVEPLAFEGTPEQKALVIGGEACMWGEYVDNTNLVPRLWPRAGAVAERLWSNKLTSDLTFAYERLSHFRCELLR

SEQ ID NO: 6433 - protein, 373 aa, Homo Sapiens
MTSSRLWFSLLLAAAFAGRATALWPWPQNFQTSDQRYVLYPNNFQFQYDVSSAAQPGCSVLDEAFQRYRDLLFGSGSWPRPYLTGKRHTLEKNVLVVSVVTPGCNQLPTLESVENYTLTINDDQCLLLSETVWGALRGLETFSQLVWKSAEGTFFINKTEIEDFPRFPHRGLLLDTSRHYLPLSSILDTLDVMAYNKLNVFHWHLVDDPSFPYESFTFPELMRKGSYNPVTHIYTAQDVKEVIEYARLRGIRVLAEFDTPGHTLSWGPGIPGLLTPCYSGSEPSGTFGPVNPSLNNTYEFMSTFFLEVSSVFPDFYLHLGGDEVDFTCWKSNPEIQDFMRKKGFGEDFKQLESFYIQTFSQTQSYRCGERIFQ

SEQ ID NO: 6434 - protein, 143 aa, Homo Sapiens
MTSSRLWFSLLLAAAFAGRATALWPWPQNFQTSDQRYVLYPNNFQFQYDVSSAAQPGCSVLDEAFQRYRDLLFGSGSWPRPYLTGKRHTLEKNVLVVSVVTPGCNQLPTLESVENYTLTINDDQCLLLSETVWGALRVLYQQD

SEQ ID NO: 6435 - protein, 119 aa, Homo Sapiens
MTSSRLWFSLLLAAAFAGRATALWPWPQNFQTSDQRYVLYPNNFQFQYDVSSAAQPGCSVLDEAFQRYRDLLFGSGSWPRPYLTGLSLSFRLECSGVITAYSNLELQDSSSLPASLMSS

SEQ ID NO: 6436 - protein, 540 aa, Homo Sapiens
MTSSRLWFSLLLAAAFAGRATALWPWPQNFQTSDQRYVLYPNNFQFQYDVSSAAQPGCSVLDEAFQRYRDLLFGSGSWPRPYLTGWPHQAYPVFLGKRHTLEKNVLVVSVVTPGCNQLPTLESVENYTLTINDDQCLLLSETVWGALRGLETFSQLVWKSAEGTFFINKTEIEDFPRFPHRGLLLDTSRHYLPLSSILDTLDVMAYNKLNVFHWHLVDDPSFPYESFTFPELMRKGSYNPVTHIYTAQDVKEVIEYARLRGIRVLAEFDTPGHTLSWGPGIPGLLTPCYSGSEPSGTFGPVNPSLNNTYEFMSTFFLEVSSVFPDFYLHLGGDEVDFTCWKSNPEIQDFMRKKGFGEDFKQLESFYIQTLLDIVSSYGKGYVVWQEVFDNKVKIQPDTIIQVWREDIPVNYMKELELVTKAGFRALLSAPWYLNRISYGPDWKDFYIVEPLAFEGTPEQKALVIGGEACMWGEYVDNTNLVPRLWPRAGAVAERLWSNKLTSDLTFAYERLSHFRCELLRRGVQAQPLNVGFCEQEFEQT

SEQ ID NO: 6437 - protein, 318 aa, Homo Sapiens
  misc_feature (1)..(1): Xaa can be any naturally occurring amino acid
XFQFQYDVSSAAQPGCSVLDEAFQRYRDLLFGSGSWPRPYLTGKRHTLEKNVLVVSVVTPGCNQLPTLESVENYTLTINDDQCLLLSETVWGALRGLETFSQLVWKSAEGTFFINKTEIEDFPRFPHRGLLLDTSRHYLPLSSILDTLDVMAYNKLNVFHWHLVDDPSFPYESFTFPELMRKGSYNPVTHIYTAQDVKEVIEYARLRGIRVLAEFDTPGHTLSWGPGIPGLLTPCYSGSEPSGTFGPVNPSLNNTYEFMSTFFLEVSSVFPDFYLHLGGDEVDFTCWKSNPEIQDFMRKKGFGEDFKQLESFYIQTYP

SEQ ID NO: 6438 - protein, 128 aa, Homo Sapiens
  misc_feature (1)..(1): Xaa can be any naturally occurring amino acid
XFSLLLAAAFAGRATALWPWPQNFQTSDQRYVLYPNNFQFQYDVSSAAQPGCSVLDEAFQRYRDLLFGSGSWPRPYLTGKRHTLEKNVLVVSVVTPGCNQLPTLESVENCIPVPFARRRLLSSFCCGN

SEQ ID NO: 6439 - protein, 331 aa, Homo Sapiens
MAFNKFNVLHWHIVDDQSFPYQSITFPELSNKGSYSLSHVYTPNDVRMVIEYARLRGIRVLPEFDTPGHTLSWGKGQKDLLTPCYSRQNKLDSFGPINPTLNTTYSFLTTFFKEISEVFPDQFIHLGGDEVEFKCWESNPKIQDFMRQKGFGTDFKKLESFYIQKVLDIIATINKGSIVWQEVFDDKAKLAPGTIVEVWKDSAYPEELSRVTASGFPVILSAPWYLDLISYGQDWRKYYKVEPLDFGGTQKQKQLFIGGEACLWGEYVDATNLTPRLWPRASAVGERLWSSKDVRDMDDAYDRLTRHRCRMVERGIAAQPLYAGYCNHENM

SEQ ID NO: 6440 - protein, 35 aa, Homo Sapiens
MDDAYDRLTRHRCRMVERGIAAQPLYAGYCNHENM

SEQ ID NO: 6441 - protein, 556 aa, Homo Sapiens
MELCGLGLPRPPMLLALLLATLLAAMLALLTQVALVVQVAEAARAPSVSAKPGPALWPLPLLVKMTPNLLHLAPENFYISHSPNSTAGPSCTLLEEAFRRYHGYIFGFYKWHHEPAEFQAKTQVQQLLVSITLQSECDAFPNISSDESYTLLVKEPVAVLKANRVWGALRGLETFSQLVYQDSYGTFTINESTIIDSPRFSHRGILIDTSRHYLPVKIILKTLDAMAFNKFNVLHWHIVDDQSFPYQSITFPELSNKGSYSLSHVYTPNDVRMVIEYARLRGIRVLPEFDTPGHTLSWGKGQKDLLTPCYSRQNKLDSFGPINPTLNTTYSFLTTFFKEISEVFPDQFIHLGGDEVEFKCWESNPKIQDFMRQKGFGTDFKKLESFYIQKVLDIIATINKGSIVWQEVFDDKAKLAPGTIVEVWKDSAYPEELSRVTASGFPVILSAPWYLDLISYGQDWRKYYKVEPLDFGGTQKQKQLFIGGEACLWGEYVDATNLTPRLWPRASAVGERLWSSKDVRDMDDAYDRLTRHRCRMVERGIAAQPLYAGYCNHENM

SEQ ID NO: 6442 - protein, 52 aa, Homo Sapiens
  misc_feature (1)..(1): Xaa can be any naturally occurring amino acid
XDATNLTPRLWPRASAVGERLWSSKDVRDMDDAYDRLTRHRCRMVEGLASFL

SEQ ID NO: 6443 - protein, 170 aa, Homo Sapiens
  misc_feature (1)..(1): Xaa can be any naturally occurring amino acid
XFGTDFKKLESFYIQKVLDIIATINKGSIVWQEVFDDKAKLAPGTIVEVWKDSAYPEELSRVTASGFPVILSAPWYLDLISYGQDWRKYYKVEPLDFGGTQKQKQLFIGGEACLWGEYVDATNLTPRLWPRASAVGERLWSSKDVRDMDDAYDRLTRHRCRMVEGLASFL

SEQ ID NO: 6444 - protein, 202 aa, Homo Sapiens
  misc_feature (1)..(1): Xaa can be any naturally occurring amino acid
XNTTYSFLTTFFKEISEVFPDQFIHLGGDEVEFKCWVLDIIATINKGSIVWQEVFDDKAKLAPGTIVEVWKDSAYPEELSRVTASGFPVILSAPWYLDLISYGQDWRKYYKVEPLDFGGTQKQKQLFIGGEACLWGEYVDATNLTPRLWPRASAVGERLWSSKDVRDMDDAYDRLTRHRCRMVERGIAAQPLYAGYCNHENM

SEQ ID NO: 6445 - protein, 70 aa, Homo Sapiens
MGEPGQSPSPRSSHGSPPTLSTLTLLLLLCGHAHSQCKILRCNADSPSYLRTCRNALIRRCIRLRWIIFL

SEQ ID NO: 6446 - protein, 93 aa, Homo Sapiens
MGEPGQSPSPRSSHGSPPTLSTLTLLLLLCGHAHSQCKILRCNAEYVSSTLSLRGGGSSGALRGGGGGGRGGGVGSGGLCRALRSYALCTRRT

SEQ ID NO: 6447 - protein, 426 aa, Homo Sapiens
MGEPGQSPSPRSSHGSPPTLSTLTLLLLLCGHAHSQCKILRCNAEYVSSTLSLRGGGSSGALRGGGGGGRGGGVGSGGLCRALRSYALCTRRTARTCRGDLAFHSAVHGIEDLMIQHNCSRQGPTAPPPPRGPALPGAGSGLPAPDPCDYEGRFSRLHGRPPGFLHCASFGDPHVRSFHHHFHTCRVQGAWPLLDNDFLFVQATSSPMALGANATATRKLTIIFKNMQECIDQKVYQAEVDNLPVAFEDGSINGGDRPGGSSLSIQTANPGNHVEIQAAYIGTTIIIRQTAGQLSFSIKVAEDVAMAFSAEQDLQLCVGGCPPSQRLSRSERNRRGAITIDTARRLCKEGLPVEDAYFHSCVFDVLISGDPNFTVAAQAALEDARAFLPDLEKLHLFPSDAGVPLSSATLLAPLLSGLFVLWLCIQ

SEQ ID NO: 6448 - protein, 313 aa, Homo Sapiens
MIQHNCSRQGPTAPPPPRGPALPGAGSGLPAPDPCDYEGRFSRLHGRPPGFLHCASFGDPHVRSFHHHFHTCRVQGAWPLLDNDFLFVQATSSPMALGANATATRKLTIIFKNMQECIDQKVYQAEVDNLPVAFEDGSINGGDRPGGSSLSIQTANPGNHVEIQAAYIGTTIIIRQTAGQLSFSIKVAEDVAMAFSAEQDLQLCVGGCPPSQRLSRSERNRRGAITIDTARRLCKEGLPVEDAYFHSCVFDVLISGDPNFTVAAQAALEDARAFLPDLEKLHLFPSDAGVPLSSATLLAPLLSGLFVLWLCIQ

SEQ ID NO: 6449 - protein, 200 aa, Homo Sapiens
MQECIDQKVYQAEVDNLPVAFEDGSINGGDRPGGSSLSIQTANPGNHVEIQAAYIGTTIIIRQTAGQLSFSIKVAEDVAMAFSAEQDLQLCVGGCPPSQRLSRSERNRRGAITIDTARRLCKEGLPVEDAYFHSCVFDVLISGDPNFTVAAQAALEDARAFLPDLEKLHLFPSDAGVPLSSATLLAPLLSGLFVLWLCIQ

SEQ ID NO: 6450 - protein, 200 aa, Homo Sapiens; identical to SEQ ID NO: 6449

SEQ ID NO: 6451 - protein, 200 aa, Homo Sapiens; identical to SEQ ID NO: 6449

SEQ ID NO: 6452 - protein, 118 aa, Homo Sapiens
MWVTKLLPALLLQHVLLHLLLLPIAIPYAEGQRKRRNTIHEFKKSAKTTLIKIDPALKIKTKKVNTADQCANRCTRNKGLPFTCKAFVFDKARKQCLWFPFNSMSSGVKKEFGHEFDL

SEQ ID NO: 6453 - protein, 141 aa, Homo Sapiens
MWVTKLLPALLLQHVLLHLLLLPIAIPYAEGQRKRRNTIHEFKKSAKTTLIKIDPALKIKTKKVNTADQCANRCTRNKGLPFTCKAFVFDKARKQCLWFPFNSMSSGVKKEFGHEFDLYENKDYIRNCIIGKGRSYKGTVS

SEQ ID NO: 6454 - protein, 161 aa, Homo Sapiens
MWVTKLLPALLLQHVLLHLLLLPIAIPYAEGQRKRRNTIHEFKKSAKTTLIKIDPALKIKTKKVNTADQCANRCTRNKGLPFTCKAFVFDKARKQCLWFPFNSMSSGVKKEFGHEFDLYENKDYIRNCIIGKGRSYKGTVSITKSGIKCQPWSSMIPHEHR

SEQ ID NO: 6455 - protein, 210 aa, Homo Sapiens
MWVTKLLPALLLQHVLLHLLLLPIAIPYAEGQRKRRNTIHEFKKSAKTTLIKIDPALKIKTKKVNTADQCANRCTRNKGLPFTCKAFVFDKARKQCLWFPFNSMSSGVKKEFGHEFDLYENKDYIRNCIIGKGRSYKGTVSITKSGIKCQPWSSMIPHEHSFLPSSYRGKDLQENYCRNPRGEEGGPWCFTSNPEVRYEVCDIPQCSEGK

SEQ ID NO: 6456 - protein, 728 aa, Homo Sapiens
MWVTKLLPALLLQHVLLHLLLLPIAIPYAEGQRKRRNTIHEFKKSAKTTLIKIDPALKIKTKKVNTADQCANRCTRNKGLPFTCKAFVFDKARKQCLWFPFNSMSSGVKKEFGHEFDLYENKDYIRNCIIGKGRSYKGTVSITKSGIKCQPWSSMIPHEHSFLPSSYRGKDLQENYCRNPRGEEGGPWCFTSNPEVRYEVCDIPQCSEVECMTCNGESYRGLMDHTESGKICQRWDHQTPHRHKFLPERYPDKGFDDNYCRNPDGQPRPWCYTLDPHTRWEYCAIKTCADNTMNDTDVPLETTECIQGQGEGYRGTVNTIWNGIPCQRWDSQYPHEHDMTPENFKCKDLRENYCRNPDGSESPWCFTTDPNIRVGYCSQIPNCDMSHGQDCYRGNGKNYMGNLSQTRSGLTCSMWDKNMEDLHRHIFWEPDASKLNENYCRNPDDDAHGPWCYTGNPLIPWDYCPISRCEGDTTPTIVNLDHPVISCAKTKQLRVVNGIPTRTNIGWMVSLRYRNKHICGGSLIKESWVLTARQCFPSRDLKDYEAWLGIHDVHGRGDEKCKQVLNVSQLVYGPEGSDLVLMKLARPAVLDDFVSTIDLPNYGCTIPEKTSCSVYGWGYTGLINYDGLLRVAHLYIMGNEKCSQHHRGKVTLNESEICAGAEKIGSGPCEGDYGGPLVCEQHKMRMVLGVIVPGRGCAIPNRPGIFVRVAYYAKWIHKIILTYKVPQS

SEQ ID NO: 6457 - protein, 290 aa, Homo Sapiens
MWVTKLLPALLLQHVLLHLLLLPIAIPYAEGQRKRRNTIHEFKKSAKTTLIKIDPALKIKTKKVNTADQCANRCTRNKGLPFTCKAFVFDKARKQCLWFPFNSMSSGVKKEFGHEFDLYENKDYIRNCIIGKGRSYKGTVSITKSGIKCQPWSSMIPHEHSFLPSSYRGKDLQENYCRNPRGEEGGPWCFTSNPEVRYEVCDIPQCSEVECMTCNGESYRGLMDHTESGKICQRWDHQTPHRHKFLPERYPDKGFDDNYCRNPDGQPRPWCYTLDPHTRWEYCAIKTCET

SEQ ID NO: 6458 - protein, 728 aa, Homo Sapiens; identical to SEQ ID NO: 6456

SEQ ID NO: 6459 - protein, 184 aa, Homo Sapiens
MWVTKLLPALLLQHVLLHLLLLPIAIPYAEGQRKRRNTIHEFKKSAKTTLIKIDPALKIKTKKVNTADQCANRCTRNKGLPFTCKAFVFDKARKQCLWFPFNSMSSGVKKEFGHEFDLYENKDYIRNCIIGKGRSYKGTVSITKSGIKCQPWSSMIPHEHSGGDDCLVESTFYSIPFWGHNSAR

SEQ ID NO: 6460 - protein, 205 aa, Homo Sapiens
MWVTKLLPALLLQHVLLHLLLLPIAIPYAEGQRKRRNTIHEFKKSAKTTLIKIDPALKIKTKKVNTADQCANRCTRNKGLPFTCKAFVFDKARKQCLWFPFNSMSSGVKKEFGHEFDLYENKDYIRNCIIGKGRSYKGTVSITKSGIKCQPWSSMIPHEHSYRGKDLQENYCRNPRGEEGGPWCFTSNPEVRYEVCDIPQCSEGK

SEQ ID NO: 6461 - protein, 285 aa, Homo Sapiens
MWVTKLLPALLLQHVLLHLLLLPIAIPYAEGQRKRRNTIHEFKKSAKTTLIKIDPALKIKTKKVNTADQCANRCTRNKGLPFTCKAFVFDKARKQCLWFPFNSMSSGVKKEFGHEFDLYENKDYIRNCIIGKGRSYKGTVSITKSGIKCQPWSSMIPHEHSYRGKDLQENYCRNPRGEEGGPWCFTSNPEVRYEVCDIPQCSEVECMTCNGESYRGLMDHTESGKICQRWDHQTPHRHKFLPERYPDKGFDDNYCRNPDGQPRPWCYTLDPHTRWEYCAIKTCET

SEQ ID NO: 6462 - protein, 723 aa, Homo Sapiens
MWVTKLLPALLLQHVLLHLLLLPIAIPYAEGQRKRRNTIHEFKKSAKTTLIKIDPALKIKTKKVNTADQCANRCTRNKGLPFTCKAFVFDKARKQCLWFPFNSMSSGVKKEFGHEFDLYENKDYIRNCIIGKGRSYKGTVSITKSGIKCQPWSSMIPHEHSYRGKDLQENYCRNPRGEEGGPWCFTSNPEVRYEVCDIPQCSEVECMTCNGESYRGLMDHTESGKICQRWDHQTPHRHKFLPERYPDKGFDDNYCRNPDGQPRPWCYTLDPHTRWEYCAIKTCADNTMNDTDVPLETTECIQGQGEGYRGTVNTIWNGIPCQRWDSQYPHEHDMTPENFKCKDLRENYCRNPDGSESPWCFTTDPNIRVGYCSQIPNCDMSHGQDCYRGNGKNYMGNLSQTRSGLTCSMWDKNMEDLHRHIFWEPDASKLNENYCRNPDDDAHGPWCYTGNPLIPWDYCPISRCEGDTTPTIVNLDHPVISCAKTKQLRVVNGIPTRTNIGWMVSLRYRNKHICGGSLIKESWVLTARQCFPSRDLKDYEAWLGIHDVHGRGDEKCKQVLNVSQLVYGPEGSDLVLMKLARPAVLDDFVSTIDLPNYGCTIPEKTSCSVYGWGYTGLINYDGLLRVAHLYIMGNEKCSQHHRGKVTLNESEICAGAEKIGSGPCEGDYGGPLVCEQHKMRMVLGVIVPGRGCAIPNRPGIFVRVAYYAKWIHKIILTYKVPQS

SEQ ID NO: 6463 - protein, 655 aa, Homo Sapiens
MGRWAWVPSPWPPPGLGPFLLLLLLLLLLPRGFQPQPGGNRTESPEPNATATPAIPTILVTSVTSETPATSAPEAEGPQSGGLPPPPRAVPSSSSPQAQALTEDGRPCRFPFRYGGRMLHACTSEGSAHRKWCATTHNYDRDRAWGYCVEATPPPGGPAALDPCASGPCLNGGSCSNTQDPQSYHCSCPRAFTGKDCGTEKCFDETRYEYLEGGDRWARVRQGHVEQCECFGGRTWCEGTRHTACLSSPCLNGGTCHLIVATGTTVCACPPGFAGRLCNIEPDERCFLGNGTGYRGVASTSASGLSCLAWNSDLLYQELHVDSVGAAALLGLGPHAYCRNPDNDERPWCYVVKDSALSWEYCRLEACESLTRVQLSPDLLATLPEPASPGRQACGRRHKKRTFLRPRIIGGSSSLPGSHPWLAAIYIGDSFCAGSLVHTCWVVSAAHCFSHSPPRDSVSVVLGQHFFNRTTDVTQTFGIEKYIPYTLYSVFNPSDHDLVLIRLKKKGDRCATRSQFVQPICLPEPGSTFPAGHKCQIAGWGHLDENVSGYSSSLREALVPLVADHKCSSPEVYGADISPNMLCAGYFDCKSDACQGDSGGPLACEKNGVAYLYGIISWGDGCGRLHKPGVYTRVANYVDWINDRIRPPRRLVAPS

SEQ ID NO: 6464 - protein, 662 aa, Homo Sapiens
MGRWAWVPSPWPPPGLGPFLLLLLLLLLLPRGFQPQPGGNRTESPEPNATATPAIPTILVTSVTSETPATSAPEAEGPQSGGLPPPPRAVPSSSSPQAQALTEDGRPCRFPFRYGGRMLHACTSEGSAHRKWCATTHNYDRDRAWGYCVEATPPPGGPAALDPCASGPCLNGGSCSNTQDPQSYHCSCPRAFTGKDCGTEKCFDETRYEYLEGGDRWARVRQGHVEQCECFGGRTWCEGTRHTACLSSPCLNGGTCHLIVATGTTVCACPPGFAGRLCNIEPDERCFLGNGTGYRGVASTSASGLSCLAWNSDLLYQELHVDSVGAAALLGLGPHAYCRNPDNDERPWCYVVKDSALSWEYCRLEACDLETEGRESLTRVQLSPDLLATLPEPASPGRQACGRRHKKRTFLRPRIIGGSSSLPGSHPWLAAIYIGDSFCAGSLVHTCWVVSAAHCFSHSPPRDSVSVVLGQHFFNRTTDVTQTFGIEKYIPYTLYSVFNPSDHDLVLIRLKKKGDRCATRSQFVQPICLPEPGSTFPAGHKCQIAGWGHLDENVSGYSSSLREALVPLVADHKCSSPEVYGADISPNMLCAGYFDCKSDACQGDSGGPLACEKNGVAYLYGIISWGDGCGRLHKPGVYTRVANYVDWINDRIRPPRRLVAPS

SEQ ID NO: 6465 - protein, 700 aa, Homo Sapiens
MLKMLSFKLLLLAVALGFFEGDAKFGERNEGSGARRRRCLNGNPPKRLKRRDRRMMSQLELLSGGEMLCGGFYPRLSCCLRSDSPGLGRLENKIFSVTNNTECGKLLEEIKCALCSPHSQSLFHSPEREVLERDLVLPLLCKDYCKEFFYTCRGHIPGFLQTTADEFCFYYARKDGGLCFPDFPRKQVRGPASNYLDQMEEYDKVEEISRKHKHNCFCIQEVVSGLRQPVGALHSGDGSQRLFILEKEGYVKILTPEGEIFKEPYLDIHKLVQSGIKGGDERGLLSLAFHPNYKKNGKLYVSYTTNQERWAIGPHDHILRVVEYTVSRKNPHQVDLRTARVFLEVAELHRKHLGGQLLFGPDGFLYIILGDGMITLDDMEEMDGLSDFTGSVLRLDVDTDMCNVPYSIPRSNPHFNSTNQPPEVFAHGLHDPGRCAVDRHPTDININLTILCSDSNGKNRSSARILQIIKGKDYESEPSLLEFKPFSNGPLVGGFVYRGCQSERLYGSYVFGDRNGNFLTLQQSPVTKQWQEKPLCLGTSGSCRGYFSGHILGFGEDELGEVYILSSSKSMTQTHNGKLYKIVDPKRPLMPEECRATVQPAQTLTSECSRLCRNGYCTPTGKCCCSPGWEGDFCRTAKCEPACRHGGVCVRPNKCLCKKGYLGPQCEQVDRNIRRVTRAGILDQIIDMTSYLLDLTSYIV

SEQ ID NO: 6466 - protein, 320 aa, Homo Sapiens
MLKMLSFKLLLLAVALGFFEGDAKFGERNEGSGARRRRCLNGNPPKRLKRRDRRMMSQLELLSGGEMLCGGFYPRLSCCLRSDSPGLGRLENKIFSVTNNTECGKLLEEIKCALCSPHSQSLFHSPEREVLERDLVLPLLCKDYCKEFFYTCRGHIPGFLQTTADEFCFYYARKDGGLCFPDFPRKQVRGPASNYLDQMEEYDKVEEISRKHKHNCFCIQEVVSGLRQPVGALHSGDGSQRLFILEKEGYVKILTPEGEIFKEPYLDIHKLVQSGIKVGFLNFIYFCAGYVNFILVLPSSLKVFLCNKRKNLAGENKGAT

SEQ ID NO: 6467 - protein, 782 aa, Homo Sapiens
MARARAGALLALWVLGAAAHPQCLDFRPPFRPTQPLRLCAQYSDFGCCDEGRDAELTRRFWALASRVDAAEWAACAGYARDLLCQECSPYAAHLYDAEDPFTPLRTVPGLCQDYCLDMWHKCRGLFRHLSTDQELWALEGNLARFCRYLSLDDTDYCFPYLLVNKNLNSNLGHVVADAKGCLQLCLEEVANGLRNPVAMVHARDGTHRFFVAEQVGLVWAYLPDRSRLGKPFLNISRVVLTSPWEGDERGFLGIAFHPSFQHNRRLYVYYSVGIRSSEWIRISEFRVSEDDENAVDHSSERIILEVKEPASNHNGGQLLFGDDGYLYIFTGDGGMAGDPFGTFGNAQNKSALLGKVLRIDVDRKERGLPYGIPPDNPFVGDPAAQPEVYALGVRNMWRCSFDRGDPSSGTGRGRLFCGDVGQNKFEEVDVVERGGNYGWRAREGFECYDRSLCANTSLNDLLPIFAYPHTVGKSVTGGYVYRGCEYPNLNGLYIFGDFMSGRLMSLQENPGTGQWQYSEICMGHGQTCEFPGLINNYYPYIISFGEDEAGELYFMSTGEPSATAPRGVVYKIIDASRRAPPGKCQIQPAQVKIRSRLIPFVPKEKFIPKTRSTPRPTARAPTRAPRRGRPTAAPPAPTPRPARPTQQPGSRRGGGRRRGRLNSASRAFRDGEVRLVRPAGLSSGSGRVEVFVGGRWGTVCDDSWNISGAAVVCRQLGFAYAVRAVKRAEFGQGGSLPILLDDVRCAGWERNLLECQHNGVGTHNCEHDEDAGVVCSHQNPDL

SEQ ID NO: 6468 - protein, 608 aa, Homo Sapiens
MARARAGALLALWVLGAAAHPQCLDFRPPFRPTQPLRLCAQYSDFGCCDEGRDAELTRRFWALASRVDAAEWAACAGYARDLLCQECSPYAAHLYDAEDPFTPLRTVPGLCQDYCLDMWHKCRGLFRHLSTDQELWALEGNLARFCRYLSLDDTDYCFPYLLVNKNLNSNLGHVVADAKGCLQLCLEEVANGLRNPVAMVHARDGTHRFFVAEQVGLVWAYLPDRSRLGKPFLNISRVVLTSPWEGDERGFLGIAFHPSFQHNRRLYVYYSVGIRSSEWIRISEFRVSEDDENAVDHSSERIILEVKEPASNHNGGQLLFGDDGYLYIFTGDGGMAGDPFGTFGNAQNKSALLGKVLRIDVDRKERGLPYGIPPDNPFVGDPAAQPEVYALGVRNMWRCSFDRGDPSSGTGRGRLFCGDVGQNKFEEVDVVERGGNYGWRAREGFECYDRSLCANTSLNDLLPIFAYPHTVGKSVTGGYVYRGCEYPNLNGLYIFGDFMSGRLMSLQENPGTGQWQYSEICMGHGQTCEFPGLINNYYPYIISFGEDEAGELYFMSTGEPSATAPRGVVYKIIDASSCKARSAMPGYVPAPSVCSSLTSQPFILQWWK

SEQ ID NO: 6469 - protein, 724 aa, Homo Sapiens
MLRTSTPNLCGGLHCRAPWLSSGILCLCLIFLLGQVGLLQGHPQCLDYGPPFQPPLHLEFCSDYESFGCCDQHKDRRIAARYWDIMEYFDLKRHELCGDYIKDILCQECSPYAAHLYDAENTQTPLRNLPGLCSDYCSAFHSNCHSAISLLTNDRGLQESHGRDGTRFCHLLDLPDKDYCFPNVLRNDYLNRHLGMVAQDPQGCLQLCLSEVANGLRNPVSMVHAGDGTHRFFVAEQVGVVWVYLPDGSRLEQPFLDLKNIVLTTPWIGDERGFLGLAFHPKFRHNRKFYIYYSCLDKKKVEKIRISEMKVSRADPNKADLKSERVILEIEEPASNHNGGQLLFGLDGYMYIFTGDGGQAGDPFGLFGNAQNKSSLLGKVLRIDVNRAGSHGKRYRVPSDNPFVSEPGAHPAIYAYGIRNMWRCAVDRGDPITRQGRGRIFCGDVGQNRFEEVDLILKGGNYGWRAKEGFACYDKKLCHNASLDDVLPIYAYGHAVGKSVTGGYVYRGCESPNLNGLYIFGDFMSGRLMALQEDRKNKKWKKQDLCLGSTTSCAFPGLISTHSKFIISFAEDEAGELYFLATSYPSAYAPRGSIYKFVDPSRRAPPGKCKYKPVPVRTKSKRIPFRPLAKTVLDLLKEQSEKAARKSSSATLASGPAQGLSEKGSSKKLASPTSSKNTLRGPGTKKKARVGPHVRQGKRRKSLKSHSGRMRPSAEQKRAGRSLP

SEQ ID NO: 6470 - protein, 543 aa, Homo Sapiens
MLGFLSRGPSMKLCMGLACVLSLWNTVSGIKGEAKKEKGMTFLPTTGKWVIRAPFQLTCLEIKMLRRKKMGHSRAALNPDLLLSGLREEERKEKGVAFLATTELPARSIDLSALNLTELVNGMLSRALKDSKKFFSLLSVTSYSSFAFHKFSVAVYNISNLKTVDPAKFPTRYCYCLNNRTNDLSDFTALLVDIIGNSTSYLTEIFKSTSILSVNQSNESDCIFICVMTGKSGRNLSDFWEIEEKYPIINYTFTSGLSGVLGAATRGTARTSKPTTKSQKTLPSTSPGHWTQSTPWASALRSSPWTETAAPSETEETLNTGRPPELPARATATWFSASHTLPALATRRVARTQWLTADRQTWASISSVPWAQTISEKKPGGSLWETRSSPPTTAGTEEAMNTTSLLAPAAEIMATPGSPSQASPTLGAFTHGTQTPSPTKATAPRYPQTGDLSAEWPFTAGEEPVLVPRPHQVSRCPQPLFKVGAMAAAPLTLAIQRLNPCLMELCQFFQQCLCMSQRSPRTEDMSSFINPYQSSTSKISWKT

SEQ ID NO: 6471 - protein, 531 aa, Homo Sapiens
MLGFLSRGPSMKLCMGLACVLSLWNTVSGIKGEAKKEKGMTFLPTTVSGLREEERKEKGVAFLATTELPARSIDLSALNLTELVNGMLSRALKDSKKFFSLLSVTSYSSFAFHKFSVAVYNISNLKTVDPAKFPTRYCYCLNNRTNDLSDFTALLVDIIGNSTSYLTEIFKSTSILSVNQSNESDCIFICVMTGKSGRNLSDFWEIEEKYPIINYTFTSGLSGVLGAATRGTARTSKPTTKSQKTLPSTSPGHWTQSTPWASALRSSPWTETAAPSETEETLNTGRPPELPARATATWFSASHTLPALATRRVARTQWLTADRQTWASISSVPWAQTISEKKPGGSLWETRSSPPTTAGTEEAMNTTSLLAPAAEIMATPGSPSQASPTLGAFTHGTQTPSPTKATAPRYPQTGDLSAEWPFTAGEEPVLVPRPHQVSRCPQPLFKVGAMAAAPLTLAIQRLNPCLMELCQFFQQCLCMSQRSPRTEDMRYCLEYYSWFLKNATYICQRVKRVSHSHTLKQKCLENICKSV

SEQ ID NO: 6472 - protein, 97 aa, Homo Sapiens
MKAQTALSFFLILITSLSGSQGIFPLAFFIYVPMNEQIVIGRLDEDIILPSSFERGSEVVIHWKYQDSYKVHSYYKGSDHLESQDPRYANRTSLFYN

SEQ ID NO: 6473 - protein, 136 aa, Homo Sapiens
MKAQTALSFFLILITSLSGSQGIFPLAFFIYVPMNEQIVIGRLDEDIILPSSFERGSEVVIHWKYQDSYKVHSYYKGSDHLESQDPRYANRTSLFYNEIQNGNASLFFRRVSLLDEGIYTCYVGTAIQVITNKVVL

SEQ ID NO: 6474 - protein, 145 aa, Homo Sapiens
MKAQTALSFFLILITSLSGSQGIFPLAFFIYVPMNEQIVIGRLDEDIILPSSFERGSEVVIHWKYQDSYKVHSYYKGSDHLESQDPRYANRTSLFYNEIQNGNASLFFRRVSLLDEGIYTCYVGTAIQVITNKVVLKVGVFLTPV

SEQ ID NO: 6475 - protein, 414 aa, Homo Sapiens
MKAQTALSFFLILITSLSGSQGIFPLAFFIYVPMNEQIVIGRLDEDIILPSSFERGSEVVIHWKYQDSYKVHSYYKGSDHLESQDPRYANRTSLFYNEIQNGNASLFFRRVSLLDEGIYTCYVGTAIQVITNKVVLKVGVFLTPVMKYEKRNTNSFLICSVLSVYPRPIITWKMDNTPISENNMEETGSLDSFSINSPLNITGSNSSYECTIENSLLKQTWTGRWTMKDGLHKMQSEHVSLSCQPVNDYFSPNQDFKVTWSRMKSGTFSVLAYYLSSSQNTIINESRFSWNKELINQSDFSMNLMDLNLSDSGEYLCNISSDEYTLLTIHTVHVEPSQETASHNKGLWILVPSAILAAFLLIWSVKCCRAQLEARRSRHPADGAQQERCCVPPGERCPSAPDNGEENVPLSGKV

SEQ ID NO: 6476 - protein, 414 aa, Homo Sapiens; identical to SEQ ID NO: 6475

SEQ ID NO: 6477 - protein, 397 aa, Homo Sapiens
MKAQTALSFFLILITSLSGSQGIFPLAFFIYVPMNEQIVIGRLDEDIILPSSFERGSEVVIHWKYQDSYKVHSYYKGSDHLESQDPRYANRTSLFYNEIQNGNASLFFRRVSLLDEGIYTCYVGTAIQVITNKVVLKVGVFLTPVMKYEKRNTNSFLICSVLSVYPRPIITWKMDNTPISENNMEETGSLDSFSINSPLNITGSNSSYECTIENSLLKQTWTGRWTMKDGLHKMQSEHVSLSCQPVNDYFSPNQDFKVTWSRMKSGTFSVLAYYLSSSQNTIINESRFSWNKELINQSDFSMNLMDLNLSDSGEYLCNISSDEYTLLTIHTVHVEPSQETASHNKGLWILVPSAILAAFLLIWSVKCCRERCCVPPGERCPSAPDNGEENVPLSGKV

SEQ ID NO: 6478 - protein, 414 aa, Homo Sapiens; identical to SEQ ID NO: 6475

SEQ ID NO: 6479 - protein, 414 aa, Homo Sapiens; identical to SEQ ID NO: 6475

SEQ ID NO: 6480 - protein, 128 aa, Homo Sapiens
MNEQIVIGRLDEDIILPSSFERGSEVVIHWKYQDSYKVHSYYKGSDHLESQDPRYANRTSLFYNEIQNGNASLFFRRVSLLDEGIYTCYVGTAIQVITNKVVLKVGVFLTPVMKYEKRNTNSFLICSV

SEQ ID NO: 6481 - protein, 350 aa, Homo Sapiens
MVMWNILKPRTHLLCMTNMFCTRHEGTDSTVFLPHSHNISEWISRRVSLLDEGIYTCYVGTAIQVITNKVVLKVGVFLTPVMKYEKRNTNSFLICSVLSVYPRPIITWKMDNTPISENNMEETGSLDSFSINSPLNITGSNSSYECTIENSLLKQTWTGRWTMKDGLHKMQSEHVSLSCQPVNDYFSPNQDFKVTWSRMKSGTFSVLAYYLSSSQNTIINESRFSWNKELINQSDFSMNLMDLNLSDSGEYLCNISSDEYTLLTIHTVHVEPSQETASHNKGLWILVPSAILAAFLLIWSVKCCRAQLEARRSRHPADGAQQERCCVPPGERCPSAPDNGEENVPLSGKV

SEQ ID NO: 6482 - protein, 328 aa, Homo Sapiens
  misc_feature (1)..(1): Xaa can be any naturally occurring amino acid
XIQNGNASLFFRRVSLLDEGIYTCYVGTAIQVITNKVVLKVGVFLTPVMKYEKRNTNSFLICSVLSVYPRPIITWKMDNTPISENNMEETGSLDSFSINSPLNITGSNSSYECTIENSLLKQTWTGRWTMKDGLHKMQSEHVSLSCQPVNDYFSPNQDFKVTWSRMKSGTFSVLAYYLSSSQNTIINESRFSWNKELINQSDFSMNLMDLNLSDSGEYLCNISSDEYTLLTIHTVHVEPSQETASHNKGLWILVPSAILAAFLLIWSVKCCRAQLEARRSRHPADGAQQERCCVPPGERCPSAPDNGEENVVRHYFLYQTIYSIKMLL

SEQ ID NO: 6483 - protein, 39 aa, Homo Sapiens
MAASLRLLGAASGLRYWSRRLRPAAGSFAAGSIFPSRCC

SEQ ID NO: 6484 - protein, 336 aa, Homo Sapiens
MAASLRLLGAASGLRYWSRRLRPAAGSFAAVCSRSVASKTPVGFIGLGNMGNPMAKNLMKHGYPLIIYDVFPDACKEFQDAGEQVVSSPADVAEKADRIITMLPTSINAIEAYSGANGILKKVKKGSLLIDSSTIDPAVSKELAKEVEKMGAVFMDAPVSGGVGAARSGNLTFMVGGVEDEFAAAQELLGCMGSNVVYCGAVGTGQAAKICNNMLLAISMIGTAEAMNLGIRLGLDPKLLAKILNMSSGRCWSSDTYNPVPGVMDGVPSANNYQGGFGTTLMAKDLGLAQDSATSTKSPILLGSLAHQIYRMMCAKGYSKKDFSSVFQFLREEETF

SEQ ID NO: 6485 - protein, 206 aa, Homo Sapiens
  misc_feature (1)..(1): Xaa can be any naturally occurring amino acid
XELPHTLKLPGLPLFPNKFLISLVLLILVSSPADVAEKADRIITMLPTSINAIEAYSGANGILKKVKKGSLLIDSSTIDPAVSKELAKEVEKMGAVFMDAPVSGGVGAARSGNLTFMVGGVEDEFAAAQELLGCMGSNVVYCGAVGTGQAAKICNNMLLAISMIGTAEAMNLGIRLGLDPKLLAKILNMSSGRCWSSDTYNPVPGV

SEQ ID NO: 6486 - protein, 163 aa, Homo Sapiens
MAAAVVLAAGLRAARRAVAATGVRGGQVRGAAGVTDGNEVAKAQQATPGGAAPTIFSRILDKSLPADILYEDQQCLVFRDVAPQAPVHFLVIPKKPIPRISQAEEEDQQLLGHLLLVAKQTAKAEGLGDGYRLVINDGKLGAQSVYHLHIHVLGGRQLQWPPG

SEQ ID NO: 6487 - protein, 365 aa, Homo Sapiens
MAVMAPRTLLLLLSGALALTQTWAGSHSMRYFFTSVSRPGRGEPRFIAVGYVDDTQFVRFDSDAASQRMEPRAPWIEQEGPEYWDQETRNVKAQSQTDRVDLGTLRGYYNQSEAGSHTIQIMYGCDVGSDGRFLRGYRQDAYDGKDYIALNEDLRSWTAADMAAQITKRKWEAAHEAEQLRAYLDGTCVEWLRRYLENGKETLQRTDPPKTHMTHHPISDHEATLRCWALGFYPAEITLTWQRDGEDQTQDTELVETRPAGDGTFQKWAAVVVPSGEEQRYTCHVQHEGLPKPLTLRWELSSQPTIPIVGIIAGLVLLGAVITGAVVAAVMWRRKSSDRKGGSYTQAASSDSAQGSDVSLTACKV

SEQ ID NO: 6488 - protein, 299 aa, Homo Sapiens
MAVMAPRTLLLLLSGALALTQTWAGSHSMRYFFTSVSRPGRGEPRFIAVGYVDDTQFVRFDSDAASQRMEPRAPWIEQEGPEYWDQETRNVKAQSQTDRVDLGTLRGYYNQSEAGSHTIQIMYGCDVGSDGRFLRGYRQDAYDGKDYIALNEDLRSWTAADMAAQITKRKWEAAHEAEQLRAYLDGTCVEWLRRYLENGKETLQRTDPPKTHMTHHPISDHEATLRCWALGFYPAEITLTWQRDGEDQTQDTELVETRPAGDGTFQKWAAVVVPSGEEQRYTCHVQHEGLPKPLTLRWV

SEQ ID NO: 6489 - protein, 365 aa, Homo Sapiens; identical to SEQ ID NO: 6487

SEQ ID NO: 6490 - protein, 371 aa, Homo Sapiens
MAVMAPRTLLLLLSGALALTQTWAGSHSMRYFFTSVSRPGRGEPRFIAVGYVDDTQFVRFDSDAASQRMEPRAPWIEQEGPEYWDQETRNVKAQSQTDRVDLGTLRGYYNQSEAGSHTIQIMYGCDVGSDGRFLRGYRQDAYDGKDYIALNEDLRSWTAADMAAQITKRKWEAAHEAEQLRAYLDGTCVEWLRRYLENGKETLQRTDPPKTHMTHHPISDHEATLRCWALGFYPAEITLTWQRDGEDQTQDTELVETRPAGDGTFQKWAAVVVPSGEEQRYTCHVQHEGLPKPLTLRWELSSQPTIPIVGIIAGLVLLGAVITGAVVAAVMWRRKSSGGEGVKDRKGGSYTQAASSDSAQGSDVSLTACKV

SEQ ID NO: 6491 - protein, 325 aa, Homo Sapiens
MAVMAPRTLLLLLSGALALTQTWAGSHSMRYFFTSVSRPGRGEPRFIAVGYVDDTQFVRFDSDAASQRMEPRAPWIEQEGPEYWDQETRNVKAQSQTDRVDLGTLRGYYNQSEAGSHTIQIMYGCDVGSDGRFLRGYRQDAYDGKDYIALNEDLRSWTAADMAAQITKRKWEAAHEAEQLRAYLDGTCVEWLRRYLENGKETLQRTDPPKTHMTHHPISDHEATLRCWALGFYPAEITLTWQRDGEDQTQDTELVETRPAGDGTFQKWAAVVVPSGEEQRYTCHVQHEGLPKPLTLRWDRKGGSYTQAASSDSAQGSDVSLTACK

SEQ ID NO: 6492 - protein, 131 aa, Homo Sapiens
MRVMAPRALLLLLSGGLALTETWACSHSMRYFDTAVSRPGRGEPRFISVGYVDDTQFVRFDSDAASPRGEPRAPWVEQEGPEYWDRETQKYKRQAQADRVSLRNLRGYYNQSEDEDVWLRPGARRAPPPRV

SEQ ID NO: 6493 - protein, 366 aa, Homo Sapiens
MRVMAPRALLLLLSGGLALTETWACSHSMRYFDTAVSRPGRGEPRFISVGYVDDTQFVRFDSDAASPRGEPRAPWVEQEGPEYWDRETQKYKRQAQADRVSLRNLRGYYNQSEDGSHTLQRMSGCDLGPDGRLLRGYDQSAYDGKDYIALNEDLRSWTAADTAAQITQRKLEAARAAEQLRAYLEGTCVEWLRRYLENGKETLQRAEPPKTHVTHHPLSDHEATLRCWALGFYPAEITLTWQRDGEDQTQDTELVETRPAGDGTFQKWAAVVVPSGQEQRYTCHMQHEGLQEPLTLSWEPSSQPTIPIMGIVAGLAVLVVLAVLGAVVTAMMCRRKSSGGKGGSCSQAACSNSAQGSDESLITCKA

SEQ ID NO: 6494 - protein, 372 aa, Homo Sapiens
MRVMAPRALLLLLSGGLALTETWACSHSMRYFDTAVSRPGRGEPRFISVGYVDDTQFVRFDSDAASPRGEPRAPWVEQEGPEYWDRETQKYKRQAQADRVSLRNLRGYYNQSEDGSHTLQRMSGCDLGPDGRLLRGYDQSAYDGKDYIALNEDLRSWTAADTAAQITQRKLEAARAAEQLRAYLEGTCVEWLRRYLENGKETLQRAEPPKTHVTHHPLSDHEATLRCWALGFYPAEITLTWQRDGEDQTQDTELVETRPAGDGTFQKWAAVVVPSGQEQRYTCHMQHEGLQEPLTLSWEPSSQPTIPIMGIVAGLAVLVVLAVLGAVVTAMMCRRKSSGHFLPTGGKGGSCSQAACSNSAQGSDESLITCKA

SEQ ID NO: 6495 - protein, 244 aa, Homo Sapiens
MSGCDLGPDGRLLRGYDQSAYDGKDYIALNEDLRSWTAADTAAQITQRKLEAARAAEQLRAYLEGTCVEWLRRYLENGKETLQRAEPPKTHVTHHPLSDHEATLRCWALGFYPAEITLTWQRDGEDQTQDTELVETRPAGDGTFQKWAAVVVPSGQEQRYTCHMQHEGLQEPLTLSWEPSSQPTIPIMGIVAGLAVLVVLAVLGAVVTAMMCRRKSSGGKGGSCSQAACSNSAQGSDESLITCK

SEQ ID NO: 6496 - protein, 261 aa, Homo Sapiens
  misc_feature (1)..(1): Xaa can be any naturally occurring amino acid
XRVMAPRALLLLLSGGLALTETWACSHSMRYFDTAVSRPGRGEPRFISVGYVDDTQFVRFDSDAASPRGEPRAPWVEQEGPEYWDRETQKYKRQAQADRVSLRNLRGYYNQSEDGSHTLQRMSGCDLGPDGRLLRGYDQSAYDGKDYIALNEDLRSWTAADTAAQITQRKLEAARAAEQLRAYLEGTCVEWLRRYLENGKETLQRAEPPKTHVTHHPLSDHEASRRWNLPEVGSCGGAFWTRAEIHVPYAARGAARAPHPE

SEQ ID NO: 6497 - protein, 250 aa, Homo Sapiens
MALRAGLVLGFHTLMTLLSPQEAGATKADHMGSYGPAFYQSYGASGQFTHEFDEEQLFSVDLKKSEAVWRLPEFGDFARFDPQGGLAGIAAIKAHLDILVERSNRSRAINVPPRVTVLPKSRVELGQPNILICIVDNIFPPVINITWLRNGQTVTEGVAQTSFYSQPDHLFRKFHYLPFVPSAEDVYDCQVEHWGLDAPLLRHWELQVPIPPPDAMETLVCALGLAIGLVGFLVGTVLIIMGTYVSSVPR

SEQ ID NO: 6498 - protein, 86 aa, Homo Sapiens
MALRAGLVLGFHTLMTLLSPQEAGATKGRAGRHRRNQSPSGHPGGALQPQQSHQRASTGDRAPQVSGGAGPAQHPHLHRGQHLPPC

SEQ ID NO: 6499 - protein, 23 aa, Homo Sapiens
MRPEDRMFHIRAVILRALSLAFL

SEQ ID NO: 6500 - protein, 209 aa, Homo Sapiens
MRPEDRMFHIRAVILRALSLAFLLSLRGAGAIKADHVSTYAAFVQTHRPTGEFMFEFDEDEMFYVDLDKKETVWHLEEFGQAFSFEAQGGLANIAILNNNLNTLIQRSNHTQATNDPPEVTVFPKEPVELGQPNTLICHIDKFFPPVLNVTWLCNGELVTEGVAESLFLPRTDYSFHKFHYLTFVPSAEDFYDCRVEHWGLDQPLLKHW

SEQ ID NO: 6501 - protein, 260 aa, Homo Sapiens
MRPEDRMFHIRAVILRALSLAFLLSLRGAGAIKADHVSTYAAFVQTHRPTGEFMFEFDEDEMFYVDLDKKETVWHLEEFGQAFSFEAQGGLANIAILNNNLNTLIQRSNHTQATNDPPEVTVFPKEPVELGQPNTLICHIDKFFPPVLNVTWLCNGELVTEGVAESLFLPRTDYSFHKFHYLTFVPSAEDFYDCRVEHWGLDQPLLKHWEAQEPIQMPETTETVLCALGLVLGLVGIIVGTVLIIKSLRSGHDPRAQGTL

SEQ ID NO: 6502 - protein, 128 aa, Homo Sapiens
  misc_feature (1)..(1): Xaa can be any naturally occurring amino acid
XNTLICHIDKFFPPVLNVTWLCNGELVTEGVAESLFLPRTDYSFHKFHYLTFVPSAEDFYDCRVEHWGLDQPLLKHWEAQEPIQMPETTETVLCALGLVLGLVGIIVGTVLIIKSLRSGHDPRAQGTL

SEQ ID NO: 6503 - protein, 24 aa, Homo Sapiens
MILNKALLLGALALTTVMSPCGGE

SEQ ID NO: 6504 - protein, 255 aa, Homo Sapiens
MILNKALLLGALALTTVMSPCGGEDIVADHVASCGVNLYQFYGPSGQYTHEFDGDEQFYVDLERKETAWRWPEFSKFGGFDPQGALRNMAVAKHNLNIMIKRYNSTAATNEVPEVTVFSKSPVTLGQPNTLICLVDNIFPPVVNITWLSNGQSVTEGVSETSFLSKSDHSFFKISYLTFLPSADEIYDCKVEHWGLDQPLLKHWEPEIPAPMSELTETVVCALGLSVGLMGIVVGTVFIIQGLRSVGASRHQGPL

SEQ ID NO: 6505 - protein, 255 aa, Homo Sapiens; identical to SEQ ID NO: 6504

SEQ ID NO: 6506 - protein, 255 aa, Homo Sapiens; identical to SEQ ID NO: 6504

SEQ ID NO: 6507 - protein, 214 aa, Homo Sapiens
MILNKALLLGALALTTVMSPCGGEDIVADHVASCGVNLYQFYGPSGQYTHEFDGDEQFYVDLERKETAWRWPEFSKFGGFDPQGALRNMAVAKHNLNIMIKRYNSTAATNEVPEVTVFSKSPVTLGQPNTLICLVDNIFPPVVNITWLSNGQSVTEGVSETSFLSKSDHSFFKISYLTFLPSADEIYDCKVEHWGLDQPLLKHWGASPSTGAEE

SEQ ID NO: 6508 - protein, 53 aa, Homo Sapiens
MILNKALLLGALALTTVMSPCGGEDIVGSISDSLLLYRDGQWVCKTKVEKSDS

SEQ ID NO: 6509 - protein, 136 aa, Homo Sapiens
MSWKKALRIPGDLRVATVTLMLAMLSSLLAEGRDSPEDFVFQFKGMCYFTNGTERVRLVTRYIYNREEYARFDSDVGVYRAVTPQGRPDAEYWNSQKEVLEGTRAELDTVCRHNYEVAFRGILQRRGMVTGLSRSW

SEQ ID NO: 6510 - protein, 269 aa, Homo Sapiens
MSWKKALRIPGDLRVATVTLMLAMLSSLLAEGRDSPEDFVFQFKGMCYFTNGTERVRLVTRYIYNREEYARFDSDVGVYRAVTPQGRPDAEYWNSQKEVLEGTRAELDTVCRHNYEVAFRGILQRRVEPTVTISPSRTEALNHHNLLVCSVTDFYPGQIKVRWFRNDQEETAGVVSTPLIRNGDWTFQILVMLEMTPQRGDVYTCHVEHPSLQSPITVEWRAQSESAQSKMLSGVGGFVLGLIFLGLGLIIRQRSQKGPQGPPPAGLLH

SEQ ID NO: 6511 - protein, 261 aa, Homo Sapiens
MSWKKALRIPGDLRVATVTLMLAMLSSLLAEGRDSPEDFVFQFKGMCYFTNGTERVRLVTRYIYNREEYARFDSDVGVYRAVTPQGRPDAEYWNSQKEVLEGTRAELDTVCRHNYEVAFRGILQRRVEPTVTISPSRTEALNHHNLLVCSVTDFYPGQIKVRWFRNDQEETAGVVSTPLIRNGDWTFQILVMLEMTPQRGDVYTCHVEHPSLQSPITVEWRAQSESAQSKMLSGVGGFVLGLIFLGLGLIIRQRSQKGLLH

SEQ ID NO: 6512 - protein, 261 aa, Homo Sapiens; identical to SEQ ID NO: 6511

SEQ ID NO: 6513 - protein, 224 aa, Homo Sapiens
MSWKKALRIPGDLRVATVTLMLAMLSSLLAEGRDSPEDFVFQFKGMCYFTNGTERVRLVTRYIYNREEYARFDSDVGVYRAVTPQGRPDAEYWNSQKEVLEGTRAELDTVCRHNYEVAFRGILQRRVEPTVTISPSRTEALNHHNLLVCSVTDFYPGQIKVRWFRNDQEETAGVVSTPLIRNGDWTFQILVMLEMTPQRGDVYTCHVEHPSLQSPITVEWRLLH

SEQ ID NO: 6514 - protein, 134 aa, Homo Sapiens
MSWKKALRIPGDLRVATVTLMLAMLSSLLAEGRDSPVEPTVTISPSRTEALNHHNLLVCSVTDFYPGQIKVRWFRNDQEETAGVVSTPLIRNGDWTFQILVMLEMTPQRGDVYTCHVEHPSLQSPITVEWRLLH

SEQ ID NO: 6515 - protein, 275 aa, Homo Sapiens
MALQIPGGFWAAAVTVMLVMLSTPVAEARDFPKDFLVQFKGMCYFTNGTERVRGVARYIYNREEYGRFDSDVGEFQAVTELGRSIEDWNNYKDFLEQERAAVDKVCRHNYEAELRTTLQRQVEPTVTISPSRTEALNHHNLLVCSVTDFYPAQIKVRWFRNDQEETAGVVSTSLIRNGDWTFQILVMLEITPQRGDIYTCQVEHPSLQSPITVEWRAQSESAQSKMLSGIGGFVLGLIFLGLGLIIRHRGQKGPRGPPPAGNISAMIQSGERAQA

SEQ ID NO: 6516 - protein, 264 aa, Homo Sapiens
MALQIPGGFWAAAVTVMLVMLSTPVAEARDFPKDFLVQFKGMCYFTNGTERVRGVARYIYNREEYGRFDSDVGEFQAVTELGRSIEDWNNYKDFLEQERAAVDKVCRHNYEAELRTTLQRQVEPTVTISPSRTEALNHHNLLVCSVTDFYPAQIKVRWFRNDQEETAGVVSTSLIRNGDWTFQILVMLEITPQRGDIYTCQVEHPSLQSPITVEWRAQSESAQSKMLSGIGGFVLGLIFLGLGLIIRHRGQKGPRGPPPAGLLH

SEQ ID NO: 6517 - protein, 227 aa, Homo Sapiens
MALQIPGGFWAAAVTVMLVMLSTPVAEARDFPKDFLVQFKGMCYFTNGTERVRGVARYIYNREEYGRFDSDVGEFQAVTELGRSIEDWNNYKDFLEQERAAVDKVCRHNYEAELRTTLQRQVEPTVTISPSRTEALNHHNLLVCSVTDFYPAQIKVRWFRNDQEETAGVVSTSLIRNGDWTFQILVMLEITPQRGDIYTCQVEHPSLQSPITVEWRPRGPPPAGLLH

SEQ ID NO: 6518 - protein, 218 aa, Homo Sapiens
  misc_feature (1)..(1): Xaa can be any naturally occurring amino acid
XLQIPGGFWAAAVTVMLVMLSTPVAEARDFPKDFLVQFKGMCYFTNGTERVRGVARYIYNREEYGRFDSDVGEFQAVTELGRSIEDWNNYKDFLEQERAAVDKVCRHNYEAELRTTLQRQVEPTVTISPSRTEALNHHNLLVCSVTDFYPAQIKVRWFRNDQEETAGVVSTSLIRNGDWTFQILVMLEITPQRGDIYTCQVEHPSLQSPITVEWRLLH

SEQ ID NO: 6519 - protein, 240 aa, Homo Sapiens
AIGSFHCGCEPGYQLKGRKCMDVNECRQNVCRPDQHCKNTRGGYKCIDLCPNGMTKAENGTCIDIDECKDGTHQCRYNQICENTRGSYRCVCPRGYRSQGVGRPCMDIDECENTDACQHECKNTFGSYQCICPPGYQLTHNGKTCQDIDECLEQNVHCGPNRMCFNMRGSYQCIDTPCPPNYQRDPVSGFCLKNCPPNDLECALSPYALEYKLVSLPFGIATNQDLIRLVAYTQDGVMHP

SEQ ID NO: 6520 - protein, 5635 aa, Homo Sapiens
MISWEVVHTVFLFALLYSSLAQDASPQSEIRAEEIPEGASTLAFVFDVTGSMYDDLVQVIEGASKILETSLKRPKRPLFNFALVPFHDPEIGPVTITTDPKKFQYELRELYVQGGGDCPEMSIGAIKIALEISLPGSFIYVFTDARSKDYRLTHEVLQLIQQKQSQVVFVLTGDCDDRTHIGYKVYEEIASTSSGQVFHLDKKQVNEVLKWVEEAVQASKVHLLSTDHLEQAVNTWRIPFDPSLKEVTVSLSGPSPMIEIRNPLGKLIKKGFGLHELLNIHNSAKVVNVKEPEAGMWTVKTSSSGRHSVRITGLSTIDFRAGFSRKPTLDFKKTVSRPVQGIPTYVLLNTSGISTPARIDLLELLSISGSSLKTIPVKYYPHRKPYGIWNISDFVPPNEAFFLKVTGYDKDDYLFQRVSSVSFSSIVPDAPKVTMPEKTPGYYLQPGQIPCSVDSLLPFTLSFVRNGVTLGVDQYLKESASVNLDIAKVTLSDEGFYECIAVSSAGTGRAQTFFDVSEPPPVIQVPNNVTVTPGERAVLTCLIISAVDYNLTWQRNDRDVRLAEPARIRTLANLSLELKSVKFNDAGEYHCMVSSEGGSSAASVFLTVQEPPKVTVMPKNQSFTGGSEVSIMCSATGYPKPKIAWTVNDMFIVGSHRYRMTSDGTLFIKNAAPKDAGIYGCLASNSAGTDKQNSTLRYIEAPKLMVVQSELLVALGDITVMECKTSGIPPPQVKWFKGDLELRPSTFLIIDPLLGLLKIQETQDLDAGDYTCVAINEAGRATGKITLDVGSPPVFIQEPADVSMEIGSNVTLPCYVQGYPEPTIKWRRLDNMPIFSRPFSVSSISQLRTGALFILNLWASDKGTYICEAENQFGKIQSETTVTVTGLVAPLIGISPSVANVIEGQQLTLPCTLLAGNPIPERRWIKNSAMLLQNPYITVRSDGSLHIERVQLQDGGEYTCVASNVAGTNNKTTSVVVHVLPTIQHGQQILSTIEGIPVTLPCKASGNPKPSVIWSKKGELISTSSAKFSAGADGSLYVVSPGGEESGEYVCTATNTAGYAKRKVQLTVYVRPRVFGDQRGLSQDKPVEISVLAGEEVTLPCEVKSLPPPIITWAKETQLISPFSPRHTFLPSGSMKITETRTSDSGMYLCVATNIAGNVTQAVKLNVHVPPKIQRGPKHLKVQVGQRVDIPCNAQGTPLPVITWSKGGSTMLVDGEHHVSNPDGTLSIDQATPSDAGIYTCVATNIAGTDETEITLHVQEPPTVEDLEPPYNTTFQERVANQRIEFPCPAKGTPKPTIKWLHNGRELTGREPGISILEDGTLLVIASVTPYDNGEYICVAVNEAGTTERKYNLKVHVPPVIKDKEQVTNVSVLLNQLTNLFCEVEGTPSPIIMWYKDNVQVTESSTIQTVNNGKILKLFRATPEDAGRYSCKAINIAGTSQKYFNIDVLVPPTIIGTNFPNEVSVVLNRDVALECQVKGTPFPDIHWFKDGKPLFLGDPNVELLDRGQVLHLKNARRNDKGRYQCTVSNAAGKQAKDIKLTIYIPPSIKGGNVTTDISVLINSLIKLECETRGLPMPAITWYKDGQPIMSSSQALYIDKGQYLHIPRAQVSDSATYTCHVANVAGTAEKSFHVDVYVPPMIEGNLATPLNKQVVIAHSLTLECKAAGNPSPILTWLKDGVPVKANDNIRIEAGGKKLEIMSAQEIDRGQYICVATSVAGEKEIKYEVDVLVPPAIEGGDETSYFIVMVNNLLELDCHVTGSPPPTIMWLKDGQLIDERDGFKILLNGRKLVIAQAQVSNTGLYRCMAANTAGDHKKEFEVTVHVPPTIKSSGLSERVVVKYKPVALQCIANGIPNPSITWLKDDQPVNTAQGNLKIQSSGRVLQIAKTLLEDAGRYTCVATNAAGETQQHIQLHVHEPPSLEDAGKMLNETVLVSNPVQLECKAAGNPVPVITWYKDNRLLSGSTSMTFLNRGQIIDIESAQISDAGIYKCVAINSAGATELFYSLQVHVAPSISGSNNMVAVVVNNPVRLECEARGIPAPSLTWLKDGSPVSSFSNGLQVLSGGRILALTSAQISDTGRYTCVAVNAAGEKQRDIDLRVYVPPNIMGEEQNVSVLISQAVELLCQSDAIPPPTLTWLKDGHPLLKKPGLSISENRSVLKIEDAQVQDTGRYTCEATNVAGKTEKNYNVNIWVPPNIGGSDELTQLTVIEGNLISLLCESSGIPPPNLIWKKKGSPVLTDSMGRVRILSGGRQLQISIAEKSDAALYSCVASNVAGTAKKEYNLQVYIRPTITNSGSHPTEIIVTRGKSISLECEVQGIPPPTVTWMKDGHPLIKAKGVEILDEGHILQLKNIHVSDTGRYVCVAVNVAGMTDKKYDLSVHAPPSIIGNHRSPENISVVEKNSVSLTCEASGIPLPSITWFKDGWPVSLSNSVRILSGGRMLRLMQTTMEDAGQYTCVVRNAAGEERKIFGLSVLVPPHIVGENTLEDVKVKEKQSVTLTCEVTGNPVPEITWHKDGQPLQEDEAHHIISGGRFLQITNVQVPHTGRYTCLASSPAGHKSRSFSLNVFVSPTIAGVGSDGNPEDVTVILNSPTSLVCEAYSYPPATITWFKDGTPLESNRNIRILPGGRTLQILNAQEDNAGRYSCVATNEAGEMIKHYEVKVYIPPIINKGDLWGPGLSPKEVKIKVNNTLTLECEAYAIPSASLSWYKDGQPLKSDDHVNIAANGHTLQIKEAQISDTGRYTCVASNIAGEDELDFDVNIQVPPSFQKLWEIGNMLDTGRNGEAKDVIINNPISLYCETNAAPPPTLTWYKDGHPLTSSDKVLILPGGRVLQIPRAKVEDAGRYTCVAVNEAGEDSLQYDVRVLVPPIIKGANSDLPEEVTVLVNKSALIECLSSGSPAPRNSWQKDGQPLLEDDHHKFLSNGRILQILNTQITDIGRYVCVAENTAGSAKKYFNLNVHVPPSVIGPKSENLTVVVNNFISLTCEVSGFPPPDLSWLKNEQPIKLNTNTLIVPGGRTLQIIRAKVSDGGEYTCIAINQAGESKKKFSLTVYVPPSIKDHDSESLSVVNVREGTSVSLECESNAVPPPVITWYKNGRMITESTHVEILADGQMLHIKKAEVSDTGQYVCRAINVAGRDDKNFHLNVYVPPSIEGPEREVIVETISNPVTLTCDATGIPPPTIAWLKNHKRIENSDSLEVRILSGGSKLQIARSQHSDSGNYTCIASNMEGKAQKYYFLSIQVPPSVAGAEIPSDVSVLLGENVELVCNANGIPTPLIQWLKDGKPIASGETERIRVSANGSTLNIYGALTSDTGKYTCVATNPAGEEDRIFNLNVYVTPTIRGNKDEAEKLMTLVDTSINIECRATGTPPPQINWLKNGLPLPLSSHIRLLAAGQVIRIVRAQVSDVAVYTCVASNRAGVDNKHYNLQVFAPPNMDNSMGTEEITVLKGSSTSMACITDGTPAPSMAWLRDGQPLGLDAHLTVSTHGMVLQLLKAETEDSGKYTCIASNEAGEVSKHFILKVLEPPHINGSEEHEEISVIVNNPLELTCIASGIPAPKMTWMKDGRPLPQTDQVQTLGGGEVLRISTAQVEDTGRYTCLASSPAGDDDKEYLVRVHVPPNIAGTDEPRDITVLRNRQVTLECKSDAVPPPVITWLRNGERLQATPRVRILSGGRYLQINNADLGDTANYTCVASNIAGKTTREFILTVNVPPNIKGGPQSLVILLNKSTVLECIAEGVPTPRITWRKDGAVLAGNHARYSILENGFLHIQSAHVTDTGRYLCMATNAAGTDRRRIDLQVHVPPSIAPGPTNMTVIVNVQTTLACEATGIPKPSINWRKNGHLLNVDQNQNSYRLLSSGSLVIISPSVDDTATYECTVTNGAGDDKRTVDLTVQVPPSIADEPTDFLVTKHAPAVITCTASGVPFPSIHWTKNGIRLLPRGDGYRILSSGAIEILATQLNHAGRYTCVARNAAGSAHRHVTLHVHEPPVIQPQPSELHVILNNPILLPCEATGTPSPFITWQKEGINVNTSGRNHAVLPSGGLQISRAVREDAGTYMCVAQNPAGTALGKIKLNVQVPPVISPHLKEYVIAVDKPITLSCEADGLPPPDITWHKDGRAIVESIRQRVLSSGSLQIAFVQPGDAGHYTCMAANVAGSSSTSTKLTVHVPPRIRSTEGHYTVNENSQAILPCVADGIPTPAINWKKDNVLLANLLGKYTAEPYGELILENVVLEDSGFYTCVANNAAGEDTHTVSLTVHVLPTFTELPGDVSLNKGEQLRLSCKATGIPLPKLTWTFNNNIIPAHFDSVNGHSELVIERVSKEDSGTYVCTAENSVGFVKAIGFVYVKEPPVFKGDYPSNWIEPLGGNAILNCEVKGDPTPTIQWNRKGVDIEISHRIRQLGNGSLAIYGTVNEDAGDYTCVATNEAGVVERSMSLTLQSPPIITLEPVETVINAGGKIILNCQATGEPQPTITWSRQGHSISWDDRVNVLSNNSLYIADAQKEDTSEFECVARNLMGSVLVRVPVIVQVHGGFSQWSAWRACSVTCGKGIQKRSRLCNQPLPANGGKPCQGSDLEMRNCQNKPCPVDGSWSEWSLWEECTRSCGRGNQTRTRTCNNPSVQHGGRPCEGNAVEIIMCNIRPCPVHGAWSAWQPWGTCSESCGKGTQTRARLCNNPPPAFGGSYCDGAETQMQVCNERNCPIHGKWATWASWSACSVSCGGGARQRTRGCSDPVPQYGGRKCEGSDVQSDFCNSDPCPTHGNWSPWSGWGTCSRTCNGGQMRRYRTCDNPPPSNGGRACGGPDSQIQRCNTDMCPVDGSWGSWHSWSQCSASCGGGEKTRKRLCDHPVPVKGGRPCPGDTTQVTRCNVQACPGGPQRARGSVIGNINDVEFGIAFLNATITDSPNSDTRIIRAKITNVPRSLGSAMRKIVSILNPIYWTTAKEIGEAVNGFTLTNAVFKRETQVEFATGEILQMSHIARGLDSDGSLLLDIVVSGYVLQLQSPAEVTVKDYTEDYIQTGPGQLYAYSTRLFTIDGISIPYTWNHTVFYDQAQGRMPFLVETLHASSVESDYNQIEETLGFKIHASISKGDRSNQCPSGFTLDSVGPFCADEDECAAGNPCSHSCHNAMGTYYCSCPKGLTIAADGRTCQDIDECALGRHTCHAGQDCDNTIGSYRCVVRCGSGFRRTSDGLSCQDINECQESSPCHQRCFNAIGSFHCGCEPGYQLKGRKCMDVNECRQNVCRPDQHCKNTRGGYKCIDLCPNGMTKAENGTCIDIDECKDGTHQCRYNQICENTRGSYRCVCPRGYRSQGVGRPCMDINECEQVPKPCAHQCSNTPGSFKCICPPGQHLLGDGKSCAGLERLPNYGTQYSSYNLARFSPVRNNYQPQQHYRQYSHLYSSYSEYRNSRTSLSRTRRTIRKTCPEGSEASHDTCVDIDECENTDACQHECKNTFGSYQCICPPGYQLTHNGKTCQDIDECLEQNVHCGPNRMCFNMRGSYQCIDTPCPPNYQRDPVSGFCLKNCPPNDLECALSPYALEYKLVSLPFGIATNQDLIRLVAYTQDGVMHPRTTFLMVDEEQTVPFALRDENLKGVVYTTRPLREAETYRMRVRASSYSANGTIEYQTTFIVYIAVSAYPY

SEQ ID NO: 6521 - protein, 595 aa, Homo Sapiens
MILAPEGSSSGKLRIPAAQERDAGTYTCRAVNELGDASAEIQLAVGHAPQLTELPRDVTVELGRSALLACRATGRPPPTVTWRRGDGQPLGLRLGAGRGSRSRQPDSGVLFFESVAPEDQAPYVCEARNVFGKVQAEARLIVTGHAPPQIASSAPTVRVLEGQPVSLPCIVLAGRPLPERHWLKDGRPLPPGSRHSIRADGSLHLDRALQEHAGRYSCVATNTAGSQHRDVELVVQVPPRIHPTATHHITNEGVAASLPCVASGVPAPTITWTKETNALTSRGPHYNVSKEGTLLIAQPSAQDAGAYVCTATNTVGFSSQEMRLSVNTKPRIHMNGSRNADVPLQVTAKAGEEVTLDCEAKGSPPPLVTWTKDSRPVPPITNRYGLLPSGSLRLAQVQVGDSGHYECTASNPAGSASHRYVLGVQGRTSWQPQSLPVPHHPACLSGLSVPLLQPTPRSVRLCHLSLRAPLPPPFATPTSCLSQACLSSSTLSLHLSPYPLRGPGDAVQRPPTTQGRAQWGLGFGRTGVRGEPMKVGLRGSLPGTRGPAGSPGCGDGKRPVRCHRAPPAGSILMPPRGPSEPLLPPLPSTRHFVHL

SEQ ID NO: 6522 - protein, 5059 aa, Homo Sapiens
MPGAPLLRLLTAVSAAVAVAVAGAPGTVMPPTTGDATLAFVFDVTGSMWDELMQVIDGASRILERSLSRRSQAIANYALVPFHDPDIGPVTLTADPTVFQRELRELYVQGGGDCPEMSVGAIKAAVEVANPGSFIYVFSDARAKDYHKKEELLRLLQLKQSQVVFVLTGDCGDRTHPGYLAYEEIAATSSGQVFHLDKQQVTEVLKWVESAIQASKVHLLSTDHEEEGEHTWRLPFDPSLKEVTISLSGPGPEIEVQDPLGRILQEDEGLNVLLNIPDSAKVVAFKPEHPGLWSIKVYSSGRHSVRITGVSNIDFRAGFSTQPLLDLNHTLEWPLQGVPISLVINSTGLKAPGRLDSVELAQSSGKPLLTLPTKPLSNGSTHQLWGGPPFHTPKERFYLKVKGKDHEGNPLLRVSGVSYSGVAPGAPLVSMAPRIHGYLHQPLLVSCSVHSALPFRLQLRRGEARLGEERHFQESGNSSWEILRASKAEEGTYECTAVSRAGTGRAKAQIVVTDPPPQLVPAPNVTVSPGETAVLSCRVLGEAPYNLTWVRDWRVLPASTGRVAQLADLSLEISGIIPTDGGRYQCVASNANGVTRASVWLLVREAPQVSIHTSSQHFSQGVEVKVSCSASGYPTPHISWSRESQALQEDSRIHVDAQGTLIIQGVAPEDAGNYSCQATNEVGTDQETVTLYYTDPPSVSAVNAVVLVAVGEEAVLVCEASGVPPPRVIWYRGGLEMILAPEGSSSGKLRIPAAQERDAGTYTCRAVNELGDASAEIQLAVGHAPQLTELPRDVTVELGRSALLACRATGRPPPTVTWRRGDGQPLGLRLGAGRGSRSRQPDSGVLFFESVAPEDQAPYVCEARNVFGKVQAEARLIVTGHAPPQIASSAPTVRVLEGQPVSLPCIVLAGRPLPERHWLKDGRPLPPGSRHSIRADGSLHLDRALQEHAGRYSCVATNTAGSQHRDVELVVQVPPRIHPTATHHITNEGVAASLPCVASGVPAPTITWTKETNALTSRGPHYNVSKEGTLLIAQPSAQDAGAYVCTATNTVGFSSQEMRLSVNTKPRIHMNGSRNADVPLQVTAKAGEEVTLDCEAKGSPPPLVTWTKDSRPVPPITNRYGLLPSGSLRLAQVQVGDSGHYECTASNPAGSASHRYVLGVQVPPQVQPGPRVLKVLVGEALDLNCVAEGNPEPQLSWSKDGVVLQGRGPQGSVHFAAIRTSDAGRYRCEASNSAGVDAWEVELRVLEPPHWGADETSGLLERVAGENASLPCPARGTPKPQVTWRKGPSSEPLHGQPGVAVLEEGSLFLASVSPADSGDYECQATNEVGSTSRRAKLVVYVPPSIREDGRKANVSGMAGQSLTLECDANGFPVPEIVWLKDAQLIPKVGGHRLLDEGQSLHFPRIQEGDSGLYSCRAENQAGTAQRDFHLLVLTPPSVLGAGAAQEVLGLAGADVELQCWTSGVPTPQVEWTKDRQPVLPGGPHLQVQEDGQVLRITGSHVGDEGRYQCVAFSPAGQQARDFQLRVHAPPTIWGSNETGEVAVMEDHLVQLLCEARGVPTPNITWFKDGALLPTSTKVVYTRGGRQLQLGRAQSSDAGVYTCKASNAVGAAEKATRLDVYVPPTIEGAGGRPYVVKAVAGRPVALECVARGHPSPTLSWHHEGLPVAESNESRLETDGSVLRLESPGEASSGLYSCVASSPAGEAVLQYSVEVQVPPQLLVAEGLGQVTTIVGQPLELPCQASGSPVPTIQWLQNGRPAEELAGVQVASQGTTLHIDHVELDHSGLFACQATNEAGTAGAEVEVSVHEFPSVSIIGGENITAPFLQPVTLQCIGDGVPTPSLRWWKDGVALAAFGGNLQIEKVDLRDEGIYTCAATNLAGESKREVALKVLVPPNIEPGPVNKAVLENASVTLECLASGVPPPDVSWFKGHQPVSSWMGVTVSVDGRVLRIEQAQLSDAGSYRCVASNVAGSTELRYGLRVNVPPRITLPPSLPGPVLVNTPVRLTCNATGAPSPTLMWLKDGNPVSPAGTPGLQVFPGGRVLTLASARASDSGRYSCVAVSAVGEDRQDVVLQVHMPPSILGEELNVSVVANESVALECQSHAMPPPVLSWWKDGRPLEPRPGVHLSADKALLQVDRADVWDAGHYTCEALNQAGHSEKHYNLNVWVAPVFPLRESHTLTVREGHPTRLSCECRGVPFPKISWRKDGQPLPGEGAGLQHVSAVGRLLYLGQAQLAQEGTYTCECSNVVGNSSQDLQLEVHVPPQIAGPREPPTQVSVVQDGVATLECNATGKPPPTVTWERDGQPVGAELGLQLQNQGQSLHVERAQAAHTGRYSCVAENLAGRAERKFELSVLVPPELIGDLDPLTNITAALHSPLTLLCEAMGIPPPAIRWFRGEEPVSPGEDTYLLAGGWMLKMTQTQEQDSGLYSCLASNEAGEARRNFSVEVLVPPSIENEDLEEVIKVLDGQTAHLMCNVTGHPQPKLTWFKDGRPLARGDAHHISPDGVLLQVLQANLSSAGHYSCIAANAVGEKTKHFQLSVLLAPTILGGAEDSADEEVTVTVNNPISLICEALAFPSPNITWMKDGAPFEASRNIQLLPGTHGLQILNAQKEDAGQYTCVVTNELGEAVKNYHVEVLIPPSISKDDPLAEVGVKEVKTKVNSTLTLECESWAVPPPTIRWYKDGQPVTPSSRLQVLGEGRLLQIQPTQVSDSGRYLCVATNVAGEDDQDFNVLIQVPPMFQKVGDFSAAFEILSREEEARGGVTEYREIVENNPAYLYCDTNAIPPPDLTWYREDQPLSAGDEVSVLQGGRVLQIPLVRAENAGRYSCKASNEVGEDWLHYELLVLTPPVILGDTEELVEEVTVNASSTVSLQCPALGNPVPTISWLQNGLPFSPSPRLQVLEDGQVLQVSTAEVADAASYMCVAENQAGSAEKLFTLRVQVPPRIAGLDLEQVTAILNSSVSLPCDVHAHPNPEVTWYKDSQALSLGEEVFLLPGTHTLQLGRARLSDSGMYTCEALNAAGRDQKLVQLSVLVPPAFRQAPRGPQDAVLVRVGDKAVLSCETDALPEPTVTWYKDGQPLVLAQRTQALRGGQRLEIQEAQVSDKGLYSCKVSNVAGEAVRTFTLTVQVPPTFENPKTETVSQVAGSPLVLTCDVSGVPAPTVTWLKDRMPVESSAVHGVVSRGGRLQLSRLQPAQAGTYTCVAENTQAEARKDFVVAVLVAPRIRSSGVAREHHVLEGQEVRLDCEADGQPPPDVAWLKDGSPLGQDMGPHLRFYLDGGSLVLKGLRASDAGAYTCVAHNPAGEDARLHTVNVLVPPTIKQGADGSGTLVSRPGELVTMVCPVRGSPPIHVSWLKDGLPLPLSQRTLLHGSGHTLRISKVQLADAGIFTCVAASPAGVADRNFTLQVQVPPVLEPVEFQNDVVVVRGSLVELPCEARGVPLPLVSWMKDGEPLLSQSLEQGPSLQLEAVGAGDSGTYSCVAVSEAGEARRHFQLTVMEPPHIEDSGQPTELSLTPGAPMELLCDAQGTPQPNITWHKDGQALTRLENNSRATRVLRVENVQVRDAGLYTCLAESPAGAIEKSFRVRVQAPPNIVGPRGPRFVVGLAPGQLVLECSVEAEPAPKITWHRDGIVLQEDAHTQFPERGRFLQLQALSTADSGDYSCTARNAAGSTSVAFRVEIHTVPTIRSGPPAVNVSVNQTALLPCQADGVPAPLVSWRKDRVPLDPRSPRFEILPEGSLRIQPVLAQDAGHYLCLASNSAGSDRQGRDLRVLALLPCEASGSPKPLVVWWKDGQKLDFRLQQGAYRLLPSNALLLTAPGPQDSAQFECVVSNEVGEAHRLYQVTVHVPPTIADDQTDFTVTMMAPVVLTCHSTGIPAPTVSWSKAGAQLGARGSGYRVSPSGALEIGQALPIHAGRYTCSARNSAGVAHKHVFLTVQASPVVKPLPSVVRAVAEEEVLLPCEASGIPRPTITWQKEGLNVATGVSTQVLPGGQLRIAHASPEDAGNYLCIAKNSAGSAMGKTRLVVQVPPVIENGLPDLSTTEGSHAFLPCKARGSPEPNITWDKDGQPVSGAEGKFTIQPSGELLVKNLEGQDAGTYTCTAENAVGRARRRVHLTILVLPVFTTLPGDRSLRLGDRLWLRCAARGSPTPRIGWTVNDRPVTEGVSEQDGGSTLQRAAVSREDSGTYVCWAENRVGRTQAVSFVHVKEAPVLQGEAFSYLVEPVGGSIQLDCVVRGDPVPDIHWIKDGLPLRGSHLRHQLQNGSLTIRRTERDDAGRYQCLAENEMGVAKKVVILVLQSAPVFQVEPQDMTVRSGDDVALRCQATGEPTPTIEWLQAGQPLRASRRLRTLPDGSLWLENVETGDAGTYDCVAHNLLGSATARAFLVVRGEPQGSWGSMTGVINGRKFGVATLNTSVMQEAHSGVSSIHSSIRHVPANVGPLMRVLVVTIAPIYWALARESGEALNGHSLTGGRFRQESHVEFATGELLTMTQVARGLDPDGLLLLDVVVNGVVPESLADADLQVQDFEEHYVQTGPGQLFVGSTQRFFQGGLPSFLRCNHSIQYNAARGPQPQLVQHLRASAISSAFDPEAEALRFQLATALQAEENEVGCPEGFELDSQGAFCVDRDECSGGPSPCSHACLNAPGRFSCTCPTGFALAWDDRNCRDVDECAWDAHLCREGQRCVNLLGSYRCLPDCGPGFRVADGAGCEDVDECLEGLDDCHYNQLCENTPGGHRCSCPRGYRMQGPSLPCLDVNECLQLPKACAYQCHNLQGSYRCLCPPGQTLLRDGKACTSLERNGQNVTTVSHRGPLLPWLRPWASIPGTSYHAWVSLRPGPMALSSVGRAWCPPGFIRQNGVCTDLDECRVRNLCQHACRNTEGSYQCLCPAGYRLLPSGKNCQDINECEEESIECGPGQMCFNTRGSYQCVDTPCPATYRQGPSPGTCFRRCSQDCGTGGPSTLQYRLLPLPLGVRAHHDVARLTAFSEVGVPANRTELSMLEPDPRSPFALRPLRAGLGAVYTRRALTRAGLYRLTVRAAAPRHQSVFVLLIAVSPYPY

SEQ ID NO: 6523 - protein, 309 aa, Homo Sapiens
  misc_feature (1)..(1): Xaa can be any naturally occurring amino acid
XPGQLFVGSTQRFFQGGLPSFLRCNHSIQYNAARGPQPQLVQHLRASAISSAFDPEAEALRFQLATALQAEENEVGCPEGFELDSQGAFCVDVDECAWDAHLCREGQRCVNLLGSYRCLPDCGPGFRVADGAGCEDVDECLEGLDDCHYNQLCENTPGGHRCSCPRGYRMQGPSLPCLDVNECLQLPKACAYQCHNLQGSYRCLCPPGQTLLRDGKACTSLERNGQNVTTVSHRGPLLPWLRPWASIPGTSYHAWVSLRPGPMALSSVGRAWCPPGFIRQNGVCTDLDECRVRNLCQHACRNTEGSYQC

SEQ ID NO: 6524 - protein, 479 aa, Homo Sapiens
  misc_feature (1)..(1): Xaa can be any naturally occurring amino acid
XVHAHPNPEVTWYKDSQALSLGEEVFLLPGTHTLQLGRARLSDSGMYTCEALNAAGRDQKLVQLSVLVPPAFRQAPRGPQDAVLVRVGDKAVLSCETDALPEPTVTWYKDGQPLVLAQRTQALRGGQRLEIQEAQVSDKGLYSCKVSNVAGEAVRTFTLTVQVPPTFENPKTETVSQVAGSPLVLTCDVSGVPAPTVTWLKDRMPVESSAVHGVVSRGGRLQLSRLQPAQAGTYTCVAENTQAEARKDFVVAVLVAPRIRSSGVAREHHVLEGQEVRLDCEADGQPPPDVAWLKDGSPLGQDMGPHLRFYLDGGSLVLKGLRASDAGAYTCVAHNPAGEDARLHTVNVLVPPTIKQGADGSGTLVSRPGELVTMVCPVRGSPPIHVSWLKDGLPLPLSQRTLLHGSGHTLRISKVQLADAGIFTCVAASPAGVADRNFTLQCPLSWSRWSSRMTWWWFVAPWWNSRARPGAFPCLSCRG

SEQ ID NO: 6525 - protein, 325 aa, Homo Sapiens
MAAMRKALPRRLVGLASLRAVSTSSMGTLPKRVKIVEVGPRDGLQNEKNIVSTPVKIKLIDMLSEAGLSVIETTSFVSPKWVPQMGDHTEVLKGIQKFPGINYPVLTPNLKGFEAAVAAGAKEVVIFGAASELFTKKNINCSIEESFQRFDAILKAAQSANISVRGYVSCALGCPYEGKISPAKVAEVTKKFYSMGCYEISLGDTIGVGTPGIMKDMLSAVMQEVPLAALAVHCHDTYGQALANTLMALQMGVSVVDSSVAGLGGCPYAQGASGNLATEDLVYMLEGLGIHTGVNLQKLLEAGNFICQALNRKTSSKVAQATCKL

SEQ ID NO: 6526 - protein, 254 aa, Homo Sapiens
MAAMRKALPRRLVGLASLRAVSTSSMGTLPKRVKIVEVGPRDGLQNEKNIVSTPVKIKLIDMLSEAGLSVIETTSFVSPKWVPQMGDHTEVLKGIQKFPGINYPVLTPNLKGFEAAVTKKFYSMGCYEISLGDTIGVGTPGIMKDMLSAVMQEVPLAALAVHCHDTYGQALANTLMALQMGVSVVDSSVAGLGGCPYAQGASGNLATEDLVYMLEGLGIHTGVNLQKLLEAGNFICQALNRKTSSKVAQATCKL

SEQ ID NO: 6527 - protein, 77 aa, Homo Sapiens
MLEARREWSRKVFPWSGATQQPGTPFHSPSQTLRRSAGQRPAGVPVPADVLLWTSSRLCVPPLMCSSPCPATCVSAC

SEQ ID NO: 6528 - protein, 182 aa, Homo Sapiens
  misc_feature (1)..(1): Xaa can be any naturally occurring amino acid
XKALPRRLVGLASLRAVSTSSMGTLPKRVKIVEVGPRDGLQNEKVTKKFYSMGCYEISLGDTIGVGTPGIMKDMLSAVMQEVPLAALAVHCHDTYGQALANTLMALQMGVSVVDSSVAGLGGCPYAQGASGNLATEDLVYMLEGLGIHTGVNLQKLLEAGNFICQALNRKTSSKVAQATCKL

SEQ ID NO: 6529 - protein, 53 aa, Homo Sapiens
MEIFIEVFSHFLLQLTELTLNMCLELPTGSLEKSLMISSQVLQIPVANSTKQR

SEQ ID NO: 6530 - protein, 139 aa, Homo Sapiens
MSISSALAMVFMGAKGNTAAQMSQALCFSKIGGEDGDIHRGFQSLLVAINRTDTEYVLRTANGLFGEKSYDFLTGFTDSCGKFYQATIKQLDFVNDTEKSTTRVNSWVADKTKGENILLFYFDNILNSFIVSSLQNCQI

SEQ ID NO: 6531 - protein, 442 aa, Homo Sapiens
MSALGAVIALLLWGQLFAVDSGNDVTDIADDGCPKPPEIAHGYVEHSVRYQCKNYYKLRTEGDGVYTLNDKKQWINKAVGDKLPECEADDGCPKPPEIAHGYVEHSVRYQCKNYYKLRTEGDGEAMPCSLPHVNLRVTFTSPADVGKEGMLMMMSPSPRVYTLNNEKQWINKAVGDKLPECEAVCGKPKNPANPVQRILGGHLDAKGSFPWQAKMVSHHNLTTGATLINEQWLLTTAKNLFLNHSENATAKDIAPTLTLYVGKKQLVEIEKVVLHPNYSQVDIGLIKLKQKVSVNERVMPICLPSKDYAEVGRVGYVSGWGRNANFKFTDHLKYVMLPVADQDQCIRHYEGSTVPEKKTPKSPVGVQPILNEHTFCAGMSKYQEDTCYGDAGSAFAVHDLEEDTWYATGILSFDKSCAVAEYGVYVKVTSIQDWVQKTIAEN

SEQ ID NO: 6532 - protein, 406 aa, Homo Sapiens
MSALGAVIALLLWGQLFAVDSGNDVTDIADDGCPKPPEIAHGYVEHSVRYQCKNYYKLRTEGDGVYTLNDKKQWINKAVGDKLPECEADDGCPKPPEIAHGYVEHSVRYQCKNYYKLRTEGDGVYTLNNEKQWINKAVGDKLPECEAVCGKPKNPANPVQRILGGHLDAKGSFPWQAKMVSHHNLTTGATLINEQWLLTTAKNLFLNHSENATAKDIAPTLTLYVGKKQLVEIEKVVLHPNYSQVDIGLIKLKQKVSVNERVMPICLPSKDYAEVGRVGYVSGWGRNANFKFTDHLKYVMLPVADQDQCIRHYEGSTVPEKKTPKSPVGVQPILNEHTFCAGMSKYQEDTCYGDAGSAFAVHDLEEDTWYATGILSFDKSCAVAEYGVYVKVTSIQDWVQKTIAEN

SEQ ID NO: 6533 - protein, 347 aa, Homo Sapiens
MSALGAVIALLLWGQLFAVDSGNDVTDIADDGCPKPPEIAHGYVEHSVRYQCKNYYKLRTEGDGVYTLNDKKQWINKAVGDKLPECEAVCGKPKNPANPVQRILGGHLDAKGSFPWQAKMVSHHNLTTGATLINEQWLLTTAKNLFLNHSENATAKDIAPTLTLYVGKKQLVEIEKVVLHPNYSQVDIGLIKLKQKVSVNERVMPICLPSKDYAEVGRVGYVSGWGRNANFKFTDHLKYVMLPVADQDQCIRHYEGSTVPEKKTPKSPVGVQPILNEHTFCAGMSKYQEDTCYGDAGSAFAVHDLEEDTWYATGILSFDKSCAVAEYGVYVKVTSIQDWVQKTIAEN

SEQ ID NO: 6534 - protein, 88 aa, Homo Sapiens
MSALGAVIALLLWGQLFAVDSGNDVTDIADDGCPKPPEIAHGYVEHSVRYQCKNYYKLRTEGDGVYTLNNEKQWINKAVGDKLPECEA

SEQ ID NO: 6535 - protein, 92 aa, Homo Sapiens
MSALGAVIALLLWGQLFAVDSGNDVTDIADDGCPKPPEIAHGYVEHSVRYQCKNYYKLRTEGDGVYTLNNEKQWINKAVGDKLPECEAAHTE

SEQ ID NO: 6536 - protein, 222 aa, Homo Sapiens
MSALGAVIALLLWGQLFAVDSGNDVTDIADDGCPKPPEIAHGYVEHSVRYQCKNYYKLRTEGDGVYTLNNEKQWINKAVGDKLPECEAGATLINEQWLLTTAKNLFLNHSENATAKDIAPTLTLYVGKKQLVEIEKVVLHPNYSQVDIGLIKLKQKVSVNERVMPICLPSKDYAEVGRVGYVSGWGRNANFKFTDHLKYVMLPVADQDQCIRHYEGSTVPEK

SEQ ID NO: 6537 - protein, 91 aa, Homo Sapiens
MSALGAVIALLLWGQLFAVDSGNDVTDIADDGCPKPPEIAHGYVEHSVRYQCKNYYKLRTEGDGVYTLNNEKQWINKAVGDKLPECEAGGC

SEQ ID NO: 6538 - protein, 347 aa, Homo Sapiens
MSALGAVIALLLWGQLFAVDSGNDVTDIADDGCPKPPEIAHGYVEHSVRYQCKNYYKLRTEGDGVYTLNNEKQWINKAVGDKLPECEAVCGKPKNPANPVQRILGGHLDAKGSFPWQAKMVSHHNLTTGATLINEQWLLTTAKNLFLNHSENATAKDIAPTLTLYVGKKQLVEIEKVVLHPNYSQVDIGLIKLKQKVSVNERVMPICLPSKDYAEVGRVGYVSGWGRNANFKFTDHLKYVMLPVADQDQCIRHYEGSTVPEKKTPKSPVGVQPILNEHTFCAGMSKYQEDTCYGDAGSAFAVHDLEEDTWYATGILSFDKSCAVAEYGVYVKVTSIQDWVQKTIAEN

SEQ ID NO: 6539 - protein, 347 aa, Homo Sapiens; identical to SEQ ID NO: 6538

SEQ ID NO: 6540 - protein, 281 aa, Homo Sapiens
MSRISQMTAARSPPRLHMAMWSTRFATSVRTNPVQRILGGHLDAKGSFPWQAKMVSHHNLTTGATLINEQWLLTTAKNLFLNHSENATAKDIAPTLTLYVGKKQLVEIEKVVLHPNYSQVDIGLIKLKQKVSVNERVMPICLPSKDYAEVGRVGYVSGWGRNANFKFTDHLKYVMLPVADQDQCIRHYEGSTVPEKKTPKSPVGVQPILNEHTFCAGMSKYQEDTCYGDAGSAFAVHDLEEDTWYATGILSFDKSCAVAEYGVYVKVTSIQDWVQKTIAEN

SEQ ID NO: 6541 - protein, 281 aa, Homo Sapiens; identical to SEQ ID NO: 6540

SEQ ID NO: 6542 - protein, 365 aa, Homo Sapiens
  misc_feature (1)..(1): Xaa can be any naturally occurring amino acid
XALGAVIALLLWGQLFAVDSGNDVTDIADDGCPKPPEIAHGYVEHSVRYQCKNYYKLRTEGDGVYTLNDKKQWINKAVGDKLPECEADDGCPKPPEIAHGYVEHSVRYQCKNYYKLRTEGDGVYTLNNEKQWINKAVGDKLPECEAGATLINEQWLLTTAKNLFLNHSENATAKDIAPTLTLYVGKKQLVEIEKVVLHPNYSQVDIGLIKLKQKVSVNERVMPICLPSKDYAEVGRVGYVSGWGRNANFKFTDHLKYVMLPVADQDQCIRHYEGSTVPEKKTPKSPVGVQPILNEHTFCAGMSKYQEDTCYGDAGSAFAVHDLEEDTWYATGILSFDKSCAVAEYGVYVKVTSIQDWVQKTIAEN

SEQ ID NO: 6543 - protein, 149 aa, Homo Sapiens
  misc_feature (1)..(1): Xaa can be any naturally occurring amino acid
XALGAVIALLLWGQLFAVDSGNDVTDIADDGCPKPPEIAHGYVEHSVRYQCKNYYKLRTEGDGVYTLNDKKQWINKAVGDKLPECEADDGCPKPPEIAHGYVEHSVRYQCKNYYKLRTEGDGVYTLNNEKQWINKAVGDKLPECEAGGC

SEQ ID NO: 6544 - protein, 404 aa, Homo Sapiens
  misc_feature (1)..(1): Xaa can be any naturally occurring amino acid
XALGAVIALLLWGQLFAVDSGNDVTDIADDGCPKPPEIAHGYVEHSVRYQCKNYYKLRTEGDGVYTLNDKKQWINKAVGDKLPECEADDGCPKPPEIAHGYVEHSVRYQCKNYYKLRTEGDVYTLNNEKQWINKAVGDKLPECEAVCGKPKNPANPVQRILGGHLDAKGSFPWQAKMVSHHNLTTGATLINEQWLLTTAKNLFLNHSENATAKDIAPTLTLYVGKKQLVEIEKVVLHPNYSQVDIGLIKLKQKVSVNERVMPICLPSKDYAEVGRVGYVSGWGRNANFKFTDHLKYVMLPVADQDQCIRHYEGSTVPEKKTPKSPVGVQPILNEHTFCAGMSKYQEDTCYGDAGSAFAVHDLEEDTWYATGILSFDKSCAVAEYGVYVKVTSIQDWVQKTIAEN

SEQ ID NO: 6545 - protein, 348 aa, Homo Sapiens
MSDLGAVISLLLWGRQLFALYSGNDVTDISDDRFPKPPEIANGYVEHLFRYQCKNYYRLRTEGDGVYTLNDKKQWINKAVGDKLPECEAVCGKPKNPANPVQRILGGHLDAKGSFPWQAKMVSHHNLTTGATLINEQWLLTTAKNLFLNHSENATAKDIAPTLTLYVGKKQLVEIEKVVLHPNYHQVDIGLIKLKQKVLVNERVMPICLPSKNYAEVGRVGYVSGWGQSDNFKLTDHLKYVMLPVADQYDCITHYEGSTCPKWKAPKSPVGVQPILNEHTFCVGMSKYQEDTCYGDAGSAFAVHDLEEDTWYAAGILSFDKSCAVAEYGVYVKVTSIQHWVQKTIAEN

SEQ ID NO: 6546 - protein, 117 aa, Homo Sapiens
MSDLGAVISLLLWGRQLFALYSGNDVTDISDDRFPKPPEIANGYVEHLFRYQCKNYYRLRTEGDGVYTLNDKKQWINKAVGDKLPECEAVCGKPKNPANPVQRILGGHLVRGWDPKL

SEQ ID NO: 6547 - protein, 281 aa, Homo Sapiens
MSRIFQMTASRSPLRLQMAMWSTCFATSVRTNPVQRILGGHLDAKGSFPWQAKMVSHHNLTTGATLINEQWLLTTAKNLFLNHSENATAKDIAPTLTLYVGKKQLVEIEKVVLHPNYHQVDIGLIKLKQKVLVNERVMPICLPSKNYAEVGRVGYVSGWGQSDNFKLTDHLKYVMLPVADQYDCITHYEGSTCPKWKAPKSPVGVQPILNEHTFCVGMSKYQEDTCYGDAGSAFAVHDLEEDTWYAAGILSFDKSCAVAEYGVYVKVTSIQHWVQKTIAEN

SEQ ID NO: 6548 - protein, 485 aa, Homo Sapiens
MLLRSKPALPPPLMLLLLGPLGPLSPGALPRPAQAQDVVDLDFFTQEPLHLVSPSFLSVTIDANLATDPRFLILLGSPKLRTLARGLSPAYLRFGGTKTDFLIFDPKKESTFEERSYWQSQVNQDICKYGSIPPDVEEKLRLEWPYQEQLLLREHYQKKFKNSTYSKPNSFLKKADIFINGSQLGEDFIQLHKLLRKSTFKNAKLYGPDVGQPRRKTAKMLKSFLKAGGEVIDSVTWHHYYLNGRTATKEDFLNPDVLDIFISSVQKVFQVVESTRPGKKVWLGETSSAYGGGAPLLSDTFAAGFMWLDKLGLSARMGIEVVMRQVFFGAGNYHLVDENFDPLPDYWLSLLFKKLVGTKVLMASVQGSKRRKLRVYLHCTNTDNPRYKEGDLTLYAINLHNVTKYLRLPYPFSNKQVDKYLLRPLGPHGLLSKSVQLNGLTLKMVDDQTLPPLMEKPLRPGSSLGLPAFSYSFFVIRNAKVAACI

SEQ ID NO: 6549 - protein, 226 aa, Homo Sapiens
MLLRSKPALPPPLMLLLLGPLGPLSPGALPRPAQAQDVVDLDFFTQEPLHLVSPSFLSVTIDANLATDPRFLILLGSPKLRTLARGLSPAYLRFGGTKTDFLIFDPKKESTFEERSYWQSQVNQDICKYGSIPPDVEEKLRLEWPYQEQLLLREHYQKKFKNSTYSRSSVDVLYTFANCSGLDLIFGLNALLRTADLQWNSSNAQLLLDYCSSKGYNISWELGNAS

SEQ ID NO: 6550 - protein, 543 aa, Homo Sapiens
MLLRSKPALPPPLMLLLLGPLGPLSPGALPRPAQAQDVVDLDFFTQEPLHLVSPSFLSVTIDANLATDPRFLILLGSPKLRTLARGLSPAYLRFGGTKTDFLIFDPKKESTFEERSYWQSQVNQDICKYGSIPPDVEEKLRLEWPYQEQLLLREHYQKKFKNSTYSRSSVDVLYTFANCSGLDLIFGLNALLRTADLQWNSSNAQLLLDYCSSKGYNISWELGNEPNSFLKKADIFINGSQLGEDFIQLHKLLRKSTFKNAKLYGPDVGQPRRKTAKMLKSFLKAGGEVIDSVTWHHYYLNGRTATKEDFLNPDVLDIFISSVQKVFQVVESTRPGKKVWLGETSSAYGGGAPLLSDTFAAGFMWLDKLGLSARMGIEVVMRQVFFGAGNYHLVDENFDPLPDYWLSLLFKKLVGTKVLMASVQGSKRRKLRVYLHCTNTDNPRYKEGDLTLYAINLHNVTKYLRLPYPFSNKQVDKYLLRPLGPHGLLSKSVQLNGLTLKMVDDQTLPPLMEKPLRPGSSLGLPAFSYSFFVIRNAKVAACI

SEQ ID NO: 6551 - protein, 543 aa, Homo Sapiens; identical to SEQ ID NO: 6550

SEQ ID NO: 6552 - protein, 380 aa, Homo Sapiens
MLLRSKPALPPPLMLLLLGPLGPLSPGALPRPAQAQDVVDLDFFTQEPLHLVSPSFLSVTIDANLATDPRFLILLGSPKLRTLARGLSPAYLRFGGTKTDFLIFDPKKESTFEERSYWQSQVNQDICKYGSIPPDVEEKLRLEWPYQEQLLLREHYQKKFKNSTYSRSSVDVLYTFANCSGLDLIFGLNALLRTADLQWNSSNAQLLLDYCSSKGYNISWELGNEPNSFLKKADIFINGSQLGEDFIQLHKLLRKSTFKNAKLYGPDVGQPRRKTAKMLKSFLKAGGEVIDSVTWHHYYLNGRTATKEDFLNPDVLDIFISSVQKVFQVVESTRPGKKVWLGETSSAYGGGAPLLSDTFAAGFMIIGYLFCSRNWWAPRC

SEQ ID NO: 6553 - protein, 469 aa, Homo Sapiens
MLLRSKPALPPPLMLLLLGPLGPLSPGALPRPAQAQDVVDLDFFTQEPLHLVSPSFLSVTIDANLATDPRFLILLGSPKLRTLARGLSPAYLRFGGTKTDFLIFDPKKESTFEERSYWQSQVNQDICKYGSIPPDVEEKLRLEWPYQEQLLLREHYQKKFKNSTYSRSSVDVLYTFANCSGLDLIFGLNALLRTADLQWNSSNAQLLLDYCSSKGYNISWELGNEPNSFLKKADIFINGSQLGEDFIQLHKLLRKSTFKNAKLYGPDVGQPRRKTAKMLKSFLKAGGEVIDSVTWHHYYLNGRTATKEDFLNPDVLDIFISSVQKVFQDYWLSLLFKKLVGTKVLMASVQGSKRRKLRVYLHCTNTDNPRYKEGDLTLYAINLHNVTKYLRLPYPFSNKQVDKYLLRPLGPHGLLSKSVQLNGLTLKMVDDQTLPPLMEKPLRPGSSLGLPAFSYSFFVIRNAKVAACI

SEQ ID NO: 6554 - protein, 168 aa, Homo Sapiens
MLLRSKPALPPPLMLLLLGPLGPLSPGALPRPAQAQDVVDLDFFTQEPLHLVSPSFLSVTIDANLATDPRFLILLGSPKLRTLARGLSPAYLRFGGTKTDFLIFDPKKESTFEERSYWQSQVNQDICKYGSIPPDVEEKLRLEWPYQEQLLLREHYQKKFKNSTYSTS

SEQ ID NO: 6555 - protein, 389 aa, Homo Sapiens
ARSLDKLYNFADCSGLHLIFALNALRRNPNNSWNSSSALSLLKYSASKKYNISWELGNEPNNYRTMHGRAVNGSQLGKDYIQLKSLLQPIRIYSRASLYGPNIGRPRKNVIALLDGFMKVAGSTVDAVTWQHCYIDGRVVKVMDFLKTRLLDTLSDQIRKIQKVVNTYTPGKKIWLEGVVTTSAGGTNNLSDSYAAGFLWLNTLGMLANQGIDVVIRHSFFDHGYNHLVDQNFNPLPDYWLSLLYKRLIGPKVLAVHVAGLQRKPRPGRVIRDKLRIYAHCTNHHNHNYVRGSITLFIINLHRSRKKIKLAGTLRDKLVHQYLLQPYGQEGLKSKSVQLNGQPLVMVDDGTLPELKPRPLRAGRTLVIPPVTMGFYVVKNVNALACRYR

SEQ ID NO: 6556 - protein, 149 aa, Homo Sapiens
MRVLCAFPEAMPSSNSRPPACLAPGALYLALLLHLSLSSQAGDRRPLPVDRAAGLKEKTLILLDVSTKNPVRTVNENFLSLQLDPSIIHDGWLDFLSSKRLVTLARGLSPAFLRFGGKRTDFLQFQNLRNPAKSRGGPGPDYYLKNYED

SEQ ID NO: 6557 - protein, 592 aa, Homo Sapiens
MRVLCAFPEAMPSSNSRPPACLAPGALYLALLLHLSLSSQAGDRRPLPVDRAAGLKEKTLILLDVSTKNPVRTVNENFLSLQLDPSIIHDGWLDFLSSKRLVTLARGLSPAFLRFGGKRTDFLQFQNLRNPAKSRGGPGPDYYLKNYEDDIVRSDVALDKQKGCKIAQHPDVMLELQREKAAQMHLVLLKEQFSNTYSNLILTARSLDKLYNFADCSGLHLIFALNALRRNPNNSWNSSSALSLLKYSASKKYNISWELGNEPNNYRTMHGRAVNGSQLGKDYIQLKSLLQPIRIYSRASLYGPNIGRPRKNVIALLDGFMKVAGSTVDAVTWQHCYIDGRVVKVMDFLKTRLLDTLSDQIRKIQKVVNTYTPGKKIWLEGVVTTSAGGTNNLSDSYAAGFLWLNTLGMLANQGIDVVIRHSFFDHGYNHLVDQNFNPLPDYWLSLLYKRLIGPKVLAVHVAGLQRKPRPGRVIRDKLRIYAHCTNHHNHNYVRGSITLFIINLHRSRKKIKLAGTLRDKLVHQYLLQPYGQEGLKSKSVQLNGQPLVMVDDGTLPELKPRPLRAGRTLVIPPVTMGFYVVKNVNALACRYR

SEQ ID NO: 6558 - protein, 548 aa, Homo Sapiens
MRVLCAFPEAMPSSNSRPPACLAPGALYLALLLHLSLSSQAGDRRPLPVDRAAGLKEKTLILLDVSTKNPVRTVNENFLSLQLDPSIIHDGWLDFLSSKRLVTLARGLSPAFLRFGGKRTDFLQFQNLRNPAKSRGGPGPDYYLKNYEDDIVRSDVALDKQKGCKIAQHPDVMLELQREKAAQMHLVLLKEQFSNTYSNLILTARSLDKLYNFADCSGLHLIFALNALRRNPNNSWNSSSALSLLKYSASKKYNISWELGNEPNNYRTMHGRAVNGSQLGKDYIQLKSLLQPIRIYSRASLYGPNIGRPRKNVIALLDGFMKVAGSTVDAVTWQHCYIDGRVVKVMDFLKTRLLDTLSDQIRKIQKVVNTYTPGKKIWLEGVVTTSAGGTNNLSDSYAAGFLWLNTLGMLANQGIDVVIRHSFFDHGYNHLVDQNFNPLPDYWLSLLYKRLIGPKVLAVHVAGLQRKPRPGRVIRDKLRIYAHCTNHHNHNYVRGSITLFIINLHRSRKKIKLAGTLRDKLVHQYLLQPYGQEGLKSKTQRCQYCGII

SEQ ID NO: 6559 - protein, 534 aa, Homo Sapiens
MRVLCAFPEAMPSSNSRPPACLAPGALYLALLLHLSLSSQAGDRRPLPVDRAAGLKEKTLILLDVSTKNPVRTVNENFLSLQLDPSIIHDGWLDFLSSKRLVTLARGLSPAFLRFGGKRTDFLQFQNLRNPAKSRGGPGPDYYLKNYEDDIVRSDVALDKQKGCKIAQHPDVMLELQREKAAQMHLVLLKEQFSNTYSNLILTEPNNYRTMHGRAVNGSQLGKDYIQLKSLLQPIRIYSRASLYGPNIGRPRKNVIALLDGFMKVAGSTVDAVTWQHCYIDGRVVKVMDFLKTRLLDTLSDQIRKIQKVVNTYTPGKKIWLEGVVTTSAGGTNNLSDSYAAGFLWLNTLGMLANQGIDVVIRHSFFDHGYNHLVDQNFNPLPDYWLSLLYKRLIGPKVLAVHVAGLQRKPRPGRVIRDKLRIYAHCTNHHNHNYVRGSITLFIINLHRSRKKIKLAGTLRDKLVHQYLLQPYGQEGLKSKSVQLNGQPLVMVDDGTLPELKPRPLRAGRTLVIPPVTMGFYVVKNVNALACRYR

SEQ ID NO: 6560 - protein, 480 aa, Homo Sapiens
MRVLCAFPEAMPSSNSRPPACLAPGALYLALLLHLSLSSQAGDRRPLPVDRAAGLKEKTLILLDVSTKNPVRTVNENFLSLQLDPSIIHDGWLDFLSSKRLVTLARGLSPAFLRFGGKRTDFLQFQNLRNPAKSRGGPGPDYYLKNYEDEPNNYRTMHGRAVNGSQLGKDYIQLKSLLQPIRIYSRASLYGPNIGRPRKNVIALLDGFMKVAGSTVDAVTWQHCYIDGRVVKVMDFLKTRLLDTLSDQIRKIQKVVNTYTPGKKIWLEGVVTTSAGGTNNLSDSYAAGFLWLNTLGMLANQGIDVVIRHSFFDHGYNHLVDQNFNPLPDYWLSLLYKRLIGPKVLAVHVAGLQRKPRPGRVIRDKLRIYAHCTNHHNHNYVRGSITLFIINLHRSRKKIKLAGTLRDKLVHQYLLQPYGQEGLKSKSVQLNGQPLVMVDDGTLPELKPRPLRAGRTLVIPPVTMGFYVVKNVNALACRYR

SEQ ID NO: 6561 - protein, 254 aa, Homo Sapiens [sequence omitted]

SEQ ID NO: 6562 - protein, 462 aa, Homo Sapiens
MARVLGAPVALGLWSLCWSLAIATPLPPTSAHGNVAEGETKPDPDVTERCSDGWSFDATTLDDNGTMLFFKGEFVWKSHKWDRELISERWKNFPSPVDAAFRQGHNSVFLIKGDKVWVYPPEKKEKGYPKLLQDEFPGIPSPLDAAVECHRGECQAEGVLFFQGDREWFWDLATGTMKERSWPAVGNCSSALRWLGRYYCFQGNQFLRFDPVRGEVPPRYPRDVRDYFMPCPGRGHGHRNGTGHGNSTHHGPEYMRCSPHLVLSALTSDNHGATYAFSGTHYWRLDTSRDGWHSWPIAHQWPQGPSAVDAAFSWEEKLYLVQGTQVYVFLTKGGYTLVSGYPKRLEKEVGTPHGIILDSVDAAFICPGSSRLHIMAGRRLWWLDLKSGAQATWTELPWPHEKVDGALCMEKSLGPNSCSANGPGLYLIHGPNLYCYSDVEKLNAAKALPQPQNVTSLLGCTH

SEQ ID NO: 6563 - protein, 699 aa, Homo Sapiens
MGHHRPWLHASVLWAGVASLLLPPAMTQQLRGDGLGFRNRNNSTGVAGLSEEASAELRHHLHSPRDHPDENKDVSTENGHHFWSHPDREKEDEDVSKEYGHLLPGHRSQDHKVGDEGVSGEEVFAEHGGQARGHRGHGSEDTEDSAEHRHHLPSHRSHSHQDEDEDEVVSSEHHHHILRHGHRGHDGEDDEGEEEEEEEEEEEEASTEYGHQAHRHRGHGSEEDEDVSDGHHHHGPSHRHQGHEEDDDDDDDDDDDDDDDDVSIEYRHQAHRHQGHGIEEDEDVSDGHHHRDPSHRHRSHEEDDNDDDDVSTEYGHQAHRHQDHRKEEVEAVSGEHHHHVPDHRHQGHRDEEEDEDVSTERWHQGPQHVHHGLVDEEEEEEEITVQFGHYVASHQPRGHKSDEEDFQDEYKTEVPHHHHHRVPREEDEEVSAELGHQAPSHRQSHQDEETGHGQRGSIKEMSHHPPGHTVVKDRSHLRKDDSEEEKEKEEDPGSHEEDDESSEQGEKGTHHGSRDQEDEEDEEEGHGLSLNQEEEEEEDKEEEEEEEDEERREERAEVGAPLSPDHSEEEEEEEEGLEEDEPRFTIIPNPLDRREEAGGASSEEESGEDTGPQDAQEYGNYQPGSLCGYCSFCNRCTECESCHCDEENMGEHCDQCQHCQFCYLCPLVCETVCAPGSYVDYFSSSLYQALADMLETPEP

SEQ ID NO: 6564 - protein, 676 aa, Homo Sapiens
MGHHRPWLHASVLWAGVASLLLPPAMTQQLRGDGLGFRNRNNSTGVAGLSEEASAELRHHLHSPRDHPDENKDVSTENGHHFWSHPDREKEDEDVSKEYGHLLPGHRSQDHKVGDEGVSGEEVFAEHGGQARGHRGHGSEDTEDSAEHRHHLPSHRSHSHQDEDEDEVVSSEHHHHILRHGHRGHDGEDDEGEEEEEEEEEEEEASTEYGHQAHRHRGHGSEEDEDVSDGHHHHGPSHRHQGHEEDDDDDDDDDDDDDDDDVSIEYRHQAHRHQGHGIEEDEDVSDGHHHRDPSHRHRSHEEDDNDDDDVSTEYGHQAHRHQDHRKEEVEAVSGEHHHHVPDHRHQGHRDEEEDEDVSTERWHQGPQHVHHGLVDEEEEEEEITVQFGHYVASHQPRGHKSDEEDFQDEYKTEVPHHHHHRVPREEDEEVSAELGHQAPSHRQSHQDEETGHGQRGSIKEMSHHPPGHTVVKDRSHLRKDDSEEEKEKEEDPGSHEEDDESSEQGEKGTHHGSRDQEDEEDEEEGHGLSLNQEEEEEEDKEEEEEEEDEERREERAEVGAPLSPDHSEEEEEEEEGLEEDEPRFTIIPNPLDRREEAGGASSEEESGEDTGPQDAQEYGNYQPGSLCGYCSFCNHCQFCYLCPLVCETVCAPGSYVDYFSSSLYQALADMLETPEP

SEQ ID NO: 6565 - protein, 96 aa, Homo Sapiens
  misc_feature (1)..(1): Xaa can be any naturally occurring amino acid
XSEEESGEDTGPQDAQEYGNYQPGSLCGYCSFCNRCTECESCHCDEENMGEHCDQCQGPGRHAGNAGTLTQSLDCDAGVPPPAFQPLSTSYIYFSE

SEQ ID NO: 6566 - protein, 525 aa, Homo Sapiens
MKALIAALLLITLQYSCAVSPTDCSAVEPEAEKALDLINKRRRDGYLFQLLRIADAHLDRVENTTVYYLVLDVQESDCSVLSRKYWNDCEPPDSRRPSEIVIGQCKVIATRHSHESQDLRVIDFNCTTSSVSSALANTKDSPVLIDFFEDTERYRKQANKALEKYKEENDDFASFRVDRIERVARVRGGEGTGYFVDFSVRNCPRHHFPRHPNVFGFCRADLFYDVEALDLESPKNLVINCEVFDPQEHENINGVPPHLGHPFHWGGHERSSTTKPPFKPHGSRDHHHPHKPHEHGPPPPPDERDHSHGPPLPQGPPPLLPMSCSSCQHATFGTNGAQRHSHNNNSSDLHPHKHHSHEQHPHGHHPHAHHPHEHDTHRQHPHGHHPHGHHPHGHHPHGHHPHGHHPHCHDFQDYGPCDPPPHNQGHCCHGHGPPPGHLRRRGPGKGPRPFHCRQIGSVYRLPPLRKGEVLPLPEANFPSFPLPHHKHPLKPDNQPFPQSVSESCPGKFKSGFPQVSMFFTHTFPK

SEQ ID NO: 6567 - protein, 111 aa, Homo Sapiens
MDGPRQDATLDEEEDMVIIYNRVPKTASTSFTNIAYDLCAKNKYHVLHINTTKNNPVMSLQDQVRFVKNITSWKEMKPGFYHGHVSYLDFAKFGVKKKPIYINVIRDPIER

SEQ ID NO: 6568 - protein, 229 aa, Homo Sapiens
MGLLRIMMPPKLQLLAVVAFAVAMLFLENQIQKLEESRSKLERAIARHEVREIEQRHTMDGPRQDATLDEEEDMVIIYNRVPKTASTSFTNIAYDLCAKNKYHVLHINTTKNNPVMSLQDQVRFVKNITSWKEMKPGFYHGHVSYLDFAKFGVKKKPIYINVIRDPIERLVSYYYFLRFGDDYRPGLRRRKQGDKKTFDECVAEGGSDCAPEKLWLQIPFFCGHSSECW

SEQ ID NO: 6569 - protein, 356 aa, Homo Sapiens
MGLLRIMMPPKLQLLAVVAFAVAMLFLENQIQKLEESRSKLERAIARHEVREIEQRHTMDGPRQDATLDEEEDMVIIYNRVPKTASTSFTNIAYDLCAKNKYHVLHINTTKNNPVMSLQDQVRFVKNITSWKEMKPGFYHGHVSYLDFAKFGVKKKPIYINVIRDPIERLVSYYYFLRFGDDYRPGLRRRKQGDKKTFDECVAEGGSDCAPEKLWLQIPFFCGHSSECWNVGSRWAMDQAKYNLINEYFLVGVTEELEDFIMLLEAALPRFFRGATELYRTGKKSHLRKTTEKKLPTKQTIAKLQQSDIWKMENEFYEFALEQFQFIRAHAVREKDGDLYILAQNFFYEKIYPKSN

SEQ ID NO: 6570 - protein, 83 aa, Homo Sapiens
MAALLLGAVLLVAQPQLVPSRPAELGQQELLRKAGTLQDDVRDGVAPNGSAQQLPQTIIIGVRKGGTRALLEMLSLHPDVAAA

SEQ ID NO: 6571 - protein, 83 aa, Homo Sapiens; identical to SEQ ID NO: 6570

SEQ ID NO: 6572 - protein, 307 aa, Homo Sapiens
MAALLLGAVLLVAQPQLVPSRPAELGQQELLRKAGTLQDDVRDGVAPNGSAQQLPQTIIIGVRKGGTRALLEMLSLHPDVAAAENEVHFFDWEEHYSHGLGWYLSQMPFSWPHQLTVEKTPAYFTSPKVPERVYSMNPSIRLLLILRDPSERVLSDYTQVFYNHMQKHKPYPSIEEFLVRDGRLNVDYKALNRSLYHVHMQNWLRFFPLRHIHIVDGDRLIRDPFPEIQKVERFLKLSPQINASNFYFNKTKGFYCLRDSGRDRCLHESKGRAHPQVDPKLLNKLHEYFHEPNKKFFELVGRTFDWH

SEQ ID NO: 6573 - protein, 411 aa, Homo Sapiens
MRRRRAGGRTMVERASKFVLVVAGSVCFMLILYQYAGPGLSLGAPGGRAPPDDLDLFPTPDPHYEKKYYFPVRELERSLRFDMKGDDVIVFLHIQKTGGTTFGRHLVQNVRLEVPCDCRPGQKKCTCYRPNRRETWLFSRFSTGWSCGLHADWTELTNCVPGVLDRRDSAALRTPRKFYYITLLRDPVSRYLSEWRHVQRGATWKTSLHMCDGRTPTPEELPPCYEGTDWSGCTLQEFMDCPYNLANNRQVRMLADLSLVGCYNLSFIPEGKRAQLLLESAKKNLRGMAFFGLTEFQRKTQYLFERTFNLKFIRPFMQYNSTRAGGVEVDEDTIRRIEELNDLDMQLYDYAKDLFQQRYQYKRQLERREQRLRSREERLLHRAKEALPREDADEPGRVPTEDYMSHIIEKW

SEQ ID NO: 6574 - protein, 471 aa, Homo Sapiens
MDERFNKWLLTPVLTLLFVVIMYQYVSPSCTSSCTNFGEQPRAGEAGPPAVPGPARRAQAPPEEWERRPQLPPPPRGPPEGPRGAAAPEEEDEEPGDPREGEEEEEEDEPDPEAPENGSLPRFVPRFNFSLKDLTRFVDFNIKGRDVIVFLHIQKTGGTTFGRHLVKNIRLEQPCSCKAGQKKCTCHRPGKKETWLFSRFSTGWSCGLHADWTELTNCVPAIMEKKDCPRNHSHTRNFYYITMLRDPVSRYLSEWKHVQRGATWKTSLHMCDGRSPTPDELPTCYPGDDWSGVSLREFMDCTYNLANNRQVRMLADLSLVGCYNLTFMNESERNTILLQSAKNNLKNMAFFGLTEFQRKTQFLFERTFNLKFISPFTQFNITRASNVEINEGARQRIEDLNFLDMQLYEYAKDLFQQRYHHTKQLEHQRDRQKRREERRLQREHRDHQWPKEDGAAEGTVTEDYNSQVVRW

SEQ ID NO: 6575 - protein, 236 aa, Homo Sapiens
RNFYYITMLRDPVSRYLSEWKHVQRGATWKTSLHMCDGRSPTPDELPTCYPGDDWSGVSLREFMDCTYNLANNRQVRMLADLSLVGCYNLTFMNESERNTILLQSAKNNLKNMAFFGLTEFQRKTQFLFERTFNLKFISPFTQFNITRASNVEINEGARQRIEDLNFLDMQLYEYAKDLFQQRYHHTKQLEHQRDRQKRREERRLQREHRDHQWPKEDGAAEGTVTEDYNSQVVRW

SEQ ID NO: 6576 - protein, 333 aa, Homo Sapiens
MANLGTLQLLPPRFKRFSCLSLPNIWITGMPVPATSVPCPSAGPHRTMKVLLLTGLGALFFAYYWDDNFDPASLQGARVLLTGANAGVGEELAYHYARLGSHLVLTAHTEALLQKVVGNCRKLGAPKVFYIAADMASPEAPESVVQFALDKLGGLDYLVLNHIGGAPAGTRARSPQATRWLMQVNFVSYVQLTSRALPSLTDSKGSLVVVSSLLGRVPTSFSTPYSAAKFALDGFFGSLRRELDVQDVNVAITMCVLGLRDRASAAEAVRGVTRVKAAPGPKAALAVIRGGATRAAGVFYPWRFRLLCLLRRWLPRPRAWFIRQELNVTAAAA

SEQ ID NO: 6577 - protein, 199 aa, Homo Sapiens
MASPEAPESVVQFALDKLGGLDYLVLNHIGGAPAGTRARSPQATRWLMQVNFVSYVQLTSRALPSLTDSKGSLVVVSSLLGRVPTSFSTPYSAAKFALDGFFGSLRRELDVQDVNVAITMCVLGLRDRASAAEAVRGVTRVKAAPGPKAALAVIRGGATRAAGVFYPWRFRLLCLLRRWLPRPRAWFIRQELNVTAAAA

SEQ ID NO: 6578 - protein, 75 aa, Homo Sapiens
MKVLLLTGLGALFFAYYWDDNFDPASLQGARVLLTGANAGVGEELAYHYARLGSHLVLTAHTEALLQKAGWTTSC

SEQ ID NO: 6579 - protein, 75 aa, Homo Sapiens; identical to SEQ ID NO: 6578

SEQ ID NO: 6580 - protein, 87 aa, Homo Sapiens
MKVLLLTGLGALFFAYYWDDNFDPASLQGARVLLTGANAGVGEELAYHYARLGSHLVLTAHTEALLQKARWLTLVVSTLGGRGKWIT

SEQ ID NO: 6581 - protein, 143 aa, Homo Sapiens
MKVLLLTGLGALFFAYYWDDNFDPASLQGARVLLTGANAGVGEELAYHYARLGSHLVLTAHTEALLQKVVGNCRKLGAPKVFYIAADMASPEAPESVVQFALDKLGGLDYLVLNHIGGAPAGTRARSPQATRWLMQVNFVSYV

SEQ ID NO: 6582 - protein, 286 aa, Homo Sapiens
MKVLLLTGLGALFFAYYWDDNFDPASLQGARVLLTGANAGVGEELAYHYARLGSHLVLTAHTEALLQKVVGNCRKLGAPKVFYIAADMASPEAPESVVQFALDKLGGLDYLVLNHIGGAPAGTRARSPQATRWLMQVNFVSYVQLTSRALPSLTDSKGSLVVVSSLLGRVPTSFSTPYSAAKFALDGFFGSLRRELDVQDVNVAITMCVLGLRDRASAAEAVRGVTRVKAAPGPKAALAVIRGGATRAAGVFYPWRFRLLCLLRRWLPRPRAWFIRQELNVTAAAA

SEQ ID NO: 6583 - protein, 286 aa, Homo Sapiens; identical to SEQ ID NO: 6582

SEQ ID NO: 6584 - protein, 286 aa, Homo Sapiens; identical to SEQ ID NO: 6582

SEQ ID NO: 6585 - protein, 315 aa, Homo Sapiens
MKVLLLTGLGALFFAYYWDDNFDPASLQGARVLLTGANAGVGEELAYHYARLGSHLVLTAHTEALLQKVVGNCRKLGAPKVFYIAADMASPEAPESVVQFALDKLGGLDYLVLNHIGGAPAGTRARSPQATRWLMQVNFVSYVQLTSRALPSLTDSKGSLVVVSSLLGRVPTSFSTPYSAAKFALDGFFGSLRRELDVQDVNVAITMCVLGLRDRASAAEAVRSSTSRPRQPEHRGVPLQSQTAMFLPPTVPGARTLTETPLRGWPQPKMKSSRQKSKTEKNDGHLEPVTAWEVQVPRVRRLCRGLARPHLFGHD

SEQ ID NO: 6586 - protein, 32 aa, Homo Sapiens
MKVLLLTGLGALFFAYYWDDNFDPASRERECC

SEQ ID NO: 6587 - protein, 205 aa, Homo Sapiens
MKVLLLTGLGALFFAYYWDDNFDPGGLDYLVLNHIGGAPAGTRARSPQATRWLMQVNFVSYVQLTSRALPSLTDSKGSLVVVSSLLGRVPTSFSTPYSAAKFALDGFFGSLRRELDVQDVNVAITMCVLGLRDRASAAEAVRGVTRVKAAPGPKAALAVIRGGATRAAGVFYPWRFRLLCLLRRWLPRPRAWFIRQELNVTAAAA

SEQ ID NO: 6588 - protein, 234 aa, Homo Sapiens
MKVLLLTGLGALFFAYYWDDNFDPGGLDYLVLNHIGGAPAGTRARSPQATRWLMQVNFVSYVQLTSRALPSLTDSKGSLVVVSSLLGRVPTSFSTPYSAAKFALDGFFGSLRRELDVQDVNVAITMCVLGLRDRASAAEAVRSSTSRPRQPEHRGVPLQSQTAMFLPPTVPGARTLTETPLRGWPQPKMKSSRQKSKTEKNDGHLEPVTAWEVQVPRVRRLCRGLARPHLFGHD

SEQ ID NO: 6589 - protein, 47 aa, Homo Sapiens
MKVLLLTGLGALFFAYYWDDNFDPGGRELPEAGRPQGLLHRGGHGLP

SEQ ID NO: 6590 - protein, 189 aa, Homo Sapiens
MKVLLLTGLGALFFAYYWDDNFDPGKLCELRATDVAGAAQPDGQQGLPGGGVLAARPRAHVVLHSLLGGQVCAGRLLRLPAAGAGRAGRERGHHHVRPGPPRSRLRRRGSQGSHEGQGGPGAQGSPGRDPRRRHARGRRLLPVAFPPAVLAPALATAPAGLVYPPGAQRHGRGSLSTGGCPSSPRRQCS

SEQ ID NO: 6591 - protein, 152 aa, Homo Sapiens
MQVNFVSYVQLTSRALPSLTDSKGSLVVVSSLLGRVPTSFSTPYSAAKFALDGFFGSLRRELDVQDVNVAITMCVLGLRDRASAAEAVRGVTRVKAAPGPKAALAVIRGGATRAAGVFYPWRFRLLCLLRRWLPRPRAWFIRQELNVTAAAA

SEQ ID NO: 6592 - protein, 152 aa, Homo Sapiens; identical to SEQ ID NO: 6591

SEQ ID NO: 6593 - protein, 181 aa, Homo Sapiens
MQVNFVSYVQLTSRALPSLTDSKGSLVVVSSLLGRVPTSFSTPYSAAKFALDGFFGSLRRELDVQDVNVAITMCVLGLRDRASAAEAVRSSTSRPRQPEHRGVPLQSQTAMFLPPTVPGARTLTETPLRGWPQPKMKSSRQKSKTEKNDGHLEPVTAWEVQVPRVRRLCRGLARPHLFGHD

SEQ ID NO: 6594 - protein, 135 aa, Homo Sapiens
  misc_feature (1)..(1): Xaa can be any naturally occurring amino acid
XLGALFFAYYWDDNFDPGGLDYLVLNHIGGAPAGTRARSPQATRWLMQVNFVSYVQLTSRALPSLTDSKGSLVVVSSLLGRVPTSFSTPYSAAKFALDGFFGSLRRELDVQDVNVAITMCVLGLRDRASAAEAVR

SEQ ID NO: 6595 - protein, 256 aa, Homo Sapiens
MKFLLDILLLLPLLIVCSLESFVKLFIPKRRKSVTGEIVLITGAGHGIGRLTAYEFAKLKSKLVLWDINKHGLEETAAKCKGLGAKVHTFVVDCSNREDIYSSAKKTTKAFLPAMTKNNHGHIVTVASAAGHVSVPFLLAYCSSKFAAVGFHKTLTDELAALQITGVKTTCLCPNFVNTGFIKNPSTSLGPTLEPEEVVNRLMHGILTEQKMIFIPSSIAFLTTLERILPERFLAVLKRKISVKFDAVIGYKMKAQ

SEQ ID NO: 6596 - protein, 300 aa, Homo Sapiens
MKFLLDILLLLPLLIVCSLESFVKLFIPKRRKSVTGEIVLITGAGHGIGRLTAYEFAKLKSKLVLWDINKHGLEETAAKCKGLGAKVHTFVVDCSNREDIYSSAKKVKAEIGDVSILVNNAGVVYTSDLFATQDPQIEKTFEVNVLAHFWTTKAFLPAMTKNNHGHIVTVASAAGHVSVPFLLAYCSSKFAAVGFHKTLTDELAALQITGVKTTCLCPNFVNTGFIKNPSTSLGPTLEPEEVVNRLMHGILTEQKMIFIPSSIAFLTTLERILPERFLAVLKRKISVKFDAVIGYKMKAQ

SEQ ID NO: 6597 - protein, 341 aa, Homo Sapiens
MRKVVLITGASSGIGLALCKRLLAEDDELHLCLACRNMSKAEAVCAALLASHPTAEVTIVQVDVSNLQSVFRASKELKQRFQRLDCIYLNAGIMPNPQLNIKALFFGLFSRKVIHMFSTAEGLLTQGDKITADGLQEVFETNVFGHFILIRELEPLLCHSDNPSQLIWTSSRSARKSNFSLEDFQHSKGKEPYSSSKYATDLLSVALNRNFNQQGLYSNVACPGTALTNLTYGILPPFIWTLLMPAILLLRFFANAFTLTPYNGTEALVWLFHQKPESLNPLIKYLSATTGFGRNYIMTQKMDLDEDTAEKFYQKLLELEKHIRVTIQKTDNQARLSGSCL

SEQ ID NO: 6598 - protein, 111 aa, Homo Sapiens
MRKVVLITGASSGIGLALCKRLLAEDDELHLCLACRNMSKAEAVCAALLASHPTAEVTIVQVDVSNLQSVFRASKELKQRFQRLDCIYLNAGIMPNPQLNIKALFFGLFSS

SEQ ID NO: 6599 - protein, 109 aa, Homo Sapiens
MRKVVLITGASSGIGLALCKRLLAEDDELHLCLACRNMSKAEAVCAALLASHPTAEVTIVQVDVSNLQSVFRASKELKQRMIKKWLYVICVEDHVSEIRLYISKCWDHA

SEQ ID NO: 6600 - protein, 84 aa, Homo Sapiens
MRKVVLITGASSGIGLALCKRLLAEDDELHLCLACRNMSKAEAVCAALLASHPTAEVTIVQVDVSNLQSVFRASKELKQRYISC

SEQ ID NO: 6601 - protein, 62 aa, Homo Sapiens
  misc_feature (1)..(1): Xaa can be any naturally occurring amino acid
XSLEDFQHSKGKEPYSSSKYATDLLSVALNRNFNQQVLYSSVYVIKYLPHYMEVGLSITIFR

SEQ ID NO: 6602 - protein, 49 aa, Homo Sapiens
MMKLIINSLYKNKEIFLRELISNASDALDKIRLISLTDENALSGNEELT

SEQ ID NO: 6603 - protein, 803 aa, Homo Sapiens
MRALWVLGLCCVLLTFGSVRADDEVDVDGTVEEDLGKSREGSRTDDEVVQREEEAIQLDGLNASQIRELREKSEKFAFQAEVNRMMKLIINSLYKNKEIFLRELISNASDALDKIRLISLTDENALSGNEELTVKIKCDKEKNLLHVTDTGVGMTREELVKNLGTIAKSGTSEFLNKMTEAQEDGQSTSELIGQFGVGFYSAFLVADKVIVTSKHNNDTQHIWESDSNEFSVIADPRGNTLGRGTTITLVLKEEASDYLELDTIKNLVKKYSQFINFPIYVWSSKTETVEEPMEEEEAAKEEKEESDDEAAVEEEEEEKKPKTKKVEKTVWDWELMNDIKPIWQRPSKEVEEDEYKAFYKSFSKESDDPMAYIHFTAEGEVTFKSILFVPTSAPRGLFDEYGSKKSDYIKLYVRRVFITDDFHDMMPKYLNFVKGVVDSDDLPLNVSRETLQQHKLLKVIRKKLVRKTLDMIKKIADDKYNDTFWKEFGTNIKLGVIEDHSNRTRLAKLLRFQSSHHPTDITSLDQYVERMKEKQDKIYFMAGSSRKEAESSPFVERLLKKGYEVIYLTEPVDEYCIQALPEFDGKRFQNVAKEGVKFDESEKTKESREAVEKEFEPLLNWMKDKALKDKIEKAVVSQRLTESPCALVASQYGWSGNMERIMKAQAYQTGKDISTNYYASQKKTFEINPRHPLIRDMLRRIKEDEDDKTVLDLAVVLFETATLRSGYLLPDTKAYGDRIERMLRLSLNIDPDAKVEEEPEEEPEETAEDTTEDTEQDEDEEMDVGTDEEEETAKESTAEKDEL

SEQ ID NO: 6604 - protein, 315 aa, Homo Sapiens [sequence omitted]

SEQ ID NO: 6605 - protein, 315 aa, Homo Sapiens [sequence omitted]

SEQ ID NO: 6606 - protein, 53 aa, Homo Sapiens
MRALWVLGLCCVLLTFGSVRADDEVDVDGTVEEDLGKSREGSRTDDEVVQRSR

SEQ ID NO: 6607 - protein, 147 aa, Homo Sapiens
  misc_feature (1)..(1): Xaa can be any naturally occurring amino acid
XQYGWSGNMERIMKAQAYQTGKDISTNYYASQKKTFEINPRHPLIRDMLRRIKEDEDDKTVLDLAVVLFETATLRSGYLLPDTKAYGDRIERMLRLSLNIDPDAKVEEEPEEEPEETAEDTTEDTEQDEDEEMDVGTDEEEETAKMS

SEQ ID NO: 6608 - protein, 471 aa, Homo Sapiens
MAREMTILGSAVLTLLLAGYLAQQYLPLPTPKVIGIDLGTTYCSVGVFFPGTGKVKVIPDENGHISIPSMVSFTDNDVYVGYESVELADSNPQNTIYDAKRFIGKIFTAEELEAEIGRYPFKVLNKNGMVEFSVTSNETITVSPEYVGSRLLLKLKEMAEAYLGMPVANAVISVPAEFDLKQRNSTIEAANLAGLKILRVINEPTAAAMAYGLHKADVFHVLVIDLGGGTLDVSLLNKQGGMFLTRAMSGNNKLGGQDFNQRLLQYLYKQIYQTYGFVPSRKEEIHRLRQAVEMVKLNLTLHQSAQLSVLLTVEEQDRKEPHSSDTELPKDKLSSADDHRVNSGFGRGLSDKKSGESQVLFETEISRKLFDTLNEDLFQKILVPIQQVLKEGHLEKTEIDEVVLVGGSTRIPRIRQVIQEFFGKDPNTSVDPDLAVVTGVAIQAGIDGGSWPLQVSALEIPNKHLQKTNFN

SEQ ID NO: 6609 - protein, 654 aa, Homo Sapiens
MKLSLVAAMLLLLSAARAEEEDKKEDVGTVVGIDLGTTYSCVGVFKNGRVEIIANDQGNRITPSYVAFTPEGERLIGDAAKNQLTSNPENTVFDAKRLIGRTWNDPSVQQDIKFLPFKVVEKKTKPYIQVDIGGGQTKTFAPEEISAMVLTKMKETAEAYLGKKVTHAVVTVPAYFNDAQRQATKDAGTIAGLNVMRIINEPTAAAIAYGLDKREGEKNILVFDLGGGTFDVSLLTIDNGVFEVVATNGDTHLGGEDFDQRVMEHFIKLYKKKTGKDVRKDNRAVQKLRREVEKAKRALSSQHQARIEIESFYEGEDFSETLTRAKFEELNMDLFRSTMKPVQKVLEDSDLKKSDIDEIVLVGGSTRIPKIQQLVKEFFNGKEPSRGINPDEAVAYGAAVQAGVLSGDQDTGDLVLLDVCPLTLGIETVGGVMTKLIPRNTVVPTKKSQIFSTASDNQPTVTIKVYEGERPLTKDNHLLGTFDLTGIPPAPRGVPQIEVTFEIDVNGILRVTAEDKGTGNKNKITITNDQNRLTPEEIERMVNDAEKFAEEDKKLKERIDTRNELESYAYSLKNQIGDKEKLGGKLSSEDKETMEKAVEEKIEWLESHQDADIEDFKAKKKELEEIVQPIISKLYGSAGPPPTGEEDTAEKDEL

SEQ ID NO: 6610 - protein, 236 aa, Homo Sapiens
ISTHFAPGDFQGFALVNPQRNSRLTGEFTVEPVPEGAQLSFGNFAQLGHESFYWQLPETYQGDKGEAYFARMRRAHQNRTSLSEEQLRAAVTAGRIPEPPEGRDWAQRASQVDEAQRRMDAEIWQLLSSFAAQPQPPPQGLSPHPQPAAALRAAPPPSSSSSSSSSSASLSFSPGSQFSLSYEGFSLLPGSLYYWQLPRAFLGDKVAAYGGKLRYTLSYTAGPQGSPLSDPDVQIT

SEQ ID NO: 6611 - protein, 4391 aa, Homo Sapiens
MGWRAAGALLLALLLHGRLLAVTHGLRAYDGLSLPEDIETVTASQMRWTHSYLSDDEDMLADSISGDDLGSGDLGSGDFQMVYFRALVNFTRSIEYSPQLEDAGSREFREVSEAVVDTLESEYLKIPGDQVVSVVFIKELDGWVFVELDVGSEGNADGAQIQEMLLRVISSGSVASYVTSPQGFQFRRLGTVPQFPRACTEAEFACHSYNECVALEYRCDRRPDCRDMSDELNCEEPVLGISPTFSLLVETTSLPPRPETTIMRQPPVTHAPQPLLPGSVRPLPCGPQEAACRNGHCIPRDYLCDGQEDCEDGSDELDCGPPPPCEPNEFPCGNGHCALKLWRCDGDFDCEDRTDEANCPTKRPEEVCGPTQFRCVSTNMCIPASFHCDEESDCPDRSDEFGCMPPQVVTPPRESIQASRGQTVTFTCVAIGVPTPIINWRLNWGHIPSHPRVTVTSEGGRGTLIIRDVKESDQGAYTCEAMNARGMVFGIPDGVLELVPQRGPCPDGHFYLEHSAACLPCFCFGITSVCQSTRRFRDQIRLRFDQPDDFKGVNVTMPAQPGTPPLSSTQLQIDPSLHEFQLVDLSRRFLVHDSFWALPEQFLGNKVDSYGGSLRYNVRYELARGMLEPVQRPDVVLMGAGYRLLSRGHTPTQPGALNQRQVQFSEEHWVHESGRPVQRAELLQVLQSLEAVLIQTVYNTKMASVGLSDIAMDTTVTHATSHGRAHSVEECRCPIGYSGLSCESCDAHFTRVPGGPYLGTCSGCNCNGHASSCDPVYGHCLNCQHNTEGPQCNKCKAGFFGDAMKATATSCRPCPCPYIDASRRFSDTCFLDTDGQATCDACAPGYTGRRCESCAPGYEGNPIQPGGKCRPVNQEIVRCDERGSMGTSGEACRCKNNVVGRLCNECADGSFHLSTRNPDGCLKCFCMGVSRHCTSSSWSRAQLHGASEEPGHFSLTNAASTHTTNEGIFSPTPGELGFSSFHRLLSGPYFWSLPSRFLGDKVTSYGGELRFTVTQRSQPGSTPLHGQPLVVLQGNNIILEHHVAQEPSPGQPSTFIVPFREQAWQRPDGQPATREHLLMALAGIDTLLIRASYAQQPAESRVSGISMDVAVPEETGQDPALEVEQCSCPPGYRGPSCQDCDTGYTRTPSGLYLGTCERCSCHGHSEACEPETGACQGCQHHTEGPRCEQCQPGYYGDAQRGTPQDCQLCPCYGDPAAGQAAHTCFLDTDGHPTCDACSPGHSGRHCERCAPGYYGNPSQGQPCQRDSQVPGPIGCNCDPQGSVSSQCDAAGQCQCKAQVEGLTCSHCRPHHFHLSASNPDGCLPCFCMGITQQCASSAYTRHLISTHFAPGDFQGFALVNPQRNSRLTGEFTVEPVPEGAQLSFGNFAQLGHESFYWQLPETYQGDKVAAYGGKLRYTLSYTAGPQGSPLSDPDVQITGNNIMLVASQPALQGPERRSYEIMFREEFWRRPDGQPATREHLLMALADLDELLIRATFSSVPLAASISAVSLEVAQPGPSNRPRALEVEECRCPPGYIGLSCQDCAPGYTRTGSGLYLGHCELCECNGHSDLCHPETGACSQCQHNAAGEFCELCAPGYYGDATAGTPEDCQPCACPLTNPENMFSRTCESLGAGGYRCTACEPGYTGQYCEQCGPGYVGNPSVQGGQCLPETNQAPLVVEVHPARSIVPQGGSHSLRCQVSGSPPHYFYWSREDGRPVPSGTQQRHQGSELHFPSVQPSDAGVYICTCRNLHQSNTSRAELLVTEAPSKPITVTVEEQRSQSVRPGADVTFICTAKSKSPAYTLVWTRLHNGKLPTRAMDFNGILTIRNVQLSDAGTYVCTGSNMFAMDQGTATLHVQASGTLSAPVVSIHPPQLTVQPGQLAEFRCSATGSPTPTLEWTGGPGGQLPAKAQIHGGILRLPAVEPTDQAQYLCRAHSSAGQQVARAVLHVHGGGGPRVQVSPERTQVHAGRTVRLYCRAAGVPSATITWRKEGGSLPPQARSERTDIATLLIPAITTADAGFYLCVATSPAGTAQARIQVVVLSASDASPPPVKIESSSPSVTEGQTLDLNCVVAGSAHAQVTWYRRGGSLPPHTQVHGSRLRLPQVSPADSGEYVCRVENGSGPKEASITVSVLHGTHSGPSYTPVPGSTRPIRIEPSSSHVAEGQTLDLNCVVPGQAHAQVTWHKRGGSLPARHQTHGSLLRLHQVTPADSGEYVCHVVGTSGPLEASVLVTIEASVIPGPIPPVRIESSSSTVAEGQTLDLSCVVAGQAHAQVTWYKRGGSLPARHQVRGSRLYIFQASPADAGQYVCRASNGMEASITVTVTGTQGANLAYPAGSTQPIRIEPSSSQVAEGQTLDLNCVVPGQSHAQVTWHKRGGSLPVRHQTHGSLLRLYQASPADSGEYVCRVLGSSVPLEASVLVTIEPAGSVPALGVTPTVRIESSSSQVAEGQTLDLNCLVAGQAHAQVTWHKRGGSLPARHQVHGSRLRLLQVTPADSGEYVCRVVGSSGTQEASVLVTIQQRLSGSHSQGVAYPVRIESSSASLANGHTLDLNCLVASQAPHTITWYKRGGSLPSRHQIVGSRLRIPQVTPADSGEYVCHVSNGAGSRETSLIVTIQGSGSSHVPSVSPPIRIESSSPTVVEGQTLDLNCVVARQPQAIITWYKRGGSLPSRHQTHGSHLRLHQMSVADSGEYVCRANNNIDALEASIVISVSPSAGSPSAPGSSMPIRIESSSSHVAEGETLDLNCVVPGQAHAQVTWHKRGGSLPSHHQTRGSRLRLHHVSPADSGEYVCRVMGSSGPLEASVLVTIEASGSSAVHVPAPGGAPPIRIEPSSSRVAEGQTLDLKCVVPGQAHAQVTWHKRGGNLPARHQVHGPLLRLNQVSPADSGEYSCQVTGSSGTLEASVLVTIEPSSPGPIPAPGLAQPIYIEASSSHVTEGQTLDLNCVVPGQAHAQVTWYKRGGSLPARHQTHGSQLRLHLVSPADSGEYVCRAASGPGPEQEASFTVTVPPSEGSSYRLRSPVISIDPPSSTVQQGQDASFKCLIHDGAAPISLEWKTRNQELEDNVHISPNGSIITIVGTRPSNHGTYRCVASNAYGVAQSVVNLSVHGPPTVSVLPEGPVWVKVGKAVTLECVSAGEPRSSARWTRISSTPAKLEQRTYGLMDSHAVLQISSAKPSDAGTYVCLAQNALGTAQKQVEVIVDTGAMAPGAPQVQAEEAELTVEAGHTATLRCSATGSPAPTIHWSKLRSPLPWQHRLEGDTLIIPRVAQQDSGQYICNATSPAGHAEATIILHVESPPYATTVPEHASVQAGETVQLQCLAHGTPPLTFQWSRVGSSLPGRATARNELLHFERAAPEDSGRYRCRVTNKVGSAEAFAQLLVQGPPGSLPATSIPAGSTPTVQVTPQLETKSIGASVEFHCAVPSDRGTQLRWFKEGGQLPPGHSVQDGVLRIQNLDQSCQGTYICQAHGPWGKAQASAQLVIQALPSVLINIRTSVQTVVVGHAVEFECLALGDPKPQVTWSKVGGHLRPGIVQSGGVVRIAHVELADAGQYRCTATNAAGTTQSHVLLLVQALPQISMPQEVRVPAGSAAVFPCIASGYPTPDISWSKLDGSLPPDSRLENNMLMLPSVRPQDAGTYVCTATNRQGKVKAFAHLQVPERVVPYFTQTPYSFLPLPTIKDAYRKFEIKITFRPDSADGMLLYNGQKRVPGSPTNLANRQPDFISFGLVGGRPEFRFDAGSGMATIRHPTPLALGHFHTVTLLRSLTQGSLIVGDLAPVNGTSQGKFQGLDLNEELYLGGYPDYGAIPKAGLSSGFIGCVRELRIQGEEIVFHDLNLTAHGISHCPTCRDRPCQNGGQCHDSESSSYVCVCPAGFTGSRCEHSQALHCHPEACGPDATCVNRPDGRGYTCRCHLGRSGLRCEEGVTVTTPSLSGAGSYLALPALTNTHHELRLDVEFKPLAPDGVLLFSGGKSGPVEDFVSLAMVGGHLEFRYELGSGLAVLRSAEPLALGRWHRVSAERLNKDGSLRVNGGRPVLRSSPGKSQGLNLHTLLYLGGVEPSVPLSPATNMSAHFRGCVGEVSVNGKRLDLTYSFLGSQGIGQCYDSSPCERQPCQHGATCMPAGEYEFQCLCRDGFKGDLCEHEENPCQLREPCLHGGTCQGTRCLCLPGFSGPRCQQGSGHGIAESDWHLEGSGGNDAPGQYGAYFHDDGFLAFPGHVFSRSLPEVPETIELEVRTSTASGLLLWQGVEVGEAGQGKDFISLGLQDGHLVFRYQLGSGEARLVSEDPINDGEWHRVTALREGRRGSIQVDGEELVSGRSPGPNVAVNAKGSVYIGGAPDVATLTGGRFSSGITGCVKNLVLHSARPGAPPPQPLDLQHRAQAGANTRPCPS

SEQ ID NO: 6612 - protein, 109 aa, Homo Sapiens
  misc_feature (1)..(1): Xaa can be any naturally occurring amino acid
XGTPPLTFQWSRVGSSLPGRATARNELLHFERAAPEDSGRYRCRVTNKVGSAEAFAQLLVQESRTWTRAAKGRIYARPMDLGGRPRPVPSWLSKVGGWLQASAKSREQR

SEQ ID NO: 6613 - protein, 307 aa, Homo Sapiens
  misc_feature (1)..(1): Xaa can be any naturally occurring amino acid
XNMLMLPSVRPQDAGTYVCTATNRQGKVKAFAHLQVPERVVPYFTQTPYSFLPLPTIKDAYRKFEIKITFRPDSADGLLLYSGMLLYNGQKRVPGSPTNLANRQPDFISFGLVGGRPEFRFDAGSGMATIRHPTPLALGHFHTVTLLRSLTQGSLIVGDLAPVNGTSQGKFQGLDLNEELYLGGYPDYGAIPKAGLSSGFIGCVRELRIQGEEIVFHDLNLTAHGISHCPTCRDRPCQNGGQCHDSESSSYVCVCPAGFTGSRCEHSQALHCHPEACGPDATCVNRPDGRGYTCRCHLGRSGLRCEE

SEQ ID NO: 6614 - protein, 197 aa, Homo Sapiens
  misc_feature (1)..(1): Xaa can be any naturally occurring amino acid
XTPSGLYLGTCERCSCHGHSEACEPETGACQGCQHHTEGPRCEQCQPGYYGDAQRGTPQDCQLCPCYGDPAAGQAAHTCFLDTDGHPTCDACSPGHSGRHCERCAPGYYGNPSQGQPCQRDSQVPGPIGCNCDPQGSVSSQCDAAGQCQCKVSPNPCPCGACSAPLPRPCGEIRQHLVEAETWAWGAGHGGQGRGCP

SEQ ID NO: 6615 - protein, 242 aa, Homo Sapiens
MAETEALSKLREDFRMQNKSVFILGASGETGRVLLKEILEQGLFSKVTLIGRRKLTFDEEAYKNVNQEVVDFEKLDDYASAFQGHDVGFCCLGTTRGKAGAEGFVRVDRDYVLKSAELAKAGGCKHFNLLSSKGADKSSNFLYLQVKGEVEAKVEELKFDRYSVFRPGVLLCDRQESRPGEWLVRKFFGSLPDSWASGHSVPVVTVVRAMLNNVVRPRDKQMELLENKAIHDLGKAHGSLKP

SEQ ID NO: 6616 - protein, 242 aa, Homo Sapiens; identical to SEQ ID NO: 6615

SEQ ID NO: 6617 - protein, 242 aa, Homo Sapiens; identical to SEQ ID NO: 6615

SEQ ID NO: 6618 - protein, 196 aa, Homo Sapiens
MAETEALSKLREDFRMQNKSVFILGASGETGRVLLKEILEQGLFSKVTLIGRRKLTFDEEAYKNVNQEVVDFEKLDDYASAFQGHDVGFCCLGTTRGKAGAGEVEAKVEELKFDRYSVFRPGVLLCDRQESRPGEWLVRKFFGSLPDSWASGHSVPVVTVVRAMLNNVVRPRDKQMELLENKAIHDLGKAHGSLKP

SEQ ID NO: 6619 - protein, 133 aa, Homo Sapiens
MAETEALSKLREDFRMQNKSVFILGASGETGRVLLKEILEQGLFSKVTLIGRRKLTFDEEAYKNVNQEVVDFEKLDDYASAFQGHDVGFCCLGTTRGKAGAVRKAYALFPFCWPVISRILFLLTLFLCACCNA

SEQ ID NO: 6620 - protein, 133 aa, Homo Sapiens; identical to SEQ ID NO: 6619

SEQ ID NO: 6621 - protein, 133 aa, Homo Sapiens; identical to SEQ ID NO: 6619

SEQ ID NO: 6622 - protein, 276 aa, Homo Sapiens
MAGPAALSAAAAAALAAALLLLRREDPGPGAGPSMAETEALSKLREDFRMQNKSVFILGASGETGRVLLKEILEQGLFSKVTLIGRRKLTFDEEAYKNVNQEVVDFEKLDDYASAFQGHDVGFCCLGTTRGKAGAEGFVRVDRDYVLKSAELAKAGGCKHFNLLSSKGADKSSNFLYLQVKGEVEAKVEELKFDRYSVFRPGVLLCDRQESRPGEWLVRKFFGSLPDSWASGHSVPVVTVVRAMLNNVVRPRDKQMELLENKAIHDLGKAHGSLKP

SEQ ID NO: 6623 - protein, 57 aa, Homo Sapiens
MKFFVFALVLALMISMISADSHEKRHHGYRRKFHEKHHSHREFPFYGDYGSNYLYDN

SEQ ID NO: 6624 - protein, 57 aa, Homo Sapiens; identical to SEQ ID NO: 6623

SEQ ID NO: 6625 - protein, 57 aa, Homo Sapiens; identical to SEQ ID NO: 6623

SEQ ID NO: 6626 - protein, 41 aa, Homo Sapiens
MKFFVFALILALMLSMTGADSHAKEKHHSHRGYRSNYLYDN

SEQ ID NO: 6627 - protein, 51 aa, Homo Sapiens
MKFFVFALILALMLSMTGADSHAKRHHGYKRKFHEKHHSHRGYRSNYLYDN

SEQ ID NO: 6628 - protein, 51 aa, Homo Sapiens; identical to SEQ ID NO: 6627

SEQ ID NO: 6629 - protein, 221 aa, Homo Sapiens
GKLPVLLLGRSSELRPGEFVVAIGSPFSLQNTVTTGIVSTTQRGGKELGLRNSDMDYIQTDAIINYGNSGGPLVNLDGEVIGINTLKVTAGISFAIPSDKIKKFLTESHDRQAKGKAITKKKYIGIRMMSLTSSKAKELKDRHRDFPDVISGAYIIEVIPDTPAEAGGLKENDVIISINGQSVVSANDVSDVIKRESTLNMVVRRGNEDIMITVIPEEIDP

SEQ ID NO: 6630 - protein, 480 aa, Homo Sapiens
MQIPRAALLPLLLLLLAAPASAQLSRAGRSAPLAAGCPDRCEPARCPPQPEHCEGGRARDACGCCEVCGAPEGAACGLQEGPCGEGLQCVVPFGVPASATVRRRAQAGLCVCASSEPVCGSDANTYANLCQLRAASRRSERLHRPPVIVLQRGACGQGQEDPNSLRHKYNFIADVVEKIAPAVVHIELFRKLPFSKREVPVASGSGFIVSEDGLIVTNAHVVTNKHRVKVELKNGATYEAKIKDVDEKADIALIKIDHQGKLPVLLLGRSSELRPGEFVVAIGSPFSLQNTVTTGIVSTTQRGGKELGLRNSDMDYIQTDAIINYGNSGGPLVNLDGEVIGINTLKVTAGISFAIPSDKIKKFLTESHDRQAKGKAITKKKYIGIRMMSLTSSKAKELKDRHRDFPDVISGAYIIEVIPDTPAEAGGLKENDVIISINGQSVVSANDVSDVIKRESTLNMVVRRGNEDIMITVIPEEIDP

SEQ ID NO: 6631 - protein, 453 aa, Homo Sapiens
MQARALLLAALAALALAREPPAAPCPARCDVSRCPSPRCPGGYVPDLCNCCLVCAASEGEPCGGPLDSPCGESLECVRGLCRCRWSHAVCGTDGHTYANVCALQAASRRALQLSGTPVRQLQKGACPLGLHQLSSPRYKFNFIADVVEKIAPAVVHIELFLRHPLFGRNVPLSSGSGFIMSEAGLIITNAHVVSSNSAAPGRQQLKVQLQNGDSYEATIKDIDKKSDIATIKIHPKKKLPVLLLGHSADLRPGEFVVAIGSPFALQNTVTTGIVSTAQREGRELGLRDSDMDYIQTDAIINYGNSGGPLVNLDGEVIGINTLKVTAGISFAIPSDRITRFLTEFQDKQIKDWKKRFIGIRMRTITPSLVDELKASNPDFPEVSSGIYVQEVAPNSPSQRGGIQDGDIIVKVNGRPLVDSSELQEAVLTESPLLLEVRRGNDDLLFSIAPEVVM

SEQ ID NO: 6632 - protein, 357 aa, Homo Sapiens
MQARALLLAALAALALAREPPAAPCPARCDVSRCPSPRCPGGYVPDLCNCCLVCAASEGEPCGGPLDSPCGESLECVRGLCRCRWSHAVCGTDGHTYANVCALQAASRRALQLSGTPVRQLQKGACPLGLHQLSSPRYKFNFIADVVEKIAPAVVHIELFLRHPLFGRNVPLSSGSGFIMSEAGLIITNAHVVSSNSAAPGRQQLKVQLQNGDSYEATIKDIDKKSDIATIKIHPKKKLPVLLLGHSADLRPGEFVVAIGSPFALQNTVTTGIVSTAQREGRELGLRDSDMDYIQTDAIINYGNSGGPLVNLDGEVIGINTLKVTAGISFAIPSDRITRFLTEFQDKQIKAPSLAVH

SEQ ID NO: 6633 - protein, 476 aa, Homo Sapiens
MIRPQLRTAGLGRCLLPGLLLLLVPVLWAGAEKLHTQPSCPAVCQPTRCPALPTCALGTTPVFDLCRCCRVCPAAEREVCGGAQGQPCAPGLQCLQPLRPGFPSTCGCPTLGGAVCGSDRRTYPSMCALRAENRAARRLGKVPAVPVQWGNCGDTGTRSAGPLRRNYNFIAAVVEKVAPSVVHVQLWGRLLHGSRLVPVYSGSGFIVSEDGLIITNAHVVRNQQWIEVVLQNGARYEAVVKDIDLKLDLAVIKIESNAELPVLMLGRSSDLRAGEFVVALGSPFSLQNTATAGIVSTKQRGGKELGMKDSDMDYVQIDATINYGNSGGPLVNLDGDVIGVNSLRVTDGISFAIPSDRVRQFLAEYHEHQMKGKAFSNKKYLGLQMLSLTVPLSEELKMHYPDFPDVSSGVYVCKVVEGTAAQSSGLRDHDVIVNINGKPITTTTDVVKALDSDSLSMAVLRGKDNLLLTVIPETIN

SEQ ID NO: 6634 - protein, 69 aa, Homo Sapiens
MAAHLLPICALFLTLLDMAQGFRGPLLPNRPFTTVWNANTQWCLERHGVDVDVSVFDVVANPGQTFRGP

SEQ ID NO: 6635 - protein, 103 aa, Homo Sapiens
MAAHLLPICALFLTLLDMAQGFRGPLLPNRPFTTVWNANTQWCLERHGVDVDVSVFDVVANPGQTFRGPDMTIFYSSQLGTYPYYTPTGEPVFGGLPQNASLI

SEQ ID NO: 6636 - protein, 435 aa, Homo Sapiens
MAAHLLPICALFLTLLDMAQGFRGPLLPNRPFTTVWNANTQWCLERHGVDVDVSVFDVVANPGQTFRGPDMTIFYSSQLGTYPYYTPTGEPVFGGLPQNASLIAHLARTFQDILAAIPAPDFSGLAVIDWEAWRPRWAFNWDTKDIYRQRSRALVQAQHPDWPAPQVEAVAQDQFQGAARAWMAGTLQLGRALRPRGLWGFYGFPDCYNYDFLSPNYTGQCPSGIRAQNDQLGWLWGQSRALYPSIYMPAVLEGTGKSQMYVQHRVAEAFRVAVAAGDPNLPVLPYVQIFYDTTNHFLPLDELEHSLGESAAQGAAGVVLWVSWENTRTKESCQAIKEYMDTTLGPFILNVTSGALLCSQALCSGHGRCVRRTSHPKALLLLNPASFSIQLTPGGGPLSLRGALSLEDQAQMAVEFKCRCYPGWQAPWCERKSMW

SEQ ID NO: 6637 - protein, 435 aa, Homo Sapiens; identical to SEQ ID NO: 6636

SEQ ID NO: 6638 - protein, 405 aa, Homo Sapiens
MAAHLLPICALFLTLLDMAQGFRGPLLPNRPFTTVWNANTQWCLERHGVDVDVSVFDVVANPGQTFRGPDMTIFYSSQLGTYPYYTPTGEPVFGGLPQNASLIAHLARTFQDILAAIPAPDFSGLAVIDWEAWRPRWAFNWDTKDIYRQRSRALVQAQHPDWPAPQVEAVAQDQFQGAARAWMAGTLQLGRALRPRGLWGFYGFPDCYNYDFLSPNYTGQCPSGIRAQNDQLGWLWGQSRALYPSIYMPAVLEGTGKSQMYVQHRVAEAFRVAVAAGDPNLPVLPYVQIFYDTTNHFLPLESCQAIKEYMDTTLGPFILNVTSGALLCSQALCSGHGRCVRRTSHPKALLLLNPASFSIQLTPGGGPLSLRGALSLEDQAQMAVEFKCRCYPGWQAPWCERKSMW

SEQ ID NO: 6639 - protein, 435 aa, Homo Sapiens; identical to SEQ ID NO: 6636

SEQ ID NO: 6640 - protein, 435 aa, Homo Sapiens; identical to SEQ ID NO: 6636

SEQ ID NO: 6641 - protein, 253 aa, Homo Sapiens
MAGTLQLGRALRPRGLWGFYGFPDCYNYDFLSPNYTGQCPSGIRAQNDQLGWLWGQSRALYPSIYMPAVLEGTGKSQMYVQHRVAEAFRVAVAAGDPNLPVLPYVQIFYDTTNHFLPLDELEHSLGESAAQGAAGVVLWVSWENTRTKESCQAIKEYMDTTLGPFILNVTSGALLCSQALCSGHGRCVRRTSHPKALLLLNPASFSIQLTPGGGPLSLRGALSLEDQAQMAVEFKCRCYPGWQAPWCERKSMW

SEQ ID NO: 6642 - protein, 176 aa, Homo Sapiens
MYVQHRVAEAFRVAVAAGDPNLPVLPYVQIFYDTTNHFLPLDELEHSLGESAAQGAAGVVLWVSWENTRTKESCQAIKEYMDTTLGPFILNVTSGALLCSQALCSGHGRCVRRTSHPKALLLLNPASFSIQLTPGGGPLSLRGALSLEDQAQMAVEFKCRCYPGWQAPWCERKSMW

SEQ ID NO: 6643 - protein, 48 aa, Homo Sapiens
MRAGPGPTVTLALVLAVSWAMELKPTAPPIFTGRPFVVAWDVPTQDCG

SEQ ID NO: 6644 - protein, 76 aa, Homo Sapiens
MRAGPGPTVTLALVLAVSWAMELKPTAPPIFTGRPFVVAWDVPTQDCGPRLKVPLDLNAFDVQASPNEGFVNQNIT

SEQ ID NO: 6645 - protein, 81 aa, Homo Sapiens
MRAGPGPTVTLALVLAVSWAMELKPTAPPIFTGRPFVVAWDVPTQDCGPRLKVPLDLNAFDVQASPNEGFVNQNITIFYRD

SEQ ID NO: 6646 - protein, 117 aa, Homo Sapiens
MRAGPGPTVTLALVLAVSWAMELKPTAPPIFTGRPFVVAWDVPTQDCGPRLKVPLDLNAFDVQASPNEGFVNQNITIFYRDRLGLYPRFDSAGRSVHGGVPQNVSLWAHRKMLQKRV

SEQ ID NO: 6647 - protein, 121 aa, Homo Sapiens
MRAGPGPTVTLALVLAVSWAMELKPTAPPIFTGRPFVVAWDVPTQDCGPRLKVPLDLNAFDVQASPNEGFVNQNITIFYRDRLGLYPRFDSAGRSVHGGVPQNVSLWAHRKMLQKRVEHYI

SEQ ID NO: 6648 - protein, 473 aa, Homo Sapiens
MRAGPGPTVTLALVLAVSWAMELKPTAPPIFTGRPFVVAWDVPTQDCGPRLKVPLDLNAFDVQASPNEGFVNQNITIFYRDRLGLYPRFDSAGRSVHGGVPQNVSLWAHRKMLQKRVEHYIRTQESAGLAVIDWEDWRPVWVRNWQDKDVYRRLSRQLVASRHPDWPPDRIVKQAQYEFEFAAQQFMLETLRYVKAVRPRHLWGFYLFPDCYNHDYVQNWESYTGRCPDVEVARNDQLAWLWAESTALFPSVYLDETLASSRHGRNFVSFRVQEALRVARTHHANHALPVYVFTRPTYSRRLTGLSEMDLISTIGESAALGAAGVILWGDAGYTTSTETCQYLKDYLTRLLVPYVVNVSWATQYCSRAQCHGHGRCVRRNPSASTFLHLSTNSFRLVPGHAPGEPQLRPVGELSWADIDHLQTHFRCQCYLGWSGEQCQWDHRQAAGGASEAWAGSHLTSLLALAALAFTWTL

SEQ ID NO: 6649 - protein, 473 aa, Homo Sapiens; identical to SEQ ID NO: 6648

SEQ ID NO: 6650 - protein, 473 aa, Homo Sapiens; identical to SEQ ID NO: 6648

SEQ ID NO: 6651 - protein, 473 aa, Homo Sapiens; identical to SEQ ID NO: 6648

SEQ ID NO: 6652 - protein, 168 aa, Homo Sapiens
MLPPAHHQAFVRHRLEEAFRVALVGHRHPLPVLAYVRLTHRRSGRFLSQDDLVQSIGVSAALGAAGVVLWGDLSLSSSEEECWHLHDYLVDTLGPYVINVTRAAMACSHQRCHGHGRCARRDPGQMEAFLHLWPDGSLGDWKSFSCHCYWGWAGPTCQEPRPGPKEAV

SEQ ID NO: 6653 - protein, 138 aa, Homo Sapiens
MLPPAHHQAFVRHRLEEAFRVALVGHRHPLPVLAYVRLTHRRSGRFLSQEECWHLHDYLVDTLGPYVINVTRAAMACSHQRCHGHGRCARRDPGQMEAFLHLWPDGSLGDWKSFSCHCYWGWAGPTCQEPRPGPKEAV

SEQ ID NO: 6654 - protein, 160 aa, Homo Sapiens
MTTQLGPALVLGVALCLGCGQPLPQVPERPFSVLWNVPSAHCEARFGVHLPLNALGIIANRGQHFHGQNMTIFYKNQLGLYPYFGPRGTAHNGGIPQALPLDRHLALAAYQIHHSLRPGFAGPAVLDWEEWCPLWAGNWGRRRAYQAASWAWAQQVFPDL

SEQ ID NO: 6655 - protein, 417 aa, Homo Sapiens
MTTQLGPALVLGVALCLGCGQPLPQVPERPFSVLWNVPSAHCEARFGVHLPLNALGIIANRGQHFHGQNMTIFYKNQLGLYPYFGPRGTAHNGGIPQALPLDRHLALAAYQIHHSLRPGFAGPAVLDWEEWCPLWAGNWGRRRAYQAASWAWAQQVFPDLDPQEQLYKAYTGFEQAARALMEDTLRVAQALRPHGLWGFYHYPACGNGWHSMASNYTGRCHAATLARNTQLHWLWAASSALFPSIYLPPRLPPAHHQAFVRHRLEEAFRVALVGHRHPLPVLAYVRLTHRRSGRFLSQDDLVQSIGVSAALGAAGVVLWGDLSLSSSEEECWHLHDYLVDTLGPYVINVTRAAMACSHQRCHGHGRCARRDPGQMEAFLHLWPDGSLGDWKSFSCHCYWGWAGPTCQEPRPGPKEAV

SEQ ID NO: 6656 - protein, 387 aa, Homo Sapiens
MTTQLGPALVLGVALCLGCGQPLPQVPERPFSVLWNVPSAHCEARFGVHLPLNALGIIANRGQHFHGQNMTIFYKNQLGLYPYFGPRGTAHNGGIPQALPLDRHLALAAYQIHHSLRPGFAGPAVLDWEEWCPLWAGNWGRRRAYQAASWAWAQQVFPDLDPQEQLYKAYTGFEQAARALMEDTLRVAQALRPHGLWGFYHYPACGNGWHSMASNYTGRCHAATLARNTQLHWLWAASSALFPSIYLPPRLPPAHHQAFVRHRLEEAFRVALVGHRHPLPVLAYVRLTHRRSGRFLSQEECWHLHDYLVDTLGPYVINVTRAAMACSHQRCHGHGRCARRDPGQMEAFLHLWPDGSLGDWKSFSCHCYWGWAGPTCQEPRPGPKEAV

SEQ ID NO: 6657 - protein, 387 aa, Homo Sapiens; identical to SEQ ID NO: 6656

SEQ ID NO: 6658 - protein, 417 aa, Homo Sapiens; identical to SEQ ID NO: 6655

SEQ ID NO: 6659 - protein, 92 aa, Homo Sapiens
MADKVRRQRPRRRVCWALVAVLLADLLALSDTLAVMSVDLGSESMKVAIVKPGVPMEIVLNKESRRKTPVIVTLKENERFFGDSAASMAIKN

SEQ ID NO: 6660 - protein, 103 aa, Homo Sapiens
MADKVRRQRPRRRVCWALVAVLLADLLALSDTLAVMSVDLGSESMKVAIVKPGVPMEIVLNKESRRKTPVIVTLKENERFFGDSAASMAIKNPKATLRYFQHL

SEQ ID NO: 6661 - protein, 149 aa, Homo Sapiens
MADKVRRQRPRRRVCWALVAVLLADLLALSDTLAVMSVDLGSESMKVAIVKPGVPMEIVLNKESRRKTPVIVTLKENERFFGDSAASMAIKNPKATLRYFQHLLGKQADNPHVALYQARFPEHELTFDPQRQTVHFQISSQLQFSPEEV

SEQ ID NO: 6662 - protein, 154 aa, Homo Sapiens
MADKVRRQRPRRRVCWALVAVLLADLLALSDTLAVMSVDLGSESMKVAIVKPGVPMEIVLNKESRRKTPVIVTLKENERFFGDSAASMAIKNPKATLRYFQHLLGKQADNPHVALYQARFPEHELTFDPQRQTVHFQISSQLQFSPEEVLGMVL

SEQ ID NO: 6663 - protein, 211 aa, Homo Sapiens
MADKVRRQRPRRRVCWALVAVLLADLLALSDTLAVMSVDLGSESMKVAIVKPGVPMEIVLNKESRRKTPVIVTLKENERFFGDSAASMAIKNPKATLRYFQHLLGKQADNPHVALYQARFPEHELTFDPQRQTVHFQISSQLQFSPEEVLGMVLNYSRSLAEDFAEQPIKDAVITVPVFFNQAERRAVLQAARMAGLKVLQLINDNTATAL

SEQ ID NO: 6664 - protein, 224 aa, Homo Sapiens
MADKVRRQRPRRRVCWALVAVLLADLLALSDTLAVMSVDLGSESMKVAIVKPGVPMEIVLNKESRRKTPVIVTLKENERFFGDSAASMAIKNPKATLRYFQHLLGKQADNPHVALYQARFPEHELTFDPQRQTVHFQISSQLQFSPEEVLGMVLNYSRSLAEDFAEQPIKDAVITVPVFFNQAERRAVLQAARMAGLKVLQLINDNTATALSYGVFRRKDINTT

SEQ ID NO: 6665 - protein, 656 aa, Homo Sapiens
MADKVRRQRPRRRVCWALVAVLLADLLALSDTLAVMSVDLGSESMKVAIVKPGVPMEIVLNKESRRKTPVIVTLKENERFFGDSAASMAIKNPKATLRYFQHLLGKQADNPHVALYQARFPEHELTFDPQRQTVHFQISSQLQFSPEEVLGMVLNYSRSLAEDFAEQPIKDAVITVPVFFNQAERRAVLQAARMAGLKVLQLINDNTATALSYGVFRRKDINTTAQNIMFYDMGSGSTVCTIVTYQMVKTKEAGMQPQLQIRGVGFDRTLGGLEMELRLRERLAGLFNEQRKGQRAKDVRENPRAMAKLLREANRLKTVLSANADHMAQIEGLMDDVDFKAKVTRVEFEELCADLFERVPGPVQQALQSAEMSLDEIEQVILVGGATRVPRVQEVLLKAVGKEELGKNINADEAAAMGAVYQAAALSKAFKVKPFVVRDAVVYPILVEFTREVEEEPGIHSLKHNKRVLFSRMGPYPQRKVITFNRYSHDFNFHINYGDLGFLGPEDLRVFGSQNLTTVKLKGVGDSFKKYPDYESKGIKAHFNLDESGVLSLDRVESVFETLVEDSAEEESTLTKLGNTISSLFGGGTTPDAKENGTDTVQEEEESPAEGSKDEPGEQVELKEEAEAPVEDGSQPPPPEPKGDATPEGEKATEKE

SEQ ID NO: 6666 - protein, 937 aa, Homo Sapiens
MADKVRRQRPRRRVCWALVAVLLADLLALSDTLAVMSVDLGSESMKVAIVKPGVPMEIVLNKESRRKTPVIVTLKENERFFGDSAASMAIKNPKATLRYFQHLLGKQADNPHVALYQARFPEHELTFDPQRQTVHFQISSQLQFSPEEVLGMVLNYSRSLAEDFAEQPIKDAVITVPVFFNQAERRAVLQAARMAGLKVLQLINDNTATALSYGVFRRKDINTTAQNIMFYDMGSGSTVCTIVTYQMVKTKEAGMQPQLQIRGVGFDRTLGGLEMELRLRERLAGLFNEQRKGQRAKDVRENPRAMAKLLREANRLKTVLSANADHMAQIEGLMDDVDFKAKVTRVEFEELCADLFERVPGPVQQALQSAEMSLDEIEQVILVGGATRVPRVQEVLLKAVGKEELGKNINADEAAAMGAVYQAAALSKAFKVKPFVVRDAVVYPILVEFTREVEEEPGIHSLKHNKRVLFSRMGPYPQRKVITFNRYSHDFNFHINYGDLGFLGPEDLRVFGSQNLTTVKLKGVGDSFKKYPDYESKGIKAHFNLDESGVLSLDRVESVFETLVEDSAEEESTLTKLGNTISSLFGGGTTPDAKENGTDTVQKPSEKAEAGPEGVAPAPEGEKKQKPARKRRMVEEIGVELVVLDLPDLPEDKLAQSVQKLQDLTLRDLEKQEREKAANSLEAFIFETQDKLYQPEYQEVSTEEQREEISGKLSAASTWLEDEGVGATTVMLKEKLAELRKLCQGLFFRVEERKKWPERLSALDNLLNHSSMFLKGARLIPEMDQIFTEVEMTTLEKVINETWAWKNATLAEQAKLPATEKPVLLSKDIEAKMMALDREVQYLLNKAKFTKPRPRPKDKNGTRAEPPLNASASDQGEKVIPPAGQTEDAEPISEPEKVETGSEPGDTEPLELGGPGAEPEQKEQSTGQKRPLKNDEL

SEQ ID NO: 6667 - protein, 678 aa, Homo Sapiens
MADKVRRQRPRRRVCWALVAVLLADLLALSDTLAVMSVDLGSESMKVAIVKPGVPMEIVLNKESRRKTPVIVTLKENERFFGDSAASMAIKNPKATLRYFQHLLGKQADNPHVALYQARFPEHELTFDPQRQTVHFQISSQLQFSPEEVLGMVLNYSRSLAEDFAEQPIKDAVITVPVFFNQAERRAVLQAARMAGLKVLQLINDNTATALSYGVFRRKDINTTAQNIMFYDMGSGSTVCTIVTYQMVKTKEAGMQPQLQIRGVGFDRTLGGLEMELRLRERLAGLFNEQRKGQRAKDVRENPRAMAKLLREANRLKTVLSANADHMAQIEGLMDDVDFKAKVTRVEFEELCADLFERVPGPVQQALQSAEMSLDEIEQVILVGGATRVPRVQEVLLKAVGKEELGKNINADEAAAMGAVYQAAALSKAFKVKPFVVRDAVVYPILVEFTREVEEEPGIHSLKHNKRVLFSRMGPYPQRKVITFNRYSHDFNFHINYGDLGFLGPEDLRVFGSQNLTTVKLKGVGDSFKKYPDYESKGIKAHFNLDESGVLSLDRVESVFETLVEDSAEEESTLTKLGNTISSLFGGGTTPDAKENGTDTVQEEEESPAEGSKDEPGEQVELKEEAEAPVEDGSQPPPPEPKGDATPEGEKATEKENGDKSEAQKPVVCRASVTRFGF

SEQ ID NO: 6668 - protein, 677 aa, Homo Sapiens
MADKVRRQRPRRRVCWALVAVLLADLLALSDTLAVMSVDLGSESMKVAIVKPGVPMEIVLNKESRRKTPVIVTLKENERFFGDSAASMAIKNPKATLRYFQHLLGKQADNPHVALYQARFPEHELTFDPQRQTVHFQISSQLQFSPEEVLGMVLNYSRSLAEDFAEQPIKDAVITVPVFFNQAERRAVLQAARMAGLKVLQLINDNTATALSYGVFRRKDINTTAQNIMFYDMGSGSTVCTIVTYQMVKTKEAGMQPQLQIRGVGFDRTLGGLEMELRLRERLAGLFNEQRKGQRAKDVRENPRAMAKLLREANRLKTVLSANADHMAQIEGLMDDVDFKAKVTRVEFEELCADLFERVPGPVQQALQSAEMSLDEIEQVILVGGATRVPRVQEVLLKAVGKEELGKNINADEAAAMGAVYQAAALSKAFKVKPFVVRDAVVYPILVEFTREVEEEPGIHSLKHNKRVLFSRMGPYPQRKVITFNRYSHDFNFHINYGDLGFLGPEDLRVFGSQNLTTVKLKGVGDSFKKYPDYESKGIKAHFNLDESGVLSLDRVESVFETLVEDSAEEESTLTKLGNTISSLFGGGTTPDAKENGTDTVQEEEESPAEGSKDEPGEQVELKEEAEAPVEDGSQPPPPEPKGDATPEGEKATEKENGDKSEAQASVCRASVTRFGF

SEQ ID NO: 6669 - protein, 999 aa, Homo Sapiens
MADKVRRQRPRRRVCWALVAVLLADLLALSDTLAVMSVDLGSESMKVAIVKPGVPMEIVLNKESRRKTPVIVTLKENERFFGDSAASMAIKNPKATLRYFQHLLGKQADNPHVALYQARFPEHELTFDPQRQTVHFQISSQLQFSPEEVLGMVLNYSRSLAEDFAEQPIKDAVITVPVFFNQAERRAVLQAARMAGLKVLQLINDNTATALSYGVFRRKDINTTAQNIMFYDMGSGSTVCTIVTYQMVKTKEAGMQPQLQIRGVGFDRTLGGLEMELRLRERLAGLFNEQRKGQRAKDVRENPRAMAKLLREANRLKTVLSANADHMAQIEGLMDDVDFKAKVTRVEFEELCADLFERVPGPVQQALQSAEMSLDEIEQVILVGGATRVPRVQEVLLKAVGKEELGKNINADEAAAMGAVYQAAALSKAFKVKPFVVRDAVVYPILVEFTREVEEEPGIHSLKHNKRVLFSRMGPYPQRKVITFNRYSHDFNFHINYGDLGFLGPEDLRVFGSQNLTTVKLKGVGDSFKKYPDYESKGIKAHFNLDESGVLSLDRVESVFETLVEDSAEEESTLTKLGNTISSLFGGGTTPDAKENGTDTVQEEEESPAEGSKDEPGEQVELKEEAEAPVEDGSQPPPPEPKGDATPEGEKATEKENGDKSEAQKPSEKAEAGPEGVAPAPEGEKKQKPARKRRMVEEIGVELVVLDLPDLPEDKLAQSVQKLQDLTLRDLEKQEREKAANSLEAFIFETQDKLYQPEYQEVSTEEQREEISGKLSAASTWLEDEGVGATTVMLKEKLAELRKLCQGLFFRVEERKKWPERLSALDNLLNHSSMFLKGARLIPEMDQIFTEVEMTTLEKVINETWAWKNATLAEQAKLPATEKPVLLSKDIEAKMMALDREVQYLLNKAKFTKPRPRPKDKNGTRAEPPLNASASDQGEKVIPPAGQTEDAEPISEPEKVETGSEPGDTEPLELGGPGAEPEQKEQSTGQKRPLKNDEL

SEQ ID NO: 6670 - protein, 937 aa, Homo Sapiens; identical to SEQ ID NO: 6666

SEQ ID NO: 6671 - protein, 147 aa, Homo Sapiens
MADKVRRQRPRRRVCWALVAVLLADLLALSDTLAVMSVDLGSESMKVAIVKPGVPMEIVLNKESRRKTPVIVTLKENERFFGDSAASMAIKNPKATLRYFQHLLGKQADNPHVALYQARFPEHELTFDPQRQTVHFQISSQLQFSPL

SEQ ID NO: 6672 - protein, 38 aa, Homo Sapiens
MADKVRRQRPRRRVCWALVAVLLADLLALSGNLGGKHR

SEQ ID NO: 6673 - protein, 38 aa, Homo Sapiens; identical to SEQ ID NO: 6672

SEQ ID NO: 6674 - protein, 79 aa, Homo Sapiens
MGILKLQVFLIVLSVALNHLKATPIERQEWIIPVLSRNILLELRGAKPEHEAGKKSKVIRWKSGNATLPHVQRSAWQIF

SEQ ID NO: 6675 - protein, 79 aa, Homo Sapiens
MGILKLQVFLIVLSVALNHLKATPIESHQVEKRKCNTATCATQRLANFLVHSSNNFGAILSSTNVGSNTYGKRNAVEVL

SEQ ID NO: 6676 - protein, 89 aa, Homo Sapiens
MGILKLQVFLIVLSVALNHLKATPIESHQVEKRKCNTATCATQRLANFLVHSSNNFGAILSSTNVGSNTYGKRNAVEVLKREPLNYLPL

SEQ ID NO: 6677 - protein, 89 aa, Homo Sapiens; identical to SEQ ID NO: 6676

SEQ ID NO: 6678 - protein, 85 aa, Homo Sapiens
  misc_feature (1)..(1): Xaa can be any naturally occurring amino acid
XLKATPIERCLDQIPIFTVFQENHQVEKRKCNTATCATQRLANFLVHSSNNFGAILSSTNVGSNTYGKRNAVEVLKREPLNYLPL

SEQ ID NO: 6679 - protein, 317 aa, Homo Sapiens
MKTALILLSILGMACAFSMKNLHRRVKIEDSEENGVFKYRPRYYLYKHAYFYPHLKRFPVQGSSDSSEENGDDSSEEEEEEEETSNEGENNEESNEDEDSEAENTTLSATTLGYGEDATPGTGYTGLAAIQLPKKAGDITNKATKEKESDEEEEEEEEGNENEESEAEVDENEQGINGTSTNSTEAENGNGSSGGDNGEEGEEESVTGANAEDTTETGRQGKGTSKTTTSPNGGFEPTTPPQVYRTTSPPFGKTTTVEYEGEYEYTGANEYDNGYEIYESENGEPRGDNYRAYEDEYSYFKGQGYDGYDGQNYYHHQ

SEQ ID NO: 6680 - protein, 180 aa, Homo Sapiens
MAPSSPRPALPALLVLLGALFPGPGNAQTSVSPSKVILPRGGSVLVTCSTSCDQPKLLGIETPLPKKELLLPGNNRKVYELSNVQEDSQPMCYSNCPDGQSTAKTFLTVYWTPERVEGGAPRANLTVVLLRGEKELKREPAVGEPAEVTTTVLVRRDHHGANFSCRTELDLRPQGLELFE

SEQ ID NO: 6681 - protein, 532 aa, Homo Sapiens
MAPSSPRPALPALLVLLGALFPGPGNAQTSVSPSKVILPRGGSVLVTCSTSCDQPKLLGIETPLPKKELLLPGNNRKVYELSNVQEDSQPMCYSNCPDGQSTAKTFLTVYWTPERVELAPLPSWQPVGKNLTLRCQVEGGAPRANLTVVLLRGEKELKREPAVGEPAEVTTTVLVRRDHHGANFSCRTELDLRPQGLELFENTSAPYQLQTFVLPATPPQLVSPRVLEVDTQGTVVCSLDGLFPVSEAQVHLALGDQRLNPTVTYGNDSFSAKASVSVTAEDEGTQRLTCAVILGNQSQETLQTVTIYSFPAPNVILTKPEVSEGTEVTVKCEAHPRAKVTLNGVPAQPLGPRAQLLLKATPEDNGRSFSCSATLEVAGQLIHKNQTRELRVLYGPRLDERDCPGNWTWPENSQQTPMCQAWGNPLPELKCLKDGTFPLPIGESVTVTRDLEGTYLCRARSTQGEVTRKVTVNVLSPRYEIVIITVVAAAVIMGTAGLSTYLYNRQRKIKKYRLQQAQKGTPMKPNTQATPP

SEQ ID NO: 6682 - protein, 310 aa, Homo Sapiens
MAPSSPRPALPALLVLLGALFPVSEAQVHLALGDQRLNPTVTYGNDSFSAKASVSVTAEDEGTQRLTCAVILGNQSQETLQTVTIYSFPAPNVILTKPEVSEGTEVTVKCEAHPRAKVTLNGVPAQPLGPRAQLLLKATPEDNGRSFSCSATLEVAGQLIHKNQTRELRVLYGPRLDERDCPGNWTWPENSQQTPMCQAWGNPLPELKCLKDGTFPLPIGESVTVTRDLEGTYLCRARSTQGEVTRKVTVNVLSPRYEIVIITVVAAAVIMGTAGLSTYLYNRQRKIKKYRLQQAQKGTPMKPNTQATPP

SEQ ID NO: 6683 - protein, 174 aa, Homo Sapiens
MNSNVSVYQPPRQVILTLQPTLVAVGKSFTIECRVPTVEPLDSLTLFLFRGNETLHYETFGKAAPAPQEATATFNSTADREDGHRNFSCLAVLDLMSRGGNIFHKHSAPKMLEIYEPVSDSQMVIIVTVVSVLLSLFVTSVLLCFIFGQHLRQQRMGTYGVRAAWRRLPQAFRP

SEQ ID NO: 6684 - protein, 251 aa, Homo Sapiens
MSSFGYRTLTVALFTLICCPGSDEKVFEVHVRPKKLATSLDKILLDEQAQWKHYLVSNISHDTVLQCHFTCSGKQESMNSNVSVYQPPRQVILTLQPTLVAVGKSFTIECRVPTVEPLDSLTLFLFRGNETLHYETFGKAAPAPQEATATFNSTADREDGHRNFSCLAVLDLMSRGGNIFHKHSAPKMLEIYEPVSDSQMVIIVTVVSVLLSLFVTSVLLCFIFGQHLRQQRMGTYGVRAAWRRLPQAFRP

SEQ ID NO: 6685 - protein, 167 aa, Homo Sapiens
MSSFGYRTLTVALFTLICCPGSDEKVFEVHVRPKKLAVEPKGSLEVNCSTTCNQPEVGGLETSLDKILLDEQAQWKHYLVSNISHDTVLQCHFTCSGKQESMNSNVSVYQPPRQVILTLQPTLVAVGKSFTIECRVPTVEPLDSLTLFLFRGNETLHYETFGKAAPA

SEQ ID NO: 6686 - protein, 214 aa, Homo Sapiens
MSSFGYRTLTVALFTLICCPGSDEKVFEVHVRPKKLAVEPKGSLEVNCSTTCNQPEVGGLETSLDKILLDEQAQWKHYLVSNISHDTVLQCHFTCSGKQESMNSNVSVYQPPRQVILTLQPTLVAVGKSFTIECRVPTVEPLDSLTLFLFRGNETLHYETFGKAAPAPQEATATFNSTADREDGHRNFSCLAVLDLMSRGGNIFHKHSAPKMLE

SEQ ID NO: 6687 - protein, 216 aa, Homo Sapiens
MSSFGYRTLTVALFTLICCPGSDEKVFEVHVRPKKLAVEPKGSLEVNCSTTCNQPEVGGLETSLDKILLDEQAQWKHYLVSNISHDTVLQCHFTCSGKQESMNSNVSVYQPPRQVILTLQPTLVAVGKSFTIECRVPTVEPLDSLTLFLFRGNETLHYETFGKAAPAPQEATATFNSTADREDGHRNFSCLAVLDLMSRGGNIFHKHSAPKMLEIY

SEQ ID NO: 6688 - protein, 275 aa, Homo Sapiens
MSSFGYRTLTVALFTLICCPGSDEKVFEVHVRPKKLAVEPKGSLEVNCSTTCNQPEVGGLETSLDKILLDEQAQWKHYLVSNISHDTVLQCHFTCSGKQESMNSNVSVYQPPRQVILTLQPTLVAVGKSFTIECRVPTVEPLDSLTLFLFRGNETLHYETFGKAAPAPQEATATFNSTADREDGHRNFSCLAVLDLMSRGGNIFHKHSAPKMLEIYEPVSDSQMVIIVTVVSVLLSLFVTSVLLCFIFGQHLRQQRMGTYGVRAAWRRLPQAFRP

SEQ ID NO: 6689 - protein, 275 aa, Homo Sapiens; identical to SEQ ID NO: 6688

SEQ ID NO: 6690 - protein, 275 aa, Homo Sapiens; identical to SEQ ID NO: 6688

SEQ ID NO: 6691 - protein, 275 aa, Homo Sapiens; identical to SEQ ID NO: 6688

SEQ ID NO: 6692 - protein, 275 aa, Homo Sapiens; identical to SEQ ID NO: 6688

SEQ ID NO: 6693 - protein, 53 aa, Homo Sapiens
MSSFGYRTLTVALFTLICCPGVNEFQRQRVPASKAGHPDTATHFGGCGQVLHH

SEQ ID NO: 6694 - protein, 271 aa, Homo Sapiens
MGSLFPLSLLFFLAAAYPGVGSALGRRTKRAQSPKGSPLAPSGTSVPFWVRMSPEFVAVQPGKSVQLNCSNSCPQPQNSSLRTPLRQGKTLRGPGWVSYQLLDVRAWSSLAHCLVTCAGKTRWATSRITAYKPPHSVILEPPVLKGRKYTLRCHVTQVFPVGYLVVTLRHGSRVIYSESLERFTGLDLANVTLTYEFAAGPRDFWQPVICHARLNLDGLVVRNSSAPITLMLAWSPAPTALASGSIAALVGILLTVGAAYLCKCLAMKSQA

SEQ ID NO: 6695 - protein, 237 aa, Homo Sapiens
MGSLFPLSLLFFLAAAYPGVGSALGRRTKRAQSPKGSPLAPSGTSVPFWVRMSPEFVAVQPGKSVQLNCSNSCPQPQNSSLRTPLRQGKTLRGPGWVSYQLLDVRAWSSLAHCLVTCAGKTRWATSRITAYKPPHSVILEPPVLKGRKYTLRCHVTQVFPVGYLVVTLRHGSRVIYSESLERFTGLDLANVTLTYEFAAGPRDFWQPVICHARLNLDGLVVRNSSAPITLMLGEAPL

SEQ ID NO: 6696 - protein, 272 aa, Homo Sapiens
MGSLFPLSLLFFLAAAYPGVGSALGRRTKRAQSPKGSPLAPSGTSVPFWVRMSPEFVAVQPGKSVQLNCSNSCPQPQNSSLRTPLRQGKTLRGPGWVSYQLLDVRAWSSLAHCLVTCAGKTRWATSRITAYSVPGGLLGGDPEAWKPGHLFRKPGALHRPGSGQRDLDLRVCCWTPRLLAARDLPRAPQSRRPGGPQQLGTHYTDARLEPRAHSFGLRFHRCPCRDPPHCGRCVPMQVPSYEVPGVKGDVLCRLSEKKRNMKQSGEMAIHGG

SEQ ID NO: 6697 - protein, 155 aa, Homo Sapiens
MKVASGSTATAAAGPSCALKAGKTASGAGEVVRCLSEQSVAISRCAGGAGARLPALLDEQQVNVLLYDMNGCYSRLKELVPTLPQNRKVSKVEILQHVIDYIRDLQLELNSESEVGTPGGRGLPVRAPLSTLNGEISALTAEAACVPADDRILCR

SEQ ID NO: 6698 - protein, 149 aa, Homo Sapiens
MKVASGSTATAAAGPSCALKAGKTASGAGEVVRCLSEQSVAISRCAGGAGARLPALLDEQQVNVLLYDMNGCYSRLKELVPTLPQNRKVSKVEILQHVIDYIRDLQLELNSESEVGTPGGRGLPVRAPLSTLNGEISALTAEVRSRSDH

SEQ ID NO: 6699 - protein, 257 aa, Homo Sapiens
EFIIRGGRVPSHCLHFSRSFQKKTYSKMNNPAIKRIGNHITKSPEDKREYRGLELANGIKVLLISDPTTDKSSAALDVHIGSLSDPPNIAGLSHFCEHMLFLGTKKYPKENEYSQFLSEHAGSSNAFTSGEHTNYYFDVSHEHLEGALDRFAQFFLCPLFDESCKDREVNAVDSEHEKNVMNDAWRLFQLEKATGNPKHPFSKFGTGNKYTLETRPNQEGIDVRQELLKFHSAYYSSNLMAVCVLGRESLDDLTNLV

SEQ ID NO: 6700 - protein, 1019 aa, Homo Sapiens [sequence omitted]

SEQ ID NO: 6701 - protein, 61 aa, Homo Sapiens
MRYRLAWLLHPALPSTFRSVLGARLPPPERLCGNYQVVFQSSGTILHFHQQCVKIPISLYP

SEQ ID NO: 6702 - protein, 464 aa, Homo Sapiens
MSKLWFKQDDKFFLPKACLNFEFFSPFAYVDPLHCNMAYLYLELLKDSLNEYAYAAELAGLSYDLQNTIYGMYLSVKGYNDKQPILLKKIIEKMATFEIDEKRFEIIKEAYMRSLNNFRAEQPHQHAMYYLRLLMTEVAWTKDELKEALDDVTLPRLKAFIPQLLSRLHIEALLHGNITKQAALGIMQMVEDTLIEHAHTKPLLPSQLVRYREVQLPDRGWFVYQQRNEVHNNCGIEIYYQTDMQSTSENMFLELFCQIISEPCFNTLRTKEQLGYIVFSGPRRANGIQGLRFIIQSEKPPHYLESRVEAFLITMEKSIEDMTEEAFQKHIQALAIRRLDKPKKLSAECAKYWGEIISQQYNFDRDNTEVAYLKTLTKEDIIKFYKEMLAVDAPRRHKVSVHVLAREMDSCPVVGEFPCQNDINLSQAPALPQPEVIQNMTEFKRGLPLFPLVKPHINFMAAKL

SEQ ID NO: 6703 - protein, 106 aa, Homo Sapiens
MAAPGALLVMGTLTLSPRLEYSGVISAHCNLCLLSSSDCHASASGVTGVTGVHHHTQLSFVFLVETGFCHVGRASPELLASSDPPASASQSAGIIGVSQGLNLTWS

SEQ ID NO: 6704 - protein, 187 aa, Homo Sapiens
MAAPGALLVMGVSGSGKSTVGALLASELGWKFYDADDYHPEENRRKMGKGIPLNDQDRIPWLCNLHDILLRDVASGQRVVLACSALKKTYRDILTQGKDGVALKCEESGKEAKQAEMQLLVVHLSGSFEVISGRLLKREGHFMPPELLQSQFETLEPPAAPENFIQISVDKNVSEIIATIMETLKMK

SEQ ID NO: 6705 - protein, 90 aa, Homo Sapiens
MAAPGALLVMGVSGSGKSTVGALLASELGWKFYDADDYHPEENRRKMGKGIPLNDQRCSLGTACGSSLFSPEENVQRHINTRKRWCSSEV

SEQ ID NO: 6706 - protein, 59 aa, Homo Sapiens
MAAPGALLVMGVSGSGNWDGNSMMLMIITRRKIEGRWEKAYRSMTRTGFHGSVTCMTFY

SEQ ID NO: 6707 - protein, 90 aa, Homo Sapiens
MGKGIPLNDQDRIPWLCNLHDILLRDVASGQRVVLACSALKKTYRDILTQGKDGVALKCEESGKEAKQAEMQLLVVHLSGSFEVISGRLL

SEQ ID NO: 6708 - protein, 141 aa, Homo Sapiens
MGKGIPLNDQDRIPWLCNLHDILLRDVASGQRVVLACSALKKTYRDILTQGKDGVALKCEESGKEAKQAEMQLLVVHLSGSFEVISGRLLKREGHFMPPELLQSQFETLEPPAAPENFIQISVDKNVSEIIATIMETLKMK

SEQ ID NO: 6709 - protein, 86 aa, Homo Sapiens
MPPPRTGRGLLWLGLVLSSVCVALGSETQANSTTDALNVLLIIVDDLRPSLGCYGDKLVRSPNIDQLASHSLLFQNAFAQQAVCAP

SEQ ID NO: 6710 - protein, 550 aa, Homo Sapiens
MPPPRTGRGLLWLGLVLSSVCVALGSETQANSTTDALNVLLIIVDDLRPSLGCYGDKLVRSPNIDQLASHSLLFQNAFAQQAVCAPSRVSFLTGRRPDTTRLYDFNSYWRVHAGNFSTIPQYFKENGYVTMSVGKVFHPGISSNHTDDSPYSWSFPPYHPSSEKYENTKTCRGPDGELHANLLCPVDVLDVPEGTLPDKQSTEQAIQLLEKMKTSASPFFLAVGYHKPHIPFRYPKEFQKLYPLENITLAPDPEVPDGLPPVAYNPWMDIRQREDVQALNISVPYGPIPVDFQRKIRQSYFASVSYLDTQVGRLLSALDDLQLANSTIIAFTSDHGWALGEHGEWAKYSNFDVATHVPLIFYVPGRTASLPEAGEKLFPYLDPFDSASQLMEPGRQSMDLVELVSLFPTLAGLAGLQVPPRCPVPSFHVELCREGKNLLKHFRFRDLEEDPYLPGNPRELIAYSQYPRPSDIPQWNSDKPSLKDIKIMGYSIRTIDYRYTVWVGFNPDEFLANFSDIHAGELYFVDSDPLQDHNMYNDSQGGDLFQLLMP

SEQ ID NO: 6711 - protein, 343 aa, Homo Sapiens
MPPPRTGRGLLWLGLVLSSVCVALGSETQANSTTDALNVLLIIVDDLRPSLGCYGDKLVRSPNIDQLASHSLLFQNAFAQQAVCAPSRVSFLTGRRPDTTRLYDFNSYWRVHAGNFSTIPQYFKENGYVTMSVGKVFHPGISSNHTDDSPYSWSFPPYHPSSEKYENTKTCRGPDGELHANLLCPVDVLDVPEGTLPDKQSTEQAIQLLEKMKTSASPFFLAVGYHKPHIPFRYPKEFQKLYPLENITLAPDPEVPDGLPPVAYNPWMDIRQREDVQALNISVPYGPIPVDFQRKIRQSYFASVSYLDTQVGRLLSALDDLQLANSTIIAFTSDHGFLMRTNT

SEQ ID NO: 6712 - protein, 312 aa, Homo Sapiens
MPPPRTGRGLLWLGLVLSSVCVALGSETQANSTTDALNVLLIIVDDLRPSLGCYGDKLVRSPNIDQLASHSLLFQNAFAQQAVCAPSRVSFLTGRRPDTTRLYDFNSYWRVHAGNFSTIPQYFKENGYVTMSVGKVFHPGISSNHTDDSPYSWSFPPYHPSSEKYENTKTCRGPDGELHANLLCPVDVLDVPEGTLPDKQSTEQAIQLLEKMKTSASPFFLAVGYHKPHIPFRYPKEFQKLYPLENITLAPDPEVPDGLPPVAYNPWMDIRQREDVQALNISVPYGPIPVDFQEDQSSTGFRLKTSSTRKYK

SEQ ID NO: 6713 - protein, 179 aa, Homo Sapiens
MPPPRTGRGLLWLGLVLSSVCVALGSETQANSTTDALNVLLIIVDDLRPSLGCYGDKLVRSPNIDQLASHSLLFQNAFAQQAVCAPSRVSFLTGRRPDTTRLYDFNSYWRVHAGNFSTIPQYFKENGYVTMSVGKVFHPGTAPCPESGFSWFVVSESSIPILGMGLSLQSPLLAGRVPR

SEQ ID NO: 6714 - protein, 106 aa, Homo Sapiens
RSPNIDQLASHSLLFQNAFAQQAVCAPSRVSFLTGRRPDTTRLYDFNSYWRVHAGNFSTIPQYFKENGYVTMSVGKVFHPALVGTHFSAESLFSRPFSVSIGPASR

SEQ ID NO: 6715 - protein, 232 aa, Homo Sapiens
LAHPGPGIGAGPSPGSAGPSPLPGMDGRWALLDPESIVRGSTGRGLSYNFTHLDGYLDLLRENQLLPGFELMGSASGHFTDFEDKQQVFEWKDLVSSLARRYIGRYGLAHVSKWNFETWNEPDHHDFDNVSMTMQGFLNYYDACSEGLRAASPALRLGGPGDSFHTPPRSPLSWGLLRHCHDGTNFFTGEAGVRLDYISLHRKGARSSISILEQEKVVAQQIRQLFPKFADT

SEQ ID NO: 6716 - protein, 176 aa, Homo Sapiens
MCLPSECHSHWTQVQASLSPAAPCPPPWLPRGSTGRGLSYNFTHLDGYLDLLRENQLLPGFELMGSASGHFTDFEDKQQVFEWKDLVSSLARRYIGRYGLAHVSKWNFETWNEPDHHDFDNVSMTMQGFLNYYDACSEGLRAASPALRLGGPGDSFHTPPRSPLSWGLLRHCHDGT

SEQ ID NO: 6717 - protein, 521 aa, Homo Sapiens
MGSASGHFTDFEDKQQVFEWKDLVSSLARRYIGRYGLAHVSKWNFETWNEPDHHDFDNVSMTMQGFLNYYDACSEGLRAASPALRLGGPGDSFHTPPRSPLSWGLLRHCHDGTNFFTGEAGVRLDYISLHRKGARSSISILEQEKVVAQQIRQLFPKFADTPIYNDEADPLVGWSLPQPWRADVTYAAMVVKVIAQHQNLLLANTTSAFPYALLSNDNAFLSYHPHPFAQRTLTARFQVNNTRPPHVQLLRKPVLTAMGLLALLDEEQLWAEVSQAGTVLDSNHTVGVLASAHRPQGPADAWRAAVLIYASDDTRAHPNRSVAVTLRLRGVPPGPGLVYVTRYLDNGLCSPDGEWRRLGRPVFPTAEQFRRMRAAEDPVAAAPRPLPAGGRLTLRPALRLPSLLLVHVCARPEKPPGQVTRLRALPLTQGQLVLVWSDEHVGSKCLWTYEIQFSQDGKAYTPVSRKPSTFNLFVFSPDTGAVSGSYRVRALDYWARPGPFSDPVPYLEVPVPRGPPSPGNP

SEQ ID NO: 6718 - protein, 653 aa, Homo Sapiens
MRPLRPRAALLALLASLLAAPPVAPAEAPHLVHVDAARALWPLRRFWRSTGFCPPLPHSQADQYVLSWDQQLNLAYVGAVPHRGIKQVRTHWLLELVTTRGSTGRGLSYNFTHLDGYLDLLRENQLLPGFELMGSASGHFTDFEDKQQVFEWKDLVSSLARRYIGRYGLAHVSKWNFETWNEPDHHDFDNVSMTMQGFLNYYDACSEGLRAASPALRLGGPGDSFHTPPRSPLSWGLLRHCHDGTNFFTGEAGVRLDYISLHRKGARSSISILEQEKVVAQQIRQLFPKFADTPIYNDEADPLVGWSLPQPWRADVTYAAMVVKVIAQHQNLLLANTTSAFPYALLSNDNAFLSYHPHPFAQRTLTARFQVNNTRPPHVQLLRKPVLTAMGLLALLDEEQLWAEVSQAGTVLDSNHTVGVLASAHRPQGPADAWRAAVLIYASDDTRAHPNRSVAVTLRLRGVPPGPGLVYVTRYLDNGLCSPDGEWRRLGRPVFPTAEQFRRMRAAEDPVAAAPRPLPAGGRLTLRPALRLPSLLLVHVCARPEKPPGQVTRLRALPLTQGQLVLVWSDEHVGSKCLWTYEIQFSQDGKAYTPVSRKPSTFNLFVFSPDTGAVSGSYRVRALDYWARPGPFSDPVPYLEVPVPRGPPSPGNP

SEQ ID NO: 6719 - protein, 224 aa, Homo Sapiens
MRPLRPRAALLALLASLLAAPPVAPAEAPHLVHVDAARALWPLRRFWRSTGFWGSTGRGLSYNFTHLDGYLDLLRENQLLPGFELMGSASGHFTDFEDKQQVFEWKDLVSSLARRYIGRYGLAHVSKWNFETWNEPDHHDFDNVSMTMQGFLNYYDACSEGLRAASPALRLGGPGDSFHTPPRSPLSWGLLRHCHDGTNFFTGEAGVRLDYISLHRKGARSSIS

SEQ ID NO: 6720 - protein, 196 aa, Homo Sapiens
  misc_feature (1)..(1): Xaa can be any naturally occurring amino acid
XVPCAPAPRCWRSWPRSWPRPRWPRPRPRTWCMWTRPARCGPCGASGGAQASAPRCHTARLTSTSSAGTSSSTSPMWAPSLTAASSRGSTGRGLSYNFTHLDGYLDLLRENQLLPGFELMGSASGHFTDFEDKQQVFEWKDLVSSLARRYIGRYGLAHVSKWNFETWNEPDHHDFDNVSMTMQGFLNYYDACSEGL

SEQ ID NO: 6721 - protein, 105 aa, Homo Sapiens
MGFTGAGIAASSIAAKMMSAAAIANGGGVSAGSLVATLQSVGAAGLSTSSNILLASVGSVLGACLGNSPSSSLPAEPEAKEDEARENVPQGEPPKPPLKSEKHEE

SEQ ID NO: 6722 - protein, 130 aa, Homo Sapiens
MMKRAAAAAVGGALAVGAVPVVLSAMGFTGAGIAASSIAAKMMSAAAIANGGGVSAGSLVATLQSVGAAGLSTSSNILLASVGSVLGACLGNSPSSSLPAEPEAKEDEARENVPQGEPPKPPLKSEKHEE

SEQ ID NO: 6723 - protein, 105 aa, Homo Sapiens
MTLSPLLLFLPPLLLLLDVPTAAVQASPLQALDFFGNGPPVNYKTGNLYLRGPLKKSNAPLVNVTLYYEALCGGCRAFLIRELFPTWLLVMEILNVTLVPYGNAQ

SEQ ID NO: 6724 - protein, 250 aa, Homo Sapiens
MTLSPLLLFLPPLLLLLDVPTAAVQASPLQALDFFGNGPPVNYKTGNLYLRGPLKKSNAPLVNVTLYYEALCGGCRAFLIRELFPTWLLVMEILNVTLVPYGNAQEQNVSGRWEFKCQHGEEECKFNKVEACVLDELDMELAFLTIVCMEEFEDMERSLPLCLQLYAPGLSPDTIMECAMGDRGMQLMHANAQRTDALQPPHEYVPWVTVNGKPLEDQTQLLTLVCQLYQGKKPDVCPSSTSSLRSVCFK

SEQ ID NO: 6725 - protein, 189 aa, Homo Sapiens
MASPFALLMVLVVLSCKSSCSLGCDLPETHSLDNRRTLMLLAQMSRISPSSCLMDRHDFGFPQEEFDGNQFQKAPAISVLHELIQQIFNLFTTKDSSAAWDEDLLDKFCTELYQQLNDLEACVMQEERVGETPLMNADSILAVKKYFRRITLYLTEKKYSPCAWEVVRAEIMRSLSLSTNLQERLRRKE

SEQ ID NO: 6726 - protein, 189 aa, Homo Sapiens
MALSFSLLMAVLVLSYKSICSLGCDLPQTHSLGNRRALILLGQMGRISPFSCLKDRHDFRIPQEEFDGNQFQKAQAISVLHEMIQQTFNLFSTEDSSAAWEQSLLEKFSTELYQQLNDLEACVIQEVGVEETPLMNEDSILAVRKYFQRITLYLIERKYSPCAWEVVRAEIMRSLSFSTNLQKRLRRKD

SEQ ID NO: 6727 - protein, 189 aa, Homo Sapiens
MASPFALLMALVVLSCKSSCSLGCDLPETHSLDNRRTLMLLAQMSRISPSSCLMDRHDFGFPQEEFDGNQFQKAPAISVLHELIQQIFNLFTTKDSSAAWDEDLLDKFCTELYQQLNDLEACVMQEERVGETPLMNADSILAVKKYFRRITLYLTEKKYSPCAWEVVRAEIMRSLSLSTNLQERLRRKE

SEQ ID NO: 6728 - protein, 190 aa, Homo Sapiens
MMASPFALLMALVVLSCKSSCSLGCDLPETHSLDNRRTLMLLAQMSRISPSSCLMDRHDFGFPQEEFDGNQFQKAPAISVLHELIQQIFNLFTTKDSSAAWDEDLLDKFCTELYQQLNDLEACVMQEERVGETPLMNADSILAVKKYFRRITLYLTEKKYSPCAWEVVRAEIMRSLSLSTNLQERLRRKE

SEQ ID NO: 6729 - protein, 189 aa, Homo Sapiens
MALPFALMMALVVLSCKSSCSLGCNLSQTHSLNNRRTLMLMAQMRRISPFSCLKDRHDFEFPQEEFDGNQFQKAQAISVLHEMMQQTFNLFSTKNSSAAWDETLLEKFYIELFQQMNDLEACVIQEVGVEETPLMNEDSILAVKKYFQRITLYLMEKKYSPCAWEVVRAEIMRSLSFSTNLQKRLRRKD

SEQ ID NO: 6730 - protein, 189 aa, Homo Sapiens
MALSFSLLMAVLVLSYKSICSLGCDLPQTHSLGNRRALILLAQMGRISHFSCLKDRYDFGFPQEVFDGNQFQKAQAISAFHEMIQQTFNLFSTKDSSAAWDETLLDKFYIELFQQLNDLEACVTQEVGVEEIALMNEDSILAVRKYFQRITLYLMGKKYSPCAWEVVRAEIMRSFSFSTNLQKGLRRKD

SEQ ID NO: 6731 - protein, 189 aa, Homo Sapiens
MALSFSLLMAVLVLSYKSICSLGCDLPQTHSLGNRRALILLAQMGRISPFSCLKDRHDFGLPQEEFDGNQFQKTQAISVLHEMIQQTFNLFSTEDSSAAWEQSLLEKFSTELYQQLNNLEACVIQEVGMEETPLMNEDSILAVRKYFQRITLYLTEKKYSPCAWEVVRAEIMRSLSFSTNLQKILRRKD

SEQ ID NO: 6732 - protein, 188 aa, Homo Sapiens
MALTFALLVALLVLSCKSSCSVGCDLPQTHSLGSRRTLMLLAQMRRISLFSCLKDRHDFGFPQEEFGNQFQKAETIPVLHEMIQQIFNLFSTKDSSAAWDETLLDKFYTELYQQLNDLEACVIQGVGVTETPLMKEDSILAVRKYFQRITLYLKEKKYSPCAWEVVRAEIMRSFSLSTNLQESLRSKE

SEQ ID NO: 6733 - protein, 189 aa, Homo Sapiens
MALSFSLLMAVLVLSYKSICSLGCDLPQTHSLGNRRALILLAQMGRISPFSCLKDRHDFGFPQEEFDGNQFQKAQAISVLHEMIQQTFNLFSTKDSSATWEQSLLEKFSTELNQQLNDLEACVIQEVGVEETPLMNVDSILAVKKYFQRITLYLTEKKYSPCAWEVVRAEIMRSFSLSKIFQERLRRKE

SEQ ID NO: 6734 - protein, 189 aa, Homo Sapiens
MALSFSLLMAVLVLSYKSICSLGCDLPQTHSLGNRRALILLAQMGRISHFSCLKDRHDFGFPEEEFDGHQFQKAQAISVLHEMIQQTFNLFSTEDSSAAWEQSLLEKFSTELYQQLNDLEACVIQEVGVEETPLMNEDSILAVRKYFQRITLYLTEKKYSPCAWEVVRAEIMRSLSFSTNLQKRLRRKD

SEQ ID NO: 6735 - protein, 189 aa, Homo Sapiens
MALPFVLLMALVVLNCKSICSLGCDLPQTHSLSNRRTLMIMAQMGRISPFSCLKDRHDFGFPQEEFDGNQFQKAQAISVLHEMIQQTFNLFSTKDSSATWDETLLDKFYTELYQQLNDLEACMMQEVGVEDTPLMNVDSILTVRKYFQRITLYLTEKKYSPCAWEVVRAEIMRSFSLSANLQERLRRKE

SEQ ID NO: 6736 - protein, 189 aa, Homo Sapiens
MALPFALLMALVVLSCKSSCSLDCDLPQTHSLGHRRTMMLLAQMRRISLFSCLKDRHDFRFPQEEFDGNQFQKAEAISVLHEVIQQTFNLFSTKDSSVAWDERLLDKLYTELYQQLNDLEACVMQEVWVGGTPLMNEDSILAVRKYFQRITLYLTEKKYSPCAWEVVRAEIMRSFSSSRNLQERLRRKE

SEQ ID NO: 6737 - protein, 190 aa, Homo Sapiens
TMALPFALLMALVVLSCKSSCSLDCDLPQTHSLGHRRTMMLLAQMRRISLFSCLKDRHDFRFPQEEFDGNQFQKAEAISVLHEVIQQTFNLFSTKDSSVAWDERLLDKLYTELYQQLNDLEACVMQEVWVGGTPLMNEDSILAVRKYFQRITLYLTEKKYSPCAWEVVRAEIMRSFSSSRNLQERLRRKE

SEQ ID NO: 6738 - protein, 189 aa, Homo Sapiens
MARSFSLLMVVLVLSYKSICSLGCDLPQTHSLRNRRALILLAQMGRISPFSCLKDRHEFRFPEEEFDGHQFQKTQAISVLHEMIQQTFNLFSTEDSSAAWEQSLLEKFSTELYQQLNDLEACVIQEVGVEETPLMNEDFILAVRKYFQRITLYLMEKKYSPCAWEVVRAEIMRSFSFSTNLKKGLRRKD

SEQ ID NO: 6739 - protein, 189 aa, Homo Sapiens
MALTFYLLVALVVLSYKSFSSLGCDLPQTHSLGNRRALILLAQMRRISPFSCLKDRHDFEFPQEEFDDKQFQKAQAISVLHEMIQQTFNLFSTKDSSAALDETLLDEFYIELDQQLNDLESCVMQEVGVIESPLMYEDSILAVRKYFQRITLYLTEKKYSSCAWEVVRAEIMRSFSLSINLQKRLKSKE

SEQ ID NO: 6740 - protein, 557 aa, Homo Sapiens
MMVVLLGATTLVLVAVAPWVLSAAAGGKNLKSPQKVEVDIIDDNFILRWNRSDESVGNVTFSFDYQKTGMDNWIKLSGCQNITSTKCNFSSLKLNVYEEIKLRIRAEKENTSSWYEVDSFTPFRKAQIGPPEVHLEAEDKAIVIHISPGTKDSVMWALDGLSFTYSLVIWKNSSGVEERIENIYSRHKIYKLSPETTYCLKVKAALLTSWKIGVYSPVHCIKTTVENELPPPENIEVSVQNQNYVLKWDYTYANMTFQVQWLHAFLKRNPGNHLYKWKQIPDCENVKTTQCVFPQNVFQKGIYLLRVQASDGNNTSFWSEEIKFDTEIQAFLLPPVFNIRSLSDSFHIYIGAPKQSGNTPVIQDYPLIYEIIFWENTSNAERKIIEKKTDVTVPNLKPLTVYCVKARAHTMDEKLNKSSVFSDAVCEKTKPGNTSKIWLIVGICIALFALPFVIYAAKVFLRCINYVFFPSLKPSSSIDEYFSEQPLKNLLLSTSEEQIEKCFIIENISTIATVEETNQTDEDHKKYSSQTSQDSGNYSNEDESESKTSEELQQDFV

SEQ ID NO: 6741 - protein, 136 aa, Homo Sapiens
MMVVLLGATTLVLVAVAPWVLSAAAGGKNLKSPQKVEVDIIDDNFILRWNRSDESVGNVTFSFDYQKTGMDNWIKLSGCQNITSTKCNFSSLKLNVYEEIKLRIRAEKENTSSWYEVDSFTPFRKVENELPPPENI

SEQ ID NO: 6742 - protein, 187 aa, Homo Sapiens
MTNKCLLQIALLLCFSTTALSMSYNLLGFLQRSSNFQCQKLLWQLNGRLEYCLKDRMNFDIPEEIKQLQQFQKEDAALTIYEMLQNIFAIFRQDSSSTGWNETIVENLLANVYHQINHLKTVLEEKLEKEDFTRGKLMSSLHLKRYYGRILHYLKAKEYSHCAWTIVRVEILRNFYFINRLTGYLRN

SEQ ID NO: 6743 - protein, 208 aa, Homo Sapiens
MIIKHFFGTVLVLLASTTIFSLDLKLIIFQQRQVNQESLKLLNKLQTLSIQQCLPHRKNFLLPQKSLSPQQYQKGHTLAILHEMLQQIFSLFRANISLDGWEENHTEKFLIQLHQQLEYLEALMGLEAEKLSGTLGSDNLRLQVKMYFRRIHDYLENQDYSTCAWAIVQVEISRCLFFVFSLTEKLSKQGRPLNDMKQELTTEFRSPR

SEQ ID NO: 6744 - protein, 166 aa, Homo Sapiens
MKYTSYILAFQLCIVLGSLGCYCQDPYVKEAENLKKYFNAGHSDVADNGTLFLGILKNWKEESDRKIMQSQIVSFYFKLFKNFKDDQSIQKSVETIKEDMNVKFFNSNKKKRDDFEKLTNYSVTDLNVQRKAIHELIQVMAELSPAAKTGKRKRSQMLFRGRRASQ

SEQ ID NO: 6745 - protein, 30 aa, Homo Sapiens
LLPLVMQGVSRAEMGTADLGPSSVLSTDVF

SEQ ID NO: 6746 - protein, 210 aa, Homo Sapiens
MALLFLLPLVMQGVSRAEMGTADLGPSSVPTPTNVTIESYNMNPIVYWEYQIMPQVPVFTVEVKNYGVKARVGQKESAYAKSEEFAVCRDGKIGPPKLDIRKEEKQIMIDIFHPSVFVNGDEQEVDYDPETTCYIRVYNVYVRMNGSEIQYKILTQKEDDCDEIQCQLAIPVSSLNSQYCVSAEGVLHVWGVTTEKSKEVCITIFNSSIK

SEQ ID NO: 6747 - protein, 489 aa, Homo Sapiens
MALLFLLPLVMQGVSRAEMGTADLGPSSVPTPTNVTIESYNMNPIVYWEYQIMPQVPVFTVEVKNYGVKNSEWIDACINISHHYCNISDHVGDPSNSLWVRVKARVGQKESAYAKSEEFAVCRDGKIGPPKLDIRKEEKQIMIDIFHPSVFVNGDEQEVDYDPETTCYIRVYNVYVRMNGSEIQYKILTQKEDDCDEIQCQLAIPVSSLNSQYCVSAEGVLHVWGVTTEKSKEVCITIFNSSIKGSLWIPVVAALLLFLVLSLVFICFYIKKINPLKEKSIILPKSLISVVRSATLETKPESKYVSLITSYQPFSLEKEVVCEEPLSPATVPGMHTEDNPGKVEHTEELSSITEVVTTEENIPDVVPGSHLTPIERESSSPLSSNQSEPGSIALNSYHSRNCSESDHSRNGFDTDSSCLESHSSLSDSEFPPNNKGEIKTEGQELITVIKAPTSFGYDKPHVLVDLLVDDSGKESLIGYRPTEDSKEFS

SEQ ID NO: 6748 - protein, 470 aa, Homo Sapiens
MCGSIVQSLVPTPTNVTIESYNMNPIVYWEYQIMPQVPVFTVEVKNYGVKNSEWIDACINISHHYCNISDHVGDPSNSLWVRVKARVGQKESAYAKSEEFAVCRDGKIGPPKLDIRKEEKQIMIDIFHPSVFVNGDEQEVDYDPETTCYIRVYNVYVRMNGSEIQYKILTQKEDDCDEIQCQLAIPVSSLNSQYCVSAEGVLHVWGVTTEKSKEVCITIFNSSIKGSLWIPVVAALLLFLVLSLVFICFYIKKINPLKEKSIILPKSLISVVRSATLETKPESKYVSLITSYQPFSLEKEVVCEEPLSPATVPGMHTEDNPGKVEHTEELSSITEVVTTEENIPDVVPGSHLTPIERESSSPLSSNQSEPGSIALNSYHSRNCSESDHSRNGFDTDSSCLESHSSLSDSEFPPNNKGEIKTEGQELITVIKAPTSFGYDKPHVLVDLLVDDSGKESLIGYRPTEDSKEFS

SEQ ID NO: 6749 - protein, 161 aa, Homo Sapiens
MLLKSPENSLLQFQFKYGVPTPTNVTIESYNMNPIVYWEYQIMPQVPVFTVEVKNYGVKNSEWIDACINISHHYCNISDHVGDPSNSLWVRVKARVGQKESAYAKSEEFAVCRDGKIGPPKLDIRKEEKQIMIDIFHPSVFVNGDEQEVDYDPETTCYIRV

SEQ ID NO: 6750 - protein, 479 aa, Homo Sapiens
MLLKSPENSLLQFQFKYGVPTPTNVTIESYNMNPIVYWEYQIMPQVPVFTVEVKNYGVKNSEWIDACINISHHYCNISDHVGDPSNSLWVRVKARVGQKESAYAKSEEFAVCRDGKIGPPKLDIRKEEKQIMIDIFHPSVFVNGDEQEVDYDPETTCYIRVYNVYVRMNGSEIQYKILTQKEDDCDEIQCQLAIPVSSLNSQYCVSAEGVLHVWGVTTEKSKEVCITIFNSSIKGSLWIPVVAALLLFLVLSLVFICFYIKKINPLKEKSIILPKSLISVVRSATLETKPESKYVSLITSYQPFSLEKEVVCEEPLSPATVPGMHTEDNPGKVEHTEELSSITEVVTTEENIPDVVPGSHLTPIERESSSPLSSNQSEPGSIALNSYHSRNCSESDHSRNGFDTDSSCLESHSSLSDSEFPPNNKGEIKTEGQELITVIKAPTSFGYDKPHVLVDLLVDDSGKESLIGYRPTEDSKEFS

SEQ ID NO: 6751 - protein, 479 aa, Homo Sapiens; identical to SEQ ID NO: 6750

SEQ ID NO: 6752 - protein, 448 aa, Homo Sapiens
MNPIVYWEYQIMPQVPVFTVEVKNYGVKNSEWIDACINISHHYCNISDHVGDPSNSLWVRVKARVGQKESAYAKSEEFAVCRDGKIGPPKLDIRKEEKQIMIDIFHPSVFVNGDEQEVDYDPETTCYIRVYNVYVRMNGSEIQYKILTQKEDDCDEIQCQLAIPVSSLNSQYCVSAEGVLHVWGVTTEKSKEVCITIFNSSIKGSLWIPVVAALLLFLVLSLVFICFYIKKINPLKEKSIILPKSLISVVRSATLETKPESKYVSLITSYQPFSLEKEVVCEEPLSPATVPGMHTEDNPGKVEHTEELSSITEVVTTEENIPDVVPGSHLTPIERESSSPLSSNQSEPGSIALNSYHSRNCSESDHSRNGFDTDSSCLESHSSLSDSEFPPNNKGEIKTEGQELITVIKAPTSFGYDKPHVLVDLLVDDSGKESLIGYRPTEDSKEFS

SEQ ID NO: 6753 - protein, 448 aa, Homo Sapiens; identical to SEQ ID NO: 6752

SEQ ID NO: 6754 - protein, 448 aa, Homo Sapiens; identical to SEQ ID NO: 6752

SEQ ID NO: 6755 - protein, 27 aa, Homo Sapiens
  misc_feature (1)..(1): Xaa can be any naturally occurring amino acid
XLLPLVMQGVSRAEMGTADLGPSSDVF

SEQ ID NO: 6756 - protein, 200 aa, Homo Sapiens
MAAAWTVVLVTLVLGLAVAGPVPTSKPTTTGKGCHIGRFKSLSPQELASFKKARDALEESLKLKNWSCSSPVFPGNWDLRLLQVRERPVALEAELALTLKVLEAAAGPALEDVLDQPLHTLHHILSQLQACIQPQPTAGPRPRGRLHHWLHRLQEAPKKESAGCLEASVTFNLFRLLTRDLKYVADGNLCLRTSTHPEST

SEQ ID NO: 6757 - protein, 200 aa, Homo Sapiens
MKLDMTGDCTPVLVLMAAVLTVTGAVPVARLHGALPDARGCHIAQFKSLSPQELQAFKRAKDALEESLLLKDCRCHSRLFPRTWDLRQLQVRERPMALEAELALTLKVLEATADTDPALVDVLDQPLHTLHHILSQFRACIQPQPTAGPRTRGRLHHWLYRLQEAPKKESPGCLEASVTFNLFRLLTRDLNCVASGDLCV

SEQ ID NO: 6758 - protein, 200 aa, Homo Sapiens
MKLDMTGDCMPVLVLMAAVLTVTGAVPVARLRGALPDARGCHIAQFKSLSPQELQAFKRAKDALEESLLLKDCKCRSRLFPRTWDLRQLQVRERPVALEAELALTLKVLEATADTDPALGDVLDQPLHTLHHILSQLRACIQPQPTAGPRTRGRLHHWLHRLQEAPKKESPGCLEASVTFNLFRLLTRDLNCVASGDLCV

SEQ ID NO: 6759 - protein, 196 aa, Homo Sapiens
MTGDCMPVLVLMAAVLTVTGAVPVARLRGALPDARGCHIAQFKSLSPQELQAFKRAKDALEESLLLKDCKCRSRLFPRTWDLRQLQVRERPVALEAELALTLKVLEATADTDPALGDVLDQPLHTLHHILSQLRACIQPQPTAGPRTRGRLHHWLHRLQEAPKKESPGCLEASVTFNLFRLLTRDLNCVASGDLCV

SEQ ID NO: 6760 - protein, 520 aa, Homo Sapiens
MAGPERWGPLLLCLLQAAPGRPRLAPPQNVTLLSQNFSVYLTWLPGLGNPQDVTYFVAYQSSPTRRRWREVEECAGTKELLCSMMCLKKQDLYNKFKGRVRTVSPSSKSPWVESEYLDYLFEVEPAPPVLVLTQTEEILSANATYQLPPCMPPLDLKYEVAFWKEGAGNKTLFPVTPHGQPVQITLQPAASEHHCLSARTIYTFSVPKYSKFSKPTCFLLEVPEANWAFLVLPSLLILLLVIAAGGVIWKTLMGNPWFQRAKMPRALDFSGHTHPVATFQPSRPESVNDLFLCPQKELTRGVRPTPRVRAPATQQTRWKKDLAEDEEEEDEEDTEDGVSFQPYIEPPSFLGQEHQAPGHSEAGGVDSGRPRAPLVPSEGSSAWDSSDRSWASTVDSSWDRAGSSGYLAEKGPGQGPGGDGHQESLPPPEFSKDSGFLEELPEDNLSSWATWGTLPPEPNLVPGGPPVSLQTLTFCWESSPEEEEEARESEIEDSDAGSWGAESTQRTEDRGRTLGHYMAR

SEQ ID NO: 6761 - protein, 491 aa, Homo Sapiens
MAGPERWGPLLLCLLQAAPGRPRLAPPQNVTLLSQNFSVYLTWLPGLGNPQDVTYFVAYQSSPTRRRWREVEECAGTKELLCSMMCLKKQDLYNKFKGRVRTVSPSSKSPWVESEYLDYLFEVEPAPPVLVLTQTEEILSANATYQLPPCMPPLDLKYEVAFWKEGAGNKTLFPVTPHGQPVQITLQPAASEHHCLSARTIYTFSVPKYSKFSKPTCFLLEVPEANWAFLVLPSLLILLLVIAAGGVIWKTLMGNPWFQRAKMPRALELTRGVRPTPRVRAPATQQTRWKKDLAEDEEEEDEEDTEDGVSFQPYIEPPSFLGQEHQAPGHSEAGGVDSGRPRAPLVPSEGSSAWDSSDRSWASTVDSSWDRAGSSGYLAEKGPGQGPGGDGHQESLPPPEFSKDSGFLEELPEDNLSSWATWGTLPPEPNLVPGGPPVSLQTLTFCWESSPEEEEEARESEIEDSDAGSWGAESTQRTEDRGRTLGHYMAR

SEQ ID NO: 6762 - protein, 244 aa, Homo Sapiens
MAGPERWGPLLLCLLQAAPGRPRLAPPQNVTLLSQNFSVYLTWLPGLGNPQDVTYFVAYQSSPTRRRWREVEECAGTKELLCSMMCLKKQDLYNKFKGRVRTVSPSSKSPWVESEYLDYLFEVEPAPPVLVLTQTEEILSANATYQLPPCMPPLDLKYEVAFWKEGAGNKTLFPVTPHGQPVQITLQPAASEHHCLSARTIYTFSVPKYSKFSKPTCFLLEVPGLFWTHTPCGNLSAQQTRVRE

SEQ ID NO: 6763 - protein, 211 aa, Homo Sapiens
MAGPERWGPLLLCLLQAAPGRPRLAPPQNVTLLSQNFSVYLTWLPGLGNPQDVTYFVAYQSSPTRRRWREVEECAGTKELLCSMMCLKKQDLYNKFKGRVRTVSPSSKSPWVESEYLDYLFEVEPAPPVLVLTQTEEILSANATYQLPPCMPPLDLKYEVAFWKEGAGNKVGSSFPAPRLGPLLHPFLLRFFSPSQPAPAPLLQEVFPVHS

SEQ ID NO: 6764 - protein, 185 aa, Homo Sapiens
MMCLKKQDLYNKFKGRVRTVSPSSKSPWVESEYLDYLFEVEPAPPVLVLTQTEEILSANATYQLPPCMPPLDLKYEVAFWKEGAGNKTLFPVTPHGQPVQITLQPAASEHHCLSARTIYTFSVPKYSKFSKPTCFLLEVPEANWAFLVLPSLLILLLVIAAGGVIWKTLMGNPWFQRAKMPRALV

SEQ ID NO: 6765 - protein, 195 aa, Homo Sapiens
MALLFPLLAALVMTSYSPVGSLGCDLPQNHGLLSRNTLVLLHQMRRISPFLCLKDRRDFRFPQEMVKGSQLQKAHVMSVLHEMLQQIFSLFHTERSSAAWNMTLLDQLHTGLHQQLQHLETCLLQVVGEGESAGAISSPALTLRRYFQGIRVYLKEKKYSDCAWEVVRMEIMKSLFLSTNMQERLRSKDRDLGSS

SEQ ID NO: 6766 - protein, 153 aa, Homo Sapiens
MGKISSLPTQLFKCCFCDFLKVKMHTMSSSHLFYLALCLLTFTSSATAGPETLCGAELVDALQFVCGDRGFYFNKPTGYGSSSRRAPQTGIVDECCFRSCDLRRLEMYCAPLKPAKSARSVRAQRHTDMPKTQKEVHLKNASRGSAGNKNYRM

SEQ ID NO: 6767 - protein, 153 aa, Homo Sapiens; identical to SEQ ID NO: 6766

SEQ ID NO: 6768 - protein, 158 aa, Homo Sapiens
MGKISSLPTQLFKCCFCDFLKVKMHTMSSSHLFYLALCLLTFTSSATAGPETLCGAELVDALQFVCGDRGFYFNKPTGYGSSSRRAPQTGIVDECCFRSCDLRRLEMYCAPLKPAKSARSVRAQRHTDMPKTQKYQPPSTNKNTKSQRRKGSTFEERK

SEQ ID NO: 6769 - protein, 158 aa, Homo Sapiens; identical to SEQ ID NO: 6768

SEQ ID NO: 6770 - protein, 195 aa, Homo Sapiens
MGKISSLPTQLFKCCFCDFLKVKMHTMSSSHLFYLALCLLTFTSSATAGPETLCGAELVDALQFVCGDRGFYFNKPTGYGSSSRRAPQTGIVDECCFRSCDLRRLEMYCAPLKPAKSARSVRAQRHTDMPKTQKYQPPSTNKNTKSQRRKGWPKTHPGGEQKEGTEASLQIRGKKKEQRREIGSRNAECRGKKGK

SEQ ID NO: 6771 - protein, 137 aa, Homo Sapiens
MITPTVKMHTMSSSHLFYLALCLLTFTSSATAGPETLCGAELVDALQFVCGDRGFYFNKPTGYGSSSRRAPQTGIVDECCFRSCDLRRLEMYCAPLKPAKSARSVRAQRHTDMPKTQKEVHLKNASRGSAGNKNYRM

SEQ ID NO: 6772 - protein, 183 aa, Homo Sapiens
MGIPMGKSMLVLLTFLAFASCCIAAYRPSETLCGGELVDTLQFVCGDRGFYFRLPGRPASRVSRRSRGIVEECCFRSCDLALLETYCATPAKSERDVSTPPTVLPDNFPRYPVGKFFQYDTWKQSTQRLRRGLPALLRARRGHVLAKELEAFREAKRHRPLIALPTQDPAHGGAPPEMASNRK

SEQ ID NO: 6773 - protein, 183 aa, Homo Sapiens; identical to SEQ ID NO: 6772

SEQ ID NO: 6774 - protein, 180 aa, Homo Sapiens
MGIPMGKSMLVLLTFLAFASCCIAAYRPSETLCGGELVDTLQFVCGDRGFYFSRPASRVSRRSRGIVEECCFRSCDLALLETYCATPAKSERDVSTPPTVLPDNFPRYPVGKFFQYDTWKQSTQRLRRGLPALLRARRGHVLAKELEAFREAKRHRPLIALPTQDPAHGGAPPEMASNRK

SEQ ID NO: 6775 - protein, 180 aa, Homo Sapiens; identical to SEQ ID NO: 6774

SEQ ID NO: 6776 - protein, 180 aa, Homo Sapiens; identical to SEQ ID NO: 6774

SEQ ID NO: 6777 - protein, 180 aa, Homo Sapiens; identical to SEQ ID NO: 6774

SEQ ID NO: 6778 - protein, 180 aa, Homo Sapiens; identical to SEQ ID NO: 6774

SEQ ID NO: 6779 - protein, 236 aa, Homo Sapiens
MVSPDPQIIVVAPETELASMQVQRTEDGVTIIQIFWVGRKGELLRRTPVSSAMQTPMGIPMGKSMLVLLTFLAFASCCIAAYRPSETLCGGELVDTLQFVCGDRGFYFSRPASRVSRRSRGIVEECCFRSCDLALLETYCATPAKSERDVSTPPTVLPDNFPRYPVGKFFQYDTWKQSTQRLRRGLPALLRARRGHVLAKELEAFREAKRHRPLIALPTQDPAHGGAPPEMASNRK

SEQ ID NO: 6780 - protein, 643 aa, Homo Sapiens
MALRKAGDLEPQFTPERRFRLCWYQAHSGRALLGPPPQASPPAGGLALALLLLSWVALGPRSLEGADPGTPGEAEGPACPAACVCSYDDDADELSVFCSSRNLTRLPDGVPGGTQALWLDGNNLSSVPPAAFQNLSSLGFLNLQGGQLGSLEPQALLGLENLCHLHLERNQLRSLALGTFAHTPALASLGLSNNRLSRLEDGLFEGLGSLWDLNLGWNSLAVLPDAAFRGLGSLRELVLAGNRLAYLQPALFSGLAELRELDLSRNALRAIKANVFVQLPRLQKLYLDRNLIAAVAPGAFLGLKALRWLDLSHNRVAGLLEDTFPGLLGLRVLRLSHNAIASLRPRTFKDLHFLEELQLGHNRIRQLAERSFEGLGQLEVLTLDHNQLQEVKAGAFLGLTNVAVMNLSGNCLRNLPEQVFRGLGKLHSLHLEGSCLGRIRPHTFTGLSGLRRLFLKDNGLVGIEEQSLWGLAELLELDLTSNQLTHLPHRLFQGLGKLEYLLLSRNRLAELPADALGPLQRAFWLDVSHNRLEALPNSLLAPLGRLRYLSLRNNSLRTFTPQPPGLERLWLEGNPWDCGCPLKALRDFALQNPSAVPRFVQAICEGDDCQPPAYTYNNITCASPPEVVGLDLRDLSEAHFAPC

SEQ ID NO: 6781 - protein, 605 aa, Homo Sapiens
MALRKGGLALALLLLSWVALGPRSLEGADPGTPGEAEGPACPAACVCSYDDDADELSVFCSSRNLTRLPDGVPGGTQALWLDGNNLSSVPPAAFQNLSSLGFLNLQGGQLGSLEPQALLGLENLCHLHLERNQLRSLALGTFAHTPALASLGLSNNRLSRLEDGLFEGLGSLWDLNLGWNSLAVLPDAAFRGLGSLRELVLAGNRLAYLQPALFSGLAELRELDLSRNALRAIKANVFVQLPRLQKLYLDRNLIAAVAPGAFLGLKALRWLDLSHNRVAGLLEDTFPGLLGLRVLRLSHNAIASLRPRTFKDLHFLEELQLGHNRIRQLAERSFEGLGQLEVLTLDHNQLQEVKAGAFLGLTNVAVMNLSGNCLRNLPEQVFRGLGKLHSLHLEGSCLGRIRPHTFTGLSGLRRLFLKDNGLVGIEEQSLWGLAELLELDLTSNQLTHLPHRLFQGLGKLEYLLLSRNRLAELPADALGPLQRAFWLDVSHNRLEALPNSLLAPLGRLRYLSLRNNSLRTFTPQPPGLERLWLEGNPWDCGCPLKALRDFALQNPSAVPRFVQAICEGDDCQPPAYTYNNITCASPPEVVGLDLRDLSEAHFAPC

SEQ ID NO: 6782 - protein, 131 aa, Homo Sapiens
MTVGRRLPTALHGACQEAWPWRCCCCPGWHWAPAAWREQTPERRGKPRAQRARPPVSAATMTTRMSSASSAAPGTSRACLMESRAAPKPCGWTATTSRPSPRQPSRTSPAWASSTCRAASWAAWSHRRCWA

SEQ ID NO: 6783 - protein, 216 aa, Homo Sapiens
MSEVPVARVWLVLLLLTVQVGVTAGAPWQCAPCSAEKLALCPPVSASCSEVTRSAGCGCCPMCALPLGAACGVATARCARGLSCRALPGEQQPLHALTRGQGACVQESDASAPHAAEAGSPESPESTEITEEELLDNFHLMAPSEEDHSILWDAISTYDGSKALHVTNIKKWKCETSMDGEAGLCWCVYPWNGKRIPGSPEIRGDPNCQIYFNVQN

SEQ ID NO: 6784 - protein, 259 aa, Homo Sapiens
MSEVPVARVWLVLLLLTVQVGVTAGAPWQCAPCSAEKLALCPPVSASCSEVTRSAGCGCCPMCALPLGAACGVATARCARGLSCRALPGEQQPLHALTRGQGACVQESDASAPHAAEAGSPESPESTEITEEELLDNFHLMAPSEEDHSILWDAISTYDGSKALHVTNIKKWKEPCRIELYRVVESLAKAQETSGEEISKFYLPNCNKNGFYHSRQCETSMDGEAGLCWCVYPWNGKRIPGSPEIRGDPNCQIYFNVQN

SEQ ID NO: 6785 - protein, 257 aa, Homo Sapiens
MSEVPVARVWLVLLLLTVQVGVTAGAPWQCAPCSAEKLALCPPVSASCSEVTRSAGCGCCPMCALPLGAACGVATARCARGLSCRALPGEQQPLHALTRGQGACVQESDASAPHAAEAGSPESPESTEITEEELLDNFHLMAPSEEDHSILWDAISTYDGSKALHVTNIKKWKEPCRIELYRVVESLAKAQETSGEEISKFYLPNCNKNGFYHSRQTSMDGEAGLCWCVYPWNGKRIPGSPEIRGDPNCQIYFNVQN

SEQ ID NO: 6786 - protein, 98 aa, Homo Sapiens
KHHLGLEEPKKLRPPPARQLLAELASGACFVGLLSSLRASPAVCACRLPANRNWTRSWSGSPPCAFRMSGALWSTSTPCTSPTVTSMACTTSNSARCL

SEQ ID NO: 6787 - protein, 325 aa, Homo Sapiens
MLPRVGCPALPLPPPPLLPLLLLLLGASGGGGGARAEVLFRCPPCTPERLAACGPPPVAPPAAVAAVAGGARMPCAELVREPGCGCCSVCARLEGEACGVYTPRCGQGLRCYPHPGSELPLQALVMGEGTCEKRRDAEYGASPEQVADNGDDHSEGGLVENHVDSTMNMLGGGGSAGRKPLKSGMKELAVFREKVTEQHRQMGKGGKHHLGLEEPKKLRPPPARTPCQQELDQVLERISTMRLPDERGPLEHLYSLHIPNCDKHGLYNLKQCKMSLNGQRGECWCVNPNTGKLIQGAPTIRGDPECHLFYNEQQEARGVHTQRMQ

SEQ ID NO: 6788 - protein, 78 aa, Homo Sapiens
MNMLGGGGSAGRKPLKSGMKELAVFREKVTEQHRQMGKGGKHHLGLEEPKKLRPPPARTPCQQELDQVLERISTMRLP

SEQ ID NO: 6789 - protein, 181 aa, Homo Sapiens
MPCNNGDDHSEGGLVENHVDSTMNMLGGGGSAGRKPLKSGMKELAVFREKVTEQHRQMGKGGKHHLGLEEPKKLRPPPARTPCQQELDQVLERISTMRLPDERGPLEHLYSLHIPNCDKHGLYNLKQCKMSLNGQRGECWCVNPNTGKLIQGAPTIRGDPECHLFYNEQQEARGVHTQRMQ

SEQ ID NO: 6790 - protein, 194 aa, Homo Sapiens
MQRARPLQALLDGRGLCVNASAVSRLRAYLLPAPPAPGNASESEEDRSAGSVESPSVSSTHRVSDPKFHPLHSKIIIIKKGHAKDSQRYKVDYESQSTDTQNFSSESKRETEYGPCRREMEDTLNHLKFLNVLSPRGVHIPNCDKKGFYKKKQCRPSKGRKRGFCWCVDKYGQPLPGYTTKGKEDVHCYSMQSK

SEQ ID NO: 6791 - protein, 297 aa, Homo Sapiens
MQRARPTLWAAALTLLVLLRGPPVARAGASSAGLGPVVRCEPCDARALAQCAPPPAVCAELVREPGCGCCLTCALSEGQPCGIYTERCGSGLRCQPSPDEARPLQALLDGRGLCVNASAVSRLRAYLLPAPPAPGEPPAPGNASESEEDRSAGSVESPSVSSTHRVSDPKFHPLHSKIIIIKKGHAKDSQRYKVDYESQSTDTQNFSSESKRETEYGPCRREMEDTLNHLKFLNVLSPRGVHIPNCDKKGFYKKKQCRPSKGRKRGFCWCVDKYGQPLPGYTTKGKEDVHCYSMQSK

SEQ ID NO: 6792 - protein, 291 aa, Homo Sapiens
MQRARPTLWAAALTLLVLLRGPPVARAGASSAGLGPVVRCEPCDARALAQCAPPPAVCAELVREPGCGCCLTCALSEGQPCGIYTERCGSGLRCQPSPDEARPLQALLDGRGLCVNASAVSRLRAYLLPAPPAPGNASESEEDRSAGSVESPSVSSTHRVSDPKFHPLHSKIIIIKKGHAKDSQRYKVDYESQSTDTQNFSSESKRETEYGPCRREMEDTLNHLKFLNVLSPRGVHIPNCDKKGFYKKKQCRPSKGRKRGFCWCVDKYGQPLPGYTTKGKEDVHCYSMQSK

SEQ ID NO: 6793 - protein, 270 aa, Homo Sapiens
MQRARPTLWAAALTLLVRCEPCDARALAQCAPPPAVCAELVREPGCGCCLTCALSEGQPCGIYTERCGSGLRCQPSPDEARPLQALLDGRGLCVNASAVSRLRAYLLPAPPAPGNASESEEDRSAGSVESPSVSSTHRVSDPKFHPLHSKIIIIKKGHAKDSQRYKVDYESQSTDTQNFSSESKRETEYGPCRREMEDTLNHLKFLNVLSPRGVHIPNCDKKGFYKKKQCRPSKGRKRGFCWCVDKYGQPLPGYTTKGKEDVHCYSMQSK

SEQ ID NO: 6794 - protein, 263 aa, Homo Sapiens
MQRARPTLWAACEPCDARALAQCAPPPAVCAELVREPGCGCCLTCALSEGQPCGIYTERCGSGLRCQPSPDEARPLQALLDGRGLCVNASAVSRLRAYLLPAPPAPGNASESEEDRSAGSVESPSVSSTHRVSDPKFHPLHSKIIIIKKGHAKDSQRYKVDYESQSTDTQNFSSESKRETEYGPCRREMEDTLNHLKFLNVLSPRGVHIPNCDKKGFYKKKQCRPSKGRKRGFCWCVDKYGQPLPGYTTKGKEDVHCYSMQSK

SEQ ID NO: 6795 - protein, 132 aa, Homo Sapiens
MRSAVCQFPRHRLAAGRPHPESGRGNASESEEDRSAGSVESPSVSSTHRVSDPKFHPLHSKIIIIKKGHAKDSQRYKVDYESQSTDTQNFSSESKRETEYGPCRREMEDTLNHLKFLNVLSPRGVHIPNCDK

SEQ ID NO: 6796 - protein, 143 aa, Homo Sapiens
  misc_feature (1)..(1): Xaa can be any naturally occurring amino acid
XESPSVSSTHRVSDPKFHPLHSKIIIIKKGHAKDSQRYKVDYESQSTDTQNFSSESKRETEYGPCRREMEDTLNHLKFLNVLSPRGVHIPNCDKKGFYKKKQCRPSKGRKRGFCWCVDKYGQPLPGYTTKGKEDVHCYSMQSK

SEQ ID NO: 6797 - protein, 153 aa, Homo Sapiens
  misc_feature (1)..(1): Xaa can be any naturally occurring amino acid
XSEEDRSAGSVESPSVSSTHRVSDPKFHPLHSKIIIIKKGHAKDSQRYKVDYESQSTDTQNFSSESKRETEYGPCRREMEDTLNHLKFLNVLSPRGVHIPNCDKKGFYKKKQCRPSKGRKRGFCWCVDKYGQPLPGYTTKGKEDVHCYSMQSK

SEQ ID NO: 6798 - protein, 258 aa, Homo Sapiens
MLPLCLVAALLLAAGPGPSLGDEAIHCPPCSEEKLARCRPPVGCEELVREPGCGCCATCALGLGMPCGVYTPRCGSGLRCYPPRGVEKPLHTLMHGQGVCMELAEIEAIQESLQPSDKDEGDHPNNSFSPCSAHDRRCLQKHFAKIRDRSTSGGKMKVNGAPREDARPVPQGSCQSELHRALERLAASQSRTHEDLYIIPIPNCDRNGNFHPKQCHPALDGQRGKCWCVDRKTGVKLPGGLEPKGELDCHQLADSFRE

SEQ ID NO: 6799 - protein, 272 aa, Homo Sapiens
MVLLTAVLLLLAAYAGPAQSLGSFVHCEPCDEKALSMCPPSPLGCELVKEPGCGCCMTCALAEGQSCGVYTERCAQGLRCLPRQDEEKPLHALLHGRGVCLNEKSYREQVKIERDSREHEEPTTSEMAEETYSPKIFRPKHTRISELKAEAVKKDRRKKLTQSKFVGGAENTAHPRIISAPEMRQESEQGPCRRHMEASLQELKASPRMVPRAVYLPNCDRKGFYKRKQCKPSRGRKRGICWCVDKYGMKLPGMEYVDGDFQCHTFDSSNVE

SEQ ID NO: 6800 - protein, 233 aa, Homo Sapiens
MVLLTAVLLLLAAYAGPAQSLGSFVHCEPCDEKALSMCPPSPLGCELVKEPGCGCCMTCALAEGQSCGVYTERCAQGLRCLPRQDEEKPLHALLHGRGVCLNEKSYREQVKIGCAPGGQRHICFSLYYSPHPKLPSPGLWPCAPWPTGADPPAPSPAERDSREHEEPTTSEMAEETYSPKIFRPKHTRISELKAEAVKKDRRKKLTQSKFVGGAENTAHPRIISAPEMRQESE

SEQ ID NO: 6801 - protein, 238 aa, Homo Sapiens
MTPHRLLPPLLLLLALLLAASPGGALARCPGCGQGVQAGCPGGCVEEEDGGSPAEGCAEAEGCLRREGQECGVYTPNCAPGLQCHPPKDDEAPLRALLLGRGRCLPARAPAEENPKESKPQAGTARPQDVNRRDQQRNPGTSTTPSQPNSAGVQDTEMGPCRRHLDSVLQQLQTEVYRGAQTLYVPNCDHRGFYRKRQCRSSQGQRRGPCWCVDRMGKSLPGSPDGNGSSSCPTGSSG

SEQ ID NO: 6802 - protein, 240 aa, Homo Sapiens
MTPHRLLPPLLLLLALLLAASPGGALARCPGCGQGVQAGCPGGCVEEEDGGSPAEGCAEAEGCLRREGQECGVYTPNCAPGLQCHPPKDDEAPLRALLLGRGRCLPARAPAVAEENPKESKPQAGTARPQDVNRRDQQRNPGTSTTPSQPNSAGVQDTEMGPCRRHLDSVLQQLQTEVYRGAQTLYVPNCDHRGFYRKRQCRSSQGQRRGPCWCVDRMGKSLPGSPDGNGSSSCPTGSSG

SEQ ID NO: 6803 - protein, 136 aa, Homo Sapiens
MTPHRLLPPLLLLLALLLAASPGGALARCPGCGQGVQAGCPGGCVEEEDGGSPAEGCAEAEGCLRREGQECGVYTPNCAPGLQCHPPKDDEAPLRALLLGRGRCLPARAPAVLSSPRTLRKLSPEPGATCSCRGES

SEQ ID NO: 6804 - protein, 282 aa, Homo Sapiens
MERPSLRALLLGAAGLLLLLLPLSSSSSSDTCGPCEPASCPPLPPLGCLLGETRDACGCCPMCARGEGEPCGGGGAGRGYCAPGMECVKSRKRRKGKAGAAAGGPGVSGVCVCKSRYPVCGSDGTTYPSGCQLRAASQRAESRGEKAITQVSKGTCEQGPSIVTPPKDIWNVTGAQVYLSCEVIGIPTPVLIWNKVKRGHYGVQRTELLPGDRDNLAIQTRGGPEKHEVTGWVLVSPLSKEDAGEYECHASNSQGQASASAKITVVDALHEIPVKKGEGAEL

SEQ ID NO: 6805 - protein, 279 aa, Homo Sapiens
MERPSLRALLLGAAGLLLLLLPLSSSSSSDTCGPCEPASCPPLPPLGCLLGETRDACGCCPMCARGEGEPCGGGGAGRGYCAPGMECVKSRKRRKGKAGAAAGGPGVSGVCVCKSRYPVCGSDGTTYPSGCQLRAASQRAESRGEKAITQVSKGTCEQGPSIVTPPKDIWNVTGAQVYLSCEVIGIPTPVLIWNKVKRGHYGVQRTELLPGDRDNLAIQTRGGPEKHEVTGWVLVSPLSKEDAGEYECHASNSQGQASASAKITVVDALHEIPVKKGTQ

SEQ ID NO: 6806 - protein, 278 aa, Homo Sapiens
MPRLSLLLPLLLLLLLPLLPPLSPSLGIRDVGGRRPKCGPCRPEGCPAPAPCPAPGISALDECGCCARCLGAEGASCGGRAGGRCGPGLVCASQAAGAAPEGTGLCVCAQRGTVCGSDGRSYPSVCALRLRARHTPRAHPGHLHKARDGPCEFAPVVVVPPRSVHNVTGAQVGLSCEVRAVPTPVITWRKVTKSPEGTQALEELPGDHVNIAVQVRGGPSDHEATAWILINPLRKEDEGVYQCHAANMVGEAESHSTVTVLDLSKYRSFHFPAPDDRM

SEQ ID NO: 6807 - protein, 110 aa, Homo Sapiens
MAPRGCIVAVFAIFCISRLLCSHGAPVAPMTPYLMLCQPHKRCGDKFYDPLQHCCYDDAVVPLARTQTCGNCTFRVCFEQCCPWTFMVKLINQNCDSARTSDDRLCRSVS

SEQ ID NO: 6808 - protein, 130 aa, Homo Sapiens
MRFSVSGMRTDYPRSVLAPAYVSVCLLLLCPREVIAPAGSEPWLCQPAPRCGDKIYNPLEQCCYNDAIVSLSETRQCGPPCTFWPCFELCCLDSFGLTNDFVVKLKVQGVNSQCHSSPISSKCESRRRFP

SEQ ID NO: 6809 - protein, 119 aa, Homo Sapiens
MVPRIFAPAYVSVCLLLLCPREVIAPAGSEPWLCQPAPRCGDKIYNPLEQCCYNDAIVSLSETRQCGPPCTFWPCFELCCLDSFGLTNDFVVKLKVQGVNSQCHSSPISSKCESRRRFP

SEQ ID NO: 6810 - protein, 84 aa, Homo Sapiens
QPAPRCGDKIYNPLEQCCYNDAIVSLSETRQCGPPCTFWPCFELCCLDSFGLTNDFVVKLKVQGVNSQCHSSPISSKCERRRFP

SEQ ID NO: 6811 - protein, 125 aa, Homo Sapiens
MRPRCCILALVCWITVFLLQCSKGTTDAPVGSGLWLCQPTPRCGNKIYNPSEQCCYDDAILSLKETRRCGSTCTFWPCFELCCPESFGPQQKFLVKLRVLGMKSQCHLSPISRSCTRNRRHVLYP

SEQ ID NO: 6812 - protein, 16 aa, Homo Sapiens
MGPGRCLLTALLLLAL

SEQ ID NO: 6813 - protein, 132 aa, Homo Sapiens
MGPGRCLLTALLLLALAPPPEASQYCGRLEYWNPDNKCCSSCLQRFGPPPCPDYEFRENCGLNDHGDFVTPPFRKCSSGQCNPDGAELCSPCGGGAVTPTPAAGGGRTPWRCREAGPCQGALPPHTWKPRRP

SEQ ID NO: 6814 - protein, 138 aa, Homo Sapiens
MGPGRCLLTALLLLALAPPPEASQYCGRLEYWNPDNKCCSSCLQRFGPPPCPDYEFRENCGLNDHGDFVTPPFRKCSSGQCNPDGAELCSPCGGGAVTPTPAAGGGRTPWRCRERPVPAKGHCPLTPGNPGAPSSQER

SEQ ID NO: 6815 - protein, 355 aa, Homo Sapiens
MGPGRCLLTALLLLALAPPPEASQYCGRLEYWNPDNKCCSSCLQRFGPPPCPDYEFRENCGLNDHGDFVTPPFRKCSSGQCNPDGAELCSPCGGGAVTPTPAAGGGRTPWRCRERPVPAKGHCPLTPGNPGAPSSQERSSPASSIAWRTPEPVPQQAWPNFLPLVVLVLLLTLAVIAILLFILLWHLCWPKEKADPYPYPGLVCGVPNTHTPSSSHLSSPGALETGDTWKEASLLPLLSRELSSLASQPLSRLLDELEVLEELIVLLDPEPGPGGGMAHGTTRHLAARYGLPAAWSTFAYSLRPSRSPLRALIEMVVAREPSASLGQLGTHLAQLGRADALRVLSKLGSSGVCWA

SEQ ID NO: 6816 - protein, 355 aa, Homo Sapiens; identical to SEQ ID NO: 6815

SEQ ID NO: 6817 - protein, 167 aa, Homo Sapiens
MGPGRCLLTALLLLALAPPPEASQYCGRLEYWNPDNKCCSSCLQRFGPPPCPELSSLASQPLSRLLDELEVLEELIVLLDPEPGPGGGMAHGTTRHLAARYGLPAAWSTFAYSLRPSRSPLRALIEMVVAREPSASLGQLGTHLAQLGRADALRVLSKLGSSGVCWA

SEQ ID NO: 6818 - protein, 187 aa, Homo Sapiens
MGPGRCLLTALLLLALAPPPEASQYCGRLEYWNPDNKCCSSCLQRFGPPPCPGALETGDTWKEASLLPLLSRELSSLASQPLSRLLDELEVLEELIVLLDPEPGPGGGMAHGTTRHLAARYGLPAAWSTFAYSLRPSRSPLRALIEMVVAREPSASLGQLGTHLAQLGRADALRVLSKLGSSGVCWA

SEQ ID NO: 6819 - protein, 60 aa, Homo Sapiens
  misc_feature (1)..(1): Xaa can be any naturally occurring amino acid
XGRLEYWNPDNKCCSSCLQRFGPPPCPGENPRPSLAWAELAEAGPCQGALPPHTWKPRRP

SEQ ID NO: 6820 - protein, 74 aa, Homo Sapiens
  misc_feature (1)..(1): Xaa can be any naturally occurring amino acid
XNCGLNDHGDFVTPPFRKCSSGQCNPDGAELCSPCGGGAVTPTPAAGGGRTPWRCREAPWRQGTHGRRPHYFHS

SEQ ID NO: 6821 - protein, 53 aa, Homo Sapiens
MCSYYHMKKRSVSGCNITIFAVMFSHLSAGKSPCGNQANVLCISRLEFVQYQS

SEQ ID NO: 6822 - protein, 336 aa, Homo Sapiens
MPPPAPGARLRLLAAAALAGLAVISRGLLSQSLEFNSPADNYTVCEGDNATLSCFIDEHVTRVAWLNRSNILYAGNDRWTSDPRVRLLINTPEEFSILITEVGLGDEGLYTCSFQTRHQPYTTQVYLIVHVPARIVNISSPVTVNEGGNVNLLCLAVGRPEPTVTWRQLRDGFTSEGEILEISDIQRGQAGEYECVTHNGVNSAPDSRRVLVTVNYPPTITDVTSARTALGRAALLRCEAMAVPPADFQWYKDDRLLSSGTAEGLKVQTERTRSMLLFANVSARHYGNYTCRAANRLGASSASMRLLRPGSLENSAPRPPGLLALLSALGWLWWRM

SEQ ID NO: 6823 - protein, 1327 aa, Homo Sapiens
MTLDRPGEGATMLKTFTVLLFCILMDPQPELWIESNYPQAPWENITLWCRSPSRISSKFLLLKDKTQMTWIRPSHKTFQVSFLIGALTESNAGLYRCCYWKETGWSKPSKVLELEAPGQLPKPIFWIQAETPALPGCNVNILCHGWLQDLVFMLFKEGYAEPVDYQVPTGTMAIFSIDNLTPEDEGVYICRTHIQMLPTLWSEPSNPLKLVVAGLYPKPTLTAHPGPIMAPGESLNLRCQGPIYGMTFALMRVEDLEKSFYHKKTIKNEANFFFQSLKIQDTGHYLCFYYDASYRGSLLSDVLKIWVTDTFPKTWLLARPSAVVQMGQNVSLRCRGPVDGVGLALYKKGEDKPLQFLDATSIDDNTSFFLNNVTYSDTGIYSCHYLLTWKTSIRMPSHNTVELMVVDKPPKPSLSAWPSTVFKLGKAITLQCRVSHPVLEFSLEWEERETFQKFSVNGDFIISNVDGKGTGTYSCSYRVETHPNIWSHRSEPLKLMGPAGYLTWNYVLNEAIRLSLIMQLVALLLVVLWIRWKCRRLRIREAWLLGTAQGVTMLFIVTALLCCGLCNGVLIEETEIVMPTPKPELWAETNFPLAPWKNLTLWCRSPSGSTKEFVLLKDGTGWIATRPASEQVRAAFPLGALTQSHTGSYHCHSWEEMAVSEPSEALELVGTDILPKPVISASPTIRGQELQLRCKGWLAGMGFALYKEGEQEPVQQLGAVGREAFFTIQRMEDKDEGNYSCRTHTEKRPFKWSEPSEPLELVIKEMYPKPFFKTWASPVVTPGARVTFNCSTPHQHMSFILYKDGSEIASSDRSWASPGASAAHFLIISVGIGDGGNYSCRYYDFSIWSEPSDPVELVVTEFYPKPTLLAQPGPVVFPGKSVILRCQGTFQGMRFALLQEGAHVPLQFRSVSGNSADFLLHTVGAEDSGNYSCIYYETTMSNRGSYLSMPLMIWVTDTFPKPWLFAEPSSVVPMGQNVTLWCRGPVHGVGYILHKEGEATSMQLWGSTSNDGAFPITNISGTSMGRYSCCYHPDWTSSIKIQPSNTLELLVTGLLPKPSLLAQPGPMVAPGENMTLQCQGELPDSTFVLLKEGAQEPLEQQRPSGYRADFWMPAVRGEDSGIYSCVYYLDSTPFAASNHSDSLEIWVTDKPPKPSLSAWPSTMFKLGKDITLQCRGPLPGVEFVLEHDGEEAPQQFSEDGDFVINNVEGKGIGNYSCSYRLQAYPDIWSEPSDPLELVGAAGPVAQECTVGNIVRSSLIVVVVVALGVVLAIEWKKWPRLRTRGSETDGRDQTIALEECNQEGEPGTPANSPSSTSQRISVELPVPI

SEQ ID NO: 6824 - protein, 1327 aa, Homo Sapiens; identical to SEQ ID NO: 6823

SEQ ID NO: 6825 - protein, 242 aa, Homo Sapiens
MTLDRPGEGATMLKTFTVLLFCIRMSLGMTSIVMDPQPELWIESNYPQAPWENITLWCRSPSRISSKFLLLKDKTQMTWIRPSHKTFQVSFLIGALTESNAGLYRCCYWKETGWSKPSKVLELEAPGQLPKPIFWIQAETPALPGCNVNILCHGWLQDLVFMLFKEGYAEPVDYQVPTGTMAIFSIDNLTPEDEGVYICRTHIQMLPTLWSEPSNPLKLVVAGGCGYGCWHLAIVVPGIMAG

SEQ ID NO: 6826 - protein, 242 aa, Homo Sapiens; identical to SEQ ID NO: 6825

SEQ ID NO: 6827 - protein, 1341 aa, Homo Sapiens
MTLDRPGEGATMLKTFTVLLFCIRMSLGMTSIVMDPQPELWIESNYPQAPWENITLWCRSPSRISSKFLLLKDKTQMTWIRPSHKTFQVSFLIGALTESNAGLYRCCYWKETGWSKPSKVLELEAPGQLPKPIFWIQAETPALPGCNVNILCHGWLQDLVFMLFKEGYAEPVDYQVPTGTMAIFSIDNLTPEDEGVYICRTHIQMLPTLWSEPSNPLKLVVAGLYPKPTLTAHPGPIMAPGESLNLRCQGPIYGMTFALMRVEDLEKSFYHKKTIKNEANFFFQSLKIQDTGHYLCFYYDASYRGSLLSDVLKIWVTDTFPKTWLLARPSAVVQMGQNVSLRCRGPVDGVGLALYKKGEDKPLQFLDATSIDDNTSFFLNNVTYSDTGIYSCHYLLTWKTSIRMPSHNTVELMVVDKPPKPSLSAWPSTVFKLGKAITLQCRVSHPVLEFSLEWEERETFQKFSVNGDFIISNVDGKGTGTYSCSYRVETHPNIWSHRSEPLKLMGPAGYLTWNYVLNEAIRLSLIMQLVALLLVVLWIRWKCRRLRIREAWLLGTAQGVTMLFIVTALLCCAISFAGLCNGVLIEETEIVMPTPKPELWAETNFPLAPWKNLTLWCRSPSGSTKEFVLLKDGTGWIATRPASEQVRAAFPLGALTQSHTGSYHCHSWEEMAVSEPSEALELVGTDILPKPVISASPTIRGQELQLRCKGWLAGMGFALYKEGEQEPVQQLGAVGREAFFTIQRMEDKDEGNYSCRTHTEKRPFKWSEPSEPLELVIKEMYPKPFFKTWASPVVTPGARVTFNCSTPHQHMSFILYKDGSEIASSDRSWASPGASAAHFLIISVGIGDGGNYSCRYYDFSIWSEPSDPVELVVTEFYPKPTLLAQPGPVVFPGKSVILRCQGTFQGMRFALLQEGAHVPLQFRSVSGNSADFLLHTVGAEDSGNYSCIYYETTMSNRGSYLSMPLMIWVTDTFPKPWLFAEPSSVVPMGQNVTLWCRGPVHGVGYILHKEGEATSMQLWGSTSNDGAFPITNISGTSMGRYSCCYHPDWTSSIKIQPSNTLELLVTGLLPKPSLLAQPGPMVAPGENMTLQCQGELPDSTFVLLKEGAQEPLEQQRPSGYRADFWMPAVRGEDSGIYSCVYYLDSTPFAASNHSDSLEIWVTDKPPKPSLSAWPSTMFKLGKDITLQCRGPLPGVEFVLEHDGEEAPQQFSEDGDFVINNVEGKGIGNYSCSYRLQAYPDIWSEPSDPLELVGAAGPVAQECTVGNIVRSSLIVVVVVALGVVLAIEWKKWPRLRTRGSETDGRDQTIALEECNQEGEPGTPANSPSSTSQRISVELPVPI

SEQ ID NO: 6828 - protein, 1336 aa, Homo Sapiens
MTLDRPGEGATMLKTFTVLLFCIRMSLGMTSIVMDPQPELWIESNYPQAPWENITLWCRSPSRISSKFLLLKDKTQMTWIRPSHKTFQVSFLIGALTESNAGLYRCCYWKETGWSKPSKVLELEAPGQLPKPIFWIQAETPALPGCNVNILCHGWLQDLVFMLFKEGYAEPVDYQVPTGTMAIFSIDNLTPEDEGVYICRTHIQMLPTLWSEPSNPLKLVVAGLYPKPTLTAHPGPIMAPGESLNLRCQGPIYGMTFALMRVEDLEKSFYHKKTIKNEANFFFQSLKIQDTGHYLCFYYDASYRGSLLSDVLKIWVTDTFPKTWLLARPSAVVQMGQNVSLRCRGPVDGVGLALYKKGEDKPLQFLDATSIDDNTSFFLNNVTYSDTGIYSCHYLLTWKTSIRMPSHNTVELMVVDKPPKPSLSAWPSTVFKLGKAITLQCRVSHPVLEFSLEWEERETFQKFSVNGDFIISNVDGKGTGTYSCSYRVETHPNIWSHRSEPLKLMGPAGYLTWNYVLNEAIRLSLIMQLVALLLVVLWIRWKCRRLRIREAWLLGTAQGVTMLFIVTALLCCGLCNGVLIEETEIVMPTPKPELWAETNFPLAPWKNLTLWCRSPSGSTKEFVLLKDGTGWIATRPASEQVRAAFPLGALTQSHTGSYHCHSWEEMAVSEPSEALELVGTDILPKPVISASPTIRGQELQLRCKGWLAGMGFALYKEGEQEPVQQLGAVGREAFFTIQRMEDKDEGNYSCRTHTEKRPFKWSEPSEPLELVIKEMYPKPFFKTWASPVVTPGARVTFNCSTPHQHMSFILYKDGSEIASSDRSWASPGASAAHFLIISVGIGDGGNYSCRYYDFSIWSEPSDPVELVVTEFYPKPTLLAQPGPVVFPGKSVILRCQGTFQGMRFALLQEGAHVPLQFRSVSGNSADFLLHTVGAEDSGNYSCIYYETTMSNRGSYLSMPLMIWVTDTFPKPWLFAEPSSVVPMGQNVTLWCRGPVHGVGYILHKEGEATSMQLWGSTSNDGAFPITNISGTSMGRYSCCYHPDWTSSIKIQPSNTLELLVTGLLPKPSLLAQPGPMVAPGENMTLQCQGELPDSTFVLLKEGAQEPLEQQRPSGYRADFWMPAVRGEDSGIYSCVYYLDSTPFAASNHSDSLEIWVTDKPPKPSLSAWPSTMFKLGKDITLQCRGPLPGVEFVLEHDGEEAPQQFSEDGDFVINNVEGKGIGNYSCSYRLQAYPDIWSEPSDPLELVGAAGPVAQECTVGNIVRSSLIVVVVVALGVVLAIEWKKWPRLRTRGSETDGRDQTIALEECNQEGEPGTPANSPSSTSQRISVELPVPI

SEQ ID NO: 6829 - protein, 2623 aa, Homo Sapiens
MKVKGRGITCLLVSFAVICLVATPGGKACPRRCACYMPTEVHCTFRYLTSIPDSIPPNVERINLGYNSLVRLMETDFSGLTKLELLMLHSNGIHTIPDKTFSDLQALQVLKMSYNKVRKLQKDTFYGLRSLTRLHMDHNNIEFINPEVFYGLNFLRLVHLEGNQLTKLHPDTFVSLSYLQIFKISFIKFLYLSDNFLTSLPQEMVSYMPDLDSLYLHGNPWTCDCHLKWLSDWIQEKPDVIKCKKDRSPSSAQQCPLCMNPRTSKGKPLAMVSAAAFQCAKPTIDSSLKSKSLTILEDSSSAFISPQGFMAPFGSLTLNMTDQSGNEANMVCSIQKPSRTSPIAFTEENDYIVLNTSFSTFLVCNIDYGHIQPVWQILALYSDSPLILERSHLLSETPQLYYKYKQVAPKPEDIFTNIEADLRADPSWLMQDQISLQLNRTATTFSTLQIQYSSDAQITLPRAEMRPVKHKWTMISRDNNTKLEHTVLVGGTVGLNCPGQGDPTPHVDWLLADGSKVRAPYVSEDGRILIDKSGKLELQMADSFDTGVYHCISSNYDDADILTYRITVVEPLVEAYQENGIHHTVFIGETLDLPCHSTGIPDASISWVIPGNNVLYQSSRDKKVLNNGTLRILQVTPKDQGYYRCVAANPSGVDFLIFQVSVKMKGQRPLEHDGETEGSGLDESNPIAHLKEPPGAQLRTSALMEAEVGKHTSSTSKRHNYRELTLQRRGDSTHRRFRENRRHFPPSARRIDPQHWAALLEKAKKNAMPDKRENTTVSPPPVVTQLPNIPGEEDDSSGMLALHEEFMVPATKALNLPARTVTADSRTISDSPMTNINYGTEFSPVVNSQILPPEEPTDFKLSTAIKTTAMSKNINPTMSSQIQGTTNQHSSTVFPLLLGATEFQDSDQMGRGREHFQSRPPITVRTMIKDVNVKMLSSTTNKLLLESVNTTNSHQTSVREVSEPRHNHFYSHTTQILSTSTFPSDPHTAAHSQFPIPRNSTVNIPLFRRFGRQRKIGGRGRIISPYRTPVLRRHRYSIFRSTTRGSSEKSTTAFSATVLNVTCLSCLPRERLTTATAALSFPSAAPITFPKADIARVPSEESTTLVQNPLLLLENKPSVEKTTPTIKYFRTEISQVTPTGAVMTYAPTSIPMEKTHKVNASYPRVSSTNEAKRDSVITSSLSGAITKPPMTIIAITRFSRRKIPWQQNFVNNHNPKGRLRNQHKVSLQKSTAVMLPKTSPALPRDKVSPFHFTTLSTSVMQIPSNTLTTAHHTTTKTHNPGSLPTKKELPFPPLNPMLPSIISKDSSTKSIISTQTAIPATTPTFPASVITYETQTERSRAQTIQREQEPQKKNRTDPNISPDQSSGFTTPTAMTPPVLTTAETSVKPSVSAFTHSPPENTTGISSTISFHSRTLNLTDVIEELAQASTQTLKSTIASETTLSSKSHQSTTTRKAIIRHSTIPPFLSSSATLMPVPISPPFTQRAVTDNVATPISGLMTNTVVKLHESSRHNAKPQQLVAEVATSPKVHPNAKFTIGTTHFIYSNLLHSTPMPALTTVKSQNSKLTPSPWAENQFWHKPYSEIAEKGKKPEVSMLATTGLSEATTLVSDWDGQKNTKKSDFDKKPVQEATTSKLLPFDSLSRYIFEKPRIVGGKAASFTIPANSDAFLPCEAVGNPLPTIHWTRVPSGLDLSKRKQNSRVQVLPNGTLSIQRVEIQDRGQYLCSASNLFGTDHLHVTLSVVSYPPRILERRTKEITVHSGSTVELKCRAEGRPSPTVTWILANQTVVSESSQGSRQAVVTVDGTLVLHNLSIYDRGFYKCVASNPGGQDSLLVKIQVIAAPPVILEQRRQVIVGTWGESLKLPCTAKGTPQPSVYWVLSDGTEVKPLQFTNSKLFLFSNGTLYIRNLASSDRGTYECIATSSTGSERRVVMLTMEERVTSPRIEAASQKRTEVNFGDKLLLNCSATGEPKPQIMWRLPSKAVVDQQHRVGSWIHVYPNGSLFIGSVTEKDSGVYLCVARNKMGDDLILMHVSLRLKPAKIDHKQYFRKQVLHGKDFQVDCKASGSPVPEISWSLPDGTMINNAMQADDSGHRTRRYTLFNNGTLYFNKVGVAEEGDYTCYAQNTLGKDEMKVHLTVITAAPRIRQSNKTNKRIKAGDTAVLDCEVTGDPKPKIFWLLPSNDMISFSIDRYTFHANGSLTINKVKLLDSGEYVCVARNPSGDDTKMYKLDVVSKPPLINGLYTNRTVIKATAVRHSKKHFDCRAEGTPSPEVMWIMPDNIFLTAPYYGSRITVHKNGTLEIRNVRLSDSADFICVARNEGGESVLVVQLEVLEMLRRPTFRNPFNEKIVAQLGKSTALNCSVDGNPPPEIIWILPNGTRFSNGPQSYQYLIASNGSFIISKTTREDAGKYRCAARNKVGYIEKLVILEIGQKPVILTYAPGTVKGISGESLSLHCVSDGIPKPNIKWTMPSGYVVDRPQINGKYILHDNGTLVIKEATAYDRGNYICKAQNSVGHTLITVPVMIVAYPPRITNRPPRSIVTRTGAAFQLHCVALGVPKPEITWEMPDHSLLSTASKERTHGSEQLHLQGTLVIQNPQTSDSGIYKCTAKNPLGSDYAATYIQVI

SEQ ID NO: 6830 - protein, 86 aa, Homo Sapiens
TMEERVTSPRIEAASQKRTEVNFGDKLLLNCSATGEPKPQIMWRLPSKAVVDQQHRILDFYFSEAEAMPCSCCNHKTEYPAYYCQV

SEQ ID NO: 6831 - protein, 406 aa, Homo Sapiens
MSLVELLLWWNCFSRTGVAASLEVSESPGSIQVARGQPAVLPCTFTTSAALINLNVIWMVTPLSNANQPEQVILYQGGQMFDGAPRFHGRVGFTGTMPATNVSIFINNTQLSDTGTYQCLVNNLPDIGGRNIGVTGLTVLVPPSAPHCQIQGSQDIGSDVILLCSSEEGIPRPTYLWEKLDNTLKLPPTATQDQVQGTVTIRNISALSSAQPRNIGLIAGAIGTGAVIIIFCIALILGAFFYWRSKNKEEEEEEIPNEIREDDLPPKCSSAKAFHTEISSSDNNTLTSSNAYNSRYWSNNPKVHRNTESVSHFSDLGQSFSFHSGNANIPSIYANGTHLVPGQHKTLVVTANRGSSPQVMSRSNGSVSRKPRPPHTHSYTISHATLERIGAVPVMVPAQSRAGSLV

SEQ ID NO: 6832 - protein, 430 aa, Homo Sapiens
MSLVELLLWWNCFSRTGVAASLEVSESPGSIQVARGQPAVLPCTFTTSAALINLNVIWMVTPLSNANQPEQVILYQGGQMFDGAPRFHGRVGFTGTMPATNVSIFINNTQLSDTGTYQCLVNNLPDIGGRNIGVTGLTVLVPPSAPHCQIQGSQDIGSDVILLCSSEEGIPRPTYLWEKLDNTLKLPPTATQDQVQGTVTIRNISALSSGLYQCVASNAIGTSTCLLDLQVISPQPRNIGLIAGAIGTGAVIIIFCIALILGAFFYWRSKNKEEEEEEIPNEIREDDLPPKCSSAKAFHTEISSSDNNTLTSSNAYNSRYWSNNPKVHRNTESVSHFSDLGQSFSFHSGNANIPSIYANGTHLVPGQHKTLVVTANRGSSPQVMSRSNGSVSRKPRPPHTHSYTISHATLERIGAVPVMVPAQSRAGSLV

SEQ ID NO: 6833 - protein, 430 aa, Homo Sapiens; identical to SEQ ID NO: 6832

SEQ ID NO: 6834 - protein, 407 aa, Homo Sapiens
MTSQRSPLAPLLLLSLHGVAASLEVSESPGSIQVARGQPAVLPCTFTTSAALINLNVIWMVTPLSNANQPEQVILYQGGQMFDGAPRFHGRVGFTGTMPATNVSIFINNTQLSDTGTYQCLVNNLPDIGGRNIGVTGLTVLVPPSAPHCQIQGSQDIGSDVILLCSSEEGIPRPTYLWEKLDNTLKLPPTATQDQVQGTVTIRNISALSSAQPRNIGLIAGAIGTGAVIIIFCIALILGAFFYWRSKNKEEEEEEIPNEIREDDLPPKCSSAKAFHTEISSSDNNTLTSSNAYNSRYWSNNPKVHRNTESVSHFSDLGQSFSFHSGNANIPSIYANGTHLVPGQHKTLVVTANRGSSPQVMSRSNGSVSRKPRPPHTHSYTISHATLERIGAVPVMVPAQSRAGSLV

SEQ ID NO: 6835 - protein, 431 aa, Homo Sapiens
MTSQRSPLAPLLLLSLHGVAASLEVSESPGSIQVARGQPAVLPCTFTTSAALINLNVIWMVTPLSNANQPEQVILYQGGQMFDGAPRFHGRVGFTGTMPATNVSIFINNTQLSDTGTYQCLVNNLPDIGGRNIGVTGLTVLVPPSAPHCQIQGSQDIGSDVILLCSSEEGIPRPTYLWEKLDNTLKLPPTATQDQVQGTVTIRNISALSSGLYQCVASNAIGTSTCLLDLQVISPQPRNIGLIAGAIGTGAVIIIFCIALILGAFFYWRSKNKEEEEEEIPNEIREDDLPPKCSSAKAFHTEISSSDNNTLTSSNAYNSRYWSNNPKVHRNTESVSHFSDLGQSFSFHSGNANIPSIYANGTHLVPGQHKTLVVTANRGSSPQVMSRSNGSVSRKPRPPHTHSYTISHATLERIGAVPVMVPAQSRAGSLV

SEQ ID NO: 6836 - protein, 403 aa, Homo Sapiens
MTSQRSPLAPLLLLSLHGVAASLEVSESPGSIQVARGQPAVLPCTFTTSAALINLNVIWMVTPLSNANQPEQVILYQGGQMFDGAPRFHGRVGFTGTMPATNVSIFINNTQLSDTGTYQCLVNNLPDIGGRNIGVTGLTVLVPPSAPHCQIQGSQDIGSDVILLCSSEEGIPRPTYLWEKLDNTLKLPPTATQDQVQGTVTIRNISALSSGLYQCVASNAIGTSTCLLDLQVISRAFFYWRSKNKEEEEEEIPNEIREDDLPPKCSSAKAFHTEISSSDNNTLTSSNAYNSRYWSNNPKVHRNTESVSHFSDLGQSFSFHSGNANIPSIYANGTHLVPGQHKTLVVTANRGSSPQVMSRSNGSVSRKPRPPHTHSYTISHATLERIGAVPVMVPAQSRAGSLV

SEQ ID NO: 6837 - protein, 33 aa, Homo Sapiens
MVTPLSNANQPEQVILYQGGQMFDGAPRFHGRV

SEQ ID NO: 6838 - protein, 59 aa, Homo Sapiens
MVTPLSNANQPEQVILYQGGQMFDGAPRFHGRVGFTGTMPATNVSIFINNTQLSDTGTY

SEQ ID NO: 6839 - protein, 467 aa, Homo Sapiens
MRTAPSLRRCVCLLLAAILDLARGYLTVNIEPLPPVVAGDAVTLKCNFKTDGRMREIVWYRVTDGGTIKQKIFTFDAMFSTNYSHMENYRKREDLVYQSTVRLPEVRISDNGPYECHVGIYDRATREKVVLASGNIFLNVMAPPTSIEVVAADTPAPFSRYQAQNFTLVCIVSGGKPAPMVYFKRDGEPIDAVPLSEPPAASSGPLQDSRPFRSLLHRDLDDTKMQKSLSLLDAENRGGRPYTERPSRGLTPDPNILLQPTTENIPETVVSREFPRWVHSAEPTYFLRHSRTPSSDGTVEVRALLTWTLNPQIDNEALFSCEVKHPALSMPMQAEVTLVAPKGPKIVMTPSRARVGDTVRILVHGFQNEVFPEPMFTWTRVGSRLLDGSAEFDGKELVLERVPAELNGSMYRCTAQNPLGSTDTHTRLIVFENPNIPRGTEDSNGSIGPTGARLTLVLALTVILELT

SEQ ID NO: 6840 - protein, 613 aa, Homo Sapiens
MGALRPTLLPPSLPLLLLLMLGMGCWAREVLVPEGPLYRVAGTAVSISCNVTGYEGPAQQNFEWFLYRPEAPDTALGIVSTKDTQFSYAVFKSRVVAGEVQVQRLQGDAVVLKIARLQAQDAGIYECHTPSTDTRYLGSYSGKVELRVLPDVLQVSAAPPGPRGRQAPTSPPRMTVHEGQELALGCLARTSTQKHTHLAVSFGRSVPEAPVGRSTLQEVVGIRSDLAVEAGAPYAERLAAGELRLGKEGTDRYRMVVGGAQAGDAGTYHCTAAEWIQDPDGSWAQIAEKRAVLAHVDVQTLSSQLAVTVGPGERRIGPGEPLELLCNVSGALPPAGRHAAYSVGWEMAPAGAPGPGRLVAQLDTEGVGSLGPGYEGRHIAMEKVASRTYRLRLEAARPGDAGTYRCLAKAYVRGSGTRLREAASARSRPLPVHVREEGVVLEAVAWLAGGTVYRGETASLLCNISVRGGPPGLRLAASWWVERPEDGELSSVPAQLVGGVGQDGVAELGVRPGGGPVSVELVGPRSHRLRLHSLGPEDEGVYHCAPSAWVQHADYSWYQAGSARSGPVTVYPYMHALDTLFVPLLVGTGVALVTGATVLGTITCCFMKRLRKR

SEQ ID NO: 6841 - protein, 613 aa, Homo Sapiens; identical to SEQ ID NO: 6840

SEQ ID NO: 6842 - protein, 301 aa, Homo Sapiens
MGALRPTLLPPSLPLLLLLMLGMGCWAREVLVPEGPLYRVAGTAVSISCNVTGYEGPAQQNFEWFLYRPEAPDTALGIVSTKDTQFSYAVFKSRVVAGEVQVQRLQGDAVVLKIARLQAQDAGIYECHTPSTDTRYLGSYSGKVELRVLPDVLQVSAAPPGPRGRQAPTSPPRMTVHEGQELALGCLARTSTQKHTHLAVSFGRSVPEAPVGRSTLQEVVGIRSDLAVEAGAPYAERLAAGELRLGKEGTDRYRMVVGGAQAGDAGTYHCTAAEWIQDPDGSWAQIAEKRAVLAHVDVQTL

SEQ ID NO: 6843 - protein, 613 aa, Homo Sapiens; identical to SEQ ID NO: 6840

SEQ ID NO: 6844 - protein, 1163 aa, Homo Sapiens
MVWCLGLAVLSLVISQGADGRGKPEVVSVVGRAGESVVLGCDLLPPAGRPPLHVIEWLRFGFLLPIFIQFGLYSPRIDPDYVGRVRLQKGASLQIEGLRVEDQGWYECRVFFLDQHIPEDDFANGSWVHLTVNSPPQFQETPPAVLEVQELEPVTLRCVARGSPLPHVTWKLRGKDLGQGQGQVQVQNGTLRIRRVERGSSGVYTCQASSTEGSATHATQLLVLGPPVIVVPPKNSTVNASQDVSLACHAEAYPANLTYSWFQDNINVFHISRLQPRVRILVDGSLRLLATQPDDAGCYTCVPSNGLLHPPSASAYLTVLCMPGVIRCPVRANPPLLFVSWTKDGKALQLDKFPGWSQGTEGSLIIALGNEDALGEYSCTPYNSLGTAGPSPVTRVLLKAPPAFIERPKEEYFQEVGRELLIPCSAQGDPPPVVSWTKVGRGLQGQAQVDSNSSLILRPLTKEAHGHWECSASNAVARVATSTNVYVLGTSPHVVTNVSVVALPKGANVSWEPGFDGGYLQRFSVWYTPLAKRPDRMHHDWVSLAVPVGAAHLLVPGLQPHTQYQFSVLAQNKLGSGPFSEIVLSAPEGLPTTPAAPGLPPTEIPPPLSPPRGLVAVRTPRGVLLHWDPPELVPKRLDGYVLEGRQGSQGWEVLDPAVAGTETELLVPGLIKDVLYEFRLVAFAGSFVSDPSNTANVSTSGLEVYPSRTQLPGLLPQPVLAGVVGGVCFLGVAVLVSILAGCLLNRRRAARRRRKRLRQDPPLIFSPTGKSAAPSALGSGSPDSVAKLKLQGSPVPSLRQSLLWGDPAGTPSPHPDPPSSRGPLPLEPICRGPDGRFVMGPTVAAPQERSGREQAEPRTPAQRLARSFDCSSSSPSGAPQPLCIEDISPVAPPPAAPPSPLPGPGPLLQYLSLPFFREMNVDGDWPPLEEPSPAAPPDYMDTRRCPTSSFLRSPETPPVSPRESLPGAVVGAGATAEPPYTALADWTLRERLLPGLLPAAPRGSLTSQSSGRGSASFLRPPSTAPSAGGSYLSPAPGDTSSWASGPERWPRREHVVTVSKRRNTSVDENYEWDSEFPGDMELLETLHLGLASSRLRPEAEPELGVKTPEEGCLLNTAHVTGPEARCAALREEFLAFRRRRDATRARLPAYRQPVPHPEQATLL

SEQ ID NO: 6845 - protein, 1179 aa, Homo Sapiens
MVWCLGLAVLSLVISQGADGRGKPEVVSVVGRAGESVVLGCDLLPPAGRPPLHVIEWLRFGFLLPIFIQFGLYSPRIDPDYVGRVRLQKGASLQIEGLRVEDQGWYECRVFFLDQHIPEDDFANGSWVHLTVNSPPQFQETPPAVLEVQELEPVTLRCVARGSPLPHVTWKLRGKDLGQGQGQVQVQNGTLRIRRVERGSSGVYTCQASSTEGSATHATQLLVLGPPVIVVPPKNSTVNASQDVSLACHAEAYPANLTYSWFQDNINVFHISRLQPRVRILVDGSLRLLATQPDDAGCYTCVPSNGLLHPPSASAYLTVLYPAQVTAMPPETPLPIGMPGVIRCPVRANPPLLFVSWTKDGKALQLDKFPGWSQGTEGSLIIALGNEDALGEYSCTPYNSLGTAGPSPVTRVLLKAPPAFIERPKEEYFQEVGRELLIPCSAQGDPPPVVSWTKVGRGLQGQAQVDSNSSLILRPLTKEAHGHWECSASNAVARVATSTNVYVLGTSPHVVTNVSVVALPKGANVSWEPGFDGGYLQRFSVWYTPLAKRPDRMHHDWVSLAVPVGAAHLLVPGLQPHTQYQFSVLAQNKLGSGPFSEIVLSAPEGLPTTPAAPGLPPTEIPPPLSPPRGLVAVRTPRGVLLHWDPPELVPKRLDGYVLEGRQGSQGWEVLDPAVAGTETELLVPGLIKDVLYEFRLVAFAGSFVSDPSNTANVSTSGLEVYPSRTQLPGLLPQPVLAGVVGGVCFLGVAVLVSILAGCLLNRRRAARRRRKRLRQDPPLIFSPTGKSAAPSALGSGSPDSVAKLKLQGSPVPSLRQSLLWGDPAGTPSPHPDPPSSRGPLPLEPICRGPDGRFVMGPTVAAPQERSGREQAEPRTPAQRLARSFDCSSSSPSGAPQPLCIEDISPVAPPPAAPPSPLPGPGPLLQYLSLPFFREMNVDGDWPPLEEPSPAAPPDYMDTRRCPTSSFLRSPETPPVSPRESLPGAVVGAGATAEPPYTALADWTLRERLLPGLLPAAPRGSLTSQSSGRGSASFLRPPSTAPSAGGSYLSPAPGDTSSWASGPERWPRREHVVTVSKRRNTSVDENYEWDSEFPGDMELLETLHLGLASSRLRPEAEPELGVKTPEEGCLLNTAHVTGPEARCAALREEFLAFRRRRDATRARLPAYRQPVPHPEQATLL

SEQ ID NO: 6846 - protein, 717 aa, Homo Sapiens
MVWCLGLAVLSLVISQGADGRGKPEVVSVVGRAGESVVLGCDLLPPAGRPPLHVIEWLRFGFLLPIFIQFGLYSPRIDPDYVGRVRLQKGASLQIEGLRVEDQGWYECRVFFLDQHIPEDDFANGSWVHLTVNSPPQFQETPPAVLEVQELEPVTLRCVARGSPLPHVTWKLRGKDLGQGQGQVQVQNGTLRIRRVERGSSGVYTCQASSTEGSATHATQLLVLGPPVIVVPPKNSTVNASQDVSLACHAEAYPANLTYSWFQDNINVFHISRLQPRVRILVDGSLRLLATQPDDAGCYTCVPSNGLLHPPSASAYLTVLYPAQVTAMPPETPLPIGMPGVIRCPVRANPPLLFVSWTKDGKALQLDKFPGWSQGTEGSLIIALGNEDALGEYSCTPYNSLGTAGPSPVTRVLLKAPPAFIERPKEEYFQEVGRELLIPCSAQGDPPPAAPPSPLPGPGPLLQYLSLPFFREMNVDGDWPPLEEPSPAAPPDYMDTRRCPTSSFLRSPETPPVSPRESLPGAVVGAGATAEPPYTALADWTLRERLLPGLLPAAPRGSLTSQSSGRGSASFLRPPSTAPSAGGSYLSPAPGDTSSWASGPERWPRREHVVTVSKRRNTSVDENYEWDSEFPGDMELLETLHLGLASSRLRPEAEPELGVKTPEEGCLLNTAHVTGPEARCAALREEFLAFRRRRDATRARLPAYRQPVPHPEQATLL

SEQ ID NO: 6847 - protein, 411 aa, Homo Sapiens
MSPARLRPRLHFCLVLLLLLVVPAAWGCGPGRVVGSRRRPPRKLVPLAYKQFSPNVPEKTLGASGRYEGKIARSSERFKELTPNYNPDIIFKDEENTGADRLMTQRCKDRLNSLAISVMNQWPGVKLRVTEGWDEDGHHSEESLHYEGRAVDITTSDRDRNKYGLLARLAVEAGFDWVYYESKAHVHCSVKSEHSAAAKTGGCFPAGAQVRLESGARVALSAVRPGDRVLAMGEDGSPTFSDVLIFLDREPHRLRAFQVIETQDPPRRLALTPAHLLFTADNHTEPAARFRATFASHVQPGQYVLVAGVPGLQPARVAAVSTHVALGAYAPLTKHGTLVVEDVVASCFAAVADHHLAQLAFWPLRLFHSLAWGSWTPGEGVHWYPQLLYRLGRLLLEEGSFHPLGMSGAGS

SEQ ID NO: 6848 - protein, 178 aa, Homo Sapiens
MHSSALLCCLVLLTGVRASPGQGTQSENSCTHFPGNLPNMLRDLRDAFSRVKTFFQMKDQLDNLLLKESLLEDFKGYLGCQALSEMIQFYLEEVMPQAENQDPDIKAHVNSLGENLKTLRLRLRRCHRFLPCENKSKAVEQVKNAFNKLQEKGIYKAMSEFDIFINYIEAYMTMKIRN

SEQ ID NO: 6849 - protein, 74 aa, Homo Sapiens
MIQFYLEEVMPQAENQDPDIKAHVNSLGENLKTLRLRLRRCHRFLPCENKSKAVEQVKNAFNKLQEKGIYKAMS

SEQ ID NO: 6850 - protein, 199 aa, Homo Sapiens
MNCVCRLVLVVLSLWPDTAVAPGPPPGPPRVSPDPRAELDSTVLLTRSLLADTRQLAAQLRDKFPADGDHNLDSLPTLAMSAGALGALQLPGVLTRLRADLLSYLRHVQWLRRAGGSSLKTLEPELGTLQARLDRLLRRLQLLMSRLALPQPPPDPPAPPLAPPSSAWGGIRAAHAILGGLHLTLDWAVRGLLLLKTRL

SEQ ID NO: 6851 - protein, 199 aa, Homo Sapiens; identical to SEQ ID NO: 6850

SEQ ID NO: 6852 - protein, 40 aa, Homo Sapiens
MSAGALGALQLPGVLTRLRADLLSYLRHVQWLRRAGGSSL

SEQ ID NO: 6853 - protein, 120 aa, Homo Sapiens
MSAGALGALQLPGVLTRLRADLLSYLRHVQWLRRAGGSSLKTLEPELGTLQARLDRLLRRLQLLMSRLALPQPPPDPPAPPLAPPSSAWGGIRAAHAILGGLHLTLDWAVRGLLLLKTRL

SEQ ID NO: 6854 - protein, 152 aa, Homo Sapiens
MSSSCSGLSRVLVAVATALVSASSPCPQAWGPPDPPARPVVSCQAADYENFSCTWSPSQISGLPTRYLTSYRKKTVLGADSQRRSPSTGPWPCPQDPLGAARCVVHGAEFWSQYRINVTEVNPLGASTRLLDVSLQSILRPDPPQGLRVESV

SEQ ID NO: 6855 - protein, 54 aa, Homo Sapiens
MSSSCSGLSRVLVAVATALVSASSPCPQAWGPPGTQCPGFGMGSQSCSRDLTLG

SEQ ID NO: 6856 - protein, 139 aa, Homo Sapiens
MSSSCSGLSRVLVAVATALVSASSPCPQAWGPPGVQYGQPGRSVKLCCPGVTAGDPVSWFRDGEPKLLQGPDSGLGHELVLAQADSTDEGTYICQTLDGALGGTVTLQLGYPPARPVVSCQAADYENFSCTWSPSQISG

SEQ ID NO: 6857 - protein, 167 aa, Homo Sapiens
MSSSCSGLSRVLVAVATALVSASSPCPQAWGPPGVQYGQPGRSVKLCCPGVTAGDPVSWFRDGEPKLLQGPDSGLGHELVLAQADSTDEGTYICQTLDGALGGTVTLQLGYPPARPVVSCQAADYENFSCTWSPSQISGLPTRYLTSYRKKTVLGADSQRRSPSTGP

SEQ ID NO: 6858 - protein, 422 aa, Homo Sapiens
MSSSCSGLSRVLVAVATALVSASSPCPQAWGPPGVQYGQPGRSVKLCCPGVTAGDPVSWFRDGEPKLLQGPDSGLGHELVLAQADSTDEGTYICQTLDGALGGTVTLQLGYPPARPVVSCQAADYENFSCTWSPSQISGLPTRYLTSYRKKTVLGADSQRRSPSTGPWPCPQDPLGAARCVVHGAEFWSQYRINVTEVNPLGASTRLLDVSLQSILRPDPPQGLRVESVPGYPRRLRASWTYPASWPCQPHFLLKFRLQYRPAQHPAWSTVEPAGLEEVITDAVAGLPHAVRVSARDFLDAGTWSTWSPEAWGTPSTGTIPKEIPAWGQLHTQPEVEPQVDSPAPPRPSLQPHPRLLDHRDSVEQVAVLASLGILSFLGLVAGALALGLWLRLRRGGKDGSPKPGFLASVIPVDRRPGAPNL

SEQ ID NO: 6859 - protein, 422 aa, Homo Sapiens; identical to SEQ ID NO: 6858

SEQ ID NO: 6860 - protein, 270 aa, Homo Sapiens
MSSSCSGLSRVLVAVATALVSASSPCPQAWGPPGVQYGQPGRSVKLCCPGVTAGDPVSWFRDGEPKLLQGPDSGLGHELVLAQADSTDEGTYICQTLDGALGGTVTLQLGYPPARPVVSCQAADYENFSCTWSPSQISGLPTRYLTSYRKKTVLGADSQRRSPSTGPWPCPQDPLGAARCVVHGAEFWSQYRINVTEVNPLGASTRLLDVSLQSILRPDPPQGLRVESVPGYPRRLRASWTYPASWPCQPHFLLKFRLQYRPAQHPAWST

SEQ ID NO: 6861 - protein, 390 aa, Homo Sapiens
MSSSCSGLSRVLVAVATALVSASSPCPQAWGPPGVQYGQPGRSVKLCCPGVTAGDPVSWFRDGEPKLLQGPDSGLGHELVLAQADSTDEGTYICQTLDGALGGTVTLQLGYPPARPVVSCQAADYENFSCTWSPSQISGLPTRYLTSYRKKTVLGADSQRRSPSTGPWPCPQDPLGAARCVVHGAEFWSQYRINVTEVNPLGASTRLLDVSLQSILRPDPPQGLRVESVPGYPRRLRASWTYPASWPCQPHFLLKFRLQYRPAQHPAWSTVEPAGLEEVITDAVAGLPHAVRVSARDFLDAGTWSTWSPEAWGTPSTGTIPKEIPAWGQLHTQPEVEPQVDSPAPPRPSLQPHPRLLDHRDSVEQVAVLASLGILSFLGLVAGALALGLW

SEQ ID NO: 6862 - protein, 422 aa, Homo Sapiens; identical to SEQ ID NO: 6858

SEQ ID NO: 6863 - protein, 68 aa, Homo Sapiens
MSSSCSGLSRVLVAVATALVSASSPCPQAWGPPGVQYGQPGRSVKLCCPGVTAGPSSPPCCLLPSSRL

SEQ ID NO: 6864 - protein, 77 aa, Homo Sapiens
  misc_feature (1)..(1): Xaa can be any naturally occurring amino acid
XTPSTGTIPKEIPAWGQLHTQPEVEPQVDSPAPPRPSLQPHPRLLDHRDSVEQVAVLASLGILSFLGLVAGALALGL

SEQ ID NO: 6865 - protein, 328 aa, Homo Sapiens
MCHQQLVISWFSLVFLASPLVAIWELKKDVYVVELDWYPDAPGEMVVLTCDTPEEDGITWTLDQSSEVLGSGKTLTIQVKEFGDAGQYTCHKGGEVLSHSLLLLHKKEDGIWSTDILKDQKEPKNKTFLRCEAKNYSGRFTCWWLTTISTDLTFSVKSSRGSSDPQGVTCGAATLSAERVRGDNKEYEYSVECQEDSACPAAEESLPIEVMVDAVHKLKYENYTSSFFIRDIIKPDPPKNLQLKPLKNSRQVEVSWEYPDTWSTPHSYFSLTFCVQVQGKSKREKKDRVFTDKTSATVICRKNASISVRAQDRYYSSSWSEWASVPCS

SEQ ID NO: 6866 - protein, 51 aa, Homo Sapiens
MEPLVTWVVPLLFLFLLSRQGAACRTSECCFQDPPYPDADSGSASGPRDLR

SEQ ID NO: 6867 - protein, 67 aa, Homo Sapiens
MEPLVTWVVPLLFLFLLSRQGAACRTSECCFQDPPYPDADSGSASGPRDLRCYRISSDRYECSWQYE

SEQ ID NO: 6868 - protein, 381 aa, Homo Sapiens
MEPLVTWVVPLLFLFLLSRQGAACRTSECCFQDPPYPDADSGSASGPRDLRCYRISSDRYECSWQYEGPTAGVSHFLRCCLSSGRCCYFAAGSATRLQFSDQAGVSVLYTVTLWVESWARNQTEKSPEVTLQLYNSVKYEPPLGDIKVSKLAGQLRMEWETPDNQVGAEVQFRHRTPSSPWKLGDCGPQDDDTESCLCPLEMNVAQEFQLRRRQLGSQGSSWSKWSSPVCVPPENPPQPQVRFSVEQLGQDGRRRLTLKEQPTQLELPEGCQGLAPGTEVTYRLQLHMLSCPCKAKATRTLHLGKMPYLSGAAYNVAVISSNQFGPGLNQTWHIPADTHTDGMISAHCNLRLPDSRDSPASASRVAGITGICHHTRLILYF

SEQ ID NO: 6869 - protein, 662 aa, Homo Sapiens
MEPLVTWVVPLLFLFLLSRQGAACRTSECCFQDPPYPDADSGSASGPRDLRCYRISSDRYECSWQYEGPTAGVSHFLRCCLSSGRCCYFAAGSATRLQFSDQAGVSVLYTVTLWVESWARNQTEKSPEVTLQLYNSVKYEPPLGDIKVSKLAGQLRMEWETPDNQVGAEVQFRHRTPSSPWKLGDCGPQDDDTESCLCPLEMNVAQEFQLRRRQLGSQGSSWSKWSSPVCVPPENPPQPQVRFSVEQLGQDGRRRLTLKEQPTQLELPEGCQGLAPGTEVTYRLQLHMLSCPCKAKATRTLHLGKMPYLSGAAYNVAVISSNQFGPGLNQTWHIPADTHTEPVALNISVGTNGTTMYWPARAQSMTYCIEWQPVGQDGGLATCSLTAPQDPDPAGMATYSWSRESGAMGQEKCYYITIFASAHPEKLTLWSTVLSTYHFGGNASAAGTPHHVSVKNHSLDSVSVDWAPSLLSTCPGVLKEYVVRCRDEDSKQVSEHPVQPTETQVTLSGLRAGVAYTVQVRADTAWLRGVWSQPQRFSIEVQVSDWLIFFASLGSFLSILLVGVLGYLGLNRAARHLCPPLPTPCASSAIEFPGGKETWQWINPVDFQEEASLQEALVVEMSWDKGERTEPLEKTELPEGAPELALDTELSLEDGDRCKAKM

SEQ ID NO: 6870 - protein, 662 aa, Homo Sapiens; identical to SEQ ID NO: 6869

SEQ ID NO: 6871 - protein, 118 aa, Homo Sapiens
MEPLVTWVVPLLFLFLLSRQGAACRTSECCFQDPPYPDADSGSLPGSASGPRDLRCYRISSDRYECSWQYEGPTAGVSHFLRCCLSSGRCCYFAAGSATRLQFSDQAGVSVLYTVTLW

SEQ ID NO: 6872 - protein, 862 aa, Homo Sapiens
MAHTFRGCSLAFMFIITWLLIKAKIDACKRGDVTVKPSHVILLGSTVNITCSLKPRQGCFHYSRRNKLILYKFDRRINFHHGHSLNSQVTGLPLGTTLFVCKLACINSDEIQICGAEIFVGVAPEQPQNLSCIQKGEQGTVACTWERGRDTHLYTEYTLQLSGPKNLTWQKQCKDIYCDYLDFGINLTPESPESNFTAKVTAVNSLGSSSSLPSTFTFLDIVRPLPPWDIRIKFQKASVSRCTLYWRDEGLVLLNRLRYRPSNSRLWNMVNVTKAKGRHDLLDLKPFTEYEFQISSKLHLYKGSWSDWSESLRAQTPEEEPTGMLDVWYMKRHIDYSRQQISLFWKNLSVSEARGKILHYQVTLQELTGGKAMTQNITGHTSWTTVIPRTGNWAVAVSAANSKGSSLPTRINIMNLCEAGLLAPRQVSANSEGMDNILVTWQPPRKDPSAVQEYVVEWRELHPGGDTQVPLNWLRSRPYNVSALISENIKSYICYEIRVYALSGDQGGCSSILGNSKHKAPLSGPHINAITEEKGSILISWNSIPVQEQMGCLLHYRIYWKERDSNSQPQLCEIPYRVSQNSHPINSLQPRVTYVLWMTALTAAGESSHGNEREFCLQGKANWMAFVAPSICIAIIMVGIFSTHYFQQKVFVLLAALRPQWCSREIPDPANSTCAKKYPIAEEKTQLPLDRLLIDWPTPEDPEPLVISEVLHQVTPVFRHPPCSNWPQREKGIQGHQASEKDMMHSASSPPPPRALQAESRQLVDLYKVLESRGSDPKPENPACPWTVLPAGDLPTHDGYLPSNIDDLPSHEAPLADSLEELEPQHISLSVFPSSSLHPLTFSCGDKLTLDQLKMRCDSLML

SEQ ID NO: 6873 - protein, 659 aa, Homo Sapiens
MAHTFRGCSLAFMFIITWLLIKAKIDACKRGDVTVKPSHVILLGSTVNITCSLKPRQGCFHYSRRNKLILYKFDRRINFHHGHSLNSQVTGLPLGTTLFVCKLACINSDEIQICGAEIFVGVAPEQPQNLSCIQKGEQGTVACTWERGRDTHLYTEYTLQLSGPKNLTWQKQCKDIYCDYLDFGINLTPESPESNFTAKVTAVNSLGSSSSLPSTFTFLDIVRPLPPWDIRIKFQKASVSRCTLYWRDEGLVLLNRLRYRPSNSRLWNMVNVTKAKGRHDLLDLKPFTEYEFQISSKLHLYKGSWSDWSESLRAQTPEEEPTGMLDVWYMKRHIDYSRQQISLFWKNLSVSEARGKILHYQVTLQELTGGKAMTQNITGHTSWTTVIPRTGNWAVAVSAANSKGSSLPTRINIMNLCEAGLLAPRQVSANSEGMDNILVTWQPPRKDPSAVQEYVVEWRELHPGGDTQVPLNWLRSRPYNVSALISENIKSYICYEIRVYALSGDQGGCSSILGNSKHKAPLSGPHINAITEEKGSILISWNSIPVQEQMGCLLHYRIYWKERDSNSQPQLCEIPYRVSQNSHPINSLQPRVTYVLWMTALTAAGESSHGNEREFCLQGKANWMAFVAPSICIAIIMVGIFSTHYFQQKRRHSCPWTGS

SEQ ID NO: 6874 - protein, 635 aa, Homo Sapiens
MAHTFRGCSLAFMFIITWLLIKAKIDACKRGDVTVKPSHVILLGSTVNITCSLKPRQGCFHYSRRNKLILYKFDRRINFHHGHSLNSQVTGLPLGTTLFVCKLACINSDEIQICGAEIFVGVAPEQPQNLSCIQKGEQGTVACTWERGRDTHLYTEYTLQLSGPKNLTWQKQCKDIYCDYLDFGINLTPESPESNFTAKVTAVNSLGSSSSLPSTFTFLDIVRPLPPWDIRIKFQKASVSRCTLYWRDEGLVLLNRLRYRPSNSRLWNMVNVTKAKGRHDLLDLKPFTEYEFQISSKLHLYKGSWSDWSESLRAQTPEEEPTGMLDVWYMKRHIDYSRQQISLFWKNLSVSEARGKILHYQVTLQELTGGKAMTQNITGHTSWTTVIPRTGNWAVAVSAANSKGSSLPTRINIMNLCEAGLLAPRQVSANSEGMDNILVTWQPPRKDPSAVQEYVVEWRELHPGGDTQVPLNWLRSRPYNVSALISENIKSYICYEIRVYALSGDQGGCSSILGNSKHKAPLSGPHINAITEEKGSILISWNSIPVQEQMGCLLHYRIYWKERDSNSQPQLCEIPYRVSQNSHPINSLQPRVTYVLWMTALTAAGESSHGNEREFCLQGEDTAALGQAPDRLAHA

SEQ ID NO: 6875 - protein, 776 aa, Homo Sapiens
MAHTFRGCSLAFMFIITWLLIKAKIDACKRGDVTVKPSHVILLGSTVNITCSLKPRQGCFHYSRRNKLILYKFDRRINFHHGHSLNSQVTGLPLGTTLFVCKLACINSDEIQICGAEIFVGVAPEQPQNLSCIQKGEQGTVACTWERGRDTHLYTEYTLQLSGPKNLTWQKQCKDIYCDYLDFGINLTPESPESNFTAKVTAVNSLGSSSSLPSTFTFLDIVRPLPPWDIRIKFQKASVSRCTLYWRDEGLVLLNRLRYRPSNSRLWNMVNVTKAKGRHDLLDLKPFTEYEFQISSKLHLYKGSWSDWSESLRAQTPEEEPTGMLDVWYMKRHIDYSRQQISLFWKNLSVSEARGKILHYQVTLQELTGGKAMTQNITGHTSWTTVIPRTGNWAVAVSAANSKGSSLPTRINIMNLCEAGLLAPRQVSANSEGMDNILVTWQPPRKDPSAVQEYVVEWRELHPGGDTQVPLNWLRSRPYNVSALISEIPYRVSQNSHPINSLQPRVTYVLWMTALTAAGESSHGNEREFCLQGKANWMAFVAPSICIAIIMVGIFSTHYFQQKVFVLLAALRPQWCSREIPDPANSTCAKKYPIAEEKTQLPLDRLLIDWPTPEDPEPLVISEVLHQVTPVFRHPPCSNWPQREKGIQGHQASEKDMMHSASSPPPPRALQAESRQLVDLYKVLESRGSDPKPENPACPWTVLPAGDLPTHDGYLPSNIDDLPSHEAPLADSLEELEPQHISLSVFPSSSLHPLTFSCGDKLTLDQLKMRCDSLML

SEQ ID NO: 6876 - protein, 230 aa, Homo Sapiens
  misc_feature (1)..(1): Xaa can be any naturally occurring amino acid
XQKGEQGTVACTWERGRDTHLYTEYTLQLSGPKNLTWQKQCKDIYCDYLDFGINLTPESPESNFTAKVTAVNSLGSSSSLPSTFTFLDIVRPLPPWDIRIKFQKASVSRCTLYWRDEGLVLLNRLRYRPSNSRLWNMVNVTKAKGRHDLLDLKPFTEYEFQISSKLHLYKGSWSDWSESLRAQTPEEEPTGMLDVWYMKRHIDYSRQQISLFWKVSFKRQLKTQGNKTEG

SEQ ID NO: 6877 - protein, 144 aa, Homo Sapiens
MALLLTTVIALTCLGGFASPGPVPPSTALRELIEELVNITQNQKAPLCNGSMVWSINLTAGMYCAALESLINVSGCSAIEKTQRMLSGFCPHKVSAGQFSSLHVRDTKIEVAQFVKDLLLHLKKLFREGQFNNFESIIICRDRT

SEQ ID NO: 6878 - protein, 146 aa, Homo Sapiens
MHPLLNPLLLALGLMALLLTTVIALTCLGGFASPGPVPPSTALRELIEELVNITQNQKAPLCNGSMVWSINLTAGMYCAALESLINVSGCSAIEKTQRMLSGFCPHKVSAGQFSSLHVRDTKIEVAQFVKDLLLHLKKLFREGQFN

SEQ ID NO: 6879 - protein, 279 aa, Homo Sapiens
MEWPARLCGLWALLLCAGGGGGGGGAAPTETQPPVTNLSVSVENLCTVIWTWNPPEGASSNCSLWYFSHFGDKQDKKIAPETRRSIEVPLNERICLQVGSQCSTNESEKPSILVEKCISPPEGDPESAVTELQCIWHNLSYMKCSWLPGRNTSPDTNYTLYYWHRSLEKIHQCENIFREGQYFGCSFDLTKVKDSSFEQHSVQIMVKDNAGKIKPSFNIVPLTSRVKPDPPHIKNLSFHNDDLYVQWENPQNFISRCLFYEVEVNNSQTETHNVFYVRF

SEQ ID NO: 6880 - protein, 427 aa, Homo Sapiens
MEWPARLCGLWALLLCAGGGGGGGGAAPTETQPPVTNLSVSVENLCTVIWTWNPPEGASSNCSLWYFSHFGDKQDKKIAPETRRSIEVPLNERICLQVGSQCSTNESEKPSILVEKCISPPEGDPESAVTELQCIWHNLSYMKCSWLPGRNTSPDTNYTLYYWHRSLEKIHQCENIFREGQYFGCSFDLTKVKDSSFEQHSVQIMVKDNAGKIKPSFNIVPLTSRVKPDPPHIKNLSFHNDDLYVQWENPQNFISRCLFYEVEVNNSQTETHNVFYVQEAKCENPEFERNVENTSCFMVPGVLPDTLNTVRIRVKTNKLCYEDDKLWSNWSQEMSIGKKRNSTLYITMLLIVPVIVAGAIIVLLLYLKRLKIIIFPPIPDPGKIFKEMFGDQNDDTLHWKKYDIYEKQTKEETDSVVLIENLKKASQ

SEQ ID NO: 6881 - protein, 308 aa, Homo Sapiens
MAPRRARGCRTLGLPALLLLLLLRPPATRDARDRLAVLAGRSRISESFNHEVQTHEACVRLRTMENCPQCHHHRTSRQQAGITCPPPMSVEHADIWVKSYSLYSRERYICNSGFKRKAGTSSLTECVLNKATNVAHWTTPSLKCIRDPALVHQRPAPPSTVTTAGVTPQPESLSPSGKEPAASSPSSNNTAATTAAIVPGSQLMPSKSPSTGTTEISSHESSHGTPSQTTAKNWELTASASHQPPGVYPQGHSDTTVAISTSTVLLCGLSAVSLLACYLKSSLDAFIKIRGGFSTWLLGLPHSTVGSG

SEQ ID NO: 6882 - protein, 346 aa, Homo Sapiens
MAPRRARGCRTLGLPALLLLLLLRPPATRDARDRLAVLAGRSRISESFNHEVQTHEACVRLRTMENCPQCHHHRTSRQQAGITCPPPMSVEHADIWVKSYSLYSRERYICNSGFKRKAGTSSLTECVLNKATNVAHWTTPSLKCIRDPALVHQRPAPPSTVTTAGVTPQPESLSPSGKEPAASSPSSNNTAATTAAIVPGSQLMPSKSPSTGTTEISSHESSHGTPSQTTAKNWELTASASHQPPGVYPQGHSDTTVAISTSTVLLCGLSAVSLLACYLKSSSHSRELTLLTLKWPKELLLLRRDISPALVEGAGQMPRASAPRQLQTGQPRMTSVLPRLCLSFGS

SEQ ID NO: 6883 - protein, 305 aa, Homo Sapiens
MAPRRARGCRTLGLPALLLLLLLRPPATRDARDRLAVLAGRSRISESFNHEVQTHEACVRLRTMENCPQCHHHRTSRQQAGITCPPPMSVEHADIWVKSYSLYSRERYICNSGFKRKAGTSSLTECVLNKATNVAHWTTPSLKCIRDPALVHQRPAPPSTVTTAGVTPQPESLSPSGKEPAASSPSSNNTAATTAAIVPGSQLMPSKSPSTGTTEISSHESSHGTPSQTTAKNWELTASASHQPPGVYPQGHSDTTGRKQHLLPDFQASFQRDCINKHIEDKECWTVASFLLFCTMFVSTCWYTL

SEQ ID NO: 6884 - protein, 331 aa, Homo Sapiens
MAPRRARGCRTLGLPALLLLLLLRPPATRDARDRLAVLAGRSRISESFNHEVQTHEACVRLRTMENCPQCHHHRTSRQQAGITCPPPMSVEHADIWVKSYSLYSRERYICNSGFKRKAGTSSLTECVLNKATNVAHWTTPSLKCIRDPALVHQRPAPPSTVTTAGVTPQPESLSPSGKEPAASSPSSNNTAATTAAIVPGSQLMPSKSPSTGTTEISSHESSHGTPSQTTAKNWELTASASHQPPGVYPQGHSDTTVAISTSTVLLCGLSAVSLLACYLKSRWLAKRSLPGDAEAPNMSRGGRNAWEQLSRAPATSLLRTPVESALSASRP

SEQ ID NO: 6885 - protein, 154 aa, Homo Sapiens
MAPRRARGCRTLGLPALLLLLLLRPPATREPAASSPSSNNTAATTAAIVPGSQLMPSKSPSTGTTEISSHESSHGTPSQTTAKNWELTASASHQPPGVYPQGHSDTTVAISTSTVLLCGLSAVSLLACYLKSRASVCSCHPRSAGHTCSVGSVC

SEQ ID NO: 6886 - protein, 169 aa, Homo Sapiens
MAPRRARGCRTLGLPALLLLLLLRPPATREPAASSPSSNNTAATTAAIVPGSQLMPSKSPSTGTTEISSHESSHGTPSQTTAKNWELTASASHQPPGVYPQGHSDTTVAISTSTVLLCGLSAVSLLACYLKSRQTPPLASVEMEAMEALPVTWGTSSRDEDLENCSHHL

SEQ ID NO: 6887 - protein, 172 aa, Homo Sapiens
MAPRRARGCRTLGLPALLLLLLLRPPATRGITCPPPMSVEHADIWVKSYSLYSRERYICNSGFKRKAGTSSLTECVLNKATNVAHWTTPSLKCIKPAASSPSSNNTAATTAAIVPGSQLMPSKSPSTGTTEISSHESSHGTPSQTTAKNWELTASASHQPPGVYPQGHSDTT

SEQ ID NO: 6888 - protein, 219 aa, Homo Sapiens
MAPRRARGCRTLGLPALLLLLLLRPPATRGITCPPPMSVEHADIWVKSYSLYSRERYICNSGFKRKAGTSSLTECVLNKATNVAHWTTPSLKCIKPAASSPSSNNTAATTAAIVPGSQLMPSKSPSTGTTEISSHESSHGTPSQTTAKNWELTASASHQPPGVYPQGHSDTTVAISTSTVLLCGLSAVSLLACYLKSRASVCSCHPRSAGHTCSVGSVC

SEQ ID NO: 6889 - protein, 234 aa, Homo Sapiens
MAPRRARGCRTLGLPALLLLLLLRPPATRGITCPPPMSVEHADIWVKSYSLYSRERYICNSGFKRKAGTSSLTECVLNKATNVAHWTTPSLKCIKPAASSPSSNNTAATTAAIVPGSQLMPSKSPSTGTTEISSHESSHGTPSQTTAKNWELTASASHQPPGVYPQGHSDTTVAISTSTVLLCGLSAVSLLACYLKSRQTPPLASVEMEAMEALPVTWGTSSRDEDLENCSHHL

SEQ ID NO: 6890 - protein, 252 aa, Homo Sapiens
MAPRRARGCRTLGLPALLLLLLLRPPATRGITCPPPMSVEHADIWVKSYSLYSRERYICNSGFKRKAGTSSLTECVLNKATNVAHWTTPSLKCIRDPALVHQRPAPPSTVTTAGVTPQPESLSPSGKEPAASSPSSNNTAATTAAIVPGSQLMPSKSPSTGTTEISSHESSHGTPSQTTAKNWELTASASHQPPGVYPQGHSDTTVAISTSTVLLCGLSAVSLLACYLKSRASVCSCHPRSAGHTCSVGSVC

SEQ ID NO: 6891 - protein, 267 aa, Homo Sapiens
MAPRRARGCRTLGLPALLLLLLLRPPATRGITCPPPMSVEHADIWVKSYSLYSRERYICNSGFKRKAGTSSLTECVLNKATNVAHWTTPSLKCIRDPALVHQRPAPPSTVTTAGVTPQPESLSPSGKEPAASSPSSNNTAATTAAIVPGSQLMPSKSPSTGTTEISSHESSHGTPSQTTAKNWELTASASHQPPGVYPQGHSDTTVAISTSTVLLCGLSAVSLLACYLKSRQTPPLASVEMEAMEALPVTWGTSSRDEDLENCSHHL

SEQ ID NO: 6892 - protein, 353 aa, Homo Sapiens
MRLAGRQVPEQRSPPPPGLGSARPGSPAVSCGAAAMAPRRARGCRTLGLPALLLLLLLRPPATRDARDRLAVLAGRSRISESFNHEVQTHEACVRLRTMENCPQCHHHRTSRQQAGITCPPPMSVEHADIWVKSYSLYSRERYICNSGFKRKAGTSSLTECVLNKATNVAHWTTPSLKCIRDPALVHQRPAPPSTVTTAGVTPQPESLSPSGKEPAASSPSSNNTAATTAAIVPGSQLMPSKSPSTGTTEISSHESSHGTPSQTTAKNWELTASASHQPPGVYPQGHSDTTVAISTSTVLLCGLSAVSLLACYLKSRQTPPLASVEMEAMEALPVTWGTSSRDEDLENCSHHL

SEQ ID NO: 6893 - protein, 172 aa, Homo Sapiens
MSVEHADIWVKSYSLYSRERYICNSGFKRKAGTSSLTECVLNKATNVAHWTTPSLKCIKPAASSPSSNNTAATTAAIVPGSQLMPSKSPSTGTTEISSHESSHGTPSQTTAKNWELTASASHQPPGVYPQGHSDTTVAISTSTVLLCGLSAVSLLACYLKSRQTPPLASVEM

SEQ ID NO: 6894 - protein, 148 aa, Homo Sapiens
MSVEHADIWVKSYSLYSRERYICNSGFKRKAGTSSLTECVLNKATNVAHWTTPSLKCINPALVHQRPAPPSTVTTAGVTPQPESLSPSGKEPAASSPSSNNTAATTAAIVPGSQLMPSKSPSTGTTEISSHESSHGTPSQTTAKNWEL

SEQ ID NO: 6895 - protein, 231 aa, Homo Sapiens
MSVEHADIWVKSYSLYSRERYICNSGFKRKAGTSSLTECVLNKATNVAHWTTPSLKCIRDPALVHQRPAPPSTVTTAGVTPQPESLSPSGKEPAASSPSSNNTAATTAAIVPGSQLMPSKSPSTGTTEISSHESSHGTPSQTTAKNWELTASASHQPPGVYPQGHSDTTVAISTSTVLLCGLSAVSLLACYLKSRQTPPLASVEMEAMEALPVTWGTSSRDEDLENCSHHL

SEQ ID NO: 6896 - protein, 209 aa, Homo Sapiens
  misc_feature (1)..(1): Xaa can be any naturally occurring amino acid
XITCPPPMSVEHADIWVKSYSLYSRERYICNSGFKRKAGTSSLTECVLNKATNVAHWTTPSLKCIRTTEISSHESSHGTPSQTTAKNWELTASASHQPPGVYPQGHSDTTGRKQHLLPDFQASFQRDCINKHIEDKECWTVASFLLFLAISTSTVLLCGLSAVSLLACYLKSRQTPPLASVEMEAMEALPVTWGTSSRDEDLENCSHHL

SEQ ID NO: 6897 - protein, 155 aa, Homo Sapiens
  misc_feature (1)..(1): Xaa can be any naturally occurring amino acid
XLVHQRPAPPSTVTTAGVTPQPESLSPSGKEPAASSPSSNNTAATTAAIVPGSQLMPSKSPSTGTTEISSHESSHGTPSQTTAKNWELTASASHQPPGVYPQGHSDTTVAISTSTVLLCGLSAVSLLACYLKSRASVCSCHPRSAGHTCSVGSVC

SEQ ID NO: 6898 - protein, 198 aa, Homo Sapiens
  misc_feature (1)..(1): Xaa can be any naturally occurring amino acid
XPAASSPSSNNTAATTAAIVPGSQLMPSKSPSTGTTEISSHESSHGTPSQTTAKNWELTASASHQPPGVYPQGHSDTTVAISTSTVLLCGLSAVSLLACYLKSSSQRKVTYLRLSVNYKAPPGVGDVYREDTSVWAPPNDPVSSCAARTDREPEKVEEMLSPVNPLHRRIQEEENSSQRHFTYICIYTSLSVISTHYI

SEQ ID NO: 6899 - protein, 155 aa, Homo Sapiens
MTPGKTSLVSLLLLLSLEAIVKAGITIPRNPGCPNSEDKNFPRTVMVNLNIHNRNTNTNPKRSSDYYNRSTSPWNLHRNEDPERYPSVIWEAKCRHLGCINADGNVDYHMNSVPIQQEILVLRREPPHCPNSFRLEKILVSVGCTCVTPIVHHVA

SEQ ID NO: 6900 - protein, 180 aa, Homo Sapiens
MDWPHNLLFLLTISIFLGLGQPRSPKSKRKGQGRPGPLAPGPHQVPLDLVSRMKPYARMEEYERNIEEMVAQLRNSSELAQRKCEVNLQLWMSNKRSLSPWGYSINHDPSRIPVDLPEARCLCLGCVNPFTMQEDRSMVSVPVFSQVPVRRRLCPPPPRTGPCRQRAVMETIAVGCTCIF

SEQ ID NO: 6901 - protein, 197 aa, Homo Sapiens
MTLLPGLLFLTWLHTCLAHHDPSLRGHPHSHGTPHCYSAEELPLGQAPPHLLARGAKWGQALPVALVSSLEAASHRGRHERPSATTQCPVLRPEEVLEADTHQRSISPWRYRVDTDEDRYPQKLAFAECLCRGCIDARTGRETAALNSVRLLQSLLVLRRRPCSRDGSGLPTPGAFAFHTEFIHVPVGCTCVLPRSV

SEQ ID NO: 6902 - protein, 35 aa, Homo Sapiens
MLGALVWMLVAGFLLALPPSWAAGAPRAGRRPARP

SEQ ID NO: 6903 - protein, 202 aa, Homo Sapiens
MLVAGFLLALPPSWAAGAPRAGRRPARPRGCADRPEELLEQLYGRLAAGVLSAFHHTLQLGPREQARNASCPAGGRPADRRFRPPTNLRSVSPWAYRISYDPARYPRYLPEAYCLCRGCLTGLFGEEDVRFRSAPVYMPTVVLRRTPACAGGRSVYTEAYVTIPVGCTCVPEPEKDADSINSSIDKQGAKLLLGPNDAPAGP

SEQ ID NO: 6904 - protein, 90 aa, Homo Sapiens
  misc_feature (1)..(1): Xaa can be any naturally occurring amino acid
XRPRGCADRPEELLEQLYGRLAAGVLSAFHHTLQLGPREQARNASCPAGGRPADRRFRPPTNLRSVSPWAYSSVSITSNHPWRTRPLFLD

SEQ ID NO: 6905 - protein, 163 aa, Homo Sapiens
MTVKTLHGPAMVKYLLLSILGLAFLSEAAARKIPKVGHTFFQKPESCPPVPGGSMKLDIGIINENQRVSMSRNIESRSTSPWNYTVTWDPNRYPSEVVQAQCRNLGCINAQGKEDISMNSVPIQQETLVVRRKHQGCSVSFQLEKVLVTVGCTCVTPVIHHVQ

SEQ ID NO: 6906 - protein, 866 aa, Homo Sapiens
MGAARSPPSAVPGPLLGLLLLLLGVLAPGGASLRLLDHRALVCSQPGLNCTVKNSTCLDDSWIHPRNLTPSSPKDLQIQLHFAHTQQGDLFPVAHIEWTLQTDASILYLEGAELSVLQLNTNERLCVRFEFLSKLRHHHRRWRFTFSHFVVDPDQEYEVTVHHLPKPIPDGDPNHQSKNFLVPDCEHARMKVTTPCMSSGSLWDPNITVETLEAHQLRVSFTLWNESTHYQILLTSFPHMENHSCFEHMHHIPAPRPEEFHQRSNVTLTLRNLKGCCRHQVQIQPFFSSCLNDCLRHSATVSCPEMPDTPEPIPDYMPLWVYWFITGISILLVGSVILLIVCMTWRLAGPGSEKYSDDTKYTDGLPAADLIPPPLKPRKVWIIYSADHPLYVDVVLKFAQFLLTACGTEVALDLLEEQAISEAGVMTWVGRQKQEMVESNSKIIVLCSRGTRAKWQALLGRGAPVRLRCDHGKPVGDLFTAAMNMILPDFKRPACFGTYVVCYFSEVSCDGDVPDLFGAAPRYPLMDRFEEVYFRIQDLEMFQPGRMHRVGELSGDNYLRSPGGRQLRAALDRFRDWQVRCPDWFECENLYSADDQDAPSLDEEVFEEPLLPPGTGIVKRAPLVREPGSQACLAIDPLVGEEGGAAVAKLEPHLQPRGQPAPQPLHTLVLAAEEGALVAAVEPGPLADGAAVRLALAGEGEACPLLGSPGAGRNSVLFLPVDPEDSPLGSSTPMASPDLLPEDVREHLEGLMLSLFEQSLSCQAQGGCSRPAMVLTDPHTPYEEEQRQSVQSDQGYISRSSPQPPEGLTEMEEEEEEEQDPGKPALPLSPEDLESLRSLQRQLLFRQLQKNSGWDTMGSESEGPSA

SEQ ID NO: 6907 - protein, 832 aa, Homo Sapiens
MGAARSPPSAVPGPLLGLLLLLLGVLAPGGASLRLLDHRALVCSQPGLNCTVKNSTCLDDSWIHPRNLTPSSPKDLQIQLHFAHTQQGDLFPVAHIEWTLQTDASILYLEGAELSVLQLNTNERLCVRFEFLSKLRHHHRRWRFTFSHFVVDPDQEYEVTVHHLPKPIPDGDPNHQSKNFLVPDCEHARMKVTTPCMSSGSLWDPNITVETLEAHQLRVSFTLWNESTHYQILLTSFPHMENHSCFEHMHHIPAPRPEEFHQRSNVTLTLRNLKGCCRHQVQIQPFFSSCLNDCLRHSATVSCPEMPDTPEPIPGPGSEKYSDDTKYTDGLPAADLIPPPLKPRKVWIIYSADHPLYVDVVLKFAQFLLTACGTEVALDLLEEQAISEAGVMTWVGRQKQEMVESNSKIIVLCSRGTRAKWQALLGRGAPVRLRCDHGKPVGDLFTAAMNMILPDFKRPACFGTYVVCYFSEVSCDGDVPDLFGAAPRYPLMDRFEEVYFRIQDLEMFQPGRMHRVGELSGDNYLRSPGGRQLRAALDRFRDWQVRCPDWFECENLYSADDQDAPSLDEEVFEEPLLPPGTGIVKRAPLVREPGSQACLAIDPLVGEEGGAAVAKLEPHLQPRGQPAPQPLHTLVLAAEEGALVAAVEPGPLADGAAVRLALAGEGEACPLLGSPGAGRNSVLFLPVDPEDSPLGSSTPMASPDLLPEDVREHLEGLMLSLFEQSLSCQAQGGCSRPAMVLTDPHTPYEEEQRQSVQSDQGYISRSSPQPPEGLTEMEEEEEEEQDPGKPALPLSPEDLESLRSLQRQLLFRQLQKNSGWDTMGSESEGPSA

SEQ ID NO: 6908 - protein, 330 aa, Homo Sapiens
MPVPWFLLSLALGRSPVVLSLERLVGPQDATHCSPGLSCRLWDSDILCLPGDIVPAPGPVLAPTHLQTELVLRCQKETDCDLCLRVAVHLAVHASLQAQVVLSFQAYPTARCVLLEVQVPAALVQFGQSVGSVVYDCFEAALGSEVRIWSYTQPRYEKELNHTQQLPALPWLNVSADGDNVHLVLNVSEEQHFGLSLYWNQVQGPPKPRWHKNLTGPQIITLNHTDLVPCLCIQVWPLEPDSVRTNICPFREDPRAHQNLWQAARLQLLTLQSWLLDAPCSLPAEAALCWRAPGGDPCQPLVPPLSWENVTVDKVLEFPLLKGHPNLCVQ

SEQ ID NO: 6909 - protein, 242 aa, Homo Sapiens
MPVPWFLLSLALGRSPVVLSLERLVGPQDATHCSPGLSCRLWDSDILCLPGDIVPAPGPVLAPTHLQTELVLRCQKETDCDLCLRVAVHLAVHASLQAQVVLSFQAYPTARCVLLEVQVPAALVQFGQSVGSVVYDCFEAALGSEVRIWSYTQPRYEKELNHTQQLPALPWLNVSADGDNVHLVLNVSEEQHFGLSLYWNQVQGPPKPRWHKNLVRPPPSQVHSHCRPMPVQRTQCHIREDP

SEQ ID NO: 6910 - protein, 416 aa, Homo Sapiens
MPVPWFLLSLALGRSPVVLSLERLVGPQDATHCSPGLSCRLWDSDILCLPGDIVPAPGPVLAPTHLQTELVLRCQKETDCDLCLRVAVHLAVHASLQAQVVLSFQAYPTARCVLLEVQVPAALVQFGQSVGSVVYDCFEAALGSEVRIWSYTQPRYEKELNHTQQLPDCRGLEVWNSIPSCWALPWLNVSADGDNVHLVLNVSEEQHFGLSLYWNQVQGPPKPRWHKNLTGPQIITLNHTDLVPCLCIQVWPLEPDSVRTNICPFREDPRAHQNLWQAARLQLLTLQSWLLDAPCSLPAEAALCWRAPGGDPCQPLVPPLSWENVTVDKVLEFPLLKGHPNLCVQVNSSEKLQLQECLWADSLGPLKDDVLLLETRGPQDNRSLCALEPSGCTSLPSKASTRAARLGEYLLQDLQS

SEQ ID NO: 6911 - protein, 99 aa, Homo Sapiens
MPVPWFLLSLALGRSPVVLSLERLVGPQDATHCSPGLSCRLWDSDILCLPGDIVPAPGPVLAPTHLQTELVLRCQKETDCDLCLRVAVHLAVHGEQVIL

SEQ ID NO: 6912 - protein, 156 aa, Homo Sapiens
MPVPWFLLSLALGRSPVVLSLERLVGPQDATHCSPGLSCRLWDSDILCLPGDIVPAPGPVLAPTHLQTELVLRCQKETDCDLCLRVAVHLAVHGHWEEPEDEEKFGGAADSGVEEPRNASLQAQVVLSFQAYPTARCVLLEVQVPAALVQFGLCGI

SEQ ID NO: 6913 - protein, 705 aa, Homo Sapiens
MPVPWFLLSLALGRSPVVLSLERLVGPQDATHCSPGLSCRLWDSDILCLPGDIVPAPGPVLAPTHLQTELVLRCQKETDCDLCLRVAVHLAVHGHWEEPEDEEKFGGAADSGVEEPRNASLQAQVVLSFQAYPTARCVLLEVQVPAALVQFGQSVGSVVYDCFEAALGSEVRIWSYTQPRYEKELNHTQQLPALPWLNVSADGDNVHLVLNVSEEQHFGLSLYWNQVQGPPKPRWHKNLTGPQIITLNHTDLVPCLCIQVWPLEPDSVRTNICPFREDPRAHQNLWQAARLQLLTLQSWLLDAPCSLPAEAALCWRAPGGDPCQPLVPPLSWENVTVDKVLEFPLLKGHPNLCVQVNSSEKLQLQECLWADSLGPLKDDVLLLETRGPQDNRSLCALEPSGCTSLPSKASTRAARLGEYLLQDLQSGQCLQLWDDDLGALWACPMDKYIHKRWALVWLACLLFAAALSLILLLKKDHAKGWLRLLKQDVRSGAAARGRAALLLYSADDSGFERLVGALASALCQLPLRVAVDLWSRRELSAQGPVAWFHAQRRQTLQEGGVVVLLFSPGAVALCSEWLQDGVSGPGAHGPHDAFRASLSCVLPDFLQGRAPGSYVGACFDRLLHPDAVPALFRTVPVFTLPSQLPDFLGALQQPRAPRSGRLQERAEQVSRALQPALDSYFHPPGTPAPGRGVGPGAGPGAGDGT

SEQ ID NO: 6914 - protein, 688 aa, Homo Sapiens
MPVPWFLLSLALGRSPVVLSLERLVGPQDATHCSPGLSCRLWDSDILCLPGDIVPAPGPVLAPTHLQTELVLRCQKETDCDLCLRVAVHLAVHGHWEEPEDEEKFGGAADSGVEEPRNASLQAQVVLSFQAYPTARCVLLEVQVPAALVQFGQSVGSVVYDCFEAALGSEVRIWSYTQPRYEKELNHTQQLPALPWLNVSADGDNVHLVLNVSEEQHFGLSLYWNQVQGPPKPRWHKNLTGPQIITLNHTDLVPCLCIQVWPLEPDSVRTNICPFREDPRAHQNLWQAARLQLLTLQSWLLDAPCSLPAEAALCWRAPGGDPCQPLVPPLSWENVTVDVNSSEKLQLQECLWADSLGPLKDDVLLLETRGPQDNRSLCALEPSGCTSLPSKASTRAARLGEYLLQDLQSGQCLQLWDDDLGALWACPMDKYIHKRWALVWLACLLFAAALSLILLLKKDHAKGWLRLLKQDVRSGAAARGRAALLLYSADDSGFERLVGALASALCQLPLRVAVDLWSRRELSAQGPVAWFHAQRRQTLQEGGVVVLLFSPGAVALCSEWLQDGVSGPGAHGPHDAFRASLSCVLPDFLQGRAPGSYVGACFDRLLHPDAVPALFRTVPVFTLPSQLPDFLGALQQPRAPRSGRLQERAEQVSRALQPALDSYFHPPGTPAPGRGVGPGAGPGAGDGT

SEQ ID NO: 6915 - protein, 690 aa, Homo Sapiens
MPVPWFLLSLALGRSPVVLSLERLVGPQDATHCSPGLSCRLWDSDILCLPGDIVPAPGPVLAPTHLQTELVLRCQKETDCDLCLRVAVHLAVHGHWEEPEDEEKFGGAADSGVEEPRNASLQAQVVLSFQAYPTARCVLLEVQVPAALVQFGQSVGSVVYDCFEAALGSEVRIWSYTQPRYEKELNHTQQLPDCRGLEVWNSIPSCWALPWLNVSADGDNVHLVLNVSEEQHFGLSLYWNQVQGPPKPRWHKNLTGPQIITLNHTDLVPCLCIQVWPLEPDSVRTNICPFREDPRAHQNLWQAARLQLLTLQSWLLDAPCSLPAEAALCWRAPGGDPCQPLVPPLSWENVTVDVNSSEKLQLQECLWADSLGPLKDDVLLLETRGPQDNRSLCALEPSGCTSLPSKASTRAARLGEYLLQDLQSGQCLQLWDDDLGALWACPMDKYIHKRWALVWLACLLFAAALSLILLLKKDHAKAAARGRAALLLYSADDSGFERLVGALASALCQLPLRVAVDLWSRRELSAQGPVAWFHAQRRQTLQEGGVVVLLFSPGAVALCSEWLQDGVSGPGAHGPHDAFRASLSCVLPDFLQGRAPGSYVGACFDRLLHPDAVPALFRTVPVFTLPSQLPDFLGALQQPRAPRSGRLQERAEQVSRALQPALDSYFHPPGTPAPGRGVGPGAGPGAGDGT

SEQ ID NO: 6916 - protein, 720 aa, Homo Sapiens
MPVPWFLLSLALGRSPVVLSLERLVGPQDATHCSPGLSCRLWDSDILCLPGDIVPAPGPVLAPTHLQTELVLRCQKETDCDLCLRVAVHLAVHGHWEEPEDEEKFGGAADSGVEEPRNASLQAQVVLSFQAYPTARCVLLEVQVPAALVQFGQSVGSVVYDCFEAALGSEVRIWSYTQPRYEKELNHTQQLPDCRGLEVWNSIPSCWALPWLNVSADGDNVHLVLNVSEEQHFGLSLYWNQVQGPPKPRWHKNLTGPQIITLNHTDLVPCLCIQVWPLEPDSVRTNICPFREDPRAHQNLWQAARLQLLTLQSWLLDAPCSLPAEAALCWRAPGGDPCQPLVPPLSWENVTVDKVLEFPLLKGHPNLCVQVNSSEKLQLQECLWADSLGPLKDDVLLLETRGPQDNRSLCALEPSGCTSLPSKASTRAARLGEYLLQDLQSGQCLQLWDDDLGALWACPMDKYIHKRWALVWLACLLFAAALSLILLLKKDHAKGWLRLLKQDVRSGAAARGRAALLLYSADDSGFERLVGALASALCQLPLRVAVDLWSRRELSAQGPVAWFHAQRRQTLQEGGVVVLLFSPGAVALCSEWLQDGVSGPGAHGPHDAFRASLSCVLPDFLQGRAPGSYVGACFDRLLHPDAVPALFRTVPVFTLPSQLPDFLGALQQPRAPRSGRLQERAEQVSRALQPALDSYFHPPGTPAPGRGVGPGAGPGAGDGT

SEQ ID NO: 6917 - protein, 707 aa, Homo Sapiens
MPVPWFLLSLALGRSPVVLSLERLVGPQDATHCSPGLSCRLWDSDILCLPGDIVPAPGPVLAPTHLQTELVLRCQKETDCDLCLRVAVHLAVHGHWEEPEDEEKFGGAADSGVEEPRNASLQAQVVLSFQAYPTARCVLLEVQVPAALVQFGQSVGSVVYDCFEAALGSEVRIWSYTQPRYEKELNHTQQLPDCRGLEVWNSIPSCWALPWLNVSADGDNVHLVLNVSEEQHFGLSLYWNQVQGPPKPRWHKNLTGPQIITLNHTDLVPCLCIQVWPLEPDSVRTNICPFREDPRAHQNLWQAARLQLLTLQSWLLDAPCSLPAEAALCWRAPGGDPCQPLVPPLSWENVTVDKVLEFPLLKGHPNLCVQVNSSEKLQLQECLWADSLGPLKDDVLLLETRGPQDNRSLCALEPSGCTSLPSKASTRAARLGEYLLQDLQSGQCLQLWDDDLGALWACPMDKYIHKRWALVWLACLLFAAALSLILLLKKDHAKAAARGRAALLLYSADDSGFERLVGALASALCQLPLRVAVDLWSRRELSAQGPVAWFHAQRRQTLQEGGVVVLLFSPGAVALCSEWLQDGVSGPGAHGPHDAFRASLSCVLPDFLQGRAPGSYVGACFDRLLHPDAVPALFRTVPVFTLPSQLPDFLGALQQPRAPRSGRLQERAEQVSRALQPALDSYFHPPGTPAPGRGVGPGAGPGAGDGT

SEQ ID NO: 6918 - protein, 98 aa, Homo Sapiens
MPVPWFLLSLALGRSPVVLSLERLVGPQDATHCSPGLSCRLWDSDILCLPGDIVPAPGPVLAPTHLQTELVLRCQKETDCDLCLRVAVHLAVHGLCGI

SEQ ID NO: 6919 - protein, 123 aa, Homo Sapiens
MPVPWFLLSLALGRSPVVLSLERLVGPQDATHCSPGLSCRLWDSDILCLPGDIVPAPGPVLAPTHLQTELVLRCQKETDCDLCLRVAVHLAVHGLPYCPLRPAGGASACCPCAVWSVCGLCGI

SEQ ID NO: 6920 - protein, 91 aa, Homo Sapiens
MPVPWFLLSLALGRSPVVLSLERLVGPQDATHCSPGLSCRLWGATKFWAWNSFSSHPLLHTQTVTYSACLGTSCLLRAPCWRLRTCRQSWC

SEQ ID NO: 6921 - protein, 70 aa, Homo Sapiens
MPVPWFLLSLALGRSPVVLSLERLVGPQDATHCSPGLSCRLWVTYSACLGTSCLLRAPCWRLRTCRQSWC

SEQ ID NO: 6922 - protein, 44 aa, Homo Sapiens
MPVPWFLLSLALGRSPVVLSLERLVGPQDATHCSPNCPVWSVWC

SEQ ID NO: 6923 - protein, 791 aa, Homo Sapiens
MPVPWFLLSLALGRSPVVLSLERLVGPQDATHCSPVSLEPWGDEERLRVQFLAQQSLSLAPVTAATARTALSGLSGADGRREERGRGKSWVCLSLGGSGNTEPQKKGLSCRLWDSDILCLPGDIVPAPGPVLAPTHLQTELVLRCQKETDCDLCLRVAVHLAVHGHWEEPEDEEKFGGAADSGVEEPRNASLQAQVVLSFQAYPTARCVLLEVQVPAALVQFGQSVGSVVYDCFEAALGSEVRIWSYTQPRYEKELNHTQQLPDCRGLEVWNSIPSCWALPWLNVSADGDNVHLVLNVSEEQHFGLSLYWNQVQGPPKPRWHKNLTGPQIITLNHTDLVPCLCIQVWPLEPDSVRTNICPFREDPRAHQNLWQAARLQLLTLQSWLLDAPCSLPAEAALCWRAPGGDPCQPLVPPLSWENVTVDKVLEFPLLKGHPNLCVQVNSSEKLQLQECLWADSLGPLKDDVLLLETRGPQDNRSLCALEPSGCTSLPSKASTRAARLGEYLLQDLQSGQCLQLWDDDLGALWACPMDKYIHKRWALVWLACLLFAAALSLILLLKKDHAKGWLRLLKQDVRSGAAARGRAALLLYSADDSGFERLVGALASALCQLPLRVAVDLWSRRELSAQGPVAWFHAQRRQTLQEGGVVVLLFSPGAVALCSEWLQDGVSGPGAHGPHDAFRASLSCVLPDFLQGRAPGSYVGACFDRLLHPDAVPALFRTVPVFTLPSQLPDFLGALQQPRAPRSGRLQERAEQVSRALQPALDSYFHPPGTPAPGRGVGPGAGPGAGDGT

SEQ ID NO: 6924 - protein, 173 aa, Homo Sapiens
MGSSRLAALLLPLLLIVIDLSDSAGIGFRHLPHWNTRCPLASHTDDSFTGLQRGLFHLLVQKSKKSSTFKFYRRHKMPAPAQRKLLPRRHLSEKSHHISIPSPDISHKGLRSKRTQPSDPETWESLPRLDSQRHGGPEFSFDLLPEARAIRVTISSGPEVSVRLCHQWALECE

SEQ ID NO: 6925 - protein, 667 aa, Homo Sapiens
MGSSRLAALLLPLLLIVIDLSDSAGIGFRHLPHWNTRCPLASHTDDSFTGSSAYIPCRTWWALFSTKPWCVRVWHCSRCLCQHLLSGGSGLQRGLFHLLVQKSKKSSTFKFYRRHKMPAPAQRKLLPRRHLSEKSHHISIPSPDISHKGLRSKRTQPSDPETWESLPRLDSQRHGGPEFSFDLLPEARAIRVTISSGPEVSVRLCHQWALECEELSSPYDVQKIVSGGHTVELPYEFLLPCLCIEASYLQEDTVRRKKCPFQSWPEAYGSDFWKSVHFTDYSQHTQMVMALTLRCPLKLEAALCQRHDWHTLCKDLPNATARESDGWYVLEKVDLHPQLCFKFSFGNSSHVECPHQTGSLTSWNVSMDTQAQQLILHFSSRMHATFSAAWSLPGLGQDTLVPPVYTVSQARGSSPVSLDLIIPFLRPGCCVLVWRSDVQFAWKHLLCPDVSYRHLGLLILALLALLTLLGVVLALTCRRPQSGPGPARPVLLLHAADSEAQRRLVGALAELLRAALGGGRDVIVDLWEGRHVARVGPLPWLWAARTRVAREQGTVLLLWSGADLRPVSGPDPRAAPLLALLHAAPRPLLLLAYFSRLCAKGDIPPPLRALPRYRLLRDLPRLLRALDARPFAEATSWGRLGARQRRQSRLELCSRLEREAARLADLG

SEQ ID NO: 6926 - protein, 533 aa, Homo Sapiens
MGSSRLAALLLPLLLIVIDLSDSAGIGFRHLPHWNTRCPLASHTDDSFTGSSAYIPCRTWWALFSTKPWCVRVWHCSRCLCQHLLSGGSGLQRGLFHLLVQKSKKSSTFKFYRRHKMPAPAQRKLLPRRHLSEKSHHISIPSPDISHKGLRSKRTQPSDPETWESLPRLDSQRHGGPEFSFDLLPEARAIRVTISSGPEVSVRLCHQWALECEELSSPYDVQKIVSGGHTVELPYEFLLPCLCIEASYLQEDTVRRKKCPFQSWPEAYGSDFWKSVHFTDYSQHTQMVMALTLRCPLKLEAALCQRHDWHTLCKDLPNATARESDGWYVLEKVDLHPQLCFKFSFGNSSHVECPHQTGSLTSWNVSMDTQAQQLILHFSSRMHATFSAAWSLPGLGQDTLVPPVYTVSQARGSSPVSLDLIIPFLRPGCCVLLHASLSSPGGEDAWLIGVGGSVPSGVAVRCPVCLEAPLVSGCLLQTPGALDPGTAGPPHPTGCCSGPHLPAPTVRPGPSAASAPPARGGLGGAAAPGGSAG

SEQ ID NO: 6927 - protein, 186 aa, Homo Sapiens
MGSSRLAALLLPLLLIVIDLSDSAGIGFRHLPHWNTRCPLASHTEVLPISLAAPGGPSSPQSLGVCESGTVPAVCASICCQVAQVFNGASSTSWCRNPKSLPHSSSIGDTRCQHLLRGSCCLVVTCLRRAITFPSPPQTSPTRDFALKGPNLRIQRHGKVFPDWTHKGMEDPSSPLICCLRPGLFG

SEQ ID NO: 6928 - protein, 190 aa, Homo Sapiens
MGSSRLAALLLPLLLIVIDLSDSAGIGFRHLPHWNTRCPLASHTRKLLPRRHLSEKSHHISIPSPDISHKGLRSKRTQPSDPETWESLPRLDSQRHGGPEFSFDLLPEARAIRVTISSGPEVSVRLCHQWALECEELSSPYDVQKIVSGGHTVELPYEFLLPCLCIEMARTSGSQCTSLTTASTLRWSWP

SEQ ID NO: 6929 - protein, 146 aa, Homo Sapiens
MGSSRLAALLLPLLLIVIDLSDSAGIGFRHLPHWNTRCPLASHTVFNGASSTSWCRNPKSLPHSSSIGDTRCQHLLRGSCCLVVTCLRRAITFPSPPQTSPTRDFALKGPNLRIQRHGKVFPDWTHKGMEDPSSPLICCLRPGLFG

SEQ ID NO: 6930 - protein, 700 aa, Homo Sapiens
MLAPFLLLLTHSRSPLSFRPCSHVPGALIAQKPMGSSRLAALLLPLLLIVIDLSDSAGIGFRHLPHWNTRCPLASHTDDSFTGSSAYIPCRTWWALFSTKPWCVRVWHCSRCLCQHLLSGGSGLQRGLFHLLVQKSKKSSTFKFYRRHKMPAPAQRKLLPRRHLSEKSHHISIPSPDISHKGLRSKRTQPSDPETWESLPRLDSQRHGGPEFSFDLLPEARAIRVTISSGPEVSVRLCHQWALECEELSSPYDVQKIVSGGHTVELPYEFLLPCLCIEASYLQEDTVRRKKCPFQSWPEAYGSDFWKSVHFTDYSQHTQMVMALTLRCPLKLEAALCQRHDWHTLCKDLPNATARESDGWYVLEKVDLHPQLCFKFSFGNSSHVECPHQTGSLTSWNVSMDTQAQQLILHFSSRMHATFSAAWSLPGLGQDTLVPPVYTVSQARGSSPVSLDLIIPFLRPGCCVLVWRSDVQFAWKHLLCPDVSYRHLGLLILALLALLTLLGVVLALTCRRPQSGPGPARPVLLLHAADSEAQRRLVGALAELLRAALGGGRDVIVDLWEGRHVARVGPLPWLWAARTRVAREQGTVLLLWSGADLRPVSGPDPRAAPLLALLHAAPRPLLLLAYFSRLCAKGDIPPPLRALPRYRLLRDLPRLLRALDARPFAEATSWGRLGARQRRQSRLELCSRLEREAARLADLG

SEQ ID NO: 6931 - protein, 194 aa, Homo Sapiens
MTMRHNWTPDLSPLWVLLLCAHVVTLLVRATPVSQTTTAATASVRSTKDPCPSQPPVFPAAKQCPALEVTWPEVEVPLNGTLSLSCVACSRFPNFSILYWLGNGSFIEHLPGRLWEGSTSRERGSTGTQLCKALVLEQLTPALHSTNFSCVLVDPEQVVQRHVVLAQLWAGLRATLPPTQEALPSSHSSPQQQG

SEQ ID NO: 6932 - protein, 194 aa, Homo Sapiens; identical to SEQ ID NO: 6931

SEQ ID NO: 6933 - protein, 194 aa, Homo Sapiens; identical to SEQ ID NO: 6931

SEQ ID NO: 6934 - protein, 194 aa, Homo Sapiens; identical to SEQ ID NO: 6931

SEQ ID NO: 6935 - protein, 194 aa, Homo Sapiens; identical to SEQ ID NO: 6931

SEQ ID NO: 6936 - protein, 194 aa, Homo Sapiens; identical to SEQ ID NO: 6931

SEQ ID NO: 6937 - protein, 199 aa, Homo Sapiens
MTMRHNWTPDLSPLWVLLLCAHVVTLLVRATPVSQTTTAATASVRSTKDPCPSQPPVFPAAKQCPALEVTWPEVEVPLNGTLSLSCVACSRFPNFSILYWLGNGSFIEHLPGRLWEGSTSRERGSTGTQLCKALVLEQLTPALHSTNFSCVLVDPEQVVQRHVVLAQLWVRSPRRGLQEQEELCFHMWGGKGGLCQSSL

SEQ ID NO: 6938 - protein, 199 aa, Homo Sapiens; identical to SEQ ID NO: 6937

SEQ ID NO: 6939 - protein, 163 aa, Homo Sapiens
MTMRHNWTPDLSPLWVLLLCAHVVTLLVRATPVSQTTTAATASVRSTKDPCPSQPPVFPAAKQCPALEVTWPEVEVPLNGTLSLSCVACSRFPNFSILYWLGNGSFIEHLPGRLWEGSTSRERGSTGWAEGNLAPHPRSPALQPQQSTAAGLRLSTGPAAAQP

SEQ ID NO: 6940 - protein, 163 aa, Homo Sapiens; identical to SEQ ID NO: 6939

SEQ ID NO: 6941 - protein, 115 aa, Homo Sapiens
MTMRHNWTPDLSPLWVLLLCAHVVTLLVRATPVSQTTTAATASVRSTKDPCPSQPPVFPAAKQCPALEVTWPEVEVPLSWAEGNLAPHPRSPALQPQQSTAAGLRLSTGPAAAQP

SEQ ID NO: 6942 - protein, 170 aa, Homo Sapiens
MNCRELPLTLWVLISVSTAESCTSRPHITVVEGEPFYLKHCSCSLAHEIETTTKSWYKSSGSQEHVELNPRSSSRIALHDCVLEFWPVELNDTGSYFFQMKNYTQKWKLNVIRRNKHSCFTERQVTSKIVEVKKFFQITCENSYYQTLVNSTSLYKIGPPICRKTSSGLH

SEQ ID NO: 6943 - protein, 541 aa, Homo Sapiens
MNCRELPLTLWVLISVSTAESCTSRPHITVVEGEPFYLKHCSCSLAHEIETTTKSWYKSSGSQEHVELNPRSSSRIALHDCVLEFWPVELNDTGSYFFQMKNYTQKWKLNVIRRNKHSCFTERQVTSKIVEVKKFFQITCENSYYQTLVNSTSLYKNCKKLLLENNKNPTIKKNAEFEDQGYYSCVHFLHHNGKLFNITKTFNITIVEDRSNIVPVLLGPKLNHVAVELGKNVRLNCSALLNEEDVIYWMFGEENGSDPNIHEEKEMRIMTPEGKWHASKVLRIENIGESNLNVLYNCTVASTGGTDTKSFILVRKADMADIPGHVFTRGMIIAVLILVAVVCLVTVCVIYRVDLVLFYRHLTRRDETLTDGKTYDAFVSYLKECRPENGEEHTFAVEILPRVLEKHFGYKLCIFERDVVPGGAVVDEIHSLIEKSRRLIIVLSKSYMSNEVRYELESGLHEALVERKIKIILIEFTPVTDFTFLPQSLKLLKSHRVLKWKADKSLSYNSRFWKNLLYLMPAKTVKPGRDEPEVLPVLSES

SEQ ID NO: 6944 - protein, 541 aa, Homo Sapiens; identical to SEQ ID NO: 6943

SEQ ID NO: 6945 - protein, 541 aa, Homo Sapiens; identical to SEQ ID NO: 6943

SEQ ID NO: 6946 - protein, 457 aa, Homo Sapiens
MILEVKPQTNASCEYSASHKQDLLLGSTGSISCPSLSCQSDAQSPAVTWYKNGKLLSVERSNRIVVDEVYDYHQGTYVCDYTQSDTVSSWTVRAVVQVRTIVGDTKLKPDILDPVEDTLEVELGKPLTISCKARFGFERVFNPVIKWYIKDSDLEWEVSVPEAKSIKSTLKDEIIERNIILEKVTQRDLRRKFVCFVQNSIGNTTQSVQLKEKRGVVLLYILLGTIGTLVAVLAASALLYRHWIEIVLLYRTYQSKDQTLGDKKDFDAFVSYAKWSSFPSEATSSLSEEHLALSLFPDVLENKYGYSLCLLERDVAPGGVYAEDIVSIIKRSRRGIFILSPNYVNGPSIFELQAAVNLALDDQTLKLILIKFCYFQEPESLPHLVKKALRVLPTVTWRGLKSVPPNSRFWAKMRYHMPVKNSQGFTWNQLRITSRIFQWKGLSRTETTGRSSQPKEW

SEQ ID NO: 6947 - protein, 44 aa, Homo Sapiens
MLCLGWIFLWLVAGERIKGFNISGCSTKKLLWTYSTRSEEEFVL

SEQ ID NO: 6948 - protein, 599 aa, Homo Sapiens
MLCLGWIFLWLVAGERIKGFNISGCSTKKLLWTYSTRSEEEFVLFCDLPEPQKSHFCHRNRLSPKQVPEHLPFMGSNDLSDVQWYQQPSNGDPLEDIRKSYPHIIQDKCTLHFLTPGVNNSGSYICRPKMIKSPYDVACCVKMILEVKPQTNASCEYSASHKQDLLLGSTGSISCPSLSCQSDAQSPAVTWYKNGKLLSVERSNRIVVDEVYDYHQGTYVCDYTQSDTVSSWTVRAVVQVRTIVGDTKLKPDILDPVEDTLEVELGKPLTISCKARFGFERVFNPVIKWYIKDSDLEWEVSVPEAKSIKSTLKDEIIERNIILEKVTQRDLRRKFVCFVQNSIGNTTQSVQLKEKRGVVLLYILLGTIGTLVAVLAASALLYRHWIEIVLLYRTYQSKDQTLGDKKDFDAFVSYAKWSSFPSEATSSLSEEHLALSLFPDVLENKYGYSLCLLERDVAPGGVYAEDIVSIIKRSRRGIFILSPNYVNGPSIFELQAAVNLALDDQTLKLILIKFCYFQEPESLPHLVKKALRVLPTVTWRGLKSVPPNSRFWAKMRYHMPVKNSQGFTWNQLRITSRIFQWKGLSRTETTGRSSQPKEW

SEQ ID NO: 6949 - protein, 215 aa, Homo Sapiens
MCTEGAFPHRSACSLPLTHVHTHIHVCVPVLWGSVPRGMKLQCVSLWLLGTILILCSVDNHGLRRCLISTDMHHIEESFQEIKRAIQAKDTFPNVTILSTLETLQIIKPLDVCCVTKNLLAFYVDRVFKDHQEPNPKILRKISSIANSFLYMQKTLRQCQEQRQCHCRQEATNATRVIHDNYDQLEVHAAAIKSLGELDVFLAWINKNHEVMFSA

SEQ ID NO: 6950 - protein, 177 aa, Homo Sapiens
MKLQCVSLWLLGTILILCSVDNHGLRRCLISTDMHHIEESFQEIKRAIQAKDTFPNVTILSTLETLQIIKPLDVCCVTKNLLAFYVDRVFKDHQEPNPKILRKISSIANSFLYMQKTLRQCQEQRQCHCRQEATNATRVIHDNYDQLEVHAAAIKSLGELDVFLAWINKNHEVMFSA

SEQ ID NO: 6951 - protein, 177 aa, Homo Sapiens; identical to SEQ ID NO: 6950

SEQ ID NO: 6952 - protein, 298 aa, Homo Sapiens
MEFFKNENNELPKLQWYKDCKPLLLDNIHFSGVKDRLIVMNVAEKHRGNYTCHASYTYLGKQYPITRVIEFITLEENKPTRPVIVSPANETMEVDLGSQIQLICNVTGQLSDIAYWKWNGSVIDEDDPVLGEDYYSVENPANKRRSTLITVLNISEIESRFYKHPFTCFAKNTHGIDAAYIQLIYPVTNFQKHMIGICVTLTVIIVCSVFIYKIFKIDIVLWYRDSCYDFLPIKASDGKTYDAYILYPKTVGEGSTSDCDIFVFKVLPEVLEKQCGYKLFIYGRDDYVGEDIVEVINE

SEQ ID NO: 6953 - protein, 80 aa, Homo Sapiens
MKVLLRLICFIALLISSLEADKCKEREEKIILVSSANEIDVRPCPLNPNEHKGTITWYKDDSKTPVSTEQASRIHQHKEK

SEQ ID NO: 6954 - protein, 119 aa, Homo Sapiens
MKVLLRLICFIALLISSLEADKCKEREEKIILVSSANEIDVRPCPLNPNEHKGTITWYKDDSKTPVSTEQASRIHQHKEKLWFVPAKVEDSGHYYCVVRIANLYFLTIYTLVESKIGSS

SEQ ID NO: 6955 - protein, 106 aa, Homo Sapiens
MKVLLRLICFIALLISSLEADKCKEREEKIILVSSANEIDVRPCPLNPNEHKGTITWYKDDSKTPVSTEQASRIHQHKEKLWFVPAKVEDSGHYYCVVRNSSYCLR

SEQ ID NO: 6956 - protein, 114 aa, Homo Sapiens
MKVLLRLICFIALLISSLEADKCKEREEKIILVSSANEIDVRPCPLNPNEHKGTITWYKDDSKTPVSTEQASRIHQHKEKLWFVPAKVEDSGHYYCVVRNSSYCLRIKISAKFV

SEQ ID NO: 6957 - protein, 182 aa, Homo Sapiens
MKVLLRLICFIALLISSLEADKCKEREEKIILVSSANEIDVRPCPLNPNEHKGTITWYKDDSKTPVSTEQASRIHQHKEKLWFVPAKVEDSGHYYCVVRNSSYCLRIKISAKFVENEPNLCYNAQAIFKQKLPVAGDGGLVCPYMEFFKNENNELPKLQWYKDCKPLLLDNIHFSGVKDRLI

SEQ ID NO: 6958 - protein, 447 aa, Homo Sapiens
MKVLLRLICFIALLISSLEADKCKEREEKIILVSSANEIDVRPCPLNPNEHKGTITWYKDDSKTPVSTEQASRIHQHKEKLWFVPAKVEDSGHYYCVVRNSSYCLRIKISAKFVENEPNLCYNAQAIFKQKLPVAGDGGLVCPYMEFFKNENNELPKLQWYKDCKPLLLDNIHFSGVKDRLIVMNVAEKHRGNYTCHASYTYLGKQYPITRVIEFITLEENKPTRPVIVSPANETMEVDLGSQIQLICNVTGQLSDIAYWKWNGSVIDEDDPVLGEDYYSVENPANKRRSTLITVLNISEIESRFYKHPFTCFAKNTHGIDAAYIQLIYPVTNFQKHMIGICVTLTVIIVCSVFIYKIFKIDIVLWYRDSCYDFLPIKASDGKTYDAYILYPKTVGEGSTSDCDIFVFKVLPEVLEKQCGYKLFIYGRDDYVGEGMCVMEQSKGLLL

SEQ ID NO: 6959 - protein, 447 aa, Homo Sapiens; identical to SEQ ID NO: 6958

SEQ ID NO: 6960 - protein, 538 aa, Homo Sapiens
MKVLLRLICFIALLISSLEADKCKEREEKIILVSSANEIDVRPCPLNPNEHKGTITWYKDDSKTPVSTEQASRIHQHKEKLWFVPAKVEDSGHYYCVVRNSSYCLRIKISAKFVENEPNLCYNAQAIFKQKLPVAGDGGLVCPYMEFFKNENNELPKLQWYKDCKPLLLDNIHFSGVKDRLIVMNVAEKHRGNYTCHASYTYLGKQYPITRVIEFITLEENKPTRPVIVSPANETMEVDLGSQIQLICNVTGQLSDIAYWKWNGSVIDEDDPVLGEDYYSVENPANKRRSTLITVLNISEIESRFYKHPFTCFAKNTHGIDAAYIQLIYPVTNFQKHMIGICVTLTVIIVCSVFIYKIFKIDIVLWYRDSCYDFLPIKVLPEVLEKQCGYKLFIYGRDDYVGEDIVEVINENVKKSRRLIIILVRETSGFSWLGGSSEEQIAMYNALVQDGIKVVLLELEKIQDYEKMPESIKFIKQKHGAIRWSGDFTQGPQSAKTRFWKNVRYHMPVQRRSPSSKHQLLSPATKEKLQREAHVPLG

SEQ ID NO: 6961 - protein, 447 aa, Homo Sapiens; identical to SEQ ID NO: 6958

SEQ ID NO: 6962 - protein, 569 aa, Homo Sapiens
MKVLLRLICFIALLISSLEADKCKEREEKIILVSSANEIDVRPCPLNPNEHKGTITWYKDDSKTPVSTEQASRIHQHKEKLWFVPAKVEDSGHYYCVVRNSSYCLRIKISAKFVENEPNLCYNAQAIFKQKLPVAGDGGLVCPYMEFFKNENNELPKLQWYKDCKPLLLDNIHFSGVKDRLIVMNVAEKHRGNYTCHASYTYLGKQYPITRVIEFITLEENKPTRPVIVSPANETMEVDLGSQIQLICNVTGQLSDIAYWKWNGSVIDEDDPVLGEDYYSVENPANKRRSTLITVLNISEIESRFYKHPFTCFAKNTHGIDAAYIQLIYPVTNFQKHMIGICVTLTVIIVCSVFIYKIFKIDIVLWYRDSCYDFLPIKASDGKTYDAYILYPKTVGEGSTSDCDIFVFKVLPEVLEKQCGYKLFIYGRDDYVGEDIVEVINENVKKSRRLIIILVRETSGFSWLGGSSEEQIAMYNALVQDGIKVVLLELEKIQDYEKMPESIKFIKQKHGAIRWSGDFTQGPQSAKTRFWKNVRYHMPVQRRSPSSKHQLLSPATKEKLQREAHVPLG

SEQ ID NO: 6963 - protein, 173 aa, Homo Sapiens
MKVLLRLICFIALLISSLEADKCKEREEKIILVSSANEIDVRPCPLNPNEHKGTITWYKDDSKTPVSTEQASRIHQHKEKLWFVPAKVEDSGHYYCVVRNSSYCLRIKISAKFVENEPNLCYNAQAIFKQKLPVAGDGGLVCPYMEFFKNENNELPKLQWYKVAVSRVWATAL

SEQ ID NO: 6964 - protein, 124 aa, Homo Sapiens
  misc_feature (1)..(1): Xaa can be any naturally occurring amino acid
XKCKEREEKIILVSSANEIDVRPCPLNPNEHKGTITWYKDDSKTPVSTEQASRIHQHKEKLWFVPAKVEDSGHYYCVETEDLCALIWSFLKMKIMSYLNYSGIRIANLYFLTIYTLVESKIGSS

SEQ ID NO: 6965 - protein, 229 aa, Homo Sapiens
MLRLYVLVMGVSAFTLQPAAHTGAARSCRFRGRHYKREFRLEGEPVALRCPQVPYWLWASVSPRINLTWHKNDSARTVPGEEETRMWAQDGALWLLPALQEDSGTYVCTTRNASYCDKMSIELRVFENTDAFLPFISYPQILTLSTSGVLVCPDLSEFTRDKTDVKIQWYKDSLLLDKDNEKFLSVRGTTHLLVHDVALEDAGYYRCVLTFAHEGQQYNITRSIELRIK

SEQ ID NO: 6966 - protein, 398 aa, Homo Sapiens
MLRLYVLVMGVSAFTLQPAAHTGAARSCRFRGRHYKREFRLEGEPVALRCPQVPYWLWASVSPRINLTWHKNDSARTVPGEEETRMWAQDGALWLLPALQEDSGTYVCTTRNASYCDKMSIELRVFENTDAFLPFISYPQILTLSTSGVLVCPDLSEFTRDKTDVKIQWYKDSLLLDKDNEKFLSVRGTTHLLVHDVALEDAGYYRCVLTFAHEGQQYNITRSIELRIKKKKEETIPVIISPLKTISASLGSRLTIPCKVFLGTGTPLTTMLWWTANDTHIESAYPGGRVTEGPRQEYSENNENYIEVPLIFDPVTREDLHMDFKCVVHNTLSFQTLRTTVKEASSTFSWGIVLAPLSLAFLVLGGIWMHRRCKHRTGKADGLTVLWPHHQDFQSYPK

SEQ ID NO: 6967 - protein, 398 aa, Homo Sapiens; identical to SEQ ID NO: 6966

SEQ ID NO: 6968 - protein, 296 aa, Homo Sapiens
MLRLYVLVMGVSAFTLQPAAHTGAARSCRFRGRHYKREFRLEGEPVALRCPQVPYWLWASVSPRINLTWHKNDSARTVPGEEETRMWAQDGALWLLPALQEDSGTYVCTTRNASYCDKMSIELRVFENTDAFLPFISYPQILTLSTSGVLVCPDLSEFTRDKTDVKIQWYKDSLLLDKDNEKFLSVRGTTHLLVHDVALEDAGYYRCVLTFAHEGQQYNITRSIELRIKKKKEETIPVIISPLKTISASLGSRLTIPCKVFLGTGTPLTTMLWWTANDTHIESAYPGGRVTEGPRQ

SEQ ID NO: 6969 - protein, 215 aa, Homo Sapiens
MKLPVHKLYIEYGIQRITCPNVDGYFPSSVKPTITWYMGCYKIQNFNNVIPEGMNLSFLIALISNNGNYTCVVTYPENGRTFHLTRTLTVKVVGSPKNAVPPVIHSPNDHVVYEKEPGEELLIPCTVYFSFLMDSRNEVWWTIDGKKPDDITIDVTINESISHSRTEDETRTQILSIKKVTSEDLKRSYVCHARSAKGEVAKAAKVKQKGNRCGQ

SEQ ID NO: 6970 - protein, 113 aa, Homo Sapiens
MTLLWCVVSLYFYGILQSDASERCDDWGLDTMRQIQVFEDEPARIKCPLFEHFLKFNYSTAHSAGLTLIWYWTRQDRDLEEPINFRLPENRISKEKDVLWFRPTLLNDTGNYT

SEQ ID NO: 6971 - protein, 145 aa, Homo Sapiens
MTLLWCVVSLYFYGILQSDASERCDDWGLDTMRQIQVFEDEPARIKCPLFEHFLKFNYSTAHSAGLTLIWYWTRQDRDLEEPINFRLPENRISKEKDVLWFRPTLLNDTGNYTCMLRNTTYCSKVAFPLEVVQKDSCFNSPMKLP

SEQ ID NO: 6972 - protein, 570 aa, Homo Sapiens
MTLLWCVVSLYFYGILQSDASERCDDWGLDTMRQIQVFEDEPARIKCPLFEHFLKFNYSTAHSAGLTLIWYWTRQDRDLEEPINFRLPENRISKEKDVLWFRPTLLNDTGNYTCMLRNTTYCSKVAFPLEVVQKDSCFNSPMKLPVHKLYIEYGIQRITCPNVDGYFPSSVKPTITWYMGCYKIQNFNNVIPEGMNLSFLIALISNNGNYTCVVTYPENGRTFHLTRTLTVKVVGSPKNAVPPVIHSPNDHVVYEKEPGEELLIPCTVYFSFLMDSRNEVWWTIDGKKPDDITIDVTINESISHSRTEDETRTQILSIKKVTSEDLKRSYVCHARSAKGEVAKAAKVKQKVPAPRYTVELACGFGATVLLVVILIVVYHVYWLEMVLFYRAHFGTDETILDGKEYDIYVSYARNAEEEEFVLLTLRGVLENEFGYKLCIFDRDSLPGGIVTDETLSFIQKSRRLLVVLSPNYVLQGTQALLELKAGLENMASRGNINVILVQYKAVKETKVKELKRAKTVLTVIKWKGEKSKYPQGRFWKQLQVAMPVKKSPRRSSSDEQGLSYSSLKNV

SEQ ID NO: 6973 - protein, 346 aa, Homo Sapiens
MTLLWCVVSLYFYGILQSDASERCDDWGLDTMRQIQVFEDEPARIKCPLFEHFLKFNYSTAHSAGLTLIWYWTRQDRDLEEPINFRLPENRISKEKDVLWFRPTLLNDTGNYTCMLRNTTYCSKVAFPLEVVQKDSCFNSPMKLPVHKLYIEYGIQRITCPNVDGYFPSSVKPTITWYMGCYKIQNFNNVIPEGMNLSFLIALISNNGNYTCVVTYPENGRTFHLTRTLTVKVVGSPKNAVPPVIHSPNDHVVYEKEPGEELLIPCTVYFSFLMDSRNEVWWTIDGKKPDDITIDVTINESASSKIHSGTGLWFWSHSPASGDSHCCLPCLLARDGPILPGSFWNR

SEQ ID NO: 6974 - protein, 687 aa, Homo Sapiens
MTLLWCVVSLYFYGILQSDASERCDDWGLDTMRQIQVFEDEPARIKCPLFEHFLKFNYSTAHSAGLTLIWYWTRQDRDLEEPINFRLPENRISKEKDVLWFRPTLLNDTGNYTCMLRNTTYCSKVAFPLEVVQKDSCFNSPMKLPVHKLYIEYGIQRITCPNVDGYFPSSVKPTITWYMGCYKIQNFNNVIPEGMNLSFLIALISNNGNYTCVVTYPENGRTFHLTRTLTVKVVGSPKNAVPPVIHSPNDHVVYEKEPGEELLIPCTVYFSFLMDSRNEVWWTIDGKKPDDITIDVTINESISHSRTEDETRTQILSIKKVTSEDLKRSYVCHARSAKGEVAKAAKVKQKVPAPRYTVELACGFGATVLLVVILIVVYHVYWLEMVLFYRAHFGTDETILDGKEYDIYVSYARNAEEEEFVLLTLRGVLENEFGYKLCIFDRDSLPGGNTVEAVFDFIQRSRRMIVVLSPDYVTEKSISMLEFKLGVMCQNSIATKLIVVEYRPLEHPHPGILQLKESVSFVSWKGEKSKHSGSKFWKALRLALPLRSLSASSGWNESCSSQSDISLDHVQRRRSRLKEPPELQSSERAAGSPPAPGTMSKHRGKSSATCRCCVTYCEGENHLRNKSRAEIHNQPQWETHLCKPVPQESETQWIQNGTRLEPPAPQISALALHHFTDLSNNNDFYIL

SEQ ID NO: 6975 - protein, 570 aa, Homo Sapiens; identical to SEQ ID NO: 6972

SEQ ID NO: 6976 - protein, 687 aa, Homo Sapiens; identical to SEQ ID NO: 6974

SEQ ID NO: 6977 - protein, 356 aa, Homo Sapiens
MTLLWCVVSLYFYGILQSDASERCDDWGLDTMRQIQVFEDEPARIKCPLFEHFLKFNYSTAHSAGLTLIWYWTRQDRDLEEPINFRLPENRISKEKDVLWFRPTLLNDTGNYTCMLRNTTYCSKVAFPLEVVQKDSCFNSPMKLPVHKLYIEYGIQRITCPNVDGYFPSSVKPTITWYMGCYKIQNFNNVIPEGMNLSFLIALISNNGNYTCVVTYPENGRTFHLTRTLTVKVVGSPKNAVPPVIHSPNDHVVYEKEPGEELLIPCTVYFSFLMDSRNEVWWTIDGKKPDDITIDVTINESISHSRTEDETRTQILSIKKVTSEDLKRSYVCHARSAKGEVAKAAKVKQKGNRCGQ

SEQ ID NO: 6978 - protein, 356 aa, Homo Sapiens; identical to SEQ ID NO: 6977

SEQ ID NO: 6979 - protein, 346 aa, Homo Sapiens; identical to SEQ ID NO: 6973

SEQ ID NO: 6980 - protein, 570 aa, Homo Sapiens; identical to SEQ ID NO: 6972

SEQ ID NO: 6981 - protein, 570 aa, Homo Sapiens; identical to SEQ ID NO: 6972

SEQ ID NO: 6982 - protein, 193 aa, Homo Sapiens
  misc_feature (1)..(1): Xaa can be any naturally occurring amino acid
XFIHIGTSKHIEVKTQGCYKIQNFNNVIPEGMNLSFLIALISNNGNYTCVVTYPENGRTFHLTRTLTVKVVGSPKNAVPPVIHSPNDHVVYEKEPGEELLIPCTVYFSFLMDSRNEVWWTIDGKKPDDITIDVTINESISHSRTEDETRTQILSIKKVTSEDLKRSYVCHARSAKGEVAKAAKVKQKGNRCGQ

SEQ ID NO: 6983 - protein, 38 aa, Homo Sapiens
MGFWILAILTILMYSTAAKFSKQSWGLENEALIVRCPR

SEQ ID NO: 6984 - protein, 556 aa, Homo Sapiens
MGFWILAILTILMYSTAAKFSKQSWGLENEALIVRCPRQGKPSYTVDWYYSQTNKSIPTQERNRVFASGQLLKFLPAAVADSGIYTCIVRSPTFNRTGYANVTIYKKQSDCNVPDYLMYSTVSGSEKNSKIYCPTIDLYNWTAPLEWFKNCQALQGSRYRAHKSFLVIDNVMTEDAGDYTCKFIHNENGANYSVTATRSFTVKDEQGFSLFPVIGAPAQNEIKEVEIGKNANLTCSACFGKGTQFLAAVLWQLNGTKITDFGEPRIQQEEGQNQSFSNGLACLDMVLRIADVKEEDLLLQYDCLALNLHGLRRHTVRLSRKNPIDHHSIYCIIAVCSVFLMLINVLVIILKMFWIEATLLWRDIAKPYKTRNDGKLYDAYVVYPRNYKSSTDGASRVEHFVHQILPDVLENKCGYTLCIYGRDMLPGEDVVTAVETNIRKSRRHIFILTPQITHNKEFAYEQEVALHCALIQNDAKVILIEMEALSELDMLQAEALQDSLQHLMKVQGTIKWREDHIANKRSLNSKFWKHVRYQMPVPSKIPRKASSLTPLAAQKQ

SEQ ID NO: 6985 - protein, 328 aa, Homo Sapiens
MGFWILAILTILMYSTAAKFSKQSWGLENEALIVRCPRQGKPSYTVDWYYSQTNKSIPTQERNRVFASGQLLKFLPAAVADSGIYTCIVRSPTFNRTGYANVTIYKKQSDCNVPDYLMYSTVSGSEKNSKIYCPTIDLYNWTAPLEWFKNCQALQGSRYRAHKSFLVIDNVMTEDAGDYTCKFIHNENGANYSVTATRSFTVKDEQGFSLFPVIGAPAQNEIKEVEIGKNANLTCSACFGKGTQFLAAVLWQLNGTKITDFGEPRIQQEEGQNQSFSNGLACLDMVLRIADVKEEDLLLQYDCLALNLHGLRRHTVRLSRKNPSKECF

SEQ ID NO: 6986 - protein, 314 aa, Homo Sapiens
MGFWILAILTILMYSTAAKFSKQSWGLENEALIVRCPRQGKPSYTVDWYYSQTNKSIPTQERNRVFASGQLLKFLPAAVADSGIYTCIVRSPTFNRTGYANVTIYKKQSDCNVPDYLMYSTVSGSEKNSKIYCPTIDLYNWTAPLEWFKNCQALQGSRYRAHKSFLVIDNVMTEDAGDYTCKFIHNENGANYSVTATRSFTVKDEQGFSLFPVIGAPAQNEIKEVEIGTQFLAAVLWQLNGTKITDFGEPRIQQEEGQNQSFSNGLACLDMVLRIADVKEEDLLLQYDCLALNLHGLRRHTVRLSRKNPSKECF

SEQ ID NO: 6987 - protein, 259 aa, Homo Sapiens
MGFWILAILTILMYSTAAKFSKQSWGLENEALIVRCPRQGKPSYTVDWYYSQTNKSIPTQERNRVFASGQLLKFLPAAVADSGIYTCIVRSPTFNRTGYANVTIYKKQSDCNVPDYLMYSTVSGSEKNSKIYCPTIDLYNWTAPLEWFKNCQALQGSRYRAHKSFLVIDNVMTEDAGDYTCKFIHNENGANYSVTATRSFTVKVWCQSFCKLKKSLIFSNTHWIQSLMRGFVMVYYGVHKCCRVVFNLCLQYFQHHQWP

SEQ ID NO: 6988 - protein, 211 aa, Homo Sapiens
MYSTVSGSEKNSKIYCPTIDLYNWTAPLEWFKNCQALQGSRYRAHKSFLVIDNVMTEDAGDYTCKFIHNENGANYSVTATRSFTVKDEQGFSLFPVIGAPAQNEIKEVEIGKNANLTCSACFGKGTQFLAAVLWQLNGTKITDFGEPRIQQEEGQNQSFSNGLACLDMVLRIADVKEEDLLLQYDCLALNLHGLRRHTVRLSRKNPSKECF

SEQ ID NO: 6989 - protein, 457 aa, Homo Sapiens
MTGLVSLSYFPLSTRSCALQSCSPVWGCGPCCSAGCPSPFHCLSQQDCNEIKGERFTVLETRLLVSNVSAEDRGNYACQAILTHSGKQYEVLNGITVSIKRAGYGGSVPKIIYPKNHSIEVQLGTTLIVDCNVTDTKDNTNLRCWRVNNTLVDDYYDESKRIREGVETHVSFREHNLYTVNITFLEVKMEDYGLPFMCHAGVSTAYIILQLPAPDFRAYLIGGLIALVAVAVSVVYIYNIFKIDIVLWYRSAFHSTETIVDGKLYDAYVLYPKPHKESQRHAVDALVLNILPEVLERQCGYKLFIFGRDEFPGQAVANVIDENVKLCRRLIVIVVPESLGFGLLKNLSEEQIAVYSALIQDGMKVILIELEKIEDYTVMPESIQYIKQKHGAIRWHGDFTEQSQCMKTKFWKTVRYHMPPRRCRPFPPVQLLQHTPCYRTAGPELGSRRKKCTLTTG

SEQ ID NO: 6990 - protein, 172 aa, Homo Sapiens
MWSLLLCGLSIALPLSVTADGCKDIFMKNEILSASQPFAFNCTFPPITSGEVSVTWYKNSSKIPVSKIIQSRIHQDETWILFLPMEWGDSGVYQCVIKGRDSCHRIHVNLTVFEKHWCDTSIGGLPNLSDEYKQILHLGKDDSLTCHLHFPKSCVLGPIKWYKDCNEIKGER

SEQ ID NO: 6991 - protein, 575 aa, Homo Sapiens
MWSLLLCGLSIALPLSVTADGCKDIFMKNEILSASQPFAFNCTFPPITSGEVSVTWYKNSSKIPVSKIIQSRIHQDETWILFLPMEWGDSGVYQCVIKGRDSCHRIHVNLTVFEKHWCDTSIGGLPNLSDEYKQILHLGKDDSLTCHLHFPKSCVLGPIKWYKDCNEIKGERFTVLETRLLVSNVSAEDRGNYACQAILTHSGKQYEVLNGITVSITERAGYGGSVPKIIYPKNHSIEVQLGTTLIVDCNVTDTKDNTNLRCWRVNNTLVDDYYDESKRIREGVETHVSFREHNLYTVNITFLEVKMEDYGLPFMCHAGVSTAYIILQLPAPDFRAYLIGGLIALVAVAVSVVYIYNIFKIDIVLWYRSAFHSTETIVDGKLYDAYVLYPKPHKESQRHAVDALVLNILPEVLERQCGYKLFIFGRDEFPGQAVANVIDENVKLCRRLIVIVVPESLGFGLLKNLSEEQIAVYSALIQDGMKVILIELEKIEDYTVMPESIQYIKQKHGAIRWHGDFTEQSQCMKTKFWKTVRYHMPPRRCRPFPPVQLLQHTPCYRTAGPELGSRRKKCTLTTG

SEQ ID NO: 6992 - protein, 180 aa, Homo Sapiens
MALADLYEEGGGGGGEGEDNADSKETICRPSGRKSSKMQAFRIWDVNQKTFYLRNNQLVAGYLQGPNVNLEEKIDVVPIEPHALFLGIHGGKMCLSCVKSGDETRLQLEAVNITDLSENRKQDKRFAFIRSDSGPTTSFESAACPGWFLCTAMEADQPVSLTNMPDEGVMVTKFYFQEDE

SEQ ID NO: 6993 - protein, 159 aa, Homo Sapiens
MALETICRPSGRKSSKMQAFRIWDVNQKTFYLRNNQLVAGYLQGPNVNLEEKIDVVPIEPHALFLGIHGGKMCLSCVKSGDETRLQLEAVNITDLSENRKQDKRFAFIRSDSGPTTSFESAACPGWFLCTAMEADQPVSLTNMPDEGVMVTKFYFQEDE

SEQ ID NO: 6994 - protein, 177 aa, Homo Sapiens
MEICRGLRSHLITLLLFLFHSETICRPSGRKSSKMQAFRIWDVNQKTFYLRNNQLVAGYLQGPNVNLEEKIDVVPIEPHALFLGIHGGKMCLSCVKSGDETRLQLEAVNITDLSENRKQDKRFAFIRSDSGPTTSFESAACPGWFLCTAMEADQPVSLTNMPDEGVMVTKFYFQEDE

SEQ ID NO: 6995 - protein, 143 aa, Homo Sapiens
MQAFRIWDVNQKTFYLRNNQLVAGYLQGPNVNLEEKIDVVPIEPHALFLGIHGGKMCLSCVKSGDETRLQLEAVNITDLSENRKQDKRFAFIRSDSGPTTSFESAACPGWFLCTAMEADQPVSLTNMPDEGVMVTKFYFQEDE

SEQ ID NO: 6996 - protein, 143 aa, Homo Sapiens; identical to SEQ ID NO: 6995

SEQ ID NO: 6997 - protein, 153 aa, Homo Sapiens
MYRMQLLSCIALSLALVTNSAPTSSSTKKTQLQLEHLLLDLQMILNGINNYKNPKLTRMLTFKFYMPKKATELKHLQCLEEELKPLEEVLNLAQSKNFHLRPRDLISNINVIVLELKGSETTFMCEYADETATIVEFLNRWITFCQSIISTLT

SEQ ID NO: 6998 - protein, 176 aa, Homo Sapiens
MKASSLAFSLLSAAFYLLWTPSTGLKTLNLGSCVIATNLQEIRNGFSEIRGSVQAKDGNIDIRILRRTESLQDTKPANRCCLLRHLLRLYLDRVFKNYQTPDHYTLRKISSLANSFLTIKKDLRLCHAHMTCHCGEEAMKKYSQILSHFEKLEPQAAVVKALGELDILLQWMEETE

SEQ ID NO: 6999 - protein, 176 aa, Homo Sapiens; identical to SEQ ID NO: 6998

SEQ ID NO: 7000 - protein, 151 aa, Homo Sapiens
MKASSLAFSLLSAAFYLLWTPSTGLKTLNLGSCVIATNLQEIRNGFSEIRGSVQAKDGNIDIRILRRTESLQDTKPANRCCLLRHLLRLYLDRVFKNYQTPDHYTLRKISSLANSFLTIKKDLRLCLEPQAAVVKALGELDILLQWMEETE

SEQ ID NO: 7001 - protein, 504 aa, Homo Sapiens
MKNVLQWTPPEGLQGVKVTYTVQYFIYGQKKWLNKSECRNINRTYCDLSAETSDYEHQYYAKVKAIWGTKCSKWAESGRFYPFLETQIGPPEVALTTDEKSISVVLTAPEKWKRNPEDLPVSMQQIYSNLKYNVSVLNTKSNRTWSQCVTNHTLVLTWLEPNTLYCVHVESFVPGPPRRAQPSEKQCARTLKDQSSEFKAKIIFWYVLPVSITVFLFSVMGYSIYRYIHVGKEKHPANLILIYGNEFDKRFFVPAEKIVINFITLNISDDSKISHQDMSLLGKSSDVSSLNDPQPSGNLRPPQEEEEVKHLGYASHLMEIFCDSEENTEGTSLTQQESLSRTIPPDKTVIEYEYDVRTTDICAGPEEQELSLQEEVSTQGTLLESQAALAVLGPQTLQYSYTPQLQDLDPLAQEHTDSEEGPEEEPSTTLVDWDPQTGRLCIPSLSSFDQDSEGCEPSEGDGLGEEGLLSRLYEEPAPDRPPGENETYLMQFMEEWGLYVQMEN

SEQ ID NO: 7002 - protein, 42 aa, Homo Sapiens
MRAPGRPALRPLPLPPLLLLLLAAPWGRAGYSRPLLGLWAKV

SEQ ID NO: 7003 - protein, 209 aa, Homo Sapiens
MRAPGRPALRPLPLPPLLLLLLAAPWGRAVPCVSGGLPKPANITFLSINMKNVLQWTPPEGLQGVKVTYTVQYFIYGQKKWLNKSECRNINRTYCDLSAETSDYEHQYYAKVKAIWGTKCSKWAESGRFYPFLETQIGPPEVALTTDEKSISVVLTAPEKWKRNPEDLPVSMQQIYSNLKYNVSVLNTKSNRTVSLKWNGAYIHVPLCS

SEQ ID NO: 7004 - protein, 553 aa, Homo Sapiens
MRAPGRPALRPLPLPPLLLLLLAAPWGRAVPCVSGGLPKPANITFLSINMKNVLQWTPPEGLQGVKVTYTVQYFIYGQKKWLNKSECRNINRTYCDLSAETSDYEHQYYAKVKAIWGTKCSKWAESGRFYPFLETQIGPPEVALTTDEKSISVVLTAPEKWKRNPEDLPVSMQQIYSNLKYNVSVLNTKSNRTWSQCVTNHTLVLTWLEPNTLYCVHVESFVPGPPRRAQPSEKQCARTLKDQSSEFKAKIIFWYVLPVSITVFLFSVMGYSIYRYIHVGKEKHPANLILIYGNEFDKRFFVPAEKIVINFITLNISDDSKISHQDMSLLGKSSDVSSLNDPQPSGNLRPPQEEEEVKHLGYASHLMEIFCDSEENTEGTSLTQQESLSRTIPPDKTVIEYEYDVRTTDICAGPEEQELSLQEEVSTQGTLLESQAALAVLGPQTLQYSYTPQLQDLDPLAQEHTDSEEGPEEEPSTTLVDWDPQTGRLCIPSLSSFDQDSEGCEPSEGDGLGEEGLLSRLYEEPAPDRPPGENETYLMQFMEEWGLYVQMEN

SEQ ID NO: 7005 - protein, 89 aa, Homo Sapiens
MSYNGLHQRVFKELKLLTLCSISSPEKWKRNPEDLPVSMQQIYSNLKYNVSVLNTKSNRTWSQCVTNHTLVLTWLEPNTLYCVHVESFV

SEQ ID NO: 7006 - protein, 177 aa, Homo Sapiens
MSYNGLHQRVFKELKLLTLCSISSQIGPPEVALTTDEKSISVVLTAPEKWKRNPEDLPVSMQQIYSNLKYNVSVLNTKSNRTWSQCVTNHTLVLTWLEPNTLYCVHVESFVPGPPRRAQPSEKQCARTLKDQSSEFKAKIIFWYVLPVSITVFLFSVMGYSIYRYIHVGKEKHPANL

SEQ ID NO: 7007 - protein, 442 aa, Homo Sapiens
MSYNGLHQRVFKELKLLTLCSISSQIGPPEVALTTDEKSISVVLTAPEKWKRNPEDLPVSMQQIYSNLKYNVSVLNTKSNRTWSQCVTNHTLVLTWLEPNTLYCVHVESFVPGPPRRAQPSEKQCARTLKDQSSEFKAKIIFWYVLPVSITVFLFSVMGYSIYRYIHVGKEKHPANLILIYGNEFDKRFFVPAEKIVINFITLNISDDSKISHQDMSLLGKSSDVSSLNDPQPSGNLRPPQEEEEVKHLGYASHLMEIFCDSEENTEGTSLTQQESLSRTIPPDKTVIEYEYDVRTTDICAGPEEQELSLQEEVSTQGTLLESQAALAVLGPQTLQYSYTPQLQDLDPLAQEHTDSEEGPEEEPSTTLVDWDPQTGRLCIPSLSSFDQDSEGCEPSEGDGLGEEGLLSRLYEEPAPDRPPGENETYLMQFMEEWGLYVQMEN

SEQ ID NO: 7008 - protein, 162 aa, Homo Sapiens
MRSSPGNMERIVICLMVIFLGTLVHKSSSQGQDRHMIRMRQLIDIVDQLKNYVNDLVPEFLPAPEDVETNCEWSAFSCFQKAQLKSANTGNNERIINVSIKKLKRKPPSTNAGRRQKHRLTCPSCDSYEKKPPKEFLERFKSLLQKMIHQHLSSRTHGSEDS

SEQ ID NO: 7009 - protein, 153 aa, Homo Sapiens
MRSSPGNMERIVICLMVIFLGTLVHKSSSQGQDRHMIRMRQLIDIVDQLKNYVNDLVPEFLPAPEDVETNCEWSAFSCFQKAQLKSANTGNNERIINVSIKKLKRKPPSTNAGRRQKHRLTCPSCDSYEKKPPKEFLERFKSLLQKVSTLSFI

SEQ ID NO: 7010 - protein, 179 aa, Homo Sapiens
MAALQKSVSSFLMGTLATSCLLLLALLVQGGAAAPISSHCRLDKSNFQQPYITNRTFMLAKEASLADNNTDVRLIGEKLFHGVSMSERCYLMKQVLNFTLEEVLFPQSDRFQPYMQEVVPFLARLSNRLSTCHIEGDDLHIQRNVQKLKDTVKKLGESGEIKAIGELDLLFMSLRNACI

SEQ ID NO: 7011 - protein, 179 aa, Homo Sapiens; identical to SEQ ID NO: 7010

SEQ ID NO: 7012 - protein, 263 aa, Homo Sapiens
MMPKHCFLGFLISFFLTGVAGTQSTHESLKPQRVQFQSRNFHNILQWQPGRALTGNSSVYFVQYKIMFSCSMKSSHQKPSGCWQHISCNFPGCRTLAKYGQRQWKNKEDCWGTQELSCDLTSETSDIQEPYYGRVRAASAGSYSEWSMTPRFTPWWETKIDPPVMNITQVNGSLLVILHAPNLPYRYQKEKNVSIEDYYELLYRVFIINNSLEKEQKVYEGAHRAVEIEALTPHSSYCVVAEIYQPMLDRRSQRSEERCVEIP

SEQ ID NO: 7013 - protein, 130 aa, Homo Sapiens
MMPKHCFLGFLISFFLTGVAGTQSTHESLKPQRVQFQSRNFHNILQWQPGRALTGNSSVYFVQYKIYGQRQWKNKEDCWGTQELSCDLTSETSDIQEPYYGRVRAASAGSYSEWSMTPRFTPWWERAKGL

SEQ ID NO: 7014 - protein, 231 aa, Homo Sapiens
MMPKHCFLGFLISFFLTGVAGTQSTHESLKPQRVQFQSRNFHNILQWQPGRALTGNSSVYFVQYKIYGQRQWKNKEDCWGTQELSCDLTSETSDIQEPYYGRVRAASAGSYSEWSMTPRFTPWWETKIDPPVMNITQVNGSLLVILHAPNLPYRYQKEKNVSIEDYYELLYRVFIINNSLEKEQKVYEGAHRAVEIEALTPHSSYCVVAEIYQPMLDRRSQRSEERCVEIP

SEQ ID NO: 7015 - protein, 189 aa, Homo Sapiens
MLGSRAVMLLLLLPWTAQGRAVPGGSSPAWTQCQQLSQKLCTLAWSAHPLVGHMDLREEGDEETTNDVPHIQCGDGCDPQGLRDNSQFCLQRIHQGLIFYEKLLGSDIFTGEPSLLPDSPVGQLHASLLGLSQLLQPEGHHWETQQIPSLSPSQPWQRLLLRFKILRSLQAFVAVAARVFAHGAATLSP

SEQ ID NO: 7016 - protein, 206 aa, Homo Sapiens
MNFQQRLQSLWTLARPFCPPLLATASQMQMVVLPCLGFTLLLWSQVSGAQGQEFHFGPCQVKGVVPQKLWEAFWAVKDTMQAQDNITSARLLQQEVLQNVSDAESCYLVHTLLEFYLKTVFKNYHNRTVEVRTLKSFSTLANNFVLIVSQLQPSQENEMFSIRDSAHRRFLLFRRAFKQLDVEAALTKALGEVDILLTWMQKFYKL

SEQ ID NO: 7017 - protein, 60 aa, Homo Sapiens
MNFQQRLQSLWTLASKLRITSRVPGCCSRRFCRTSRKKMRCFPSETVHTGGFCYSGEHSN

SEQ ID NO: 7018 - protein, 63 aa, Homo Sapiens
MNFQQRLQSLWTLASKLRITSRVPGCCSRRFCRTSRKKMRCFPSETVHTGGFCYSGEHSNSWT

SEQ ID NO: 7019 - protein, 51 aa, Homo Sapiens
MNFQQRLQSLWTLASKLRITSRVPGCCSRRFCRTSRMLRAVTLSTPCWSST

SEQ ID NO: 7020 - protein, 207 aa, Homo Sapiens
MNFQQRLQSLWTLASRPFCPPLLATASQMQMVVLPCLGFTLLLWSQVSGAQGQEFHFGPCQVKGVVPQKLWEAFWAVKDTMQAQDNITSARLLQQEVLQNVSDAESCYLVHTLLEFYLKTVFKNYHNRTVEVRTLKSFSTLANNFVLIVSQLQPSQENEMFSIRDSAHRRFLLFRRAFKQLDVEAALTKALGEVDILLTWMQKFYKL

SEQ ID NO: 7021 - protein, 154 aa, Homo Sapiens
MNFQQRLQSLWTLASRPFCPPLLATASQMQMVVLPCLGFTLLLWSQVSGAQGQEFHFGPCQVKGVVPQKLWEAFWAVKDTMQAQDNITSARLLQQEVLQNVSQENEMFSIRDSAHRRFLLFRRAFKQLDVEAALTKALGEVDILLTWMQKFYKL

SEQ ID NO: 7022 - protein, 177 aa, Homo Sapiens
MRERPRLGEDSSLISLFLQVVAFLAMVMGTHTYSHWPSCCPSKGQDTSEELLRWSTVPVPPLEPARPNRHPESCRASEDGPLNSRAISPWRYELDRDLNRLPQDLYHARCLCPHCVSLQTGSHMDPRGNSELLYHNQTVFYRRPCHGEKGTHKGYCLERRLYRVSLACVCVRPRVMG

SEQ ID NO: 7023 - protein, 161 aa, Homo Sapiens
MYQVVAFLAMVMGTHTYSHWPSCCPSKGQDTSEELLRWSTVPVPPLEPARPNRHPESCRASEDGPLNSRAISPWRYELDRDLNRLPQDLYHARCLCPHCVSLQTGSHMDPRGNSELLYHNQTVFYRRPCHGEKGTHKGYCLERRLYRVSLACVCVRPRVMG

SEQ ID NO: 7024 - protein, 171 aa, Homo Sapiens
MLVNFILRCGLLLVTLSLAIAKHKQSSFTKSCYPRGTLSQAVDALYIKAAWLKATIPEDRIKNIRLLKKKTKKQFMKNCQFQEQLLSFFMEDVFGQLQLQGCKKIRFVEDFHSLRQKLSHCISCASSAREMKSITRMKRIFYRIGNKGIYKAISELDILLSWIKKLLESSQ

SEQ ID NO: 7025 - protein, 24 aa, Homo Sapiens
MERMQLWAMRLDLRDLQRHLRFQV

SEQ ID NO: 7026 - protein, 243 aa, Homo Sapiens
MGQTAGDLGWRLSLLLLPLLLVQAGVWGFPRPPGRPQLSLQELRREFTVSLHLARKLLSEVRGQAHRFAESHLPGVNLYLLPLGEQLPDVSLTFQAWRRLSDPERLCFISTTLQPFHALLGGLGTQGRWTNMERMQLWAMRLDLRDLQRHLRFQVLAAGFNLPEEEEEEEEEEEEERKGLLPGALGSALQGPAQVSWPQLLSTYRLLHSLELVLSRAVRELLLLSKAGHSVWPLGFPTLSPQP

SEQ ID NO: 7027 - protein, 88 aa, Homo Sapiens
MAAPALSWRLPLLILLLPLATSWASAAVNGTSQFTCFYNSRANISCVWSQDGALQDTSCQVHAWPDRRRWNQTCELLPVSQASWACNL

SEQ ID NO: 7028 - protein, 146 aa, Homo Sapiens
MAAPALSWRLPLLILLLPLATSWASAAVNGTSQFTCFYNSRANISCVWSQDGALQDTSCQVHAWPDRRRWNQTCELLPVSQASWACNLILGAPDSQKLTTVDIVTLRVLCREGVRWRVMAIQDFKPFENLRLMAPISLQVVHVETH

SEQ ID NO: 7029 - protein, 188 aa, Homo Sapiens
MAAPALSWRLPLLILLLPLATSWASAAVNGTSQFTCFYNSRANISCVWSQDGALQDTSCQVHAWPDRRRWNQTCELLPVSQASWACNLILGAPDSQKLTTVDIVTLRVLCREGVRWRVMAIQDFKPFENLRLMAPISLQVVHVETHRCNISWEISQASHYFERHLEFEARTLSPGHTWEEAPLLTLKQ

SEQ ID NO: 7030 - protein, 551 aa, Homo Sapiens
MAAPALSWRLPLLILLLPLATSWASAAVNGTSQFTCFYNSRANISCVWSQDGALQDTSCQVHAWPDRRRWNQTCELLPVSQASWACNLILGAPDSQKLTTVDIVTLRVLCREGVRWRVMAIQDFKPFENLRLMAPISLQVVHVETHRCNISWEISQASHYFERHLEFEARTLSPGHTWEEAPLLTLKQKQEWICLETLTPDTQYEFQVRVKPLQGEFTTWSPWSQPLAFRTKPAALGKDTIPWLGHLLVGLSGAFGFIILVYLLINCRNTGPWLKKVLKCNTPDPSKFFSQLSSEHGGDVQKWLSSPFPSSSFSPGGLAPEISPLEVLERDKVTQLLLQQDKVPEPASLSSNHSLTSCFTNQGYFFFHLPDALEIEACQVYFTYDPYSEEDPDEGVAGAPTGSSPQPLQPLSGEDDAYCTFPSRDDLLLFSPSLLGGPSPPSTAPGGSGAGEERMPPSLQERVPRDWDPQPLGPPTPGVPDLVDFQPPPELVLREAGEEVPDAGPREGVSFPWSRPPGQGEFRALNARLPLNTDAYLSLQELQGQDPTHLV

SEQ ID NO: 7031 - protein, 105 aa, Homo Sapiens
TCFYNSRANISCVWSQDGALQDTSCQVHAWPDRRSLQLPWDQAGMREQDKVPMREECHGASGGGSAPHSGWHRGPSLALLPGAILAAERSEKSPLGQLCGSFLFF

SEQ ID NO: 7032 - protein, 152 aa, Homo Sapiens
MSRLPVLLLLQLLVRPGLQAPMTQTTPLKTSWVNCSNMIDEIITHLKQPPLPLLDFNNLNGEDQDILMENNLRRPNLEAFNRAVKSLQNASAIESILKNLLPCLPLATAAPTRHPIHIKDGDWNEFRRKLTFYLKTLENAQAQQTTLSLAIF

SEQ ID NO: 7033 - protein, 164 aa, Homo Sapiens
MASHSGPSTSVLFLFCCLGGWLASHTLPVRLLRPSDDVQKIVEELQSLSKMLLKDVEEEKGVLVSQNYTLPCLSPDAQPPNNIHSPAIRAYLKTIRQLDNKSVIDEIIEHLDKLIFQDAPETNISVPTDTHECKRFILTISQQFSECMDLALKSLTSGAQQATT

SEQ ID NO: 7034 - protein, 582 aa, Homo Sapiens
MCIRQLKFFTTACVCECPQNILSPQPSCVNLGMMWTWALWMLPSLCKFSLAALPAKPENISCVYYYRKNLTCTWSPGKETSYTQYTVKRTYAFGEKHDNCTTNSSTSENRASCSFFLPRITIPDNYTIEVEAENGDGVIKSHMTYWRLENIAKTEPPKIFRVKPVLGIKRMIQIEWIKPELAPVSSDLKYTLRFRTVNSTSWMEVNFAKNRKDKNQTYNLTGLQPFTEYVIALRCAVKESKFWSDWSQEKMGMTEEEAPCGLELWRVLKPAEADGRRPVRLLWKKARGAPVLEKTLGYNIWYYPESNTNLTETMNTTNQQLELHLGGESFWVSMISYNSLGKSPVATLRIPAIQEKSFQCIEVMQACVAEDQLVVKWQSSALDVNTWMIEWFPDVDSEPTTLSWESVSQATNWTIQQDKLKPFWCYNISVYPMLHDKVGEPYSIQAYAKEGVPSEGPETKVENIGVKTVTITWKEIPKSERKGIICNYTIFYQAEGGKGFCKHAHSEVEKNPKPQIDAMDRPVVGMAPPSHCDLQPGMNHLASLNLSENGAKSTHLLGFWGLNESEVTVPERRVLRKWKELL

SEQ ID NO: 7035 - protein, 681 aa, Homo Sapiens
MCIRQLKFFTTACVCECPQNILSPQPSCVNLGMMWTWALWMLPSLCKFSLAALPAKPENISCVYYYRKNLTCTWSPGKETSYTQYTVKRTYAFGEKHDNCTTNSSTSENRASCSFFLPRITIPDNYTIEVEAENGDGVIKSHMTYWRLENIAKTEPPKIFRVKPVLGIKRMIQIEWIKPELAPVSSDLKYTLRFRTVNSTSWMEVNFAKNRKDKNQTYNLTGLQPFTEYVIALRCAVKESKFWSDWSQEKMGMTEEEAPCGLELWRVLKPAEADGRRPVRLLWKKARGAPVLEKTLGYNIWYYPESNTNLTETMNTTNQQLELHLGGESFWVSMISYNSLGKSPVATLRIPAIQEKSFQCIEVMQACVAEDQLVVKWQSSALDVNTWMIEWFPDVDSEPTTLSWESVSQATNWTIQQDKLKPFWCYNISVYPMLHDKVGEPYSIQAYAKEGVPSEGPETKVENIGVKTVTITWKEIPKSERKGIICNYTIFYQAEGGKGFSKTVNSSILQYGLESLKRKTSYIVQVMASTSAGGTNGTSINFKTLSFSVFEIILITSLIGGGLLILIILTVAYGLKKPNKLTHLCWPTVPNPAESSIATWHGDDFKDKLNLKESDDSVNTEDRILKPCSTPSDKLVIDKLVVNFGNVLQEIFTDEARTGQENNLGGEKNGTRILSSCPTSI

SEQ ID NO: 7036 - protein, 764 aa, Homo Sapiens
MCIRQLKFFTTACVCECPQNILSPQPSCVNLGMMWTWALWMLPSLCKFSLAALPAKPENISCVYYYRKNLTCTWSPGKETSYTQYTVKRTYAFGEKHDNCTTNSSTSENRASCSFFLPRITIPDNYTIEVEAENGDGVIKSHMTYWRLENIAKTEPPKIFRVKPVLGIKRMIQIEWIKPELAPVSSDLKYTLRFRTVNSTSWMEVNFAKNRKDKNQTYNLTGLQPFTEYVIALRCAVKESKFWSDWSQEKMGMTEEEAPCGLELWRVLKPAEADGRRPVRLLWKKARGAPVLEKTLGYNIWYYPESNTNLTETMNTTNQQLELHLGGESFWVSMISYNSLGKSPVATLRIPAIQEKSFQCIEVMQACVAEDQLVVKWQSSALDVNTWMIEWFPDVDSEPTTLSWESVSQATNWTIQQDKLKPFWCYNISVYPMLHDKVGEPYSIQAYAKEGVPSEGPETKVENIGVKTVTITWKEIPKSERKGIICNYTIFYQAEGGKGFSKTVNSSILQYGLESLKRKTSYIVQVMASTSAGGTNGTSINFKTLSFSVFEIILITSLIGGGLLILIILTVAYGLKKPNKLTHLCWPTVPNPAESSIATWHGDDFKDKLNLKESDDSVNTEDRILKPCSTPSDKLVIDKLVVNFGNVLQEIFTDEARTGQENNLGGEKNGYVTCPFRPDCPLGKSFEELPVSPEIPPRKSQYLRSRMPEGTRPEAKEQLLFSGQSLVPDHLCEEGAPNPYLKNSVTAREFLVSEKLPEHTKGEV

SEQ ID NO: 7037 - protein, 745 aa, Homo Sapiens
MKLSPQPSCVNLGMMWTWALWMLPSLCKFSLAALPAKPENISCVYYYRKNLTCTWSPGKETSYTQYTVKRTYAFGEKHDNCTTNSSTSENRASCSFFLPRITIPDNYTIEVEAENGDGVIKSHMTYWRLENIAKTEPPKIFRVKPVLGIKRMIQIEWIKPELAPVSSDLKYTLRFRTVNSTSWMEVNFAKNRKDKNQTYNLTGLQPFTEYVIALRCAVKESKFWSDWSQEKMGMTEEEAPCGLELWRVLKPAEADGRRPVRLLWKKARGAPVLEKTLGYNIWYYPESNTNLTETMNTTNQQLELHLGGESFWVSMISYNSLGKSPVATLRIPAIQEKSFQCIEVMQACVAEDQLVVKWQSSALDVNTWMIEWFPDVDSEPTTLSWESVSQATNWTIQQDKLKPFWCYNISVYPMLHDKVGEPYSIQAYAKEGVPSEGPETKVENIGVKTVTITWKEIPKSERKGIICNYTIFYQAEGGKGFSKTVNSSILQYGLESLKRKTSYIVQVMASTSAGGTNGTSINFKTLSFSVFEIILITSLIGGGLLILIILTVAYGLKKPNKLTHLCWPTVPNPAESSIATWHGDDFKDKLNLKESDDSVNTEDRILKPCSTPSDKLVIDKLVVNFGNVLQEIFTDEARTGQENNLGGEKNGYVTCPFRPDCPLGKSFEELPVSPEIPPRKSQYLRSRMPEGTRPEAKEQLLFSGQSLVPDHLCEEGAPNPYLKNSVTAREFLVSEKLPEHTKGEV

SEQ ID NO: 7038 - protein, 662 aa, Homo Sapiens
MKLSPQPSCVNLGMMWTWALWMLPSLCKFSLAALPAKPENISCVYYYRKNLTCTWSPGKETSYTQYTVKRTYAFGEKHDNCTTNSSTSENRASCSFFLPRITIPDNYTIEVEAENGDGVIKSHMTYWRLENIAKTEPPKIFRVKPVLGIKRMIQIEWIKPELAPVSSDLKYTLRFRTVNSTSWMEVNFAKNRKDKNQTYNLTGLQPFTEYVIALRCAVKESKFWSDWSQEKMGMTEEEAPCGLELWRVLKPAEADGRRPVRLLWKKARGAPVLEKTLGYNIWYYPESNTNLTETMNTTNQQLELHLGGESFWVSMISYNSLGKSPVATLRIPAIQEKSFQCIEVMQACVAEDQLVVKWQSSALDVNTWMIEWFPDVDSEPTTLSWESVSQATNWTIQQDKLKPFWCYNISVYPMLHDKVGEPYSIQAYAKEGVPSEGPETKVENIGVKTVTITWKEIPKSERKGIICNYTIFYQAEGGKGFSKTVNSSILQYGLESLKRKTSYIVQVMASTSAGGTNGTSINFKTLSFSVFEIILITSLIGGGLLILIILTVAYGLKKPNKLTHLCWPTVPNPAESSIATWHGDDFKDKLNLKESDDSVNTEDRILKPCSTPSDKLVIDKLVVNFGNVLQEIFTDEARTGQENNLGGEKNGTRILSSCPTSI

SEQ ID NO: 7039 - protein, 662 aa, Homo Sapiens; identical to SEQ ID NO: 7038

SEQ ID NO: 7040 - protein, 324 aa, Homo Sapiens
MMWTWALWMLPSLCKFSLAALPAKPENISCVYYYRKNLTCTWSPGKETSYTQYTVKRTYAFGEKHDNCTTNSSTSENRASCSFFLPRITIPDNYTIEVEAENGDGVIKSHMTYWRLENIAKTEPPKIFRVKPVLGIKRMIQIEWIKPELAPVSSDLKYTLRFRTVNSTSWMEVNFAKNRKDKNQTYNLTGLQPFTEYVIALRCAVKESKFWSDWSQEKMGMTEEEAPCGLELWRVLKPAEADGRRPVRLLWKKARGAPVLEKTLGYNIWYYPESNTNLTETMNTTNQQLELHLGGESFWVSMISYNSLGKSPVATLRIPAIQEK

SEQ ID NO: 7041 - protein, 622 aa, Homo Sapiens
MTYWRLENIAKTEPPKIFRVKPVLGIKRMIQIEWIKPELAPVSSDLKYTLRFRTVNSTSWMEVNFAKNRKDKNQTYNLTGLQPFTEYVIALRCAVKESKFWSDWSQEKMGMTEEEAPCGLELWRVLKPAEADGRRPVRLLWKKARGAPVLEKTLGYNIWYYPESNTNLTETMNTTNQQLELHLGGESFWVSMISYNSLGKSPVATLRIPAIQEKSFQCIEVMQACVAEDQLVVKWQSSALDVNTWMIEWFPDVDSEPTTLSWESVSQATNWTIQQDKLKPFWCYNISVYPMLHDKVGEPYSIQAYAKEGVPSEGPETKVENIGVKTVTITWKEIPKSERKGIICNYTIFYQAEGGKGFSKTVNSSILQYGLESLKRKTSYIVQVMASTSAGGTNGTSINFKTLSFSVFEIILITSLIGGGLLILIILTVAYGLKKPNKLTHLCWPTVPNPAESSIATWHGDDFKDKLNLKESDDSVNTEDRILKPCSTPSDKLVIDKLVVNFGNVLQEIFTDEARTGQENNLGGEKNGYVTCPFRPDCPLGKSFEELPVSPEIPPRKSQYLRSRMPEGTRPEAKEQLLFSGQSLVPDHLCEEGAPNPYLKNSVTAREFLVSEKLPEHTKGEV

SEQ ID NO: 7042 - protein, 212 aa, Homo Sapiens
MCFPKGLGAWVSACDTEDTVGHLGPWRDKDPALWCQLCLSSQHQAIERFYDKMQNAESGRGQVMSSLAELEDDFKEGYLETVAAYYEEQHPELTPLLEKERDGLRCRGNRSPVPDVEDPATEEPGESFCDKVMRWFQAMLQRLQTWWHGVLAWVKEKVVALVHAVQALWKQFQSFCCSLSELFMSSFQSYGAPRGDKEELTPQKCSEPQSSK

SEQ ID NO: 7043 - protein, 131 aa, Homo Sapiens
MCFPKVLSDDMKKLKARMDDFKEGYLETVAAYYEEQHPELTPLLEKERDGLRCRGNRSPVPDVEDPATEEPGESFCDKVMRWFQAMLQRLQTWWHGVLAWVKEKVVALVHAVQALWKQFQSFCCSLSELFM

SEQ ID NO: 7044 - protein, 179 aa, Homo Sapiens
MCFPKVLSDDMKKLKARMHQAIERFYDKMQNAESGRGQDDFKEGYLETVAAYYEEQHPELTPLLEKERDGLRCRGNRSPVPDVEDPATEEPGESFCDKVMRWFQAMLQRLQTWWHGVLAWVKEKVVALVHAVQALWKQFQSFCCSLSELFMSSFQSYGAPRGDKEELTPQKCSEPQSSK

SEQ ID NO: 7045 - protein, 179 aa, Homo Sapiens; identical to SEQ ID NO: 7044

SEQ ID NO: 7046 - protein, 131 aa, Homo Sapiens
MCFPKVLSDDMKKLKARMHQAIERFYDKMQNAESGRGQVMSSLAELEDDFKEGYLETVAAYYEEQHPELTPLLEKERDGLRCRGNRSPVPDVEDPATEEPGESFCDKSYGAPRGDKEELTPQKCSEPQSSK

SEQ ID NO: 7047 - protein, 131 aa, Homo Sapiens; identical to SEQ ID NO: 7046

SEQ ID NO: 7048 - protein, 131 aa, Homo Sapiens; identical to SEQ ID NO: 7046

SEQ ID NO: 7049 - protein, 188 aa, Homo Sapiens
MCFPKVLSDDMKKLKARMHQAIERFYDKMQNAESGRGQVMSSLAELEDDFKEGYLETVAAYYEEQHPELTPLLEKERDGLRCRGNRSPVPDVEDPATEEPGESFCDKVMRWFQAMLQRLQTWWHGVLAWVKEKVVALVHAVQALWKQFQSFCCSLSELFMSSFQSYGAPRGDKEELTPQKCSEPQSSK

SEQ ID NO: 7050 - protein, 188 aa, Homo Sapiens; identical to SEQ ID NO: 7049

SEQ ID NO: 7051 - protein, 188 aa, Homo Sapiens; identical to SEQ ID NO: 7049

SEQ ID NO: 7052 - protein, 188 aa, Homo Sapiens; identical to SEQ ID NO: 7049

SEQ ID NO: 7053 - protein, 188 aa, Homo Sapiens; identical to SEQ ID NO: 7049

SEQ ID NO: 7054 - protein, 188 aa, Homo Sapiens; identical to SEQ ID NO: 7049

SEQ ID NO: 7055 - protein, 188 aa, Homo Sapiens; identical to SEQ ID NO: 7049

SEQ ID NO: 7056 - protein, 188 aa, Homo Sapiens; identical to SEQ ID NO: 7049

SEQ ID NO: 7057 - protein, 188 aa, Homo Sapiens; identical to SEQ ID NO: 7049

SEQ ID NO: 7058 - protein, 188 aa, Homo Sapiens; identical to SEQ ID NO: 7049

SEQ ID NO: 7059 - protein, 168 aa, Homo Sapiens
MCFPKVLSDDMKKLKARMHQAIERFYDKMQNAESGRGQVMSSLAELEELTPLLEKERDGLRCRGNRSPVPDVEDPATEEPGESFCDKVMRWFQAMLQRLQTWWHGVLAWVKEKVVALVHAVQALWKQFQSFCCSLSELFMSSFQSYGAPRGDKEELTPQKCSEPQSSK

SEQ ID NO: 7060 - protein, 168 aa, Homo Sapiens; identical to SEQ ID NO: 7059

SEQ ID NO: 7061 - protein, 225 aa, Homo Sapiens
MCFPKVLSDDMKKLKARMVMLLPTSAQGLGAWVSACDTEDTVGHLGPWRDKDPALWCQLCLSSQHQAIERFYDKMQNAESGRGQDDFKEGYLETVAAYYEEQHPELTPLLEKERDGLRCRGNRSPVPDVEDPATEEPGESFCDKVMRWFQAMLQRLQTWWHGVLAWVKEKVVALVHAVQALWKQFQSFCCSLSELFMSSFQSYGAPRGDKEELTPQKCSEPQSSK

SEQ ID NO: 7062 - protein, 225 aa, Homo Sapiens
MCFPKVLSDDMKKLKARMVMLLPTSAQGLGAWVSACDTEDTVGHLGPWRDKDPALWCQLCLSSQHQAIERFYDKMQNAESGRGQVMSSLAELEDDFKEGYLETVAAYYEEQHPELTPLLEKERDGLRCRGNRSPVPDVEDPATEEPGESFCDKVMRWFQAMLQRLQTWWHGVLAWVKEKVVALVHAVQALWKQFQSFCCSLSELFMSSFQSYGAPRGDKEELTPQ

SEQ ID NO: 7063 - protein, 234 aa, Homo Sapiens
MCFPKVLSDDMKKLKARMVMLLPTSAQGLGAWVSACDTEDTVGHLGPWRDKDPALWCQLCLSSQHQAIERFYDKMQNAESGRGQVMSSLAELEDDFKEGYLETVAAYYEEQHPELTPLLEKERDGLRCRGNRSPVPDVEDPATEEPGESFCDKVMRWFQAMLQRLQTWWHGVLAWVKEKVVALVHAVQALWKQFQSFCCSLSELFMSSFQSYGAPRGDKEELTPQKCSEPQSSK

SEQ ID NO: 7064 - protein, 234 aa, Homo Sapiens; identical to SEQ ID NO: 7063

SEQ ID NO: 7065 - protein, 234 aa, Homo Sapiens; identical to SEQ ID NO: 7063

SEQ ID NO: 7066 - protein, 221 aa, Homo Sapiens
MCFPKVLSDDMKKLKARMVMLLPTSAQGLGAWVSACDTEDTVGHLGPWRDKDPALWCQLCLSSQHQAIERFYDKMQNAESGRGQVMSSLAELEDDFKEGYLETVAAYYEEQHPELTPLLEKERDGLRCRGNRSPVPDVEDPATEEPGESFCDKVMRWFQAMLQRLQTWWHGVLAWVKEKVVALVHAVQALWKQFQSFCCSLSELFMSSFQSYGATRGARRS

SEQ ID NO: 7067 - protein, 168 aa, Homo Sapiens
MCFPKVLSDDMKKLKARMVMSSLAELEDDFKEGYLETVAAYYEEQHPELTPLLEKERDGLRCRGNRSPVPDVEDPATEEPGESFCDKVMRWFQAMLQRLQTWWHGVLAWVKEKVVALVHAVQALWKQFQSFCCSLSELFMSSFQSYGAPRGDKEELTPQKCSEPQSSK

SEQ ID NO: 7068 - protein, 168 aa, Homo Sapiens; identical to SEQ ID NO: 7067

SEQ ID NO: 7069 - protein, 168 aa, Homo Sapiens; identical to SEQ ID NO: 7067

SEQ ID NO: 7070 - protein, 148 aa, Homo Sapiens
MCFPKVLSDDMKKLKARMVMSSLAELEELTPLLEKERDGLRCRGNRSPVPDVEDPATEEPGESFCDKVMRWFQAMLQRLQTWWHGVLAWVKEKVVALVHAVQALWKQFQSFCCSLSELFMSSFQSYGAPRGDKEELTPQKCSEPQSSK

SEQ ID NO: 7071 - protein, 178 aa, Homo Sapiens
MKKLKARMHQAIERFYDKMQNAESGRGQVMSSLAELEDDFKEGYLETVAAYYEEQHPELTPLLEKERDGLRCRGNRSPVPDVEDPATEEPGESFCDKVMRWFQAMLQRLQTWWHGVLAWVKEKVVALVHAVQALWKQFQSFCCSLSELFMSSFQSYGAPRGDKEELTPQKCSEPQSSK

SEQ ID NO: 7072 - protein, 54 aa, Homo Sapiens
MPRGFTWLRYLGIFLGVALGNEPLEMWPLTQNEECTVTGFLRDKLQYRSRLQYM

SEQ ID NO: 7073 - protein, 242 aa, Homo Sapiens
MPRGFTWLRYLGIFLGVALGNEPLEMWPLTQNEECTVTGFLRDKLQYRSRLQYMKHYFPINYKISVPYEGVFRIANVTRLQRAQVSERELRYLWVLVSLSATESVQDVLLEGHPSWKYLQEVETLLLNVQQGLTDVEVSPKVESVLSLLNAPGPNLKLVRPKALLDNCFRVMELLYCSCCKQSSVLNWQDCEVPSPQSCSPEPSLQYAATQLYPPPPWSPSSPPHSTGSVRPVRAQGEGLLP

SEQ ID NO: 7074 - protein, 242 aa, Homo Sapiens; identical to SEQ ID NO: 7073

SEQ ID NO: 7075 - protein, 217 aa, Homo Sapiens
MWPLTQNEECTVTGFLRDKLQYRSRLQYMKHYFPINYKISVPYEGVFRIANVTRLQRAQVSERELRYLWVLVSLSATESVQDVLLEGHPSWKYLQEVETLLLNVQQGLTDVEVSPKVESVLSLLNAPGPNLKLVRPKALLDNCFRVMELLYCSCCKQSSVLNWQDCEVPSPQSCSPEPSLQYAATQLYPPPPWSPSSPPHSTGSVRPVRAQGEGLLP

SEQ ID NO: 7076 - protein, 378 aa, Homo Sapiens
MVLLWLTLLLIALPCLLQTKEDPNPPITNLRMKAKAQQLTWDLNRNVTDIECVKDADYSMPAVNNSYCQFGAISLCEVTNYTVRVANPPFSTWILFPENSGKPWAGAENLTCWIHDVDFLSCSWAVGPGAPADVQYDLYLNVANRRQQYECLHYKTDAQGTRIGCRFDDISRLSSGSQSSHILVRGRSAAFGIPCTDKFVVFSQIEILTPPNMTAKCNKTHSFMHWKMRSHFNRKFRYELQIQKRMQPVITEQVRDRTSFQLLNPGTYTVQIRARERVYEFLSAWSTPQRFECDQEEGANTRAWRTSLLIALGTLLALVCVFVICRRYLVMQRLFPRIPHMKDPIGDSFQNDKLVVWEAGKAGLEECLVTEVQVVQKT

SEQ ID NO: 7077 - protein, 164 aa, Homo Sapiens
MVLLWLTLLLIALPCLLQTKEGGKPWAGAENLTCWIHDVDFLSCSWAVGPGAPADVQYDLYLNVANRRQQYECLHYKTDAQGTRIGCRFDDISRLSSGSQSSHILVRGRSAAFGIPCTDKFVVFSQIEILTPPNMTAKCNKTHSFMHWKMRSHFNRKFRYELQI

SEQ ID NO: 7078 - protein, 300 aa, Homo Sapiens
MVLLWLTLLLIALPCLLQTKEGGKPWAGAENLTCWIHDVDFLSCSWAVGPGAPADVQYDLYLNVANRRQQYECLHYKTDAQGTRIGCRFDDISRLSSGSQSSHILVRGRSAAFGIPCTDKFVVFSQIEILTPPNMTAKCNKTHSFMHWKMRSHFNRKFRYELQIQKRMQPVITEQVRDRTSFQLLNPGTYTVQIRARERVYEFLSAWSTPQRFECDQEEGANTRAWRTSLLIALGTLLALVCVFVICRRYLVMQRLFPRIPHMKDPIGDSFQNDKLVVWEAGKAGLEECLVTEVQVVQKT

SEQ ID NO: 7079 - protein, 137 aa, Homo Sapiens
MGLTSQLLPPLFFLLACAGNFVHGHKCDITLQEIIKTLNSLTEQKNTTEKETFCRAATVLRQFYSHHEKDTRCLGATAQQFHRHKQLIRFLKRLDRNLWGLAGLNSCPVKEANQSTLENFLERLKTIMREKYSKCSS

SEQ ID NO: 7080 - protein, 153 aa, Homo Sapiens [sequence omitted]

SEQ ID NO: 7081 - protein, 136 aa, Homo Sapiens
MGLTSQLLPPLFFLLACAGNFVHGHKCDITLQEIIKTLNSLTEQKTLCTELTVTDIFAASKQHACLPTSRHTGTICRPPSARVPSTSTRLQSPERTQLRRKPSAGLRLCSGSSTATMRRTLAAWVRLHSSSTGTSS

SEQ ID NO: 7082 - protein, 32 aa, Homo Sapiens
MAPLALHLLVLVPILLSLVASQDWKAERSQDP

SEQ ID NO: 7083 - protein, 150 aa, Homo Sapiens
MAPLALHLLVLVPILLSLVASQDWKAERSQDPFEKCMQDPDYEQLLKVTILEADNRIGGRIFTYRDQNTGWIGELGAMRMPSSHRILHKLCQGLGLNLTKFTQYDKNTWTEVHEVKLRNYVVEKVPEKLGYALRPQEKGHSPEDIYQMAL

SEQ ID NO: 7084 - protein, 71 aa, Homo Sapiens
MAPLALHLLVLVPILLSLVASQDWKAERSQDPFEKCMQDPDYEQLLKVVTWGLNRTLKPQRVIVVGAGVAG

SEQ ID NO: 7085 - protein, 567 aa, Homo Sapiens
MAPLALHLLVLVPILLSLVASQDWKAERSQDPFEKCMQDPDYEQLLKVVTWGLNRTLKPQRVIVVGAGVAGLVAAKVLSDAGHKVTILEADNRIGGRIFTYRDQNTGWIGELGAMRMPSSHRILHKLCQGLGLNLTKFTQYDKNTWTEVHEVKLRNYVVEKVPEKLGYALRPQEKGHSPEDIYQMALNQALKDLKALGCRKAMKKFERHTLLEYLLGEGNLSRPAVQLLGDVMSEDGFFYLSFAEALRAHSCLSDRLQYSRIVGGWDLLPRALLSSLSGLVLLNAPVVAMTQGPHDVHVQIETSPPARNLKVLKADVVLLTASGPAVKRITFSPPLPRHMQEALRRLHYVPATKVFLSFRRPFWREEHIEGGHSNTDRPSRMIFYPPPREGALLLASYTWSDAAAAFAGLSREEALRLALDDVAALHGPVVRQLWDGTGVVKRWAEDQHSQGGFVVQPPALWQTEKDDWTVPYGRIYFAGEHTAYPHGWVETAVKSALRAAIKINSRKGPASDTASPEGHASDMEGQGHVHGVASSPSHDLAKEEGSHPPVQGQLSLQNTTHTRTSH

SEQ ID NO: 7086 - protein, 82 aa, Homo Sapiens
MPNDDFCPGLTIKAMGAERAPQRQPCNTISHRESWPHWPCTSSSSSPSSSAWWPPRTGRLNAAKTPSRNACRILTMSSCSRW

SEQ ID NO: 7087 - protein, 106 aa, Homo Sapiens
MPNDDFCPGLTIKAMGAERAPQRQPCTLHLLVLVPILLSLVASQDWKAERSQDPFEKCMQDPDYEQLLKVVTWGLNRTLKPQRVIVVGAGVAGLVAAKVLSDAGHK

SEQ ID NO: 7088 - protein, 589 aa, Homo Sapiens
MPNDDFCPGLTIKAMGAERAPQRQPCTLHLLVLVPILLSLVASQDWKAERSQDPFEKCMQDPDYEQLLKVVTWGLNRTLKPQRVIVVGAGVAGLVAAKVLSDAGHKVTILEADNRIGGRIFTYRDQNTGWIGELGAMRMPSSHRILHKLCQGLGLNLTKFTQYDKNTWTEVHEVKLRNYVVEKVPEKLGYALRPQEKGHSPEDIYQMALNQALKDLKALGCRKAMKKFERHTLLEYLLGEGNLSRPAVQLLGDVMSEDGFFYLSFAEALRAHSCLSDRLQYSRIVGGWDLLPRALLSSLSGLVLLNAPVVAMTQGPHDVHVQIETSPPARNLKVLKADVVLLTASGPAVKRITFSPPLPRHMQEALRRLHYVPATKVFLSFRRPFWREEHIEGGHSNTDRPSRMIFYPPPREGALLLASYTWSDAAAAFAGLSREEALRLALDDVAALHGPVVRQLWDGTGVVKRWAEDQHSQGGFVVQPPALWQTEKDDWTVPYGRIYFAGEHTAYPHGWVETAVKSALRAAIKINSRKGPASDTASPEGHASDMEGQGHVHGVASSPSHDLAKEEGSHPPVQGQLSLQNTTHTRTSH

SEQ ID NO: 7089 - protein, 589 aa, Homo Sapiens; identical to SEQ ID NO: 7088

SEQ ID NO: 7090 - protein, 10 aa, Homo Sapiens
MGWLCSGLLF

SEQ ID NO: 7091 - protein, 66 aa, Homo Sapiens
MGWLCSGLLFPVSCLVLLQVASSGLFRMPCGERKRVEARRSGGRSGVEEMRGSGSLWEVDLRTDWN

SEQ ID NO: 7092 - protein, 66 aa, Homo Sapiens; identical to SEQ ID NO: 7091

SEQ ID NO: 7093 - protein, 66 aa, Homo Sapiens; identical to SEQ ID NO: 7091

SEQ ID NO: 7094 - protein, 64 aa, Homo Sapiens
MGWLCSGLLFPVSCLVLLQVASSGNMKVLQEPTCVSDYMSISTCEWKMNGPTNCSTELRLLYQL

SEQ ID NO: 7095 - protein, 120 aa, Homo Sapiens
MGWLCSGLLFPVSCLVLLQVASSGNMKVLQEPTCVSDYMSISTCEWKMNGPTNCSTELRLLYQLVFLLSEAHTCIPENNGGAGCVCHLLMDDVVSADNYTLDLWAGQQLLWKGSFKPSEH

SEQ ID NO: 7096 - protein, 120 aa, Homo Sapiens; identical to SEQ ID NO: 7095

SEQ ID NO: 7097 - protein, 825 aa, Homo Sapiens
MGWLCSGLLFPVSCLVLLQVASSGNMKVLQEPTCVSDYMSISTCEWKMNGPTNCSTELRLLYQLVFLLSEAHTCIPENNGGAGCVCHLLMDDVVSADNYTLDLWAGQQLLWKGSFKPSEHVKPRAPGNLTVHTNVSDTLLLTWSNPYPPDNYLYNHLTYAVNIWSENDPADFRIYNVTYLEPSLRIAASTLKSGISYRARVRAWAQCYNTTWSEWSPSTKWHNSYREPFEQHLLLGVSVSCIVILAVCLLCYVSITKIKKEWWDQIPNPARSRLVAIIIQDAQGSQWEKRSRGQEPAKCPHWKNCLTKLLPCFLEHNMKRDEDPHKAAKEMPFQGSGKSAWCPVEISKTVLWPESISVVRCVELFEAPVECEEEEEVEEEKGSFCASPESSRDDFQEGREGIVARLTESLFLDLLGEENGGFCQQDMGESCLLPPSGSTSAHMPWDEFPSAGPKEAPPWGKEQPLHLEPSPPASPTQSPDNLTCTETPLVIAGNPAYRSFSNSLSQSPCPRELGPDPLLARHLEEVEPEMPCVPQLSEPTTVPQPEPETWEQILRRNVLQHGAAAAPVSAPTSGYQEFVHAVEQGGTQASAVVGLGPPGEAGYKAFSSLLASSAVSPEKCGFGASSGEEGYKPFQDLIPGCPGDPAPVPVPLFTFGLDREPPRSPQSSHLPSSSPEHLGLEPGEKVEDMPKPPLPQEQATDPLVDSLGSGIVYSALTCHLCGHLKQCHGQEDGGQTPVMASPCCGCCCGDRSSPPTTPLRAPDPSPGGVPLEASLCPASLAPSGISEKSKSSSSFHPAPGNAQSSSQTPKIVNFVSVGPTYMRVS

SEQ ID NO: 7098 - protein, 825 aa, Homo Sapiens; identical to SEQ ID NO: 7097

SEQ ID NO: 7099 - protein, 124 aa, Homo Sapiens
MGWLCSGLLFPVSCLVLLQVASSGNMKVLQEPTCVSDYMSISTCEWKMNGPTNCSTELRLLYQLVFLLSEAHTCIPENNGGAGCVCHLLMDDVVSADNYTLDLWAGQQLLWKGSFKPSEHVQNL

SEQ ID NO: 7100 - protein, 810 aa, Homo Sapiens
MQKDARREGNMKVLQEPTCVSDYMSISTCEWKMNGPTNCSTELRLLYQLVFLLSEAHTCIPENNGGAGCVCHLLMDDVVSADNYTLDLWAGQQLLWKGSFKPSEHVKPRAPGNLTVHTNVSDTLLLTWSNPYPPDNYLYNHLTYAVNIWSENDPADFRIYNVTYLEPSLRIAASTLKSGISYRARVRAWAQCYNTTWSEWSPSTKWHNSYREPFEQHLLLGVSVSCIVILAVCLLCYVSITKIKKEWWDQIPNPARSRLVAIIIQDAQGSQWEKRSRGQEPAKCPHWKNCLTKLLPCFLEHNMKRDEDPHKAAKEMPFQGSGKSAWCPVEISKTVLWPESISVVRCVELFEAPVECEEEEEVEEEKGSFCASPESSRDDFQEGREGIVARLTESLFLDLLGEENGGFCQQDMGESCLLPPSGSTSAHMPWDEFPSAGPKEAPPWGKEQPLHLEPSPPASPTQSPDNLTCTETPLVIAGNPAYRSFSNSLSQSPCPRELGPDPLLARHLEEVEPEMPCVPQLSEPTTVPQPEPETWEQILRRNVLQHGAAAAPVSAPTSGYQEFVHAVEQGGTQASAVVGLGPPGEAGYKAFSSLLASSAVSPEKCGFGASSGEEGYKPFQDLIPGCPGDPAPVPVPLFTFGLDREPPRSPQSSHLPSSSPEHLGLEPGEKVEDMPKPPLPQEQATDPLVDSLGSGIVYSALTCHLCGHLKQCHGQEDGGQTPVMASPCCGCCCGDRSSPPTTPLRAPDPSPGGVPLEASLCPASLAPSGISEKSKSSSSFHPAPGNAQSSSQTPKIVNFVSVGPTYMRVS

SEQ ID NO: 7101 - protein, 133 aa, Homo Sapiens
PSTKWHNSYREPFEQHLLLGVSVSCIVILAVCLLCYVSITKIKKEWWDQIPNPARSRLVAIIIQDAQGSQWEKRSRGPWAPRLVNELLAAPSTASAADCPCCNCPRHVLPTRSWPTWRPTCLCLTELEAEPRN

SEQ ID NO: 7102 - protein, 49 aa, Homo Sapiens
  misc_feature (1)..(1): Xaa can be any naturally occurring amino acid
XCVCHLLMDDVVSADNYTLDLWAGQQLLWKGSFKPSEHVLPPLKRSWSQ

SEQ ID NO: 7103 - protein, 193 aa, Homo Sapiens
  misc_feature (1)..(1): Xaa can be any naturally occurring amino acid
XNVTYLEPSLRIAASTLKSGISYRARVRAWAQCYNTTWSEWSPSTKWHNSYREPFEQHLLLGVSVSCIVILAVCLLCYVSITKIKKEWWDQIPNPARSRLVAIIIQDAQGSQWEKRSRGQEPAKCPLQGTAGGGVFWKRGLLAKPPEFHWCVRHWKNCLTKLLPCFLEHNMKRDEDPHKAAKEMPFQGSGKSA

SEQ ID NO: 7104 - protein, 51 aa, Homo Sapiens
MGVVVGWIGDPGSGTLRIPVPVHKNHQLCTEEIFQGIGTLESQTVQGGTVE

SEQ ID NO: 7105 - protein, 134 aa, Homo Sapiens
MRMLLHLSLLALGAAYVYAIPTEIPTSALVKETLALLSTHRTLLIANETLRIPVPVHKNHQLCTEEIFQGIGTLESQTVQGGTVERLFKNLSLIKKYIDGQKKKCGEERRRVNQFLDYLQEFLGVMNTEWIIES

SEQ ID NO: 7106 - protein, 109 aa, Homo Sapiens
MIIVAHVLLILLGATEILQADLLPDEKISLLPPVNFTIKVTGLAQVLLQWKPNPDQEQRNVNLEYQVKINAPKEDDYETRITESKCVTILHKGFSASVRTILQNDHSLL

SEQ ID NO: 7107 - protein, 196 aa, Homo Sapiens
MIIVAHVLLILLGATEILQADLLPDEKISLLPPVNFTIKVTGLAQVLLQWKPNPDQEQRNVNLEYQVKINAPKEDDYETRITESKCVTILHKGFSASVRTILQNDHSLLASSWASAELHAPPGSPGTSIVNLTCTTNTTEDNYSRLRSYQVSLHCTWLVGTDAPEDTQYFLYYRYGSWTEECQEYSKDTLGRNIAC

SEQ ID NO: 7108 - protein, 420 aa, Homo Sapiens
MIIVAHVLLILLGATEILQADLLPDEKISLLPPVNFTIKVTGLAQVLLQWKPNPDQEQRNVNLEYQVKINAPKEDDYETRITESKCVTILHKGFSASVRTILQNDHSLLASSWASAELHAPPGSPGTSIVNLTCTTNTTEDNYSRLRSYQVSLHCTWLVGTDAPEDTQYFLYYRYGSWTEECQEYSKDTLGRNIACWFPRTFILSKGRDWLAVLVNGSSKHSAIRPFDQLFALHAIDQINPPLNVTAEIEGTRLSIQWEKPVSAFPIHCFDYEVKIHNTRNGYLQIEKLMTNAFISIIDDLSKYDVQVRAAVSSMCREAGLWSEWSQPIYVGNDEHKPLREWFVIVIMATICFILLILSLICKICHLWIKLFPPIPAPKSNIKDLFVTTNYEKAGSSETEIEVICYIEKPGVETLEDSVF

SEQ ID NO: 7109 - protein, 335 aa, Homo Sapiens
MIIVAHVLLILLGATEILQADLLPDEKISLLPPVNFTIKVTGLAQVLLQWKPNPDQEQRNVNLEYQVKINAPKEDDYETRITESKCVTILHKGFSASVRTILQNDHSLLASSWASAELHAPPGSPGTSIVNLTCTTNTTEDNYSRLRSYQVSLHCTWLVGTDAPEDTQYFLYYRYGSWTEECQEYSKDTLGRNIACWFPRTFILSKGRDWLAVLVNGSSKHSAIRPFDQLFALHAIDQINPPLNVTAEIEGTRLSIQWEKPVSAFPIHCFDYEVKIHNTRNGYLQIEKLMTNAFISIIDDLSKYDVQVRAAVSSMCREAGLWSEWSQPIYVGFSR

SEQ ID NO: 7110 - protein, 335 aa, Homo Sapiens; identical to SEQ ID NO: 7109

SEQ ID NO: 7111 - protein, 333 aa, Homo Sapiens
MIIVAHVLLILLGATEILQADLLPDEKISLLPPVNFTIKVTGLAQVLLQWKPNPDQEQRNVNLEYQVKINAPKEDDYETRITESKCVTILHKGFSASVRTILQNDHSLLASSWASAELHAPPGSPGTSIVNLTCTTNTTEDNYSRLRSYQVSLHCTWLVGTDAPEDTQYFLYYRYGSWTEECQEYSKDTLGRNIACWFPRTFILSKGRDWLAVLVNGSSKHSAIRPFDQLFALHAIDQINPPLNVTAEIEGTRLSIQWEKPVSAFPIHCFDYEVKIHNTRNGYLQIEKLMTNAFISIIDDLSKYDVQVRAAVSSMCREAGLWSEWSQPIYVGK

SEQ ID NO: 7112 - protein, 420 aa, Homo Sapiens; identical to SEQ ID NO: 7108

SEQ ID NO: 7113 - protein, 378 aa, Homo Sapiens
MIIVAHVLLILLGATEILQADLLPDEKISLLPPVNFTIKVTGLAQVLLQWKPNPDQEQRNVNLEYQVKINAPKEDDYETRITESKCVTILHKGFSASVRTILQNDHSLLASSWASAELHAPPGSPGTSIVNLTCTTNTTEDNYSRLRSYQVSLHCTWLVGTDAPEDTQYFLYYRYGSWTEECQEYSKDTLGRNIACWFPRTFILSKGRDWLAVLVNGSSKHSAIRPFDQLFALHAIDQINPPLNVTAEIEGTRLSIQWEKPVSAFPIHCFDYEVKIHNTRNGYLQIEKLMTNAFISIIDDLSKYDVQVRAAVSSMCREAGLWSEWSQPIYVGNDEHKPLREWFVIVIMATICFILLILSLICKIKLGPVRRKLKSSVI

SEQ ID NO: 7114 - protein, 333 aa, Homo Sapiens; identical to SEQ ID NO: 7111

SEQ ID NO: 7115 - protein, 325 aa, Homo Sapiens
MIIVAHVLLILLGATEILQADLLPDEKISLLPPVNFTIKVTGLAQVLLQWKPNPDQEQRNVNLEYQVKINAPKEDDYETRITESKCVTILHKGFSASVRTILQNDHSLLASSWASAELHAPPGSPGTSIVNLTCTTNTTEDNYSRLRSYQVSLHCTWLVGTDAPEDTQYFLYYRYGSWTEECQEYSKDTLGRNIACWFPRTFILSKGRDWLAVLVNGSSKHSAIRPFDQLFALHAIGNDEHKPLREWFVIVIMATICFILLILSLICKICHLWIKLFPPIPAPKSNIKDLFVTTNYEKAGSSETEIEVICYIEKPGVETLEDSVF

SEQ ID NO: 7116 - protein, 136 aa, Homo Sapiens
MCESSKEALAENNLNLPKMAEKDGCFQSGFNEETCLVKIITGLLEFEVYLEYLQNRFESSEEQARAVQMSTKVLIQFLQKKAKNLDAITTPDPTTNASLLTKLQAQNQWLQDMTTHLILRSFKEFLQSSLRALRQM

SEQ ID NO: 7117 - protein, 122 aa, Homo Sapiens
MCESSKEALAENNLNLPKMAEKDGCFQSGFNEETCLVKIITGLLEFEVYLEYLQNRFESSEEQARAVQMSTKVLIQFLQKKVGVSSFPQLGVGEDRLKDSVLDNSGMQCHFQKRRLHVNKRV

SEQ ID NO: 7118 - protein, 189 aa, Homo Sapiens
MNSFSTIPPGEDSKDVAAPHRQPLTSSERIDKQIRYILDGISALRKETCNKSNMCESSKEALAENNLNLPKMAEKDGCFQSGFNEETCLVKIITGLLEFEVYLEYLQNRFESSEEQARAVQMSTKVLIQFLQKKAKNLDAITTPDPTTNASLLTKLQAQNQWLQDMTTHLILRSFKEFLQSSLRALRQM

SEQ ID NO: 7119 - protein, 152 aa, Homo Sapiens
MNSFSTSAFGPVAFSLGLLLVLPAAFPAPVPPGEDSKDVAAPHRQPLTSSERIDKQIRYILDGISALRKETCNKSNMCESSKEALAENNLNLPKMAEKDGCFQSGFNEETCLVKIITGLLEFEVYLEYLQNRFESSEEQARAVQMSTKVLIQ

SEQ ID NO: 7120 - protein, 212 aa, Homo Sapiens
MNSFSTSAFGPVAFSLGLLLVLPAAFPAPVPPGEDSKDVAAPHRQPLTSSERIDKQIRYILDGISALRKETCNKSNMCESSKEALAENNLNLPKMAEKDGCFQSGFNEETCLVKIITGLLEFEVYLEYLQNRFESSEEQARAVQMSTKVLIQFLQKKAKNLDAITTPDPTTNASLLTKLQAQNQWLQDMTTHLILRSFKEFLQSSLRALRQM

SEQ ID NO: 7121 - protein, 212 aa, Homo Sapiens; identical to SEQ ID NO: 7120

SEQ ID NO: 7122 - protein, 198 aa, Homo Sapiens
MNSFSTSAFGPVAFSLGLLLVLPAAFPAPVPPGEDSKDVAAPHRQPLTSSERIDKQIRYILDGISALRKETCNKSNMCESSKEALAENNLNLPKMAEKDGCFQSGFNEETCLVKIITGLLEFEVYLEYLQNRFESSEEQARAVQMSTKVLIQFLQKKVGVSSFPQLGVGEDRLKDSVLDNSGMQCHFQKRRLHVNKRV

SEQ ID NO: 7123 - protein, 171 aa, Homo Sapiens [sequence omitted]

SEQ ID NO: 7124 - protein, 365 aa, Homo Sapiens [sequence omitted]

SEQ ID NO: 7125 - protein, 468 aa, Homo Sapiens
MLAVGCALLAALLAAPGAALAPRRCPAQEVARGVLTSLPGDSVTLTCPGVEPEDNATVHWVLRKPAAGSHPSRWAGMGRRLLLRSVQLHDSGNYSCYRAGRPAGTVHLLVDVPPEEPQLSCFRKSPLSNVVCEWGPRSTPSLTTKAVLLVRKFQNSPAEDFQEPCQYSQESQKFSCQLAVPEGDSSFYIVSMCVASSVGSKFSKTQTFQGCGILQPDPPANITVTAVARNPRWLSVTWQDPHSWNSSFYRLRFELRYRAERSKTFTTWMVKDLQHHCVIHDAWSGLRHVVQLRAQEEFGQGEWSEWSPEAMGTPWTESRSPPAENEVSTPMQALTTNKDDDNILFRDSANATSLPVQDSSSVPLPTFLVAGGSLAFGTLLCIAIVLRFKKTWKLRALKEGKTSMHPPYSLGQLVPERPRPTPVLVPLISPPVSPSSLGSDNTSSHNRPDARDPRSPYDISNTDYFFPR

SEQ ID NO: 7126 - protein, 352 aa, Homo Sapiens
MLAVGCALLAALLAAPGAALAPRRCPAQEVARGVLTSLPGDSVTLTCPGVEPEDNATVHWVLRKPAAGSHPSRWAGMGRRLLLRSVQLHDSGNYSCYRAGRPAGTVHLLVDVPPEEPQLSCFRKSPLSNVVCEWGPRSTPSLTTKAVLLVRKFQNSPAEDFQEPCQYSQESQKFSCQLAVPEGDSSFYIVSMCVASSVGSKFSKTQTFQGCGILQPDPPANITVTAVARNPRWLSVTWQDPHSWNSSFYRLRFELRYRAERSKTFTTWMVKDLQHHCVIHDAWSGLRHVVQLRAQEEFGQGEWSEWSPEAMGTPWTDRLSPRCPGWSTAVQSQLTATSASWVQAILPPQPPK

SEQ ID NO: 7127 - protein, 190 aa, Homo Sapiens
  misc_feature (1)..(1): Xaa can be any naturally occurring amino acid
XGSKFSKTQTFQGCGILQPDPPANITVTAVARNPRWLSVTWQDPHSWNSSFYRLRFELRYRAERSKTFTTWMVKDLQHHCVIHDAWSGLRHVVQLRAQEEFGQGEWSEWSPEAMGTPWTESRSPPAENEVSTPMQALTTNKDDDNILFRDSANATSLPVQDSSSVPLPTFLVAGGSLAFGTLLCIAIVLR

SEQ ID NO: 7128 - protein, 294 aa, Homo Sapiens
  misc_feature (1)..(1): Xaa can be any naturally occurring amino acid
XRRLLLRSVQLHDSGNYSCYRAGRPAGTVHLLVDVPPEEPQLSCFRKSPLSNVVCEWGPRSTPSLTTKAVLLVRKFQNSPAEDFQEPCQYSQESQKFSCQLAVPEGDSSFYIVSMCVASSVGSKFSKTQTFQGCGILQPDPPANITVTAVARNPRWLSVTWQDPHSWNSSFYRLRFELRYRAERSKTFTTWMVKDLQHHCVIHDAWSGLRHVVQLRAQEEFGQGEWSEWSPEAMGTPWTGFSPQTIPGGIWDPAGESRSPPAENEVSTPMQALTTNKDDDNILFRDSANATSLP

SEQ ID NO: 7129 - protein, 66 aa, Homo Sapiens
MLTLQTWLVQALFIFLTTESTELKNTSGLMFQILQRVILPSGHLTLLQGTILIQKIKCIQMAISLM

SEQ ID NO: 7130 - protein, 918 aa, Homo Sapiens
MLTLQTWLVQALFIFLTTESTGELLDPCGYISPESPVVQLHSNFTAVCVLKEKCMDYFHVNANYIVWKTNHFTIPKEQYTIINRTASSVTFTDIASLNIQLTCNILTFGQLEQNVYGITIISGLPPEKPKNLSCIVNEGKKMRCEWDGGRETHLETNFTLKSEWATHKFADCKAKRDTPTSCTVDYSTVYFVNIEVWVEAENALGKVTSDHINFDPVYKVKPNPPHNLSVINSEELSSILKLTWTNPSIKSVIILKYNIQYRTKDASTWSQIPPEDTASTRSSFTVQDLKPFTEYVFRIRCMKEDGKGYWSDWSEEASGITYEDRPSKAPSFWYKIDPSHTQGYRTVQLVWKTLPPFEANGKILDYEVTLTRWKSHLQNYTVNATKLTVNLTNDRYLATLTVRNLVGKSDAAVLTIPACDFQATHPVMDLKAFPKDNMLWVEWTTPRESVKKYILEWCVLSDKAPCITDWQQEDGTVHRTYLRGNLAESKCYLITVTPVYADGPGSPESIKAYLKQAPPSKGPTVRTKKVGKNEAVLEWDQLPVDVQNGFIRNYTIFYRTIIGNETAVNVDSSHTEYTLSSLTSDTLYMVRMAAYTDEGGKDGPEFTFTTPKFAQGEIEAIVVPVCLAFLLTTLLGVLFCFNKRDLIKKHIWPNVPDPSKSHIAQWSPHTPPRHNFNSKDQMYSDGNFTDVSVVEIEANDKKPFPEDLKSLDLFKKEKINTEGHSSGIGGSSCMSSSRPSISSSDENESSQNTSSTVQYSTVVHSGYRHQVPSVQVFSRSESTQPLLDSEERPEDLQLVDHVDGGDGILPRQQYFKQNCSQHESSPDISHFERSKQVSSVNEEDFVRLKQQISDHISQSCGSGQMKMFQEVSAADAFGPGTEGQVERFETVGMEAATDEGMPKSYLPQTVRQGGYMPQ

SEQ ID NO: 7131 - protein, 918 aa, Homo Sapiens; identical to SEQ ID NO: 7130

SEQ ID NO: 7132 - protein, 857 aa, Homo Sapiens
MLTLQTWLVQALFIFLTTESTGELLDPCGYISPESPVVQLHSNFTAVCVLKEKCMDYFHVNANYIVWKTNHFTIPKEQYTIINRTASSVTFTDIASLNIQLTCNILTFGQLEQNVYGITIISGLPPEKPKNLSCIVNEGKKMRCEWDGGRETHLETNFTLKSEWATHKFADCKAKRDTPTSCTVDYSTVYFVNIEVWVEAENALGKVTSDHINFDPVYKVKPNPPHNLSVINSEELSSILKLTWTNPSIKSVIILKYNIQYRTKDASTWSQIPPEDTASTRSSFTVQDLKPFTEYVFRIRCMKEDGKGYWSDWSEEASGITYEDRPSKAPSFWYKIDPSHTQGYRTVQLVWKTLPPFEANGKILDYEVTLTRWKSHLQNYTVNATKLTVNLTNDRYLATLTVRNLVGKSDAAVLTIPACDFQGNLAESKCYLITVTPVYADGPGSPESIKAYLKQAPPSKGPTVRTKKVGKNEAVLEWDQLPVDVQNGFIRNYTIFYRTIIGNETAVNVDSSHTEYTLSSLTSDTLYMVRMAAYTDEGGKDGPEFTFTTPKFAQGEIEAIVVPVCLAFLLTTLLGVLFCFNKRDLIKKHIWPNVPDPSKSHIAQWSPHTPPRHNFNSKDQMYSDGNFTDVSVVEIEANDKKPFPEDLKSLDLFKKEKINTEGHSSGIGGSSCMSSSRPSISSSDENESSQNTSSTVQYSTVVHSGYRHQVPSVQVFSRSESTQPLLDSEERPEDLQLVDHVDGGDGILPRQQYFKQNCSQHESSPDISHFERSKQVSSVNEEDFVRLKQQISDHISQSCGSGQMKMFQEVSAADAFGPGTEGQVERFETVGMEAATDEGMPKSYLPQTVRQGGYMPQ

SEQ ID NO: 7133 - protein, 329 aa, Homo Sapiens
MLTLQTWLVQALFIFLTTESTGELLDPCGYISPESPVVQLHSNFTAVCVLKEKCMDYFHVNANYIVWKTNHFTIPKEQYTIINRTASSVTFTDIASLNIQLTCNILTFGQLEQNVYGITIISGLPPEKPKNLSCIVNEGKKMRCEWDGGRETHLETNFTLKSEWATHKFADCKAKRDTPTSCTVDYSTVYFVNIEVWVEAENALGKVTSDHINFDPVYKVKPNPPHNLSVINSEELSSILKLTWTNPSIKSVIILKYNIQYRTKDASTWSQIPPEDTASTRSSFTVQDLKPFTEYVFRIRCMKEDGKGYWSDWSEEASGITYEDNIASF

SEQ ID NO: 7134 - protein, 918 aa, Homo Sapiens; identical to SEQ ID NO: 7130

SEQ ID NO: 7135 - protein, 329 aa, Homo Sapiens; identical to SEQ ID NO: 7133

SEQ ID NO: 7136 - protein, 333 aa, Homo Sapiens
MLTLQTWLVQALFIFLTTESTGELLDPCGYISPESPVVQLHSNFTAVCVLKEKCMDYFHVNANYIVWKTNHFTIPKEQYTIINRTASSVTFTDIASLNIQLTCNILTFGQLEQNVYGITIISGLPPEKPKNLSCIVNEGKKMRCEWDGGRETHLETNFTLKSEWATHKFADCKAKRDTPTSCTVDYSTVYFVNIEVWVEAENALGKVTSDHINFDPVYKVKPNPPHNLSVINSEELSSILKLTWTNPSIKSVIILKYNIQYRTKDASTWSQIPPEDTASTRSSFTVQDLKPFTEYVFRIRCMKEDGKGYWSDWSEEASGITYEDTLDKPLGSG

SEQ ID NO: 7137 - protein, 203 aa, Homo Sapiens
MLTLQTWLVQALFIFLTTESTGELLDPCGYISPESPVVQLHSNFTAVCVLKEKLKPNPPHNLSVINSEELSSILKLTWTNPSIKSVIILKYNIQYRTKDASTWSQIPPEDTASTRSSFTVQDLKPFTEYVFRIRCMKEDGKGYWSDWSEEASGITYEDKLKNTSGLMFQILQRVILPSGHLTLLQGTILIQKIKCIQMAISLM

SEQ ID NO: 7138 - protein, 55 aa, Homo Sapiens
MLTLQTWLVQALFIFLTTESTGQHTSLLIAKQNVTPPPHALLIILLCILSTLKSG

SEQ ID NO: 7139 - protein, 115 aa, Homo Sapiens
MFHVSFRYIFGLPPLILVLLPVASSDCDIEGKDGKQYESVLMVSIDQLLDSMKEIGSNCLNNEFNFFKRHICDANKEENKSLKEQKKLNDLCFLKRLLQEIKTCWNKILMGTKEH

SEQ ID NO: 7140 - protein, 159 aa, Homo Sapiens
MFHVSFRYIFGLPPLILVLLPVASSDCDIEGKDGKQYESVLMVSIDQLLDSMKEIGSNCLNNEFNFFKRHICDANKEGMFLFRAARKLRQFLKMNSTGDFDLHLLKVSEGTTILLNCTGQEENKSLKEQKKLNDLCFLKRLLQEIKTCWNKILMGTKEH

SEQ ID NO: 7141 - protein, 177 aa, Homo Sapiens
MFHVSFRYIFGLPPLILVLLPVASSDCDIEGKDGKQYESVLMVSIDQLLDSMKEIGSNCLNNEFNFFKRHICDANKEGMFLFRAARKLRQFLKMNSTGDFDLHLLKVSEGTTILLNCTGQVKGRKPAALGEAQPTKSLEENKSLKEQKKLNDLCFLKRLLQEIKTCWNKILMGTKEH

SEQ ID NO: 7142 - protein, 133 aa, Homo Sapiens
MFHVSFRYIFGLPPLILVLLPVASSDCDIEGKDGKQYESVLMVSIDQLLDSMKEIGSNCLNNEFNFFKRHICDANKVKGRKPAALGEAQPTKSLEENKSLKEQKKLNDLCFLKRLLQEIKTCWNKILMGTKEH

SEQ ID NO: 7143 - protein, 71 aa, Homo Sapiens
MFHVSFRYIFGLPPLILVLLPVASSDCDIEGKDGKQYESVLMVSIDQLLNQPYKKKEKRTERKQQSAMSNN

SEQ ID NO: 7144 - protein, 71 aa, Homo Sapiens; identical to SEQ ID NO: 7143

SEQ ID NO: 7145 - protein, 37 aa, Homo Sapiens
MFHVSFRYIFGLPPLILVLLPVASSDCDIEGQHERNW

SEQ ID NO: 7146 - protein, 37 aa, Homo Sapiens; identical to SEQ ID NO: 7145

SEQ ID NO: 7147 - protein, 65 aa, Homo Sapiens
AAMYEIKVRSIPDHYFKGFWSEWSPSYYFRTPEINNSSGLSLSYGPVSPIIRRLWNIFVRNQEKI

SEQ ID NO: 7148 - protein, 52 aa, Homo Sapiens
MTILGTTFGMVFSLLQVVSGESGYAQNGDLEDAELDDYSFSCYSQLEVNGSQ

SEQ ID NO: 7149 - protein, 59 aa, Homo Sapiens
MTILGTTFGMVFSLLQVVSGESGYAQNGDLEDAELDDYSFSCYSQLEVNGSQHSLTCAF

SEQ ID NO: 7150 - protein, 150 aa, Homo Sapiens
MTILGTTFGMVFSLLQVVSGESGYAQNGDLEDAELDDYSFSCYSQLEVNGSQHSLTCAFEDPDVNITNLEFEICGALVEVKCLNFRKLQEIYFIETKKFLLIGKSNICVKVGEKSLTCKKIDLTTIGKKLYIKVWLSLLGYLKTLCLDIL

SEQ ID NO: 7151 - protein, 180 aa, Homo Sapiens
MTILGTTFGMVFSLLQVVSGESGYAQNGDLEDAELDDYSFSCYSQLEVNGSQHSLTCAFEDPDVNITNLEFEICGALVEVKCLNFRKLQEIYFIETKKFLLIGKSNICVKVGEKSLTCKKIDLTTIVKPEAPFDLSVVYREGANDFVVTFNTSHLQKKYVKVLMHDVAYRQEKDENKWTD

SEQ ID NO: 7152 - protein, 459 aa, Homo Sapiens
MTILGTTFGMVFSLLQVVSGESGYAQNGDLEDAELDDYSFSCYSQLEVNGSQHSLTCAFEDPDVNITNLEFEICGALVEVKCLNFRKLQEIYFIETKKFLLIGKSNICVKVGEKSLTCKKIDLTTIVKPEAPFDLSVVYREGANDFVVTFNTSHLQKKYVKVLMHDVAYRQEKDENKWTHVNLSSTKLTLLQRKLQPAAMYEIKVRSIPDHYFKGFWSEWSPSYYFRTPEINNSSGEMDPILLTISILSFFSVALLVILACVLWKKRIKPIVWPSLPDHKKTLEHLCKKPRKNLNVSFNPESFLDCQIHRVDDIQARDEVEGFLQDTFPQQLEESEKQRLGGDVQSPNCPSEDVVITPESFGRDSSLTCLAGNVSACDAPILSSSRSLDCRESGKNGPHVYQDLLLSLGTTNSTLPPPFSLQSGILTLNPVAQGQPILTSLGSNQEEAYVTMSSFYQNQ

SEQ ID NO: 7153 - protein, 261 aa, Homo Sapiens
MTILGTTFGMVFSLLQVVSGESGYAQNGDLEDAELDDYSFSCYSQLEVNGSQHSLTCAFEDPDVNITNLEFEICGALVEVKCLNFRKLQEIYFIETKKFLLIGKSNICVKVGEKSLTCKKIDLTTIVKPEAPFDLSVVYREGANDFVVTFNTSHLQKKYVKVLMHDVAYRQEKDENKWTHVNLSSTKLTLLQRKLQPAAMYEIKVRSIPDHYFKGFWSEWSPSYYFRTPEINNSSGLSLSYGPVSPIIRRLWNIFVRNQEK

SEQ ID NO: 7154 - protein, 144 aa, Homo Sapiens
MLLAMVLTSALLLCSVAGQGCPTLAGILDINFLINKMQEDPASKCHCSANVTSCLCLGIPSDNCTRPCFSERLSQMTNTTMQTRYPLIFSRVKKSVEVLKNNKCPYFSCEQPCNQTTAGNALTFLKSLLEIFQKEKMRGMRGKI

SEQ ID NO: 7155 - protein, 457 aa, Homo Sapiens
MAWPKLPAPWLLLCTWLPAGCLSLLVTVQHTERYVTLFASIILKCDYTTSAQLQDVVVTWRFKSFCKDPIFDYYSASYQAALSLGQDPSNDCNDNQREVRIVAQRRGQNEPVLGVDYRQRKITIQNPLARHRYMKQAQALGPQMMGKPLYWGADRSSQVSSYPMHPLLQRDLSLPSSLPQMPMTQTTNQPPIANGVLEYLEKELRNLNLAQPLPPDLKGRFGHPCSMLSSLGSEVVERRIIHLPPLIRDLSSSRRTSDSLHQQWLTPIPSRPWDLREGRSHHHYPDFHQELQDRGPKSWALERRELDPSWSGRHRSSRLNGSPIHWSDRDSLSDVPSSSEARWRPSHPPFRSRCQERPRRPSPRESTQRHGRRRRHRSYSPPLPSGLSSWSSEEDKERQPQSWRAHRRGSHSPHWPEEKPPSYRSLDITPGKNSRKKGSVERRSEKDSSHSGRSVVI

SEQ ID NO: 7156 - protein, 546 aa, Homo Sapiens
MAWPKLPAPWLLLCTWLPAGCLSLLVTVQHTERYVTLFASIILKCDYTTSAQLQDVVVTWRFKSFCKDPIFDYYSASYQAALSLGQDPSNDCNDNQREVRIVAQRRGQNEPVLGVDYRQRKITIQNRADLVINEVMWWDHGVYYCTIEAPGDTSGDPDKEVKLIVLHWLTVIFIILGALLLLLLIGVCWCQCCPQYCCCYIRCPCCPAHCCCPEEALARHRYMKQAQALGPQMMGKPLYWGADRSSQVSSYPMHPLLQRDLSLPSSLPQMPMTQTTNQPPIANGVLEYLEKELRNLNLAQPLPPDLKGRFGHPCSMLSSLGSEVVERRIIHLPPLIRDLSSSRRTSDSLHQQWLTPIPSRPWDLREGRSHHHYPDFHQELQDRGPKSWALERRELDPSWSGRHRSSRLNGSPIHWSDRDSLSDVPSSSEARWRPSHPPFRSRCQERPRRPSPRESTQRHGRRRRHRSYSPPLPSGLSSWSSEEDKERQPQSWRAHRRGSHSPHWPEEKPPSYRSLDITPGKNSRKKGSVERRSEKDSSHSGRSVVI

SEQ ID NO: 7157 - protein, 546 aa, Homo Sapiens; identical to SEQ ID NO: 7156

SEQ ID NO: 7158 - protein, 265 aa, Homo Sapiens
MAWPKLPAPWLLLCTWLPAGCLSLLVTVQHTERYVTLFASIILKCDYTTSAQLQDVVVTWRFKSFCKDPIFDYYSASYQAALSLGQDPSNDCNDNQREVRIVAQRRGQNEPVLGVDYRQRKITIQNRADLVINEVMWWDHGVYYCTIEAPGDTSGDPDKEVKLIVLHWLTVIFIILGALLLLLLIGVCWCQCCPQYCCCYIRCPCCPAHCCCPEEALARHRYMKQAQALGPQMMGKPLYWGADRSSQVSSYPMHPLLQRASRRCQ

SEQ ID NO: 7159 - protein, 502 aa, Homo Sapiens
MAWPKLPAPWLLLCTWLPAGCLSLLVTVQHTERYVTLFASIILKCDYTTSAQLQDVVVTWRFKSFCKDPIFDYYSASYQAALSLGQDPSNDCNDNQREVRIVAQRRGQNEPVLGVDYRQRKITIQNRADLVINEVMWWDHGVYYCTIEAPGDTSGDPDKEVKLIVLHWLTVIFIILGALLLLLLIGVCWCQCCPQYCCCYIRCPCCPAHCCCPEEDLSLPSSLPQMPMTQTTNQPPIANGVLEYLEKELRNLNLAQPLPPDLKGRFGHPCSMLSSLGSEVVERRIIHLPPLIRDLSSSRRTSDSLHQQWLTPIPSRPWDLREGRSHHHYPDFHQELQDRGPKSWALERRELDPSWSGRHRSSRLNGSPIHWSDRDSLSDVPSSSEARWRPSHPPFRSRCQERPRRPSPRESTQRHGRRRRHRSYSPPLPSGLSSWSSEEDKERQPQSWRAHRRGSHSPHWPEEKPPSYRSLDITPGKNSRKKGSVERRSEKDSSHSGRSVVI

SEQ ID NO: 7160 - protein, 167 aa, Homo Sapiens
MDRVLLRWISLFWLTAMVEGLQVTVPDKKKVAMLFQPTVLRCHFSTSSHQPAVVQWKFKSYCQDRMGESLGMSSTRAQSLSKRNLEWDPYLDCLDSRRTVRVVASKQGSTVTLGDFYRGREITIVHDADLQIGKLMWGDSGLYYCIITTPDDLEGKNEDSVELLVLE

SEQ ID NO: 7161 - protein, 620 aa, Homo Sapiens
MDRVLLRWISLFWLTAMVEGLQVTVPDKKKVAMLFQPTVLRCHFSTSSHQPAVVQWKFKSYCQDRMGESLGMSSTRAQSLSKRNLEWDPYLDCLDSRRTVRVVASKQGSTVTLGDFYRGREITIVHDADLQIGKLMWGDSGLYYCIITTPDDLEGKNEDSVELLVLEWVFVGLVLLGVFLFFVLVGICWCQCCPHSCCCYVRCPCCPDSCCCPQALYEAGKAAKAGYPPSVSGVPGPYSIPSVPLGGAPSSGMLMDKPHPPPLAPSDSTGGSHSVRKGYRIQADKERDSMKVLYYVEKELAQFDPARRMRGRYNNTISELSSLHEEDSNFRQSFHQMRSKQFPVSGDLESNPDYWSGVMGGSSGASRGPSAMEYNKEDRESFRHSQPRSKSEMLSRKNFATGVPAVSMDELAAFADSYGQRPRRADGNSHEARGGSRFERSESRAHSGFYQDDSLEEYYGQRSRSREPLTDADRGWAFSPARRRPAEDAHLPRLVSRTPGTAPKYDHSYLGSARERQARPEGASRGGSLETPSKRSAQLGPRSASYYAWSPPGTYKAGSSQDDQEDASDDALPPYSELELTRGPSYRGRDLPYHSNSEKKRKKEPAKKTNDFPTRMSLVV

SEQ ID NO: 7162 - protein, 580 aa, Homo Sapiens
MDRVLLRWISLFWLTAMVEGLQVTVPDKKKVAMLFQPTVLRCHFSTSSHQPAVVQWKFKSYCQDRMGESLGMSSTRAQSLSKRNLEWDPYLDCLDSRRTVRVVASKQGSTVTLGDFYRGREITIVHDADLQIGKLMWGDSGLYYCIITTPDDLEGKNEDSVELLVLGRTGLLADLLPSFAVEIMPEWVFVGLVLLGVFLFFVLVGICWCQCCPHSCCCYVRCPCCPDSCCCPQAFRKGYRIQADKERDSMKVLYYVEKELAQFDPARRMRGRYNNTISELSSLHEEDSNFRQSFHQMRSKQFPVSGDLESNPDYWSGVMGGSSGASRGPSAMEYNKEDRESFRHSQPRSKSEMLSRKNFATGVPAVSMDELAAFADSYGQRPRRADGNSHEARGGSRFERSESRAHSGFYQDDSLEEYYGQRSRSREPLTDADRGWAFSPARRRPAEDAHLPRLVSRTPGTAPKYDHSYLGSARERQARPEGASRGGSLETPSKRSAQLGPRSASYYAWSPPGTYKAGSSQDDQEDASDDALPPYSELELTRGPSYRGRDLPYHSNSEKKRKKEPAKKTNDFPTRMSLVV

SEQ ID NO: 7163 - protein, 639 aa, Homo Sapiens
MDRVLLRWISLFWLTAMVEGLQVTVPDKKKVAMLFQPTVLRCHFSTSSHQPAVVQWKFKSYCQDRMGESLGMSSTRAQSLSKRNLEWDPYLDCLDSRRTVRVVASKQGSTVTLGDFYRGREITIVHDADLQIGKLMWGDSGLYYCIITTPDDLEGKNEDSVELLVLGRTGLLADLLPSFAVEIMPEWVFVGLVLLGVFLFFVLVGICWCQCCPHSCCCYVRCPCCPDSCCCPQALYEAGKAAKAGYPPSVSGVPGPYSIPSVPLGGAPSSGMLMDKPHPPPLAPSDSTGGSHSVRKGYRIQADKERDSMKVLYYVEKELAQFDPARRMRGRYNNTISELSSLHEEDSNFRQSFHQMRSKQFPVSGDLESNPDYWSGVMGGSSGASRGPSAMEYNKEDRESFRHSQPRSKSEMLSRKNFATGVPAVSMDELAAFADSYGQRPRRADGNSHEARGGSRFERSESRAHSGFYQDDSLEEYYGQRSRSREPLTDADRGWAFSPARRRPAEDAHLPRLVSRTPGTAPKYDHSYLGSARERQARPEGASRGGSLETPSKRSAQLGPRSASYYAWSPPGTYKAGSSQDDQEDASDDALPPYSELELTRGPSYRGRDLPYHSNSEKKRKKEPAKKTNDFPTRMSLVV

SEQ ID NO: 7164 - protein, 437 aa, Homo Sapiens
MDRVLLRWISLFWLTAMVEGLQVTVPDKKKVAMLFQPTVLRCHFSTSSHQPAVVQWKFKSYCQDRMGESLGMSSTRAQSLSKRNLEWDPYLDCLDSRRTVRVVASKQGSTVTLGDFYRGREITIVHDADLQIGKLMWGDSGLYYCIITTPDDLEGKNEDSVELLVLGRTGLLADLLPSFAVEIMPEWVFVGLVLLGVFLFFVLVGICWCQCCPHSCCCYVRCPCCPDSCCCPQALYEAGKAAKAGYPPSVSGVPGPYSIPSVPLGGAPSSGMLMDKPHPPPLAPSDSTGGSHSVRKGYRIQADKERDSMKVLYYVEKELAQFDPARRMRGRYNNTISELSSLHEEDSNFRQSFHQMRSKQFPVSGDLESNPDYWSGVMGGSSGASRGPSAMEYNKEDRESFRHRMTFQPGCPLWSDVVNISLDNEKSDMDYGDKTQI

SEQ ID NO: 7165 - protein, 531 aa, Homo Sapiens
MDRVLLRWISLFWLTAMVEGLQVTVPDKKKVAMLFQPTVLRCHFSTSSHQPAVVQWKFKSYCQDRMGESLGMSSTRAQSLSKRNLEWDPYLDCLDSRRTVRVVASKQGSTVTLGDFYRGREITIVHDADLQIGKLMWGDSGLYYCIITTPDDLEGKNEDSVELLVLGRTGLLADLLPSFAVEIMPVRKGYRIQADKERDSMKVLYYVEKELAQFDPARRMRGRYNNTISELSSLHEEDSNFRQSFHQMRSKQFPVSGDLESNPDYWSGVMGGSSGASRGPSAMEYNKEDRESFRHSQPRSKSEMLSRKNFATGVPAVSMDELAAFADSYGQRPRRADGNSHEARGGSRFERSESRAHSGFYQDDSLEEYYGQRSRSREPLTDADRGWAFSPARRRPAEDAHLPRLVSRTPGTAPKYDHSYLGSARERQARPEGASRGGSLETPSKRSAQLGPRSASYYAWSPPGTYKAGSSQDDQEDASDDALPPYSELELTRGPSYRGRDLPYHSNSEKKRKKEPAKKTNDFPTRMSLVV

SEQ ID NO: 7166 - protein, 512 aa, Homo Sapiens
MDRVLLRWISLFWLTAMVEGLQVTVPDKKKVAMLFQPTVLRCHFSTSSHQPAVVQWKFKSYCQDRMGESLGMSSTRAQSLSKRNLEWDPYLDCLDSRRTVRVVASKQGSTVTLGDFYRGREITIVHDADLQIGKLMWGDSGLYYCIITTPDDLEGKNEDSVELLVLVRKGYRIQADKERDSMKVLYYVEKELAQFDPARRMRGRYNNTISELSSLHEEDSNFRQSFHQMRSKQFPVSGDLESNPDYWSGVMGGSSGASRGPSAMEYNKEDRESFRHSQPRSKSEMLSRKNFATGVPAVSMDELAAFADSYGQRPRRADGNSHEARGGSRFERSESRAHSGFYQDDSLEEYYGQRSRSREPLTDADRGWAFSPARRRPAEDAHLPRLVSRTPGTAPKYDHSYLGSARERQARPEGASRGGSLETPSKRSAQLGPRSASYYAWSPPGTYKAGSSQDDQEDASDDALPPYSELELTRGPSYRGRDLPYHSNSEKKRKKEPAKKTNDFPTRMSLVV

SEQ ID NO: 7167 - protein, 172 aa, Homo Sapiens
MITTSRDPSSRLKMFAKELKLVFPGAQRMNRGRHEVGALVRACKANGVTDLLVVHEHRGTPVGLIVSHLPFGPTAYFTLCNVVMRHDIPDLGTMSEAKPHLITHGFSSRLGKRVSDILRYLFPVPKDDSHRVITFANQDDYISFRHHVYKKTDHRNVELTEVGPRFELKLYM

SEQ ID NO: 7168 - protein, 76 aa, Homo Sapiens
MLRREARLRREYLYRKAREEAQRSAQERKERLRRALEENRLIPTELRREALALQGSLEFDDAGGEGNYTRCDQPRG

SEQ ID NO: 7169 - protein, 248 aa, Homo Sapiens
MLRREARLRREYLYRKAREEAQRSAQERKERLRRALEENRLIPTELRREALALQGSLEFDDAGGEGVTSHVDDEYRWAGVEDPKVMITTSRDPSSRLKMFAKELKLVFPGAQRMNRGRHEVGALVRACKANGVTDLLVVHEHRGTPVGLIVSHLPFGPTAYFTLCNVVMRHDIPDLGTMSEAKPHLITHGFSSRLGKRVSDILRYLFPVPKDDSHRVITFANQDDYISFRHHVYKKTDHRNVELTECT

SEQ ID NO: 7170 - protein, 291 aa, Homo Sapiens
MLRREARLRREYLYRKAREEAQRSAQERKERLRRALEENRLIPTELRREALALQGSLEFDDAGGEGVTSHVDDEYRWAGVEDPKVMITTSRDPSSRLKMFAKELKLVFPGAQRMNRGRHEVGALVRACKANGVTDLLVVHEHRGTPVGLIVSHLPFGPTAYFTLCNVVMRHDIPDLGTMSEAKPHLITHGFSSRLGKRVSDILRYLFPVPKDDSHRVITFANQDDYISFRHHVYKKTDHRNVELTEVGPRFELKLYMIRLGTLEQEATADVEWRWHPYTNTARKRVFLSTE

SEQ ID NO: 7171 - protein, 236 aa, Homo Sapiens
MMLEVKVTIQGVTSHVDDEYRWAGVEDPKVMITTSRDPSSRLKMFAKELKLVFPGAQRMNRGRHEVGALVRACKANGVTDLLVVHEHRGTPVGLIVSHLPFGPTAYFTLCNVVMRHDIPDLGTMSEAKPHLITHGFSSRLGKRVSDILRYLFPVPKDDSHRVITFANQDDYISFRHHVYKKTDHRNVELTEVGPRFELKLYMIRLGTLEQEATADVEWRWHPYTNTARKRVFLSTE

SEQ ID NO: 7172 - protein, 280 aa, Homo Sapiens
  misc_feature (1)..(1): Xaa can be any naturally occurring amino acid
XSKCLPAVFLAHWVLLLVLRVFLPCDENRLIPTELRREALALQGSLEFDDAGGEGVTSHVDDEYRWAGVEDPKVMITTSRDPSSRLKMFAKELKLVFPGAQRMNRGRHEVGALVRACKANGVTDLLVVHEHRGTPVGLIVSHLPFGPTAYFTLCNVVMRHDIPDLGTMSEAKPHLITHGFSSRLGKRVSDILRYLFPVPKDDSHRVITFANQDDYISFRHHVYKKTDHRNVELTEVGPRFELKLYMIRLGTLEQEATADVEWRWHPYTNTARKRVFLSTE

SEQ ID NO: 7173 - protein, 158 aa, Homo Sapiens
ERPNGTSAQPAQVKPEFYRQAELKPCPWTGSNQRRCITFCPTPDQADPCKFLACGEFAQCVKNERTEEAECRCKPGYDSQGSLDGLEPGLCGPGTKECEVLQGKGAPCRLPDHSENQAYKTSVKKFQNQQNNKVISKRNSELLTVEYEEFNHQDWEGN

SEQ ID NO: 7174 - protein, 140 aa, Homo Sapiens
MKQILDSLQAYYRLRVCQEAVWEAYRIFLDRIPDTGEYQDWVSICQQETFCLFDIGKNFSNSQEHLDLLQQRIKQRSFPDRKDEISAEKTLGEPGETIVISTEKNKGKTKPFNILQFGNNHHEHLLPIFCLLSSIIYTYY

SEQ ID NO: 7175 - protein, 797 aa, Homo Sapiens
MYLETRRAIFVFWIFLQVQGTKDISINIYHSETKDIDNPPRNETTESTEKMYKMSTMRRIFDLAKHRTKRSAFFPTGVKVCPQESMKQILDSLQAYYRLRVCQEAVWEAYRIFLDRIPDTGEYQDWVSICQQETFCLFDIGKNFSNSQEHLDLLQQRIKQRSFPDRKDEISAEKTLGEPGETIVISTDVANVSLGPFPLTPDDTLLNEILDNTLNDTKMPTTERETEFAVLEEQRVELSVSLVNQKFKAELADSQSPYYQELAGKSQLQMQKIFKKLPGFKKIHVLGFRPKKEKDGSSSTEMQLTAIFKRHSAEAKSPASDLLSFDSNKIESEEVYHGTMEEDKQPEIYLTATDLKRLISKALEEEQSLDVGTIQFTDEIAGSLPAFGPDTQSELPTSFAVITEDATLSPELPPVEPQLETVDGAEHGLPDTSWSPPAMASTSLSEAPPFFMASSIFSLTDQGTTDTMATDQTMLVPGLTIPTSDYSAISQLALGISHPPASSDDSRSSAGGEDMVRHLDEMDLSDTPAPSEVPELSEYVSVPDHFLEDTTPVSALQYITTSSMTIAPKGRELVVFFSLRVANMAFSNDLFNKSSLEYRALEQQFTQLLVPYLRSNLTGFKQLEILNFRNGSVIVNSKMKFAKSVPYNLTKAVHGVLEDFRSAAAQQLHLEIDSYSLNIEPADQADPCKFLACGEFAQCVKNERTEEAECRCKPGYDSQGSLDGLEPGLCGPGTKECEVLQGKGAPCRLPDHSENQAYKTSVKKFQNQQNNKVISKRNSELLTVEYEEFNHQDWEGN

SEQ ID NO: 7176 - protein, 719 aa, Homo Sapiens
MYLETRRAIFVFWIFLQVQGTKVCQEAVWEAYRIFLDRIPDTGEYQDWVSICQQETFCLFDIGKNFSNSQEHLDLLQQRIKQRSFPDRKDEISAEKTLGEPGETIVISTDVANVSLGPFPLTPDDTLLNEILDNTLNDTKMPTTERETEFAVLEEQRVELSVSLVNQKFKAELADSQSPYYQELAGKSQLQMQKIFKKLPGFKKIHVLGFRPKKEKDGSSSTEMQLTAIFKRHSAEAKSPASDLLSFDSNKIESEEVYHGTMEEDKQPEIYLTATDLKRLISKALEEEQSLDVGTIQFTDEIAGSLPAFGPDTQSELPTSFAVITEDATLSPELPPVEPQLETVDGAEHGLPDTSWSPPAMASTSLSEAPPFFMASSIFSLTDQGTTDTMATDQTMLVPGLTIPTSDYSAISQLALGISHPPASSDDSRSSAGGEDMVRHLDEMDLSDTPAPSEVPELSEYVSVPDHFLEDTTPVSALQYITTSSMTIAPKGRELVVFFSLRVANMAFSNDLFNKSSLEYRALEQQFTQLLVPYLRSNLTGFKQLEILNFRNGSVIVNSKMKFAKSVPYNLTKAVHGVLEDFRSAAAQQLHLEIDSYSLNIEPADQADPCKFLACGEFAQCVKNERTEEAECRCKPGYDSQGSLDGLEPGLCGPGTKECEVLQGKGAPCRLPDHSENQAYKTSVKKFQNQQNNKVISKRNSELLTVEYEEFNHQDWEGN

SEQ ID NO: 7177 - protein, 366 aa, Homo Sapiens
MVLHLLLFLLLTPQGGHSCQGLELARELVLAKVRALFLDALGPPAVTREGGDPGVRRLPRRHALGGFTHRGSEPEEEEDVSQAILFPATDASCEDKSAARGLAQEAEEGLFRYMFRPSQHTRSRQVTSAQLWFHTGLDRQGTAASNSSEPLLGLLALSPGGPVAVPMSLGHAPPHWAVLHLATSALSLLTHPVLVLLLRCPLCTCSARPEATPFLVAHTRTRPPSGGERARRSTPLMSWPWSPSALRLLQRPPEEPAAHANCHRVALNISFQELGWERWIVYPPSFIFHYCHGGCGLHIPPNLSLPVPGAPPTPAQPYSLLPGAQPCCAALPGTMRPLHVRTTSDGGYSFKYETVPNLLTQHCACI

SEQ ID NO: 7178 - protein, 426 aa, Homo Sapiens
MPLLWLRGFLLASCWIIVRSSPTPGSEGHSAAPDCPSCALAALPKDVPNSQPEMVEAVKKHILNMLHLKKRPDVTQPVPKAALLNAIRKLHVGKVGENGYVEIEDDIGRRAEMNELMEQTSEIITFAESGTARKTLHFEISKEGSDLSVVERAEVWLFLKVPKANRTRTKVTIRLFQQQKHPQGSLDTGEEAEEVGLKGERSELLLSEKVVDARKSTWHVFPVSSSIQRLLDQGKSSLDVRIACEQCQESGASLVLLGKKKKKEEEGEGKKKGGGEGGAGADEEKEQSHRPFLMLQARQSEDHPHRRRRRGLECDGKVNICCKKQFFVSFKDIGWNDWIIAPSGYHANYCEGECPSHIAGTSGSSLSFHSTVINHYRMRGHSPFANLKSCCVPTKLRPMSMLYYDDGQNIIKKDIQNMIVEECGCS

SEQ ID NO: 7179 - protein, 426 aa, Homo Sapiens; identical to SEQ ID NO: 7178

SEQ ID NO: 7180 - protein, 426 aa, Homo Sapiens; identical to SEQ ID NO: 7178

SEQ ID NO: 7181 - protein, 407 aa, Homo Sapiens
MDGLPGRALGAACLLLLAAGWLGPEAWGSPTPPPTPAAPPPPPPPGSPGGSQDTCTSCGGFRRPEELGRVDGDFLEAVKRHILSRLQMRGRPNITHAVPKAAMVTALRKLHAGKVREDGRVEIPHLDGHASPGADGQERVSEIISFAETDGLASSRVRLYFFISNEGNQNLFVVQASLWLYLKLLPYVLEKGSRRKVRVKVYFQEQGHGDRWNMVEKRVDLKRSGWHTFPLTEAIQALFERGERRLNLDVQCDSCQELAVVPVFVDPGEESHRPFVVVQARLGDSRHRIRKRGLECDGRTNLCCRQQFFIDFRLIGWNDWIIAPTGYYGNYCEGSCPAYLAGVPGSASSFHTAVVNQYRMRGLNPGTVNSCCIPTKLSTMSMLYFDDEYNIVKRDVPNMIVEECGCA

SEQ ID NO: 7182 - protein, 352 aa, Homo Sapiens
MTSSLLLAFLLLAPTTVATPRAGGQCPACGGPTLELESQRELLLDLAKRSILDKLHLTQRPTLNRPVSRAALRTALQHLHGVPQGALLEDNREQECEIISFAETGLSTINQTRLDFHFSSDRTAGDREVQQASLMFFVQLPSNTTWTLKVRVLVLGPHNTNLTLATQYLLEVDASGWHQLPLGPEAQAACSQGHLTLELVLEGQVAQSSVILGGAAHRPFVAARVRVGGKHQIHRRGIDCQGGSRMCCRQEFFVDFREIGWHDWIIQPEGYAMNFCIGQCPLHIAGMPGIAASFHTAVLNLLKANTAAGTTGGGSCCVPTARRPLSLLYYDRDSNIVKTDIPDMVVEACGCS

SEQ ID NO: 7183 - protein, 274 aa, Homo Sapiens
METAAAVVKLERLEAALTRALRRLQPGSVAPGNGEEVISFATVTDSTSAYSSLLTFHLSTPRSHHLYHARLWLHVLPTLPGTLCLRIFRWGPRRRRQGSRTLLAEHHITNLGWHTLTLPSSGLRGEKSGVLKLQLDCRPLEGNSTVTGQPRRLLDTAGHQQPFLELKIRANEPGAGRARRRTPTCEPATPLCCRRDHYVDFQELGWRDWILQPEGYQLNYCSGQCPPHLAGSPGIAASFHSAVFSLLKANNPWPASTSCCVPTARRPLSLLYLD

SEQ ID NO: 7184 - protein, 350 aa, Homo Sapiens
MRLPDVQLWLVLLWALVRAQGTGSVCPSCGGSKLAPQAERALVLELAKQQILDGLHLTSRPRITHPPPQAALTRALRRLQPGSVAPGNGEEVISFATVTDSTSAYSSLLTFHLSTPRSHHLYHARLWLHVLPTLPGTLCLRIFRWGPRRRRQGSRTLLAEHHITNLGWHTLTLPSSGLRGEKSGVLKLQLDCRPLEGNSTVTGQPRRLLDTAGHQQPFLELKIRANEPGAGRARRRTPTCEPATPLCCRRDHYVDFQELGWRDWILQPEGYQLNYCSGQCPPHLAGSPGIAASFHSAVFSLLKANNPWPASTSCCVPTARRPLSLLYLDHNGNVVKTDVPDMVVEACGCS

SEQ ID NO: 7185 - protein, 104 aa, Homo Sapiens
LDISFPPSYPYSEDARQGEQYMNTRCPAWCDRILMSPSAKELVLRSESEEKVVTYDHIGPNVCMGDHKPVFLAFRIMPGAGKRCQRHERTLREPPCSRGPNTHS

SEQ ID NO: 7186 - protein, 412 aa, Homo Sapiens
MAGKAAAPGTAVLLVTANVGSLFDDPENLQKNWLREFYQVVHTHKPHFMALHCQEFGGKNYEASMSHVDKFVKELLSSDAMKEYNRARVYLDENYKSQEHFTALGSFYFLHESLKNIYQFDFKAKKYRKVAGKEIYSDTLESTPMLEKEKFPQDYFPECKWSRKGFIRTRWCIADCAFDLVNIHLFHDASNLVAWETSPSVYSGIRHKALGYVLDRIIDQRFEKVSYFVFGDFNFRLDSKSVVETLCTKATMQTVRAADTNEVVKLIFRESDNDRKVMLQLEKKLFDYFNQEVFRDNNGTALLEFDKELSVFKDRLYELDISFPPSYPYSEDARQGEQYMNTRCPAWCDRILMSPSAKELVLRSESEEKVVTYDHIGPNVCMGDHKPVFLAFRIMPGAGKPHAHVHKCCVVQ

SEQ ID NO: 7187 - protein, 387 aa, Homo Sapiens
MAGKAAAPGTAVLLVTANVGSLFDDPENLQKNWLREFYQVVHTHKPHFMALHCQEFGGKNYEASMSHVDKFVKELLSSDAMKEYNRARVYLDENYKSQEHFTALGSFYFLHESLKNIYQFDFKAKKYRKVAGKEIYSDTLESTPMLEKEKFPQDYFPECKWSRKGFIRTRWCIADCAFDLVNIHLFHDASNLVAWETSPSVYSGIRHKALGYVLDRIIDQRFEKVSYFVFGDFNFRLDSKSVVETLCTKATMQTVRAADTNEVVKLIFRESDNDRKVMLQLEKKLFDYFNQEVFRDNNGTALLEFDKELSVFKDRLYELDISFPPSYPYSEDARQGEQYMNTRCPAWCDRILMSPSAKELVLRVSVCCPSPGHRGMWSAGSGLAQPW

SEQ ID NO: 7188 - protein, 138 aa, Homo Sapiens
VTANVGSLFDDPENLQKNWLREFYQALGSFYFLHESLKNIYQFDFKAKKYRKVAGKEIYSDTLESTPMLEKEKFPQDYFPECKWSRKGFIRTRWCIADCAFDLVNIHLFHDASNLVAWETSPSVYSGIRHKALGYVLD

SEQ ID NO: 7189 - protein, 278 aa, Homo Sapiens
  misc_feature (1)..(1): Xaa can be any naturally occurring amino acid
XQKNWLREFYQVVHTHKPHFMALHCQEFGGKNYEASMSHVDKFVKELLSSDAMKEYNRARVYLDENYKSQEHFTALGSFYFLHESLKNIYQFDFKAKKYRKVAGKEIYSDTLESTPMLEKEKFPQDYFPECKWSRKGFIRTRWCIADCAFDLVNIHLFHDASNLVAWETSPSVYSGIRHKALGYVLDRIIDQRFEKVSYFVFGDFNFRLDSKSVVELLEFDKELSVFKDRLYELDISFPPSYPYSEDARQGEQYMNTRCPAWCDRILMSPSAKELVLR

SEQ ID NO: 7190 - protein, 92 aa, Homo Sapiens
MALWMRLLPLLALLALWGPDPAAAFVNQHLCGSHLVEALYLVCGERGFFYTPKTRREAEDLQAGELLQLDAARRQPHTRRLLHRERWNKALE

SEQ ID NO: 7191 - protein, 98 aa, Homo Sapiens
MALWMRLLPLLALLALWGPDPAAAFVNQHLCGSHLVEALYLVCGERGFFYTPKTRREAEDLQGSLQPLALEGSLQKRGIVEQCCTSICSLYQLENYCN

SEQ ID NO: 7192 - protein, 110 aa, Homo Sapiens
MALWMRLLPLLALLALWGPDPAAAFVNQHLCGSHLVEALYLVCGERGFFYTPKTRREAEDLQVGQVELGGGPGAGSLQPLALEGSLQKRGIVEQCCTSICSLYQLENYCN

SEQ ID NO: 7193 - protein, 110 aa, Homo Sapiens; identical to SEQ ID NO: 7192

SEQ ID NO: 7194 - protein, 110 aa, Homo Sapiens; identical to SEQ ID NO: 7192

SEQ ID NO: 7195 - protein, 200 aa, Homo Sapiens
MALWMRLLPLLALLALWGPDPAAAFVNQHLCGSHLVEALYLVCGERGFFYTPKTRREAEDLQASALSLSSSTSTWPEGLDATARAPPALVVTANIGQAGGSSSRQFRQRALGTSDSPVLFIHCPGAAGTAQGLEYRGRRVTTELVWEEVDSSPQPQGSESLPAQPPAQPAPQPEPQQAREPSPEVSCCGLWPRRPQRSQN

SEQ ID NO: 7196 - protein, 200 aa, Homo Sapiens; identical to SEQ ID NO: 7195

SEQ ID NO: 7197 - protein, 157 aa, Homo Sapiens
MDPRLPAWALVLLGPALVFALGPAPTPEMREKLCGHHFVRALVRVCGGPRWSTEARRPATGGDQRESHSVSQAGLKLLSSSNPPTLTFQSVGISDVSCYSGWRDDICSMGWWPTVISRWDLACSPCPRPLTITATTVQLPPTLHATAASVAVPNKTC

SEQ ID NO: 7198 - protein, 131 aa, Homo Sapiens
MDPRLPAWALVLLGPALVFALGPAPTPEMREKLCGHHFVRALVRVCGGPRWSTEARRPATGGDRELLQWLERRHLLHGLVADSNLTLGPGLQPLPQTSHHHRHHRAAATNPARYCCLSGCTQQDLLTLCPY

SEQ ID NO: 7199 - protein, 71 aa, Homo Sapiens
  misc_feature (1)..(1): Xaa can be any naturally occurring amino acid
XDPRLPAWALVLLGPALVFALGPAPTPEMREKLCGHHFVRALVRVCGGPRWSTEARRPATGGDPEFHSVPR

SEQ ID NO: 7200 - protein, 139 aa, Homo Sapiens
MASLFRSYLPAIWLLLSQLLRESLAAELRGCGPRFGKHLLSYCPMPEKTFTTTPGGWLLESGRPKEMVSTSNNKDGQALGTTSEFIPNLSPELKKPLSEGQPSLKKIILSRKKRSGRHRFDPFCCEVICDDGTSVKLCT

SEQ ID NO: 7201 - protein, 135 aa, Homo Sapiens
MKGSIFTLFLFSVLFAISEVRSKESVRLCGLEYIRTVIYICASSRWRRHQEGIPQAQQAETGNSFQLPHKREFSEENPAQNLPKVDASGEDRLWGGQMPTEELWKSKKHSVMSRQDLQTLCCTDGCSMTDLSALC

SEQ ID NO: 7202 - protein, 213 aa, Homo Sapiens
MPRLLRLSLLWLGLLLVRFSRELSDISSARKLCGRYLVKEIEKLCGHANWSQFRFEEETPFSRLIAQASEKVEAYSPYQFESPQTASPARGRGTNPVSTSWEEAVNSWEMQSLPEYKDKKGYSPLGKTREFSSSHNINVYIHENAKFQKKRRNKIKTLSNLFWGHHPQRKRRGYSEKCCLTGCTKEELSIACLPYIDFKRLKEKRSSLVTKIY

SEQ ID NO: 7203 - protein, 902 aa, Homo Sapiens
MAVYTYLRLIVDHHGTAQLQALRQKEVDFCISLLRERFMECLMIGRDLVRLLQNVARIPEFELLWKDIIHNPQALSPQFTGILQLLQSRTSRKFLACRLTPDMETKLLFMTSRVRFGQQKRYQDWFQRQYLSTPDSQSLRCDLIRYICGVVHPSNEVLSSDILPRWAIIGWLLTTCTSNVAASNAKLALFYDWLFFSPDKDSIMNIEPAILVMHHSMKPHPAITATLLDFMCRIIPNFYPPLEGHVRQGVFSSLNHIVEKRVLAHLAPLFDNPKLDKELRAMLREKFPEFCSSPSPPVEVKIEEPVSMEMDNHMSDKDESCYDNAEAAFSDDEEDLNSKGKKREFRFHPIKETVVEEPVDITPYLDQLDESLRDKVLQLQKGSDTEAQCEVMQEIVDQVLEEDFDSEQLSVLASCLQELFKAHFRGEVLPEEITEESLEESVGKPLYLIFRNLCQMQEDNSSFSLLLDLLSELYQKQPKIGYHLLYYLRASKAAAGKMNLYESFAQATQLGDLHTCLMMDMKACQEDDVRLLCHLTPSIYTEFPDETLRSGELLNMIVAVIDSAQLQELVCHVMMGNLVMFRKDSVLNILIQSLDWETFEQYCAWQLFLAHNIPLETIIPILQHLKYKEHPEALSCLLLQLRREKPSEEMVKMVLSRPCHPDDQFTTSILRHWCMKHDELLAEHIKSLLIKNNSLPRKRQSLRSSSSKLAQLTLEQILEHLDNLRLNLTNTKQNCMPSTLGVQCRRCCPGPDYAWSQAGGRGRTPGATTHTRDKTTCACCLISSQTSDCFSFPALPFLPLVFSQTPILQALQHVQASCDEAHKMKFSDLFSLAEEYEDSSTKPPKSRRKAALSSPRSRKNATQPPNAEEESGSSSASEEEDTKPKPTKRKRKGSSAVGSDSD

SEQ ID NO: 7204 - protein, 1042 aa, Homo Sapiens
MELQKGKGAAAAAAASGAAGGGGGGAGAGAPGGGRLLLSTSLDAKDELEERLERCMSIVTSMTAGVSEREANDALNAYVCKGLPQHEEICLGLFTLILTEPAQAQKCYRDLALVSRDGMNIVLNKINQILMEKYLKLQDTCRTQLVWLVRELVKSGVLGADGVCMTFMKQIAGGDVTAKNIWLAESVLDILTEQREWVLKSSILIAMAVYTYLRLIVDHHGTAQLQALRQKEVDFCISLLRERFMECLMIGRDLVRLLQNVARIPEFELLWKDIIHNPQALSPQFTGILQLLQSRTSRKFLACRLTPDMETKLLFMTSRVRFGQQKRYQDWFQRQYLSTPDSQSLRCDLIRYICGVVHPSNEVLSSDILPRWAIIGWLLTTCTSNVAASNAKLALFYDWLFFSPDKDSIMNIEPAILVMHHSMKPHPAITATLLDFMCRIIPNFYPPLEGHVRQGVFSSLNHIVEKRVLAHLAPLFDNPKLDKELRAMLREKFPEFCSSPSPPVEVKIEEPVSMEMDNHMSDKDESCYDNAEAAFSDDEEDLNSKGKKREFRFHPIKETVVEEPVDITPYLDQLDESLRDKVLQLQKGSDTEAQCEVMQEIVDQVLEEDFDSEQLSVLASCLQELFKAHFRGEVLPEEITEESLEESVGKPLYLIFRNLCQMQEDNSSFSLLLDLLSELYQKQPKIGYHLLYYLRASKAAAGKMNLYESFAQATQLGDLHTCLMMDMKACQEDDVRLLCHLTPSIYTEFPDETLRSGELLNMIVAVIDSAQLQELVCHVMMGNLVMFRKDSVLNILIQSLDWETFEQYCAWQLFLAHNIPLETIIPILQHLKYKEHPEALSCLLLQLRREKPSEEMVKMVLSRPCHPDDQFTTSILRHWCMKHDELLAEHIKSLLIKNNSLPRKRQSLRSSSSKLAQLTLEQILEHLDNLRLNLTNTKQNFFSQTPILQALQHVQASCDEAHKMKFSDLFSLAEEYEDSSTKPPKSRRKAALSSPRSRKNATQPPNAEEESGSSSASEEEDTKPKPTKRKRKGSSAVGSDSD

SEQ ID NO: 7205 - protein, 1042 aa, Homo Sapiens; identical to SEQ ID NO: 7204

SEQ ID NO: 7206 - protein, 41 aa, Homo Sapiens
TQPPNAEEESGSSSASEEEDTKPKPTKRKRKGSSAVGSDSD

SEQ ID NO: 7207 - protein, 280 aa, Homo Sapiens
VYTYLRLIVDHHGTAQLQALRQKEVDFCISLLRERFMECLMIGRDLVRLLQNVARIPEFELLWKDIIHNPQALSPQFTGILQLLQSRTSRKFLACRLTPDMETKLLFMTSRVRFGQQKRYQDWFQRQYLSTPDSQSLRCDLIRYICGVVHPSNEVLSSDILPRWAIIGWLLTTCTSNVAASNAKLALFYDWLFFSPDKDSIMNIEPAILVMHHSMKPHPAITATLLDFMCRIIPNFYPPLEGHVRQGVFSSLNHIVEKRVLACKKYWLYLRLLGICLLGS

SEQ ID NO: 7208 - protein, 49 aa, Homo Sapiens
  misc_feature (1)..(1): Xaa can be any naturally occurring amino acid
XSQSLRCDLIRYICGVVHPSNEVLSSDILPRWAIIGWLLTTCTTPSSPV

SEQ ID NO: 7209 - protein, 64 aa, Homo Sapiens
MDLNSASTVVLQVLTQATSQDTAVLKPAEEQLKQWETQPGFYSVLLNIFTNHTLDINVRWLAVL

SEQ ID NO: 7210 - protein, 149 aa, Homo Sapiens
MDLNSASTVVLQVLTQATSQDTAVLKPAEEQLKQWETQPGFYSVLLNIFTNHTLDINVRWLAVLYFKHGIDRYWRRVAPHALSEEEKTTLRAGLITNFNEPINQIATQIAVLIAKVARLDCPRQWPELIPTLIESVKVQDDLRQHRALL

SEQ ID NO: 7211 - protein, 162 aa, Homo Sapiens
MDLNSASTVVLQVLTQATSQDTAVLKPAEEQLKQWETQPGFYSVLLNIFTNHTLDINVRWLAVLYFKHGIDRYWRRVAPHALSEEEKTTLRAGLITNFNEPINQIATQIAVLIAKVARLDCPRQWPELIPTLIESVKVQDDLRQHRALLTFYHVTKTLASKR

SEQ ID NO: 7212 - protein, 975 aa, Homo Sapiens
MDLNSASTVVLQVLTQATSQDTAVLKPAEEQLKQWETQPGFYSVLLNIFTNHTLDINVRWLAVLYFKHGIDRYWRRVAPHALSEEEKTTLRAGLITNFNEPINQIATQIAVLIAKVARLDCPRQWPELIPTLIESVKVQDDLRQHRALLTFYHVTKTLASKRLAADRKLFYDLASGIYNFACSLWNHHTDTFLQEVSSGNEAAILSSLERTLLSLKVLRKLTVNGFVEPHKNMEVMGFLHGIFERLKQFLECSRSIGTDNVCRDRLEKTIILFTKVLLDFLDQHPFSFTPLIQRSLEFSVSYVFTEVGEGVTFERFIVQCMNLIKMIVKNYAYKPSKNFEDSSPETLEAHKIKMAFFTYPTLTEICRRLVSHYFLLTEEELTMWEEDPEGFTVEETGGDSWKYSLRPCTEVLFIDIFHEYNQTLTPVLLEMMQTLQGPTNVEDMNALLIKDAVYNAVGLAAYELFDSVDFDQWFKNQLLPELQVIHNRYKPLRRRVIWLIGQWISVKFKSDLRPMLYEAICNLLQDQDLVVRIETATTLKLTVDDFEFRTDQFLPYLETMFTLLFQLLQQVTECDTKMHVLHVLSCVIERVNMQIRPYVGCLVQYLPLLWKQSEEHNMLRCAILTTLIHLVQGLGADSKNLYPFLLPVIQLSTDVSQPPHVYLLEDGLELWLVTLENSPCITPELLRIFQNMSPLLELSSENLRTCFKIINGYIFLSSTEFLQTYAVGLCQSFCELLKEITTEGQVQVLKVVENALKVNPILGPQMFQPILPYVFKGIIEGERYPVVMSTYLGVMGRVLLQNTSFFSSLLNEMAHKFNQEMDQLLGNMIEMWVDRMDNITQPERRKLSALALLSLLPSDNSVIQDKFCGIINISVEGLHDVMTEDPETGTYKDCMLMSHLEEPKVTEDEEPPTEQDKRKKMLALKDPVHTVSLQQFIYEKLKAQQEMLGEQGFQSLMETVDTEIVTQLQEFLQGF

SEQ ID NO: 7213 - protein, 863 aa, Homo Sapiens
MDLNSASTVVLQVLTQATSQDTAVLKPAEEQLKQWETQPGFYSVLLNIFTNHTLDINVRWLAVLYFKHGIDRYWRRVAPHALSEEEKTTLRAGLITNFNEPINQIATQIAVLIAKVARLDCPRQWPELIPTLIESVKVQDDLRQHRALLTFYHVTKTLASKRLAADRKLFYDLASGIYNFACSLWNHHTDTFLQEVSSGNEAAILSSLERTLLSLKVLRKLTVNGFVEPHKNMEVMGFLHGIFERLKQFLECSRSIGTDNVCRDRLEKTIILFTKVLLDFLDQHPFSFTPLIQRSLEFSVSYVFTEVGEGVTFERFIVQCMNLIKMIVKNYAYKPSKNFEDSSPETLEAHKIKMAFFTYPTLTEICRRLVSHYFLLTEEELTMWEEDPEGFTVEETGGDSWKYSLRPCTEVLFIDIFHEYNQTLTPVLLEMMQTLQGPTNVEDMNALLIKDAVYNAVGLAAYELFDSVDFDQWFKNQLLPELQVIHNRYKPLRRRVIWLIGQWISVKFKSDLRPMLYEAICNLLQDQDLVVRIETATTLKLTVDDFEFRTDQFLPYLETMFTLLFQLLQQVTECDTKMHVLHVLSCVIERVNMQIRPYVGCLVQYLPLLWKQSEEHNMLRCAILTTLIHLVQGLGADSKNLYPFLLPVIQLSTDVSQPPHVYLLEDGLELWLVTLENSPCITPELLRIFQNMSPLLELSSENLRTCFKIINGYIFLSSTEFLQTYAVGLCQSFCELLKEITTEGQVQVLKVVENALKVNPILGPQMFQPILPYVFKGIIEGERYPVVMSTYLGVMGRVLLQNTSFFSSLLNEMAHKFNQEMDQLLGNMIEMWVDRMDNITQPERRKLSALALLSLLPSDNSQF

SEQ ID NO: 7214 - protein, 59 aa, Homo Sapiens
MDQLLGNMIEMWVDRMDNITQPERRKLSALALLSLLPSDNSFLYPWQPLFYTLTVKEPM

SEQ ID NO: 7215 - protein, 94 aa, Homo Sapiens
MTEDPETGTYKDCMLMSHLEEPKVTEDEEPPTEQDKRKKMLALKDPVHTVSLQQFIYEKLKAQQEMLGEQGFQSLMETVDTEIVTQLQEFLQGF

SEQ ID NO: 7216 - protein, 1015 aa, Homo Sapiens
MVQPIIHLGYVVYSLLYLGYKPVQHVTALNTVSSCHKMVSMDLNSASTVVLQVLTQATSQDTAVLKPAEEQLKQWETQPGFYSVLLNIFTNHTLDINVRWLAVLYFKHGIDRYWRRVAPHALSEEEKTTLRAGLITNFNEPINQIATQIAVLIAKVARLDCPRQWPELIPTLIESVKVQDDLRQHRALLTFYHVTKTLASKRLAADRKLFYDLASGIYNFACSLWNHHTDTFLQEVSSGNEAAILSSLERTLLSLKVLRKLTVNGFVEPHKNMEVMGFLHGIFERLKQFLECSRSIGTDNVCRDRLEKTIILFTKVLLDFLDQHPFSFTPLIQRSLEFSVSYVFTEVGEGVTFERFIVQCMNLIKMIVKNYAYKPSKNFEDSSPETLEAHKIKMAFFTYPTLTEICRRLVSHYFLLTEEELTMWEEDPEGFTVEETGGDSWKYSLRPCTEVLFIDIFHEYNQTLTPVLLEMMQTLQGPTNVEDMNALLIKDAVYNAVGLAAYELFDSVDFDQWFKNQLLPELQVIHNRYKPLRRRVIWLIGQWISVKFKSDLRPMLYEAICNLLQDQDLVVRIETATTLKLTVDDFEFRTDQFLPYLETMFTLLFQLLQQVTECDTKMHVLHVLSCVIERVNMQIRPYVGCLVQYLPLLWKQSEEHNMLRCAILTTLIHLVQGLGADSKNLYPFLLPVIQLSTDVSQPPHVYLLEDGLELWLVTLENSPCITPELLRIFQNMSPLLELSSENLRTCFKIINGYIFLSSTEFLQTYAVGLCQSFCELLKEITTEGQVQVLKVVENALKVNPILGPQMFQPILPYVFKGIIEGERYPVVMSTYLGVMGRVLLQNTSFFSSLLNEMAHKFNQEMDQLLGNMIEMWVDRMDNITQPERRKLSALALLSLLPSDNSVIQDKFCGIINISVEGLHDVMTEDPETGTYKDCMLMSHLEEPKVTEDEEPPTEQDKRKKMLALKDPVHTVSLQQFIYEKLKAQQEMLGEQGFQSLMETVDTEIVTQLQEFLQGF

SEQ ID NO: 7217 - protein, 160 aa, Homo Sapiens
  misc_feature (1)..(1): Xaa can be any naturally occurring amino acid
XLRCAILTTLIHLVQVVENALKVNPILGPQMFQPILPYVFKGIIEGERYPVVMSTYLGVMGRVLLQNTSFFSSLLNEMAHKFNQEMDQLLGNMIEMWVDRMDNITQPERRKLSALALLSLLPSDNSVIQDKFCGIINISVEGLHDVMTEDPETGTYKDWP

SEQ ID NO: 7218 - protein, 1041 aa, Homo Sapiens
MAAAAAAGAASGLPGPVAQGLKEALVDTLTGILSPVQEVRAAAEEQIKVLEVTEEFGVHLAELTVDPQGALAIRQLASVILKQYVETHWCAQSEKFRPPETTERAKIVIRELLPNGLRESISKVRSSVAYAVSAIAHWDWPEAWPQLFNLLMEMLVSGDLNAVHGAMRVLTEFTREVTDTQMPLVAPVILPEMYKIFTMAEVYGIRTRSRAVEIFTTCAHMICNMEELEKGAAKVLIFPVVQQFTEAFVQALQIPDGPTSDSGFKMEVLKAVTALVKNFPKHMVSSMQQILPIVWNTLTESAAFYVRTEVNYTEEVEDPVDSDGEVLGFENLVFSIFEFVHALLENSKFKSTVKKALPELIYYIILYMQITEEQIKVWTANPQQFVEDEDDDTFSYTVRIAAQDLLLAVATDFQNESAAALAAAATRHLQEAEQTKNSGTEHWWKIHEACMLALGSVKAIITDSVKNGRIHFDMHGFLTNVILADLNLSVSPFLLGRALWAASRFTVAMSPELIQQFLQATVSGLHETQPPSVRISAVRAIWGYCDQLKVSESTHVLQPFLPSILDGLIHLAAQFSSEVLNLVMETLCIVCTVDPEFTASMESKICPFTIAIFLKYSNDPVVASLAQDIFKELSQIEACQGPMQMRLIPTLVSIMQAPADKIPAGLCATAIDILTTVVRNTKPPLSQLLICQAFPAVAQCTLHTDDNATMQNGGECLRAYVSVTLEQVAQWHDEQGHNGLWYVMQVVSQLLDPRTSEFTAAFVGRLVSTLISKAGRELGENLDQILRAILSKMQQAETLSVMQSLIMVFAHLVHTQLEPLLEFLCSLPGPTGKPALEFVMAEWTSRQHLFYGQYEGKVSSVALCKLLQHGINADDKRLQDIRVKGEEIYSMDEGIRTRSKSAKNPERWTNIPLLVKILKLIINELSNVMEANAARQATPAEWSQDDSNDMWEDQEEEEEEEEDGLAGQLLSDILATSKYEEDYYEDDEEDDPDALKDPLYQIDLQAYLTDFLCQFAQQPCYIMFSGHLNDNERRVLQTIGI

SEQ ID NO: 7219 - protein, 155 aa, Homo Sapiens
SNVMEANAARQATPAEWSQDDSNDMWEDQEEEEEEEEDGLAGQLLSDILATSKYEEDYYEDDEEDDPDALKDPLYQIDLQATLMTMRGEFYRPSASKKGSLSTFAPSGPAANHFAALTGLEMHFLLNLKWHLDPWPLASAVTLMTIQTRLTGAVT

SEQ ID NO: 7220 - protein, 127 aa, Homo Sapiens
MDTQNLEKTAIKIQSWWRGNMVRRTLLQAALRAWVIQCWWRSMQAKMLEQRRRLALRLYTCQEWAVVKVQAQVRMWQARRRFLQARQAACIIQSHWRWHASQTRGLIRGHYEVRASRLELDIEILMT

SEQ ID NO: 7221 - protein, 107 aa, Homo Sapiens
MVRRTLLQAALRAWVIQCWWRSMQAKMLEQRRRLALRLYTCQEWAVVKVQAQVRMWQARRRFLQARQAACIIQSHWRWHASQTRGLIRGHYEVRASRLELDIEILMT

SEQ ID NO: 7222 - protein, 596 aa, Homo Sapiens
MAGNCGARGALSAHTLLFDLPPALLGELCAVLDSCDGALGWRGLAERLSSSWLDVRHIEKYVDQGKSGTRELLWSWAQKNKTIGDLLQVLQEMGHRRAIHLITNYGAVLSPSEKSYQEGGFPNILFKETANVTVDNVLIPEHNEKGILLKSSISFQNIIEGTRNFHKDFLIGEGEIFEVYRVEIQNLTYAVKLFKQEKKMQCKKHWKRFLSELEVLLLFHHPNILELAAYFTETEKFCLIYPYMRNGTLFDRLQCVGDTAPLPWHIRIGILIGISKAIHYLHNVQPCSVICGSISSANILLDDQFQPKLTDFAMAHFRSHLEHQSCTINMTSSSSKHLWYMPEEYIRQGKLSIKTDVYSFGIVIMEVLTGCRVVLDDPKHIQLRDLLRELMEKRGLDSCLSFLDKKVPPCPRNFSAKLFCLAGRCAATRAKLRPSMDEVLNTLESTQASLYFAEDPPTSLKSFRCPSPLFLENVPSIPVEDDESQNNNLLPSDEGLRIDRMTQKTPFECSQSEVMFLSLDKKPESKRNEEACNMPSSSCEESWFPKYIVPSQDLRPYKVNIDPSSEAPGHSCRSRPVESSCSSKFSWDEYEQYKKE

SEQ ID NO: 7223 - protein, 535 aa, Homo Sapiens
MAGNCGARGALSAHTLLFDLPPALLGELCAVLDSCDGALGWRGLGAVLSPSEKSYQEGGFPNILFKETANVTVDNVLIPEHNEKGILLKSSISFQNIIEGTRNFHKDFLIGEGEIFEVYRVEIQNLTYAVKLFKQEKKMQCKKHWKRFLSELEVLLLFHHPNILELAAYFTETEKFCLIYPYMRNGTLFDRLQCVGDTAPLPWHIRIGILIGISKAIHYLHNVQPCSVICGSISSANILLDDQFQPKLTDFAMAHFRSHLEHQSCTINMTSSSSKHLWYMPEEYIRQGKLSIKTDVYSFGIVIMEVLTGCRVVLDDPKHIQLRDLLRELMEKRGLDSCLSFLDKKVPPCPRNFSAKLFCLAGRCAATRAKLRPSMDEVLNTLESTQASLYFAEDPPTSLKSFRCPSPLFLENVPSIPVEDDESQNNNLLPSDEGLRIDRMTQKTPFECSQSEVMFLSLDKKPESKRNEEACNMPSSSCEESWFPKYIVPSQDLRPYKVNIDPSSEAPGHSCRSRPVESSCSSKFSWDEYEQYKKE

SEQ ID NO: 7224 - protein, 93 aa, Homo Sapiens
MAGNCGARGALSAHTLLFDLPPALLGELCAVLDSCDGALGWRGLVSKNKLCENGVLILQGFWHVVVCKYKDSKYGCVALFEKTPSETYLHMET

SEQ ID NO: 7225 - protein, 1257 aa, Homo Sapiens
MASCSFTRDQATRRLRGAAAAAAAALAAVVTTPLLSSGTPTALIGTGSSCPGAMWLSTATGSRSDSESEEEDLPVGEEVCKRGYLRKQKHGHRRYFVLKLETADAPARLEYYENARKFRHSVRAAAAAAAAAASGAAIPPLIPPRRVITLYQCFSVSQRADARYRHLIALFTQDEYFAMVAENESEQESWYLLLSRLILESKRRRCGTLGAQPDGEPAALAAAAAAEPPFYKDVWQVIVKPRGLGHRKELSGVFRLCLTDEEVVFVRLNTEVASVVVQLLSIRRCGHSEQYFFLEVGRSTVIGPGELWMQVDDCVVAQNMHELFLEKMRALCADEYRARCRSYSISIGAHLLTLLSARRHLGLVPLEPGGWLRRSRFEQFCHLRAIGDGEDEMLFTRRFVTPSEPVAHSRRGRLHLPRGRRSRRAVSVPASFFRRLAPSPARPRHPAEAPNNGARLSSEVSGSGSGNFGEEGNPQGKEDQEGSGGDYMPMNNWGSGNGRGSGGGQGSNGQGSSSHSSGGNQCSGEGQGSRGGQGSNGQGSGGNQCSRDGQGTAGGHGSGGGQRPGGGHGSGGGQGPGDGHGSGGGKNSGGGKGSGSGKGSDGDGERGKSLKKRSYFGKLTQSKQQQMPPPPPPPPPPPPAGGTGGKGKSGGRFRLYFCVDRGATKECKEAKEVKDAEIPEGAARGPHRARAFDEDEDDPYVPMRPGVATPLVSSSDYMPMAPQNVSASKKRHSRSPFEDSRGYMMMFPRVSPPPAPSPPKAPDTNKEDDSKDNDSESDYMFMAPGAGAIPKNPRNPQGGSSSKSWSSYFSLPNPFRSSPLGQNDNSEYVPMLPGKFLGRGLDKEVSYNWDPKDAASKPSGEGSFSKPGDGGSPSKPSDHEPPKNKAKRPNRLSFITKGYKIKPKPQKPTHEQREADSSSDYVNMDFTKRESNTPAPSTQGLPDSWGIIAEPRQSAFSNYVNVEFGVPFPNPANDLSDLLRAIPRANPLSLDSARWPLPPLPLSATGSNAIEEEGDYIEVIFNSAMTPAMALADSAIRYDAETGRIYVVDPFSECCMDISLSPSRCSEPPPVARLLQEEEQERRRPQSRSQSFFAAARAAVSAFPTDSLERDLSPSSAPAVASAAEPTLALSQVVAAASALAAAPGIGAAAAAAGFDSASARWFQPVANAADAEAVRGAQDVAGGSNPGAHNPSANLARGDNQAGGAAAAAAAPEPPPRSRRVPRPPEREDSDNDDDTHVRMDFARRDNQFDSPKRGR

SEQ ID NO: 7226 - protein, 147 aa, Homo Sapiens
MQELHLLWWALLLGLAQACPEPCDCGEKYGFQIADCAYRDLESVPPGFPANVTTLSLSANRLPGLPEGAFREVPLLQSLWLAHNEIRTVAAGALASLSHLKSLDLSHNLISDFAWSDLHNLSALQLLKMDSNELTFIPRDAFRSLRA

SEQ ID NO: 7227 - protein, 183 aa, Homo Sapiens
MQELHLLWWALLLGLAQACPEPCDCGEKYGFQIADCAYRDLESVPPGFPANVTTLSLSANRLPGLPEGAFREVPLLQSLWLAHNEIRTVAAGALASLSHLKSLDLSHNLISDFAWSDLHNLSALQLLKMDSNELTFIPRDAFRSLRALRSLQLNHNRLHTLAEGTFTPLTALSHLQINENPFD

SEQ ID NO: 7228 - protein, 428 aa, Homo Sapiens
MQELHLLWWALLLGLAQACPEPCDCGEKYGFQIADCAYRDLESVPPGFPANVTTLSLSANRLPGLPEGAFREVPLLQSLWLAHNEIRTVAAGALASLSHLKSLDLSHNLISDFAWSDLHNLSALQLLKMDSNELTFIPRDAFRSLRALRSLQLNHNRLHTLAEGTFTPLTALSHLQINENPFDCTCGIVWLKTWALTTAVSIPEQDNIACTSPHVLKGTPLSRLPPLPCSAPSVQLSYQPSQDGAELRPGFVLALHCDVDGQPAPQLHWHIQIPSGIVEITSPNVGTDGRALPGTPVASSQPRFQAFANGSLLIPDFGKLEEGTYSCLATNELGSAESSVDVALATPGEGGEDTLGRRFHGKAVEGKGCYTVDNEVQPSGPEDNVVIIYLSRAGNPEAAVAEGVPGQLPPGLLLLGQSLLLFFFLTSF

SEQ ID NO: 7229 - protein, 428 aa, Homo Sapiens; identical to SEQ ID NO: 7228

SEQ ID NO: 7230 - protein, 5 aa, Homo Sapiens
MFPLR

SEQ ID NO: 7231 - protein, 89 aa, Homo Sapiens
MFPLRALWLVWALLGVAGSCPEPCACVDKYAHQFADCAYKELREVPEGLPANVTTLSLSANKITVLRRGAFADVTQVTSLWLAHNEVRT

SEQ ID NO: 7232 - protein, 114 aa, Homo Sapiens
MFPLRALWLVWALLGVAGSCPEPCACVDKYAHQFADCAYKELREVPEGLPANVTTLSLSANKITVLRRGAFADVTQVTSLWLAHNEVRTVEPGALAVLSQLKNLDLSHNFISSF

SEQ ID NO: 7233 - protein, 138 aa, Homo Sapiens
MFPLRALWLVWALLGVAGSCPEPCACVDKYAHQFADCAYKELREVPEGLPANVTTLSLSANKITVLRRGAFADVTQVTSLWLAHNEVRTVEPGALAVLSQLKNLDLSHNFISSFPWSDLRNLSALQLLKMNHNRLGSL

SEQ ID NO: 7234 - protein, 334 aa, Homo Sapiens
MFPLRALWLVWALLGVAGSCPEPCACVDKYAHQFADCAYKELREVPEGLPANVTTLSLSANKITVLRRGAFADVTQVTSLWLAHNEVRTVEPGALAVLSQLKNLDLSHNFISSFPWSDLRNLSALQLLKMNHNRLGSLPRDALGALPDLRSLRINNNRLAGEACHVQVVFSTKKELPSLLVIVAVSVFLLVLATVPLLGAACCHLLAKHPGKPYRLILRPQAPDPMEKRIAADFDPRASYLESEKSYPAGGEAGGEEPEDVQGEGLDEDAEQGDPSGDLQREESLAACSLVESQSKANQEEFEAGSEYSDRLPLGAEAVNIAQEINGNYRQTAG

SEQ ID NO: 7235 - protein, 745 aa, Homo Sapiens
MFPLRALWLVWALLGVAGSCPEPCACVDKYAHQFADCAYKELREVPEGLPANVTTLSLSANKITVLRRGAFADVTQVTSLWLAHNEVRTVEPGALAVLSQLKNLDLSHNFISSFPWSDLRNLSALQLLKMNHNRLGSLPRDALGALPDLRSLRINNNRLRTLAPGTFDALSALSHLQLYHNPFHCGCGLVWLQAWAASTRVSLPEPDSIACASPPALQGVPVYRLPALPCAPPSVHLSAEPPLEAPGTPLRAGLAFVLHCIADGHPTPRLQWQLQIPGGTVVLEPPVLSGEDDGVGAEEGEGEGDGDLLTQTQAQTPTPAPAWPAPPATPRFLALANGSLLVPLLSAKEAGVYTCRAHNELGANSTSIRVAVAATGPPKHAPGAGGEPDGQAPTSERKSTAKGRGNSVLPSKPEGKIKGQGLAKVSILGETETEPEEDTSEGEEAEDQILADPAEEQRCGNGDPSRYVSNHAFNQSAELKPHVFELGVIALDVAEREARVQLTPLAARWGPGPGGAGGAPRPGRRPLRLLYLCPAGGGAAVQWSRVEEGVNAYWFRGLRPGTNYSVCLALAGEACHVQVVFSTKKELPSLLVIVAVSVFLLVLATVPLLGAACCHLLAKHPGKPYRLILRPQAPDPMEKRIAADFDPRASYLESEKSYPAGGEAGGEEPEDVQGEGLDEDAEQGDPSGDLQREESLAACSLVESQSKANQEEFEAGSEYSDRLPLGAEAVNIAQEINGNYRQTAG

SEQ ID NO: 7236 - protein, 745 aa, Homo Sapiens; identical to SEQ ID NO: 7235

SEQ ID NO: 7237 - protein, 745 aa, Homo Sapiens; identical to SEQ ID NO: 7235

SEQ ID NO: 7238 - protein, 745 aa, Homo Sapiens; identical to SEQ ID NO: 7235

SEQ ID NO: 7239 - protein, 745 aa, Homo Sapiens; identical to SEQ ID NO: 7235

SEQ ID NO: 7240 - protein, 464 aa, Homo Sapiens
MVRLAAELLLLLGLLLLTLHITVLRGSGAADGPDAAAGNASQAQLQNNLNVGSDTTSETSFSLSKEAPREHLDHQAAHQPFPRPRFRQETGHPSLQRDFPRSFLLDLPNFPDLSKADINGQNPNIQVTIEVVDGPDSEADKDQHPENKPSWSVPSPDWRAWWQRSLSLARANSGDQDYKYDSTSDDSNFLNPPRGWDHTAPGHRTFETKDQPEYDSTDGEGDWSLWSVCSVTCGNGNQKRTRSCGYACTATESRTCDRPNCPGIEDTFRTAATEVSLLAGSEEFNATKLFEVDTDSCERWMSCKSEFLKKYMHKVMNDLPSCPCSYPTEVAYSTADIFDRIKRKDFRWKDASGPKEKLEIYKPTARYCIRSMLSLESTTLAAQHCCYGDNMQLITRGKGAGTPNLISTEFSAELHYKVDVLPWIICKGDWSRYNEARPPNNGQKCTESPSDEDYIKQFQEAREY

SEQ ID NO: 7241 - protein, 76 aa, Homo Sapiens
MRALRDRAGLLLCVLLLAALLEAALGLPVKKPRLRGPRPGSLTRLAEPPFQVRASSERSPAGARNLALCGVAGQGR

SEQ ID NO: 7242 - protein, 292 aa, Homo Sapiens
MRALRDRAGLLLCVLLLAALLEAALGLPVKKPRLRGPRPGSLTRLAEVSASPDPRPLKEEEEAPLLPRTHLQAEPHQHGCWTVTEPAAMTPGNATPPRTPEVTPLRLELQKLPGLANTTLSTPNPDTQASASPDPRPLREEEEARLLPRTHLQAELHQHGCWTVTEPAALTPGNATPPRTQEVTPLLLELQKLPELVHATLSTPNPDNQTMSLRRSGVPGLPAVGTAALASSRGLGPVAMAALPPRPVPVTCPPVLALRTRTPWASPVRSGSSWPAMLRTCMIKMWTAVRSG

SEQ ID NO: 7243 - protein, 571 aa, Homo Sapiens
MRALRDRAGLLLCVLLLAALLEAALGLPVKKPRLRGPRPGSLTRLAEVSASPDPRPLKEEEEAPLLPRTHLQAEPHQHGCWTVTEPAAMTPGNATPPRTPEVTPLRLELQKLPGLANTTLSTPNPDTQASASPDPRPLREEEEARLLPRTHLQAELHQHGCWTVTEPAALTPGNATPPRTQEVTPLLLELQKLPELVHATLSTPNPDNQVTIKVVEDPQAEVSIDLLAEPSNPPPQDTLSWLPALWSFLWGDYKGEEKDRAPGEKGEEKEEDEDYPSEDIEGEDQEDKEEDEEEQALWFNGTTDNWDQGWLAPGDWVFKDSVSYDYEPQKEWSPWSPCSGNCSTGKQQRTRPCGYGCTATETRTCDLPSCPGTEDKDTLGLPSEEWKLLARNATDMHDQDVDSCEKWLNCKSDFLIKYLSQMLRDLPSCPCAYPLEAMDSPVSLQDEHQGRSFRWRDASGPRERLDIYQPTARFCLRSMLSGESSTLAAQHCCYDEDSRLLTRGKGAGMPNLISTDFSPKLHFKFDTTPWILCKGDWSRLHAVLPPNNGRACTDNPLEEEYLAQLQEAKEY

SEQ ID NO: 7244 - protein, 185 aa, Homo Sapiens
MRALRDRAGLLLCVLLLAALLEAALGLPVKKPRLRGPRPGSLTRLAEVSASPDPRPLKEEEEAPLLPRTHLQAEPHQHGCWTVTEPAAMTPGNATPPRTPEVTPLRLELQKLPGLANTTLSTPNPDTQVTIKVVEDPQAEVSIDLLAEPSNPPPQDTLSWLPALWSFLWGDYKGEEKDRAPGEKG

SEQ ID NO: 7245 - protein, 104 aa, Homo Sapiens
  misc_feature (1)..(1): Xaa can be any naturally occurring amino acid
XCVLLLAALLEAALGLPVKKPRLRGPRPGSLTRLAEVSGGGTGLRSALSVPPPQPAGSSRAGSGTGTHTGSDPPMERGAGAGRKLPDTGRCPGAPDFGASTPRA

SEQ ID NO: 7246 - protein, 73 aa, Homo Sapiens
  misc_feature (1)..(1): Xaa can be any naturally occurring amino acid
XRLAEVSGGGTGLRSALSVPPPQPAGSSRAGSGTGTHTGSDPPMERGAGAGRKLPDTGRCPGAPDFGASTPRA

SEQ ID NO: 7247 - protein, 614 aa, Homo Sapiens
MAWEARREPGPRRAAVRETVMLLLCLGVPTGRPYNVDTESALLYQGPHNTLFGYSVVLHSHGANRWLLVGAPTANWLANASVINPGAIYRCRIGKNPGQTCEQLQLGSPNGEPCGKTCLEERDNQWLGVTLSRQPGENGSIVTCGHRWKNIFYIKNENKLPTGGCYGVPPDLRTELSKRIAPCYQDYVKKFGENFASCQAGISSFYTKDLIVMGAPGSSYWTGSLFVYNITTNKYKAFLDKQNQVKFGSYLGYSVGAGHFRSQHTTEVVGGAPQHEQIGKAYIFSIDEKELNILHEMKGKKLGSYFGASVCAVDLNADGFSDLLVGAPMQSTIREEGRVFVYINSGSGAVMNAMETNLVGSDKYAARFGESIVNLGDIDNDGFEDVAIGAPQEDDLQGAIYIYNGRADGISSTFSQRIEGLQISKSLSMFGQSISGQIDADNNGYVDVAVGAFRSDSAVLLRTRPVVIVDASLSHPESVNRTKFDCVENGWPSVCIDLTLCFSYKGKEVPGYIVLFYNMSLDVNRKAESPPRFYFSSNGTSDVITGSIQVSSREANCRTHQAFMRKDVRDILTPIQIEAAYHLGPHVISKRSTEEFPPLQPILQQKKEKDIMKK

SEQ ID NO: 7248 - protein, 1032 aa, Homo Sapiens [sequence omitted]

SEQ ID NO: 7249 - protein, 195 aa, Homo Sapiens
MAWEARREPGPRRAAVRETVMLLLCLGVPTGRPYNVDTESALLYQGPHNTLFGYSVVLHSHGANRWLLVGAPTANWLANASVINPGAIYRCRIGKNPGQTCEQLQLGSPNGEPCGKTCLEERDNQWLGVTLSRQPGENGSIVTCGHRWKNIFYIKNENKLPTGGCYGVPPDLRTELSKRIAPCYQGSISKYRART

SEQ ID NO: 7250 - protein, 1035 aa, Homo Sapiens
MGGPAAPRGAGRLRALLLALVVAGIPAGAYNLDPQRPVHFQGPADSFFGYAVLEHFHDNTRWVLVGAPKADSKYSPSVKSPGAVFKCRVHTNPDRRCTELDMARGKNRGTSCGKTCREDRDDEWMGVSLARQPKADGRVLACAHRWKNIYYEADHILPHGFCYIIPSNLQAKGRTLIPCYEEYKKKYGEEHGSCQAGIAGFFTEELVVMGAPGSFYWAGTIKVLNLTDNTYLKLNDEVIMNRRYTYLGYAVTAGHFSHPSTIDVVGGAPQDKGIGKVYIFRADRRSGTLIKIFQASGKKMGSYFGSSLCAVDLNGDGLSDLLVGAPMFSEIRDEGQVTVYINRGNGALEEQLALTGDGAYNAHFGESIASLDDLDNDGFPDVAIGAPKEDDFAGAVYIYHGDAGGIVPQYSMKLSGQKINPVLRMFGQSISGGIDMDGNGYPDVTVGAFMSDSVVLLRARPVITVDVSIFLPGSINITAPQCHDGQQPVNCLNVTTCFSFHGKHVPGEIGLNYVLMADVAKKEKGQMPRVYFVLLGETMGQVTEKLQLTYMEETCRHYVAHVKRRVQDVISPIVFEAAYSLSEHVTGEEERELPPLTPVLRWKKGQKIAQKNQTVFERNCRSEDCAADLQLQGKLLLSSMDEKTLYLALGAVKNISLNISISNLGDDAYDANVSFNVSRELFFINMWQKEEMGISCELLESDFLKCSVGFPFMRSKSKYEFSVIFDTSHLSGEEEVLSFIVTAQSGNTERSESLHDNTLVLMVPLMHEVDTSITGIMSPTSFVYGESVDAANFIQLDDLECHFQPINITLQVYNTGPSTLPGSSVSISFPNRLSSGGAEMFHVQEMVVGQEKGNCSFQKNPTPCIIPQEQENIFHTIFAFFTKSGRKVLDCEKPGISCLTAHCNFSALAKEESRTIDIYMLLNTEILKKDSSSVIQFMSRAKVKVDPALRVVEIAHGNPEEVTVVFEALHNLEPRGYVVGWIIAISLLVGILIFLLLAVLLWKMGFFRRRYKEIIEAEKNRKENEDSWDWVQKNQ

SEQ ID NO: 7251 - protein, 632 aa, Homo Sapiens
MGGPAAPRGAGRLRALLLALVVAGIPAGAYNLDPQRPVHFQGPADSFFGYAVLEHFHDNTRWVLVGAPKADSKYSPSVKSPGAVFKCRVHTNPDRRCTELDMARGKNRGTSCGKTCREDRDDEWMGVSLARQPKADGRVLACAHRWKNIYYEADHILPHGFCYIIPSNLQAKGRTLIPCYEEYKKKYGEEHGSCQAGIAGFFTEELVVMGAPGSFYWAGTIKVLNLTDNTYLKLNDEVIMNRRYTYLGYAVTAGHFSHPSTIDVVGGAPQDKGIGKVYIFRADRRSGTLIKIFQASGKKMGSYFGSSLCAVDLNGDGLSDLLVGAPMFSEIRDEGQVTVYINRGNGALEEQLALTGDGAYNAHFGESIASLDDLDNDGFPDVAIGAPKEDDFAGAVYIYHGDAGGIVPQYSMKLSGQKINPVLRMFGQSISGGIDMDGNGYPDVTVGAFMSDSVVLLRARPVITVDVSIFLPGSINITAPQCHDGQQPVNCLNVTTCFSFHGKHVPGEIGLNYVLMADVAKKEKGQMPRVYFVLLGETMGQVTEKLQLTYMEETCRHYVAHVKRRVQDVISPIVFEAAYSLSEHVTGEEERELPPLTPVLRWKKGQKIAQKNQVRTLKLILSTQGGSCTEQK

SEQ ID NO: 7252 - protein, 69 aa, Homo Sapiens
  misc_feature (1)..(1): Xaa can be any naturally occurring amino acid
XKKDSSSVIQFMSRAKVKVDPALRVVEIAHGNPEEVTMGFFRRRYKEIIEAEKNRKENEDSWDWVQKNQ

SEQ ID NO: 7253 - protein, 404 aa, Homo Sapiens
MKDSCITVMAMALLSGFFFFAPASSYNLDVRGARSFSPPRAGRHFGYRVLQIKSLIPQFQGRLVANLTYTLQLDGHRTRRRGLFPGGRHELRRNIAVTTSMSCTDFSFHFPMMFNTLVNSSWGDSVELHANVTCNNEDSDLLEDNSATTIIPILYPINILIQDQEDSTLYVSFTPKGPKIHQVKHMYQVRIQPSIHDHNIPTLEAVVGVPQPPSEGPITHQWSVQMEPPVPCHYEDLERLPDAAEPCLPGALFRCPVVFRQEILVQVIGTLELVGEIEASSMFSLCSSLSISFNSSKHFHLYGSNASLAQVVMKVDVVYEKQMLYLYVLSGIGGLLLLLLIFIVLYKVGFFKRNLKEKMEAGRGVPNGIPAEDSEQLASGQEAGDPGCLKPLHEKDSESGGGKD

SEQ ID NO: 7254 - protein, 109 aa, Homo Sapiens
MKDSCITVMAMALLSGFFFFAPASSYNLDVRGARSFSPPRAGRHFGYRVLQLDGHRTRRRGLFPGGRHELRRNIAVTTSMSCTDFSFHFPIQSPASNCFCQPLCGAEPE

SEQ ID NO: 7255 - protein, 55 aa, Homo Sapiens
MKDSCITVMAMALLSGFFFFAPASSYNLDVRGARSFSPPRAGRHFGYRVLQVGNG

SEQ ID NO: 7256 - protein, 1170 aa, Homo Sapiens
MKDSCITVMAMALLSGFFFFAPASSYNLDVRGARSFSPPRAGRHFGYRVLQVGNGVIVGAPGEGNSTGSLYQCQSGTGHCLPVTLRGSNYTSKYLGMTLATDPTDGSILACDPGLSRTCDQNTYLSGLCYLFRQNLQGPMLQGRPGFQECIKGNVDLVFLFDGSMSLQPDEFQKILDFMKDVMKKLSNTSYQFAAVQFSTSYKTEFDFSDYVKRKDPDALLKHVKHMLLLTNTFGAINYVATEVFREELGARPDATKVLIIITDGEATDSGNIDAAKDIIRYIIGIGKHFQTKESQETLHKFASKPASEFVKILDTFEKLKDLFTELQKKIYVIEGTSKQDLTSFNMELSSSGISADLSRGHAVVGAVGAKDWAGGFLDLKADLQDDTFIGNEPLTPEVRAGYLGYTVTWLPSRQKTSLLASGAPRYQHMGRVLLFQEPQGGGHWSQVQTIHGTQIGSYFGGELCGVDVDQDGETELLLIGAPLFYGEQRGGRVFIYQRRQLGFEEVSELQGDPGYPLGRFGEAITALTDINGDGLVDVAVGAPLEEQGAVYIFNGRHGGLSPQPSQRIEGTQVLSGIQWFGRSIHGVKDLEGDGLADVAVGAESQMIVLSSRPVVDMVTLMSFSPAEIPVHEVECSYSTSNKMKEGVNITICFQIKSLIPQFQGRLVANLTYTLQLDGHRTRRRGLFPGGRHELRRNIAVTTSMSCTDFSFHFPVCVQDLISPINVSLNFSLWEEEGTPRDQRAQGKDIPPILRPSLHSETWEIPFEKNCGEDKKCEANLRVSFSPARSRALRLTAFASLSVELSLSNLEEDAYWVQLDLHFPPGLSFRKVEMLKPHSQIPVSCEELPEESRLLSRALSCNVSSPIFKAGHSVALQMMFNTLVNSSWGDSVELHANVTCNNEDSDLLEDNSATTIIPILYPINILIQDQEDSTLYVSFTPKGPKIHQVKHMYQVRIQPSIHDHNIPTLEAVVGVPQPPSEGPITHQWSVQMEPPVPCHYEDLERLPDAAEPCLPGALFRCPVVFRQEILVQVIGTLELVGEIEASSMFSLCSSLSISFNSSKHFHLYGSNASLAQVVMKVDVVYEKQMLYLYVLSGIGGLLLLLLIFIVLYKVGFFKRNLKEKMEAGRGVPNGIPAEDSEQLASGQEAGDPGCLKPLHEKDSESGGGKD

SEQ ID NO: 7257 - protein, 162 aa, Homo Sapiens
MKDSCITVMAMALLSGFFFFAPASSYNLDVRGARSFSPPRAGRHFGYRVLQVGNGVIVGAPGEGNSTGSLYQCQSGTGHCLPVTLRGSNYTSKYLGMTLATDPTDGSILACDPGLSRTCDQNTYLSGLCYLFRQNLQGPMLQGRPGFQVCCCSVFHKLQNRI

SEQ ID NO: 7258 - protein, 1086 aa, Homo Sapiens
MKDSCITVMAMALLSGFFFFAPASSYNLDVRGARSFSPPRAGRHFGYRVLQVGNGVIVGAPGEGNSTGSLYQCQSGTGHCLPVTLRGSNYTSKYLGMTLATDPTDGSILFAAVQFSTSYKTEFDFSDYVKRKDPDALLKHVKHMLLLTNTFGAINYVATEVFREELGARPDATKVLIIITDGEATDSGNIDAAKDIIRYIIGIGKHFQTKESQETLHKFASKPASEFVKILDTFEKLKDLFTELQKKIYVIEGTSKQDLTSFNMELSSSGISADLSRGHAVVGAVGAKDWAGGFLDLKADLQDDTFIGNEPLTPEVRAGYLGYTVTWLPSRQKTSLLASGAPRYQHMGRVLLFQEPQGGGHWSQVQTIHGTQIGSYFGGELCGVDVDQDGETELLLIGAPLFYGEQRGGRVFIYQRRQLGFEEVSELQGDPGYPLGRFGEAITALTDINGDGLVDVAVGAPLEEQGAVYIFNGRHGGLSPQPSQRIEGTQVLSGIQWFGRSIHGVKDLEGDGLADVAVGAESQMIVLSSRPVVDMVTLMSFSPAEIPVHEVECSYSTSNKMKEGVNITICFQIKSLIPQFQGRLVANLTYTLQLDGHRTRRRGLFPGGRHELRRNIAVTTSMSCTDFSFHFPVCVQDLISPINVSLNFSLWEEEGTPRDQRAGKDIPPILRPSLHSETWEIPFEKNCGEDKKCEANLRVSFSPARSRALRLTAFASLSVELSLSNLEEDAYWVQLDLHFPPGLSFRKVEMLKPHSQIPVSCEELPEESRLLSRALSCNVSSPIFKAGHSVALQMMFNTLVNSSWGDSVELHANVTCNNEDSDLLEDNSATTIIPILYPINILIQDQEDSTLYVSFTPKGPKIHQVKHMYQVRIQPSIHDHNIPTLEAVVGVPQPPSEGPITHQWSVQMEPPVPCHYEDLERLPDAAEPCLPGALFRCPVVFRQEILVQVIGTLELVGEIEASSMFSLCSSLSISFNSSKHFHLYGSNASLAQVVMKVDVVYEKQMLYLYVLSGIGGLLLLLLIFIVLYKVGFFKRNLKEKMEAGRGVPNGIPAEDSEQLASGQEAGDPGCLKPLHEKDSESGGGKD

SEQ ID NO: 7259 - protein, 204 aa, Homo Sapiens
MKDSCITVMAMALLSGFFFFAPASSYNLDVRGARSFSPPRAGRHFGYRVLQVGNGVIVGAPGEGNSTGSLYQCQSGTGHCLPVTLRGSNYTSKYLGMTLATDPTDGSILFAAVQFSTSYKTEFDFSDYVKRKDPDALLKHVKHMLLLTNTFGAINYVATEVFREELGARPDATKVLIIITDGEATDSGNIDAAKDIIRYIIGVG

SEQ ID NO: 7260 - protein, 90 aa, Homo Sapiens
MKDSCITVMAMALLSGFFFFERPNGKLYPQALGRAFRALGGPGVAPSIFPEVNALEGKRRVRVAWGATSGWAWDRPPAGHVQGRGSLGRS

SEQ ID NO: 7261 - protein, 41 aa, Homo Sapiens
MTLATDPTDGSILACDPGLSRTCDQNTYLSGLCYLFRQNLQ

SEQ ID NO: 7262 - protein, 38 aa, Homo Sapiens
  misc_feature (1)..(1): Xaa can be any naturally occurring amino acid
XKEGVNITICFQIKSLIPQFQAGWPPDQKTGVVPRRET

SEQ ID NO: 7263 - protein, 1163 aa, Homo Sapiens
MTRTRAALLLFTALATSLGFNLDTEELTAFRVDSAGFGDSVVQYANSWVVVGAPQKITAANQTGGLYQCGYSTGACEPIGLQVPPEAVNMSLGLSLASTTSPSQLLACGPTVHHECGRNMYLTGLCFLLGPTQLTQRLPVSRQECPRQEQDIVFLIDGSGSISSRNFATMMNFVRAVISQFQRPSTQFSLMQFSNKFQTHFTFEEFRRSSNPLSLLASVHQLQGFTYTATAIQNVVHRLFHASYGARRDAAKILIVITDGKKEGDSLDYKDVIPMADAAGIIRYAIGVGLAFQNRNSWKELNDIASKPSQEHIFKVEDFDALKDIQNQLKEKIFAIEGTETTSSSSFELEMAQEGFSAVFTPDGPVLGAVGSFTWSGGAFLYPPNMSPTFINMSQENVDMRDSYLGYSTELALWKGVQSLVLGAPRYQHTGKAVIFTQVSRQWRMKAEVTGTQIGSYFGASLCSVDVDSDGSTDLVLIGAPHYYEQTRGGQVSVCPLPRGWRRWWCDAVLYGEQGHPWGRFGAALTVLGDVNGDKLTDVVIGAPGEEENRGAVYLFHGVLGPSISPSHSQRIAGSQLSSRLQYFGQALSGGQDLTQDGLVDLAVGARGQVLLLRTRPVLWVGVSMQFIPAEIPRSAFECREQVVSEQTLVQSNICLYIDKRSKNLLGSRDLQSSVTLDLALDPGRLSPRATFQETKNRSLSRVRVLGLKAHCENFNLLLPSCVEDSVTPITLRLNFTLVGKPLLAFRNLRPMLAADAQRYFTASLPFEKNCGADHICQDNLGISFSFPGLKSLLVGSNLELNAEVMVWNDGEDSYGTTITFSHPAGLSYRYVAEGQKQGQLRSLHLTCDSAPVGSQGTWSTSCRINHLIFRGGAQITFLATFDVSPKAVLGDRLLLTANVSSENNTPRTSKTTFQLELPVKYAVYTVVSSHEQFTKYLNFSESEEKESHVAMHRYQVNNLGQRDLPVSINFWVPVELNQEAVWMDVEVSHPQNPSLRCSSEKIAPPASDFLAHIQKNPVLDCSIAGCLRFRCDVPSFSVQEELDFTLKGNLSFGWVRQILQKKVSVVSVAEITFDTSVYSQLPGQEAFMRAQTTTVLEKYKVHNPTPLIVGSSIGGLLLLALITAVLYKVGFFKRQYKEMMEEANGQIAPENGTQTPSPPSEK

SEQ ID NO: 7264 - protein, 1169 aa, Homo Sapiens
MTRTRAALLLFTALATSLGFNLDTEELTAFRVDSAGFGDSVVQYANSWVVVGAPQKITAANQTGGLYQCGYSTGACEPIGLQVPPEAVNMSLGLSLASTTSPSQLLACGPTVHHECGRNMYLTGLCFLLGPTQLTQRLPVSRQECPRQEQDIVFLIDGSGSISSRNFATMMNFVRAVISQFQRPSTQFSLMQFSNKFQTHFTFEEFRRSSNPLSLLASVHQLQGFTYTATAIQNVVHRLFHASYGARRDAAKILIVITDGKKEGDSLDYKDVIPMADAAGIIRYAIGVGLAFQNRNSWKELNDIASKPSQEHIFKVEDFDALKDIQNQLKEKIFAIEGTETTSSSSFELEMAQEGFSAVFTPDGPVLGAVGSFTWSGGAFLYPPNMSPTFINMSQENVDMRDSYLGYSTELALWKGVQSLVLGAPRYQHTGKAVIFTQVSRQWRMKAEVTGTQIGSYFGASLCSVDVDSDGSTDLVLIGAPHYYEQTRGGQVSVCPLPRGWRRWWCDAVLYGEQGHPWGRFGAALTVLGDVNGDKLTDVVIGAPGEEENRGAVYLFHGVLGPSISPSHSQRIAGSQLSSRLQYFGQALSGGQDLTQDGLVDLAVGARGQVLLLRTRPVLWVGVSMQFIPAEIPRSAFECREQVVSEQTLVQSNICLYIDKRSKNLLGSRDLQSSVTLDLALDPGRLSPRATFQETKNRSLSRVRVLGLKAHCENFNLLLPSCVEDSVTPITLRLNFTLVGKPLLAFRNLRPMLAADAQRYFTASLPFEKNCGADHICQDNLGISFSFPGLKSLLVGSNLELNAEVMVWNDGEDSYGTTITFSHPAGLSYRYVAEGQKQGQLRSLHLTCDSAPVGSQGTWSTSCRINHLIFRGGAQITFLATFDVSPKAVLGDRLLLTANVSSENNTPRTSKTTFQLELPVKYAVYTVVSSHEQFTKYLNFSESEEKESHVAMHRYQVNNLGQRDLPVSINFWVPVELNQEAVWMDVEVSHPQNPSLRCSSEKIAPPASDFLAHIQKNPVLDCSIAGCLRFRCDVPSFSVQEELDFTLKGNLSFGWVRQILQKKVSVVSVAEITFDTSVYSQLPGQEAFMRAQTTTVLEKYKVHNPTPLIVGSSIGGLLLLALITAVLYKVGFFKRQYKEMMEEANGQIAPENGTQTPSPPTPHYPQDNV

SEQ ID NO: 7265 - protein, 181 aa, Homo Sapiens
MTRTRAALLLFTALATSLGFNLDTEELTAFRVDSAGFGDSVVQYANSWVVVGAPQKITAANQTGGLYQCGYSTGACEPIGLQVPPEAVNMSLGLSLASTTSPSQLLLTQRLPVSRQGECRDHQGFEELTHIQLGVRWARDSLARVDQKEGIWKKSYHVLQWFLTLLPAHPADRPHAAGPFL

SEQ ID NO: 7266 - protein, 49 aa, Homo Sapiens
MNLQPIFWIGLISSVCCVFAQTDENRCLKANAKSCGECIQAGPNCGWCT

SEQ ID NO: 7267 - protein, 89 aa, Homo Sapiens
MNLQPIFWIGLISSVCCVFAQTDENRCLKANAKSCGECIQAGPNCGWCTNSTFLQEGMPTSARCDDLEALKKKGCPPDDIENPRGSKDI

SEQ ID NO: 7268 - protein, 104 aa, Homo Sapiens
MNLQPIFWIGLISSVCCVFAQTDENRCLKANAKSCGECIQAGPNCGWCTNSTFLQEGMPTSARCDDLEALKKKGCPPDDIENPRGSKDIKKNKNVTNRSKGTAE

SEQ ID NO: 7269 - protein, 125 aa, Homo Sapiens
MNLQPIFWIGLISSVCCVFAQTDENRCLKANAKSCGECIQAGPNCGWCTNSTFLQEGMPTSARCDDLEALKKKGCPPDDIENPRGSKDIKKNKNVTNRSKGTAEKLKPEDITQIQPQQLVLRLRS

SEQ ID NO: 7270 - protein, 136 aa, Homo Sapiens
MNLQPIFWIGLISSVCCVFAQTDENRCLKANAKSCGECIQAGPNCGWCTNSTFLQEGMPTSARCDDLEALKKKGCPPDDIENPRGSKDIKKNKNVTNRSKGTAEKLKPEDITQIQPQQLVLRLRSGEPQTFTLKFK

SEQ ID NO: 7271 - protein, 143 aa, Homo Sapiens
MNLQPIFWIGLISSVCCVFAQTDENRCLKANAKSCGECIQAGPNCGWCTNSTFLQEGMPTSARCDDLEALKKKGCPPDDIENPRGSKDIKKNKNVTNRSKGTAEKLKPEDITQIQPQQLVLRLRSGEPQTFTLKFKRAEDYPI

SEQ ID NO: 7272 - protein, 163 aa, Homo Sapiens
MNLQPIFWIGLISSVCCVFAQTDENRCLKANAKSCGECIQAGPNCGWCTNSTFLQEGMPTSARCDDLEALKKKGCPPDDIENPRGSKDIKKNKNVTNRSKGTAEKLKPEDITQIQPQQLVLRLRSGEPQTFTLKFKRAEDYPIDLYYLMDLSYSMKDDLENVK

SEQ ID NO: 7273 - protein, 798 aa, Homo Sapiens
MNLQPIFWIGLISSVCCVFAQTDENRCLKANAKSCGECIQAGPNCGWCTNSTFLQEGMPTSARCDDLEALKKKGCPPDDIENPRGSKDIKKNKNVTNRSKGTAEKLKPEDITQIQPQQLVLRLRSGEPQTFTLKFKRAEDYPIDLYYLMDLSYSMKDDLENVKSLGTDLMNEMRRITSDFRIGFGSFVEKTVMPYISTTPAKLRNPCTSEQNCTSPFSYKNVLSLTNKGEVFNELVGKQRISGNLDSPEGGFDAIMQVAVCGSLIGWRNVTRLLVFSTDAGFHFAGDGKLGGIVLPNDGQCHLENNMYTMSHYYDYPSIAHLVQKLSENNIQTIFAVTEEFQPVYKELKNLIPKSAVGTLSANSSNVIQLIIDAYNSLSSEVILENGKLSEGVTISYKSYCKNGVNGTGENGRKCSNISIGDEVQFEISITSNKCPKKDSDSFKIRPLGFTEEVEVILQYICECECQSEGIPESPKCHEGNGTFECGACRCNEGRVGRHCECSTDEVNSEDMDAYCRKENSSEICSNNGECVCGQCVCRKRDNTNEIYSGKFCECDNFNCDRSNGLICGGNGVCKCRVCECNPNYTGSACDCSLDTSTCEASNGQICNGRGICECGVCKCTDPKFQGQTCEMCQTCLGVCAEHKECVQCRAFNKGEKKDTCTQECSYFNITKVESRDKLPQPVQPDPVSHCKEKDVDDCWFYFTYSVNGNNEVMVHVVENPECPTGPDIIPIVAGVVAGIVLIGLALLLIWKLLMIIHDRREFAKFEKEKMNAKWDTGENPIYKSAVTTVVNPKYEGK

SEQ ID NO: 7274 - protein, 798 aa, Homo Sapiens; identical to SEQ ID NO: 7273

SEQ ID NO: 7275 - protein, 801 aa, Homo Sapiens
MNLQPIFWIGLISSVCCVFAQTDENRCLKANAKSCGECIQAGPNCGWCTNSTFLQEGMPTSARCDDLEALKKKGCPPDDIENPRGSKDIKKNKNVTNRSKGTAEKLKPEDITQIQPQQLVLRLRSGEPQTFTLKFKRAEDYPIDLYYLMDLSYSMKDDLENVKSLGTDLMNEMRRITSDFRIGFGSFVEKTVMPYISTTPAKLRNPCTSEQNCTSPFSYKNVLSLTNKGEVFNELVGKQRISGNLDSPEGGFDAIMQVAVCGSLIGWRNVTRLLVFSTDAGFHFAGDGKLGGIVLPNDGQCHLENNMYTMSHYYDYPSIAHLVQKLSENNIQTIFAVTEEFQPVYKELKNLIPKSAVGTLSANSSNVIQLIIDAYNSLSSEVILENGKLSEGVTISYKSYCKNGVNGTGENGRKCSNISIGDEVQFEISITSNKCPKKDSDSFKIRPLGFTEEVEVILQYICECECQSEGIPESPKCHEGNGTFECGACRCNEGRVGRHCECSTDEVNSEDMDAYCRKENSSEICSNNGECVCGQCVCRKRDNTNEIYSGKFCECDNFNCDRSNGLICGGNGVCKCRVCECNPNYTGSACDCSLDTSTCEASNGQICNGRGICECGVCKCTDPKFQGQTCEMCQTCLGVCAEHKECVQCRAFNKGEKKDTCTQECSYFNITKVESRDKLPQPVQPDPVSHCKEKDVDDCWFYFTYSVNGNNEVMVHVVENPECPTGPDIIPIVAGVVAGIVLIGLALLLIWKLLMIIHDRREFAKFEKEKMNAKWDTQENPIYKSPINNFKNPNYGRKAGL

SEQ ID NO: 7276 - protein, 152 aa, Homo Sapiens
MNLQPIFWIGLISSVCCVFAQTDENRCLKANAKSCGECIQAGPNCGWCTNSVSKTFLQEGMPTSARCDDLEALKKKGCPPDDIENPRGSKDIKKNKNVTNRSKGTAEKLKPEDITQIQPQQLVLRLRSGEPQTFTLKFKRAEDYPIDLYYLM

SEQ ID NO: 7277 - protein, 14 aa, Homo Sapiens
MPTSARCDDLEALK

SEQ ID NO: 7278 - protein, 31 aa, Homo Sapiens
MPTSARCDDLEALKKKGCPPDDIENPRGSKD

SEQ ID NO: 7279 - protein, 98 aa, Homo Sapiens
MPTSARCDDLEALKKKGCPPDDIENPRGSKDIKKNKNVTNRSKGTAEKLKPEDITQIQPQQLVLRLRSGEPQTFTLKFKRAEDYPIDLYYLMDLSYSM

SEQ ID NO: 7280 - protein, 108 aa, Homo Sapiens
  misc_feature (1)..(1): Xaa can be any naturally occurring amino acid
XDMDAYCRKENSSEICSNNGECVCGQCVCRKRDNTNEIYSGKFCECDNFNCDRSNGLICGGNGVCKCRVCECNPNYTGSACDCSLDTSTCEASNGQICNGRGICECGV

SEQ ID NO: 7281 - protein, 70 aa, Homo Sapiens
  misc_feature (1)..(1): Xaa can be any naturally occurring amino acid
XVAGVVAGIVLIGLALLLIWKLLMIIHDRREFAKFEKEKMNAKWDTQENPIYKSPINNFKNPNYGRKAGL

SEQ ID NO: 7282 - protein, 322 aa, Homo Sapiens
GRLGKDLATGVLSQECTKFKVSSCRECIESGPGCTWCQKLNFTGPGDPDSIRCDTRPQLLMRGCAADDIMDPTSLAETQEDHNGGQKQLSPQKVTLYLRPGQAAAFNVTFRRAKGYPIDLYYLMDLSYSMLDDLRNVKKLGGDLLRALNEITESGRIGFGSFVDKTVLPFVNTHPDKLRNPCPNKEKECQPPFAFRHVLKLTNNSNQFQTEVGKQLISGNLDAPEGGLDAMMQVAACPEEIGWRNVTRLLVFATDDGFHFAGDGKLGAILTPNDGRCHLEDNLYKRSNEFDYPSVGQLAHKLAENNIQPIFAVTSRMVKTYE

SEQ ID NO: 7283 - protein, 71 aa, Homo Sapiens
MLGLRPPLLALVGLLSLGCGRPRAPTHQPASSLSPLSGVHEVQGQQLPGMHRVGARLHLVPEAELHRAGGS

SEQ ID NO: 7284 - protein, 49 aa, Homo Sapiens
MLGLRPPLLALVGLLSLGCVLSQECTKFKVSSCRECIESGPGCTWCQKL

SEQ ID NO: 7285 - protein, 93 aa, Homo Sapiens
MLGLRPPLLALVGLLSLGCVLSQECTKFKVSSCRECIESGPGCTWCQKLGAALGPPAHATAASSPRRRSRVAPVCPRTEQGGQAPELHRAGGS

SEQ ID NO: 7286 - protein, 108 aa, Homo Sapiens
MLGLRPPLLALVGLLSLGCVLSQECTKFKVSSCRECIESGPGCTWCQKLGAALGPPAHATAASSPRRRSRVAPVCPRTEQGGQAPGGNYLGQAGFFPSPFWRFSAPLK

SEQ ID NO: 7287 - protein, 70 aa, Homo Sapiens
MLGLRPPLLALVGLLSLGCVLSQECTKFKVSSCRECIESGPGCTWCQKLNFTGPGDPDSIRCDTRPQLLM

SEQ ID NO: 7288 - protein, 712 aa, Homo Sapiens
MLGLRPPLLALVGLLSLGCVLSQECTKFKVSSCRECIESGPGCTWCQKLNFTGPGDPDSIRCDTRPQLLMRGCAADDIMDPTSLAETQEDHNGGQKQLSPQKVTLYLRPGFGSFVDKTVLPFVNTHPDKLRNPCPNKEKECQPPFAFRHVLKLTNNSNQFQTEVGKQLISGNLDAPEGGLDAMMQVAACPEEIGWRNVTRLLVFATDDGFHFAGDGKLGAILTPNDGRCHLEDNLYKRSNEFDYPSVGQLAHKLAENNIQPIFAVTSRMVKTYEKLTEIIPKSAVGELSEDSSNVVHLIKNAYNKLSSRVFLDHNALPDTLKVTYDSFCSNGVTHRNQPRGDCDGVQINVPITFQVKVTATECIQEQSFVIRALGFTDIVTVQVLPQCECRCRDQSRDRSLCHGKGFLECGICRCDTGYIGKNCECQTQGRSSQELEGSCRKDNNSIICSGLGDCVCGQCLCHTSDVPGKLIYGQYCECDTINCERYNGQVCGGPGRGLCFCGKCRCHPGFEGSACQCERTTEGCLNPRRVECSGRGRCRCNVCECHSGYQLPLCQECPGCPSPCGKYISCAECLKFEKGPFGKNCSAACPGLQLSNNPVKGRTCKERDSEGCWVAYTLEQQDGMDRYLIYVDESRECVAGPNIAAIVGGTVAGIVLIGILLLVIWKALIHLSDLREYRRFEKEKLKSQWNNDNPLFKSATTTVMNPKFAES

SEQ ID NO: 7289 - protein, 120 aa, Homo Sapiens
MLGLRPPLLALVGLLSLGCVLSQECTKFKVSSCRECIESGPGCTWCQKLNFTGPGDPDSIRCDTRPQLLMRGCAADDIMDPTSLAETQEDHNGGQKQLSPQKVTLYLRPGQAAAFNVTFR

SEQ ID NO: 7290 - protein, 160 aa, Homo Sapiens
MLGLRPPLLALVGLLSLGCVLSQECTKFKVSSCRECIESGPGCTWCQKLNFTGPGDPDSIRCDTRPQLLMRGCAADDIMDPTSLAETQEDHNGGQKQLSPQKVTLYLRPGQAAAFNVTFRRAKGYPIDLYYLMDLSYSMLDDLRNVKKLGGDLLRALNEI

SEQ ID NO: 7291 - protein, 166 aa, Homo Sapiens
MLGLRPPLLALVGLLSLGCVLSQECTKFKVSSCRECIESGPGCTWCQKLNFTGPGDPDSIRCDTRPQLLMRGCAADDIMDPTSLAETQEDHNGGQKQLSPQKVTLYLRPGQAAAFNVTFRRAKGYPIDLYYLMDLSYSMLDDLRNVKKLGGDLLRALNEITESGRI

SEQ ID NO: 7292 - protein, 769 aa, Homo Sapiens
MLGLRPPLLALVGLLSLGCVLSQECTKFKVSSCRECIESGPGCTWCQKLNFTGPGDPDSIRCDTRPQLLMRGCAADDIMDPTSLAETQEDHNGGQKQLSPQKVTLYLRPGQAAAFNVTFRRAKGYPIDLYYLMDLSYSMLDDLRNVKKLGGDLLRALNEITESGRIGFGSFVDKTVLPFVNTHPDKLRNPCPNKEKECQPPFAFRHVLKLTNNSNQFQTEVGKQLISGNLDAPEGGLDAMMQVAACPEEIGWRNVTRLLVFATDDGFHFAGDGKLGAILTPNDGRCHLEDNLYKRSNEFDYPSVGQLAHKLAENNIQPIFAVTSRMVKTYEKLTEIIPKSAVGELSEDSSNVVHLIKNAYNKLSSRVFLDHNALPDTLKVTYDSFCSNGVTHRNQPRGDCDGVQINVPITFQVKVTATECIQEQSFVIRALGFTDIVTVQVLPQCECRCRDQSRDRSLCHGKGFLECGICRCDTGYIGKNCECQTQGRSSQELEGSCRKDNNSIICSGLGDCVCGQCLCHTSDVPGKLIYGQYCECDTINCERYNGQVCGGPGRGLCFCGKCRCHPGFEGSACQCERTTEGCLNPRRVECSGRGRCRCNVCECHSGYQLPLCQECPGCPSPCGKYISCAECLKFEKGPFGKNCSAACPGLQLSNNPVKGRTCKERDSEGCWVAYTLEQQDGMDRYLIYVDESRECVAGPNIAAIVGGTVAGIVLIGILLLVIWKALIHLSDLREYRRFEKEKLKSQWNNDNPLFKSATTTVMNPKFAES

SEQ ID NO: 7293 - protein, 769 aa, Homo Sapiens; identical to SEQ ID NO: 7292

SEQ ID NO: 7294 - protein, 769 aa, Homo Sapiens; identical to SEQ ID NO: 7292

SEQ ID NO: 7295 - protein, 769 aa, Homo Sapiens; identical to SEQ ID NO: 7292

SEQ ID NO: 7296 - protein, 769 aa, Homo Sapiens; identical to SEQ ID NO: 7292

SEQ ID NO: 7297 - protein, 37 aa, Homo Sapiens
MRGCAADDIMDPTSLAETQEDHNGGQKQLSPQKVTLY

SEQ ID NO: 7298 - protein, 49 aa, Homo Sapiens
MRGCAADDIMDPTSLAETQEDHNGGQKQLSPQKVTLYLRPGQAAAFNVT

SEQ ID NO: 7299 - protein, 35 aa, Homo Sapiens
LKSCMGLKIGDTVRWAGQGLCPGASVGTQPPFFLL

SEQ ID NO: 7300 - protein, 788 aa, Homo Sapiens
MRARPRPRPLWATVLALGALAGVGVGGPNICTTRGVSSCQQCLAVSPMCAWCSDEALPLGSPRCDLKENLLKDNCAPESIEFPVSEARVLEDRPLSDKGSGDSSQVTQVSPQRIALRLRPDDSKNFSIQVRQVEDYPVDIYYLMDLSYSMKDDLWSIQNLGTKLATQMRKLTSNLRIGFGAFVDKPVSPYMYISPPEALENPCYDMKTTCLPMFGYKHVLTLTDQVTRFNEEVKKQSVSRNRDAPEGGFDAIMQATVCDEKIGWRNDASHLLVFTTDAKTHIALDGRLAGIVQPNDGQCHVGSDNHYSASTTMDYPSLGLMTEKLSQKNINLIFAVTENVVNLYQNYSELIPGTTVGVLSMDSSNVLQLIVDAYGKIRSKVELEVRDLPEELSLSFNATCLNNEVIPGLKSCMGLKIGDTVSFSIEAKVRGCPQEKEKSFTIKPVGFKDSLIVQVTFDCDCACQAQAEPNSHRCNNGNGTFECGVCRCGPGWLGSQCECSEEDYRPSQQDECSPREGQPVCSQRGECLCGQCVCHSSDFGKITGKYCECDDFSCVRYKGEMCSGHGQCSCGDCLCDSDWTGYYCNCTTRTDTCMSSNGLLCSGRGKCECGSCVCIQPGSYGDTCEKCPTCPDACTFKKECVECKKFDRGALHDENTCNRYCRDEIESVKELKDTGKDAVNCTYKNEDDCVVRFQYYEDSSGKSILYVVEEPECPKGPDILVVLLSVMGAILLIGLAALLIWKLLITIHDRKEFAKFEEERARAKWDTANNPLYKEATSTFTNITYRGT

SEQ ID NO: 7301 - protein, 443 aa, Homo Sapiens
MRARPRPRPLWATVLALGALAGVGVGGPNICTTRGVSSCQQCLAVSPMCAWCSDEALPLGSPRCDLKENLLKDNCAPESIEFPVSEARVLEDRPLSDKGSGDSSQVTQVSPQRIALRLRPDDSKNFSIQVRQVEDYPVDIYYLMDLSYSMKDDLWSIQNLGTKLATQMRKLTSNLRIGFGAFVDKPVSPYMYISPPEALENPCYDMKTTCLPMFGYKHVLTLTDQVTRFNEEVKKQSVSRNRDAPEGGFDAIMQATVCDEKIGWRNDASHLLVFTTDAKTHIALDGRLAGIVQPNDGQCHVGSDNHYSASTTMDYPSLGLMTEKLSQKNINLIFAVTENVVNLYQNYSELIPGTTVGVLSMDSSNVLQLIVDAYGKIRSKVELEVRDLPEELSLSFNATCLNNEVIPGLKSCMGLKIGDTVRWAGQGLCPGASVGTQPPFFLL

SEQ ID NO: 7302 - protein, 89 aa, Homo Sapiens
MVALPMVLVLLLVLSRGESELDAKIPSTGDATEWRNPHLSMLGSCQPAPSCQKCILSHPSCAWCKQLNFTASGEAEARRCARREELLAR

SEQ ID NO: 7303 - protein, 93 aa, Homo Sapiens
MVALPMVLVLLLVLSRGESELDAKIPSTGDATEWRNPHLSMLGSCQPAPSCQKCILSHPSCAWCKQLNFTASGEAEARRCARREELLARGCPL

SEQ ID NO: 7304 - protein, 158 aa, Homo Sapiens
MVALPMVLVLLLVLSRGESELDAKIPSTGDATEWRNPHLSMLGSCQPAPSCQKCILSHPSCAWCKQLNFTASGEAEARRCARREELLARGCPLEELEEPRGQQEVLQDQPLSQGARGEGATQLAPQRVRVTLRPGEPQQLQVRFLRAEGYPVDLYYLM

SEQ ID NO: 7305 - protein, 798 aa, Homo Sapiens
MVALPMVLVLLLVLSRGESELDAKIPSTGDATEWRNPHLSMLGSCQPAPSCQKCILSHPSCAWCKQLNFTASGEAEARRCARREELLARGCPLEELEEPRGQQEVLQDQPLSQGARGEGATQLAPQRVRVTLRPGEPQQLQVRFLRAEGYPVDLYYLMDLSYSMKDDLERVRQLGHALLVRLQEVTHSVRIGFGSFVDKTVLPFVSTVPSKLRHPCPTRLERCQSPFSFHHVLSLTGDAQAFEREVGRQSVSGNLDSPEGGFDAILQAALCQEQIGWRNVSRLLVFTSDDTFHTAGDGKLGGIFMPSDGHCHLDSNGLYSRSTEFDYPSVGQVAQALSAANIQPIFAVTSAALPVYQELSKLIPKSAVGELSEDSSNVVQLIMDAYNSLSSTVTLEHSSLPPGVHISYESQCEGPEKREGKAEDRGQCNHVRINQTVTFWVSLQATHCLPEPHLLRLRALGFSEELIVELHTLCDCNCSDTQPQAPHCSDGQGHLQCGVCSCAPGRLGRLCECSVAELSSPDLESGCRAPNGTGPLCSGKGHCQCGRCSCSGQSSGHLCECDDASCERHEGILCGGFGRCQCGVCHCHANRTGRACECSGDMDSCISPEGGLCSGHGRCKCNRCQCLDGYYGALCDQCPGCKTPCERHRDCAECGAFRTGPLATNCSTACAHTNVTLALAPILDDGWCKERTLDNQLFFFLVEDDARGTVVLRVRPQEKGADHTQAIVLGCVGGIVAVGLGLVLAYRLSVEIYDRREYSRFEKEQQQLNWKQDSNPLYKSAITTTINPRFQEADSPTL

SEQ ID NO: 7306 - protein, 798 aa, Homo Sapiens; identical to SEQ ID NO: 7305

SEQ ID NO: 7307 - protein, 650 aa, Homo Sapiens
MVALPMVLVLLLVLSRGESELDAKIPSTGDATEWRNPHLSMLGSCQPAPSCQKCILSHPSCAWCKQLNFTASGEAEARRCARREELLARGCPLEELEEPRGQQEVLQDQPLSQGARGEGATQLAPQRVRVTLRPGEPQQLQVRFLRAEGYPVDLYYLMDLSYSMKDDLERVRQLGHALLVRLQEVTHSVRIGFGSFVDKTVLPFVSTVPSKLRHPCPTRLERCQSPFSFHHVLSLTGDAQAFEREVGRQSVSGNLDSPEGGFDAILQAALCQEQIGWRNVSRLLVFTSDDTFHTAGDGKLGGIFMPSDGHCHLDSNGLYSRSTEFDYPSVGQVAQALSAANIQPIFAVTSAALPVYQELSKLIPKSAVGELSEDSSNVVQLIMDAYNSLSSTVTLEHSSLPPGVHISYESQCEGPEKREGKAEDRGQCNHVRINQTVTFWVSLQATHCLPEPHLLRLRALGFSEELIVELHTLCDCNCSDTQPQAPHCSDGQGHLQCGVCRDCAECGAFRTGPLATNCSTACAHTNVTLALAPILDDGWCKERTLDNQLFFFLVEDDARGTVVLRVRPQEKGADHTQAIVLGCVGGIVAVGLGLVLAYRLSVEIYDRREYSRFEKEQQQLNWKQDSNPLYKSAITTTINPRFQEADSPTL

SEQ ID NO: 7308 - protein, 471 aa, Homo Sapiens
MVALPMVLVLLLVLSRGESELDAKIPSTGDATEWRNPHLSMLGSCQPAPSCQKCILSHPSCAWCKQLNFTASGEAEARRCARREELLARGCPLEELEEPRGQQEVLQDQPLSQGARGEGATQLAPQRVRVTLRPGEPQQLQVRFLRAEGYPVDLYYLMDLSYSMKDDLERVRQLGHALLVRLQEVTHSVRIGFGSFVDKTVLPFVSTVPSKLRHPCPTRLERCQSPFSFHHVLSLTGDAQAFEREVGRQSVSGNLDSPEGGFDAILQAALCQEQIGWRNVSRLLVFTSDDTFHTAGDGKLGGIFMPSDGHCHLDSNGLYSRSTEFDYPSVGQVAQALSAANIQPIFAVTSAALPVYQELSKLIPKSAVGELSEDSSNVVQLIMDAYNSLSSTVTLEHSSLPPGVHISYESQCEGPEKREGKAEDRGQCNHVRINQTGLCRVWGLQDWPTGHQLQYSLCPYQCDPGLGPYLG

SEQ ID NO: 7309 - protein, 117 aa, Homo Sapiens
  misc_feature (1)..(1): Xaa can be any naturally occurring amino acid
XSTACAHTNVTLALAPILDDGWCKERTLDNQLFFFLVEDDARGTVVLRVRPQEKGADHTQAIVLGCVGGIVAVGLGLVLAYRLSVEIYDRREYSRFEKEQQQLNWKQLLGFGSRLAS

SEQ ID NO: 7310 - protein, 353 aa, Homo Sapiens
MCKNSQDIICSNAGTCHCGRCKCDNSDGSGLVYGKFCECDDRECIDDETEEICGGHGKCYCGNCYCKAGWHGDKCEFQCDITPWESKRRCTSPDGKICSNRGTCVCGECTCHDVDPTGDWGDIHGDTCECDERDCRAVYDRYSDDFCSGHGQCNCGRCDCKAGWYGKKCEHPQSCTLSAEESIRKCQGSSDLPCSGRGKCECGKCTCYPPGDRRVYGKTCECDDRRCEDLDGVVCGGHGTCSCGRCVCERGWFGKLCQHPRKCNMTEEQSKNLCESADGILCSGKGSCHCGKCICSAEEWYISGEFCDCDDRDCDKHDGLICTGNGICSCGNCECWDGWNGNACEIWLGSEYP

SEQ ID NO: 7311 - protein, 401 aa, Homo Sapiens
MNLVAVMGAFNKGHGKCDCGKCKCDQGWYGDACQYPTNCDLTKKKSNQMCKNSQDIICSNAGTCHCGRCKCDNSDGSGLVYGKFCECDDRECIDDETEEICGGHGKCYCGNCYCKAGWHGDKCEFQCDITPWESKRRCTSPDGKICSNRGTCVCGECTCHDVDPTGDWGDIHGDTCECDERDCRAVYDRYSDDFCSGHGQCNCGRCDCKAGWYGKKCEHPQSCTLSAEESIRKCQGSSDLPCSGRGKCECGKCTCYPPGDRRVYGKTCECDDRRCEDLDGVVCGGHGTCSCGRCVCERGWFGKLCQHPRKCNMTEEQSKNLCESADGILCSGKGSCHCGKCICSAEEWYISGEFCDCDDRDCDKHDGLICTGNGICSCGNCECWDGWNGNACEIWLGSEYP

SEQ ID NO: 7312 - protein, 494 aa, Homo Sapiens
MRPPGFRNFLLLASSLLFAGLSAVPQSFSPSLRSWPGAACRLSRAESERRCRAPGQPPGAALCHGRGRCDCGVCICHVTEPGMFFGPLCECHEWVCETYDGSTCAGHGKCDCGKCKCDQGWYGDACQYPTNCDLTKKKSNQMCKNSQDIICSNAGTCHCGRCKCDNSDGSGLVYGKFCECDDRECIDDETEEICGGHGKCYCGNCYCKAGWHGDKCEFQCDITPWESKRRCTSPDGKICSNRGTCVCGECTCHDVDPTGDWGDIHGDTCECDERDCRAVYDRYSDDFCSGHGQCNCGRCDCKAGWYGKKCEHPQSCTLSAEESIRKCQGSSDLPCSGRGKCECGKCTCYPPGDRRVYGKTCECDDRRCEDLDGVVCGGHGTCSCGRCVCERGWFGKLCQHPRKCNMTEEQSKNLCESADGILCSGKGSCHCGKCICSAEEWYISGEFCDCDDRDCDKHDGLICTGNGICSCGNCECWDGWNGNACEIWLGSEYP

SEQ ID NO: 7313 - protein, 445 aa, Homo Sapiens
MRPPGFRNFLLLASSLLFAGLSAVPQSFSPSLRSWPGAACRLSRAESERRCRAPGQPPGAALCHGRGRCDCGVCICHVTEPGMFFGPLCECHEWVCETYDGSTCAGTCHCGRCKCDNSDGSGLVYGKFCECDDRECIDDETEEICGGHGKCYCGNCYCKAGWHGDKCEFQCDITPWESKRRCTSPDGKICSNRGTCVCGECTCHDVDPTGDWGDIHGDTCECDERDCRAVYDRYSDDFCSGHGQCNCGRCDCKAGWYGKKCEHPQSCTLSAEESIRKCQGSSDLPCSGRGKCECGKCTCYPPGDRRVYGKTCECDDRRCEDLDGVVCGGHGTCSCGRCVCERGWFGKLCQHPRKCNMTEEQSKNLCESADGILCSGKGSCHCGKCICSAEEWYISGEFCDCDDRDCDKHDGLICTGNGICSCGNCECWDGWNGNACEIWLGSEYP

SEQ ID NO: 7314 - protein, 401 aa, Homo Sapiens
MSGCARPTTGAPVQAMVSVGKCKCDQGWYGDACQYPTNCDLTKKKSNQMCKNSQDIICSNAGTCHCGRCKCDNSDGSGLVYGKFCECDDRECIDDETEEICGGHGKCYCGNCYCKAGWHGDKCEFQCDITPWESKRRCTSPDGKICSNRGTCVCGECTCHDVDPTGDWGDIHGDTCECDERDCRAVYDRYSDDFCSGHGQCNCGRCDCKAGWYGKKCEHPQSCTLSAEESIRKCQGSSDLPCSGRGKCECGKCTCYPPGDRRVYGKTCECDDRRCEDLDGVVCGGHGTCSCGRCVCERGWFGKLCQHPRKCNMTEEQSKNLCESADGILCSGKGSCHCGKCICSAEEWYISGEFCDCDDRDCDKHDGLICTGNGICSCGNCECWDGWNGNACEIWLGSEYP

SEQ ID NO: 7315 - protein, 208 aa, Homo Sapiens
  misc_feature (1)..(1): Xaa can be any naturally occurring amino acid
XCEGHGQCNCGRCDCKAGWYGKKCEHPQSCTLSAEESIRKCQGSSDLPCSGRGKCECGKCTCYPPGDRRVYGKTCECDDRRCEDLDGVVCGGHGTCSCGRCVCERGWFGKLCQHPRKCNMTEEQSKNLCESADGILCSGKGSCHCGKCICSAEEWYISGEFCDCDDRDCDKHDGLICTGNGICSCGNCECWDGWNGNACEIWLGSEYP

SEQ ID NO: 7316 - protein, 911 aa, Homo Sapiens
MDGAMGPRGLLLCMYLVSLLILQAMPALGSATGRSKSSEKRQAVDTAVDGVFIRSLKVNCKVTSRFAHYVVTSQVVNTANEAREVAFDLEIPKTAFISDFAVTADGNAFIGDIKDKVTAWKQYRKAAISGENAGLVRASGRTMEQFTIHLTVNPQSKVTFQLTYEEVLKRNHMQYEIVIKVKPKQLVHHFEIDVDIFEPQGISKLDAQASFLPKELAAQTIKKSFSGKKGHVLFRPTVSQQQSCPTCSTSLLNGHFKVTYDVSRDKICDLLVANNHFAHFFAPQNLTNMNKNVVFVIDISGSMRGQKVKQTKEALLKILGDMQPGDYFDLVLFGTRVQSWKGSLVQASEANLQAAQDFVRGFSLDEATNLNGGLLRGIEILNQVQESLPELSNHASILIMLTDGDPTEGVTDRSQILKNVRNAIRGRFPLYNLGFGHNVDFNFLEVMSMENNGRAQRIYEDHDATQQLQGFYSQVAKPLLVDVDLQYPQDAVLALTQNHHKQYYEGSEIVVAGRIADNKQSSFKADVQAHGEGQEFSITCLVDEEEMKKLLRERGHMLENHVERLWAYLTIQELLAKRMKVDREERANLSSQALQMSLDYGFVTPLTSMSIRGMADQDGLKPTIDKPSEDSPPLEMLGPRRTFVLSALQPSPTHSSSNTQRLPDRVTGVDTDPHFIIHVPQKEDTLCFNINEEPGVILSLVQDPNTGFSVNGQLIGNKARSPGQHDGTYFGRLGIANPATDFQLEVTPQNITLNPGFGGPVFSWRDQAVLRQDGVVVTINKKRNLVVSVDDGGTFEVVLHRVWKGSSVHQDFLGFYVLDSHRMSARTHGLLGQFFHPIGFEVSDIHPGSDPTKPDATMVVRNRRLTVTRGLQKDYSKDPWHGAEVSCWFIHNNGAGLIDGAYTDYIVPDIF

SEQ ID NO: 7317 - protein, 213 aa, Homo Sapiens
MDGAMGPRGLLLCMYLVSLLILQAMPALGSATGRSKSSEKRQAVDTAVDGVFIRSLKVNCKVTSRFAHYVVTSQVVNTANEAREVAFDLEIPKTAFISDFAVTADGNAFIGDIKDKVTAWKQYRKAAISGENAGLVRASGRTMEQFTIHLTVNPQSKVTFQLTYEEVLKRNHMQYEIVIKVKPKQLVHHFEVDHRSRGRGPAPLSVTMAPNTG

SEQ ID NO: 7318 - protein, 623 aa, Homo Sapiens
MNKNVVFVIDISGSMRGQKVKQTKEALLKILGDMQPGDYFDLVLFGTRVQSWKGSLVQASEANLQAAQDFVRGFSLDEATNLNGGLLRGIEILNQVQESLPELSNHASILIMLTDGDPTEGVTDRSQILKNVRNAIRGRFPLYNLGFGHNVDFNFLEVMSMENNGRAQRIYEDHDATQQLQGFYSQVAKPLLVDVDLQYPQDAVLALTQNHHKQYYEGSEIVVAGRIADNKQSSFKADVQAHGEGQEFSITCLVDEEEMKKLLRERGHMLENHVERLWAYLTIQELLAKRMKVDREERANLSSQALQMSLDYGFVTPLTSMSIRGMADQDGLKPTIDKPSEDSPPLEMLGPRRTFVLSALQPSPTHSSSNTQRLPDRVTGVDTDPHFIIHVPQKEDTLCFNINEEPGVILSLVQDPNTGFSVNGQLIGNKARSPGQHDGTYFGRLGIANPATDFQLEVTPQNITLNPGFGGPVFSWRDQAVLRQDGVVVTINKKRNLVVSVDDGGTFEVVLHRVWKGSSVHQDFLGFYVLDSHRMSARTHGLLGQFFHPIGFEVSDIHPGSDPTKPDATMVVRNRRLTVTRGLQKDYSKDPWHGAEVSCWFIHNNGAGLIDGAYTDYIVPDIF

SEQ ID NO: 7319 - protein, 277 aa, Homo Sapiens
MPLPLPSAFVLSALQPSPTHSSSNTQRLPDRVTGVDTDPHFIIHVPQKEDTLCFNINEEPGVILSLVQDPNTGFSVNGQLIGNKARSPGQHDGTYFGRLGIANPATDFQLEVTPQNITLNPGFGGPVFSWRDQAVLRQDGVVVTINKKRNLVVSVDDGGTFEVVLHRVWKGSSVHQDFLGFYVLDSHRMSARTHGLLGQFFHPIGFEVSDIHPGSDPTKPDATMVVRNRRLTVTRGLQKDYSKDPWHGAEVSCWFIHNNGAGLIDGAYTDYIVPDIF

SEQ ID NO: 7320 - protein, 464 aa, Homo Sapiens
SMENNGRAQRIYEDHDATQQLQGFYSQVAKPLLVDVDLQYPQDAVLALTQNHHKQYYEGSEIVVAGRIADNKQSSFKADVQAHGEGQEFSITCLVDEEEMKKLLRERGHMLENHVERLWAYLTIQELLAKRMKVDREERANLSSQALQMSLDYGFVTPLTSMSIRGMADQDGLKPTIDKPSEGIGCREMLGPRRTFVLSALQPSPTHSSSNTQRLPDRVTGVDTDPHFIIHVPQKEDTLCFNINEEPGVILSLVQDPNTGFSVNGQLIGNKARSPGQHDGTYFGRLGIANPATDFQLEVTPQNITLNPGFGGPVFSWRDQAVLRQDGVVVTINKKRNLVVSVDDGGTFEVVLHRVWKGSSVHQDFLGFYVLDSHRMSARTHGLLGQFFHPIGFEVSDIHPGSDPTKPDATMVVRNRRLTVTRGLQKDYSKDPWHGAEVSCWFIHNNGAGLIDGAYTDYIVPDIF

SEQ ID NO: 7321 - protein, 74 aa, Homo Sapiens
  misc_feature (1)..(1): Xaa can be any naturally occurring amino acid
XMKVDREERANLSSQALQMSLDYGFVTPLTSMSIRGMADQDGLKPTIDKPSEDSPPLEMLGPRRTPIPSGCQTE

SEQ ID NO: 7322 - protein, 935 aa, Homo Sapiens
MKRLTCFFICFFLSEVSGFEIPINGLSEFVDYEDLVELAPGKFQLVAENRRYQEEVDQVTLYSYKVQSTITSRMATTMIQSKVVNNSPQPQNVVFDVQIPKGAFISNFSMTVDGKTFRSSIKEKTVGRALYAQARAKGKTAGLVRSSALDMENFRTEVNVLPGAKVQFELHYQEVKWRKLGSYEHRIYLQPGRLAKHLEVDVWVIEPQGLRFLHVPDTFEGHFDGVPVISKGQQKAHVSFKPTVAQQRICPNCRETAVDGELVVLYDVKREEKAGELEVFNGYFVHFFAPDNLDPIPKNILFVIDVSGSMWGVKMKQTVEAMKTILDDLRAEDHFSVIDFNQNIRTWRNDLISATKTQVADAKRYIEKIQPSGGTNINEALLRAIFILNEANNLGLLDPNSVSLIILVSDGDPTVGELKLSKIQKNVKENIQDNISLFSLGMGFDVDYDFLKRLSNENHGIAQRIYGNQDTSSQLKKFYNQVSTPLLRNVQFNYPHTSVTDVTQNNFHNYFGGSEIVVAGKFDPAKLDQIESVITATSANTQLVLETLAQMDDLQDFLSKDKHADPDFTRKLWAYLTINQLLAERSLAPTAAAKRRITRSILQMSLDHHIVTPLTSLVIENEAGDERMLADAPPQDPSCCSGALYYGSKVVPDSTPSWANPSPTPVISMLAQGSQVLESTPPPHVMRVENDPHFIIYLPKSQKNICFNIDSEPGKILNLVSDPESGIVVNGQLVGAKKPNNGKLSTYFGKLGFYFQSEDIKIEISTETITLSHGSSTFSLSWSDTAQVTNQRVQISVKKEKVVTITLDKEMSFSVLLHRVWKKHPVNVDFLGIYIPPTNKFSPKAHGLIGQFMQEPKIHIFNERPGKDPEKPEASMEVKGQKLIITRGLQKDYRTDLVFGTDVTCWFVHNSGKGFIDGHYKDYFVPQLYSFLKRP

SEQ ID NO: 7323 - protein, 946 aa, Homo Sapiens
MKRLTCFFICFFLSEVSGFEIPINGLSEFVDYEDLVELAPGKFQLVAENRRYQRSLPGESEEMMEEVDQVTLYSYKVQSTITSRMATTMIQSKVVNNSPQPQNVVFDVQIPKGAFISNFSMTVDGKTFRSSIKEKTVGRALYAQARAKGKTAGLVRSSALDMENFRTEVNVLPGAKVQFELHYQEVKWRKLGSYEHRIYLQPGRLAKHLEVDVWVIEPQGLRFLHVPDTFEGHFDGVPVISKGQQKAHVSFKPTVAQQRICPNCRETAVDGELVVLYDVKREEKAGELEVFNGYFVHFFAPDNLDPIPKNILFVIDVSGSMWGVKMKQTVEAMKTILDDLRAEDHFSVIDFNQNIRTWRNDLISATKTQVADAKRYIEKIQPSGGTNINEALLRAIFILNEANNLGLLDPNSVSLIILVSDGDPTVGELKLSKIQKNVKENIQDNISLFSLGMGFDVDYDFLKRLSNENHGIAQRIYGNQDTSSQLKKFYNQVSTPLLRNVQFNYPHTSVTDVTQNNFHNYFGGSEIVVAGKFDPAKLDQIESVITATSANTQLVLETLAQMDDLQDFLSKDKHADPDFTRKLWAYLTINQLLAERSLAPTAAAKRRITRSILQMSLDHHIVTPLTSLVIENEAGDERMLADAPPQDPSCCSGALYYGSKVVPDSTPSWANPSPTPVISMLAQGSQVLESTPPPHVMRVENDPHFIIYLPKSQKNICFNIDSEPGKILNLVSDPESGIVVNGQLVGAKKPNNGKLSTYFGKLGFYFQSEDIKIEISTETITLSHGSSTFSLSWSDTAQVTNQRVQISVKKEKVVTITLDKEMSFSVLLHRVWKKHPVNVDFLGIYIPPTNKFSPKAHGLIGQFMQEPKIHIFNERPGKDPEKPEASMEVKGQKLIITRGLQKDYRTDLVFGTDVTCWFVHNSGKGFIDGHYKDYFVPQLYSFLKRP

SEQ ID NO: 7324 - protein, 237 aa, Homo Sapiens
MKRLTCFFICFFLSEVSGFEIPINGLSERSLPGESEEMMEEVDQVTLYSYKVQSTITSRMATTMIQSKVVNNSPQPQNVVFDVQIPKGAFISNFSMTVDGKTFRSSIKEKTVGRALYAQARAKGKTAGLVRSSALDMENFRTEVNVLPGAKVQFELHYQEVKWRKLGSYEHRIYLQPGRLAKHLEVDVWVIEPQGLRFLHVPDTFEGHFDGVPVISKGQQKAHVSFKPTVAQQRICP

SEQ ID NO: 7325 - protein, 698 aa, Homo Sapiens
MAFAWWPCLILALLSSLAASGFPRSPFRLLGKRSLPEGVANGIEVYSTKINSKVTSRFAHNVVTMRAVNRADTAKEVSFDVELPKTAFITNFTLTIDGVTYPGNVKEKEVAKKQYEKAVSQGKTAGLVKASGRKLEKFTVSVNVAAGSKVTFELTYEELLKRHKGKYEMYLKVQPKQLVKHFEIEVDIFEPQGISMLDAEASFITNDLLGSALTKSFSGKKGHVSFKPSLDQQRSCPTCTDSLLNGDFTITYDVNRESPGNVQIVNGYFVHFFAPQGLPVVPKNVAFVIDISGSMAGRKLEQTKEALLRILEDMQEEDYLNFILFSGDVSTWKEHLVQATPENLQEARTFVKSMEDKGMTNINDGLLRGISMLNKAREEHRIPERSTSIVIMLTDGDANVGESRPEKIQENVRNAIGGKFPLYNLGFGNNLNYNFLENMALENHGFARRIYEDSDADLQLQGFYEEVANPLLTGVEMEYPENAILDLTQNTYQHFYDGSEIVVAGRLVDEDMNSFKADVKGHGATNDLTFTEEVTTEKITLWNRAVPSTFSWLDTVTVTQDGLSMMINRKNMVVSFGDGVTFVVVLHQVWKKHPVHRDFLGFYVVDSHRMSAQTHGLLGQFFQPFDFKVSDIRPGSDPTKPDATLVVKNHQLIVTRGSQKDYRKDASIGTKVVCWFVHNNGEGLIDGVHTDYIVPNLF

SEQ ID NO: 7326 - protein, 890 aa, Homo Sapiens
MAFAWWPCLILALLSSLAASGFPRSPFRLLGKRSLPEGVANGIEVYSTKINSKVTSRFAHNVVTMRAVNRADTAKEVSFDVELPKTAFITNFTLTIDGVTYPGNVKEKEVAKKQYEKAVSQGKTAGLVKASGRKLEKFTVSVNVAAGSKVTFELTYEELLKRHKGKYEMYLKVQPKQLVKHFEIEVDIFEPQGISMLDAEASFITNDLLGSALTKSFSGKKGHVSFKPSLDQQRSCPTCTDSLLNGDFTITYDVNRESPGNVQIVNGYFVHFFAPQGLPVVPKNVAFVIDISGSMAGRKLEQTKEALLRILEDMQEEDYLNFILFSGDVSTWKEHLVQATPENLQEARTFVKSMEDKGMTNINDGLLRGISMLNKAREEHRIPERSTSIVIMLTDGDANVGESRPEKIQENVRNAIGGKFPLYNLGFGNNLNYNFLENMALENHGFARRIYEDSDADLQLQGFYEEVANPLLTGVEMEYPENAILDLTQNTYQHFYDGSEIVVAGRLVDEDMNSFKADVKGHGATNDLTFTEEVDMKEMEKALQERDYIFGNYIERLWAYLTIEQLLEKRKNAHGEEKENLTARALDLSLKYHFVTPLTSMVVTKPEDNEDERAIADKPGEDAEATPVSPAMSYLTSYQPPQNPYYYVDGDPHFIIQIPEKDDALCFNIDEAPGTVLRLIQDAVTGLTVNGQITGDKRGSPDSKTRKTYFGKLGIANAQMDFQVEVTTEKITLWNRAVPSTFSWLDTVTVTQDGLSMMINRKNMVVSFGDGVTFVVVLHQVWKKHPVHRDFLGFYVVDSHRMSAQTHGLLGQFFQPFDFKVSDIRPGSDPTKPDATLVVKNHQLIVTRGSQKDYRKDASIGTKVVCWFVHNNGEGLIDGVHTDYIVPNLF

SEQ ID NO: 7327 - protein, 670 aa, Homo Sapiens [sequence omitted]

SEQ ID NO: 7328 - protein, 930 aa, Homo Sapiens
MKPPRPVRTCSKVLVLLSLLAIHQTTTAEKNGIDIYSLTVDSRVSSRFAHTVVTSRVVNRANTVQEATFQMELPKKAFITNFSMIIDGMTYPGIIKEKAEAQAQYSAAVAKGKSAGLVKATGRNMEQFQVSVSVAPNAKITFELVYEELLKRRLGVYELLLKVRPQQLVKHLQMDIHIFEPQGISFLETESTFMTNQLVDALTTWQNKTKAHIRFKPTLSQQQKSPEQQETVLDGNLIIRYDVDRAISGGSIQIENGYFVHYFAPEGLTTMPKNVVFVIDKSGSMSGRKIQQTREALIKILDDLSPRDQFNLIVFSTEATQWRPSLVPASAENVNKARSFAAGIQALGGTNINDAMLMAVQLLDSSNQEERLPEGSVSLIILLTDGDPTVGETNPRSIQNNVREAVSGRYSLFCLGFGFDVSYAFLEKLALDNGGLARRIHEDSDSALQLQDFYQEVANPLLTAVTFEYPSNAVEEVTQNNFRLLFKGSEMVVAGKLQDRGPDVLTATVSGKLPTQNITFQTESSVAEQEAEFQSPKYIFHNFMERLWAYLTIQQLLEQTVSASDADQQALRNQALNLSLAYSFVTPLTSMVVTKPDDQEQSQVAEKPMEGESRNRNVHSGSTFFKYYLQGAKIPKPEASFSPRRGWNRQAGAAGSRMNFRPGVLSSRQLGLPGPPDVPDHAAYHPFRRLAILPASAPPATSNPDPAVSRVMNMKIEETTMTTQTPAPIQAPSAILPLPGQSVERLCVDPRHRQGPVNLLSDPEQGVEVTGQYEREKAGFSWIEVTFKNPLVWVHASPEHVVVTRNRRSSAYKWKETLFSVMPGLKMTMDKTGLLLLSDPDKVTIGLLFWDGRGEGLRLLLRDTDRFSSHVGGTLGQFYQEVLWGSPAASDDGRRTLRVQGNDHSATRERRLDYQEGPPGVEISCWSVEL

SEQ ID NO: 7329 - protein, 900 aa, Homo Sapiens
MKPPRPVRTCSKVLVLLSLLAIHQTTTAEKNGIDIYSLTVDSRVSSRFAHTVVTSRVVNRANTVQEATFQMELPKKAFITNFSMIIDGMTYPGIIKEKAEAQAQYSAAVAKGKSAGLVKATGRNMEQFQVSVSVAPNAKITFELVYEELLKRRLGVYELLLKVRPQQLVKHLQMDIHIFEPQGISFLETESTFMTNQLVDALTTWQNKTKAHIRFKPTLSQQQKSPEQQETVLDGNLIIRYDVDRAISGGSIQIENGYFVHYFAPEGLTTMPKNVVFVIDKSGSMSGRKIQQTREALIKILDDLSPRDQFNLIVFSTEATQWRPSLVPASAENVNKARSFAAGIQALGGTNINDAMLMAVQLLDSSNQEERLPEGSVSLIILLTDGDPTVGETNPRSIQNNVREAVSGRYSLFCLGFGFDVSYAFLEKLALDNGGLARRIHEDSDSALQLQDFYQEVANPLLTAVTFEYPSNAVEEVTQNNFRLLFKGSEMVVAGKLQDRGPDVLTATVSGKLPTQNITFQTESSVAEQEAEFQSPKYIFHNFMERLWAYLTIQQLLEQTVSASDADQQALRNQALNLSLAYSFVTPLTSMVVTKPDDQEQSQVAEKPMEGESRNRNVHSAGAAGSRMNFRPGVLSSRQLGLPGPPDVPDHAAYHPFRRLAILPASAPPATSNPDPAVSRVMNMKIEETTMTTQTPAPIQAPSAILPLPGQSVERLCVDPRHRQGPVNLLSDPEQGVEVTGQYEREKAGFSWIEVTFKNPLVWVHASPEHVVVTRNRRSSAYKWKETLFSVMPGLKMTMDKTGLLLLSDPDKVTIGLLFWDGRGEGLRLLLRDTDRFSSHVGGTLGQFYQEVLWGSPAASDDGRRTLRVQGNDHSATRERRLDYQEGPPGVEISCWSVEL

SEQ ID NO: 7330 - protein, 935 aa, Homo Sapiens
MKPPRPVRTCSKVLVLLSLLAIHQTTTAEKNGIDIYSLTVDSRVSSRFAHTVVTSRVVNRANTVQEATFQMELPKKAFITNFSMIIDGMTYPGIIKEKAEAQAQYSAAVAKGKSAGLVKATGRNMEQFQVSVSVAPNAKITFELVYEELLKRRLGVYELLLKVRPQQLVKHLQMDIHIFEPQGISFLETESTFMTNQLVDALTTWQNKTKAHIRFKPTLSQQQKSPEQQETVLDGNLIIRYDVDRAISGGSIQIENGYFVHYFAPEGLTTMPKNVVFVIDKSGSMSGRKIQQTREALIKILDDLSPRDQFNLIVFSTEATQWRPSLVPASAENVNKARSFAAGIQALGGTNINDAMLMAVQLLDSSNQEERLPEGSVSLIILLTDGDPTVGETNPRSIQNNVREAVSGRYSLFCLGFGFDVSYAFLEKLALDNGGLARRIHEDSDSALQLQDFYQEVANPLLTAVTFEYPSNAVEEVTQNNFRLLFKGSEMVVAGKLQDRGPDVLTATVSGKLPTQNITFQTESSVAEQEAEFQSPKYIFHNFMERLWAYLTIQQLLEQTVSASDADQQALRNQALNLSLAYSFVTPLTSMVVTKPDDQEQSQVAEKPMEGESRNRNVHSGSTFFKYYLQGAKIPKPGLDHTEASFSPRRGWNRQAGAAGSRMNFRPGVLSSRQLGLPGPPDVPDHAAYHPFRRLAILPASAPPATSNPDPAVSRVMNMKIEETTMTTQTPAPIQAPSAILPLPGQSVERLCVDPRHRQGPVNLLSDPEQGVEVTGQYEREKAGFSWIEVTFKNPLVWVHASPEHVVVTRNRRSSAYKWKETLFSVMPGLKMTMDKTGLLLLSDPDKVTIGLLFWDGRGEGLRLLLRDTDRFSSHVGGTLGQFYQEVLWGSPAASDDGRRTLRVQGNDHSATRERRLDYQEGPPGVEISCWSVEL

SEQ ID NO: 7331 - protein, 719 aa, Homo Sapiens
  misc_feature (1)..(1): Xaa can be any naturally occurring amino acid
XVSVAPNAKITFELVYEELLKRRLGVYELLLKVRPQQLVKHLQMDIHIFEPQGISFLETESTFMTNQLVDALTTWQNKTKQKSPEQQETVLDGNLIIRYDVDRAISGGSIQIENGYFVHYFAPEGLTTMPKNVVFVIDKSGSMSGRKIQQTREALIKILDDLSPRDQFNLIVFSTEATQWRPSLVPASAENVNKARSFAAGIQALGGTNINDAMLMAVQLLDSSNQEERLPEGSVSLIILLTDGDPTVGETNPRSIQNNVREAVSGRYSLFCLGFGFDVSYAFLEKLALDNGGLARRIHEDSDSALQLQDFYQEVANPLLTAVTFEYPSNAVEEVTQNNFRLLFKGSEMVVAGKLQDRGPDVLTATVSGKLPTQNITFQTESSVAEQEAEFQSPKYIFHNFMERLWAYLTIQQLLEQTVSASDADQQALRNQALNLSLAYSFVTPLTSMVVTKPDDQEQSQVAEKPMEGESRNRNVHSAGAAGSRMNFRPGVLSSRQLGLPGPPDVPDHAAYHPFRRLAILPASAPPATSNPDPAVSRVMNMKIEETTMTTQTPGVEVTGQYEREKAGFSWIEVTFKNPLVWVHASPEHVVVTRNRRSSAYKWKETLFSVMPGLKMTMDKTGLLLLSDPDKVTIGLLFWDGRGEGLRLLLRDTDRFSSHVGGTLGQFYQEVLWGSPAASDDGRRTLRVQGNDHSATRERRLDYQEGPPGVEISCWSVEL

SEQ ID NO: 7332 - protein, 942 aa, Homo Sapiens
MLLLLGLCLGLSLCVGSQEEAQSWGHSSEQDGLRVPRQVRLLQRLKTKPLMTEFSVKSTIISRYAFTTVSCRMLNRASEDQDIEFQMQIPAAAFITNFTMLIGDKVYQGEITEREKKSGDRVKEKRNKTTEENGEKGTEIFRASAVIPSKDKAAFFLSYEELLQRRLGKYEHSISVRPQQLSGRLSVDVNILESAGIASLEVLPLHNSRQRGSGRGEDDSGPPPSTVINQNETFANIIFKPTVVQQARIAQNGILGDFIIRYDVNREQSIGDIQVLNGYFVHYFAPKDLPPLPKNVVFVLDSSASMVGTKLRQTKDALFTILHDLRPQDRFSIIGFSNRIKVWKDHLISVTPDSIRDGKVYIHHMSPTGGTDINGALQRAIRLLNKYVAHSGIGDRSVSLIVFLTDGKPTVGETHTLKILNNTREAARGQVCIFTIGIGNDVDFRLLEKLSLENCGLTRRVHEEEDAGSQLIGFYDEIRTPLLSDIRIDYPPSSVVQATKTLFPNYFNGSEIIIAGKLVDRKLDHLHVEVTASNSKKFIILKTDVPVRPQKAGKDVTGSPRPGGDGEGDTNHIERLWSYLTTKELLSSWLQSDDEPEKERLRQRAQALAVSYRFLTPFTSMKLRGPVPRMDGLEEAHGMSAAMGPEPVVQSVRGAGTQPGPLLKKPYQPRIKISKTSVDGDPHFVVDFPLSRLTVCFNIDGQPGDILRLVSDHRDSGVTVNGELIGAPAPPNGHKKQRTYLRTITILINKPERSYLEITPSRVILDGGDRLVLPCNQSVVVGSWGLEVSVSANANVTVTIQGSIAFVILIHLYKKPAPFQRHHLGFYIANSEGLSSNCHGLLGQFLNQDARLTEDPAGPSQNLTHPLLLQVGEGPEAVLTVKGHQVPVVWKQRKIYNGEEQIDCWFARNNAAKLIDGEYKDYLASHPFDTGMTLGRGMSREL

SEQ ID NO: 7333 - protein, 702 aa, Homo Sapiens
MLLLLGLCLGLSLCVGSQEEAQSWGHSSEQDGLRVPRQVRLLQRLKTKPLMTEFSVKSTIISRYAFTTVSCRMLNRASEDQDIEFQMQIPAAAFITNFTMLIGDKVYQGEITEREKKSGDRVKEKRNKTTEENGEKGTEIFRASAVIPSKDKAAFFLSYEELLQRRLGKYEHSISVRPQQLSGRLSVDVNILESAGIASLEVLPLHNSRQRGSGRGEDDSGPPPSTVINQNETFANIIFKPTVVQQARIAQNGILGDFIIRYDVNREQSIGDIQVLNGYFVHYFAPKDLPPLPKNVVFVLDSSASMVGTKLRQTKDALFTILHDLRPQDRFSIIGFSNRIKVWKDHLISVTPDSIRDGKVYIHHMSPTGGTDINGALQRAIRLLNKYVAHSGIGDRSVSLIVFLTDGKPTVGETHTLKILNNTREAARGQVCIFTIGIGNDVDFRLLEKLSLENCGLTRRVHEEEDAGSQLIGFYDEIRTPLLSDIRIDYPPSSVVQATKTLFPNYFNGSEIIIAGKLVDRKLDHLHVEVTASNSKKFIILKTDVPVRPQKAGKDVTGSPRPGGDGEGDTNHIERLWSYLTTKELLSSWLQSDDEPEKERLRQRAQALAVSYRFLTPFTSMKLRGPVPRMDGLEEAHGMSAAMGPEPVVQSVRGAGTQPGPLLKKPYQPRIKISKTSVRGFRREEQIFSNVMKFPFASILEL

SEQ ID NO: 7334 - protein, 728 aa, Homo Sapiens
MRNYDSGPPPSTVINQNETFANIIFKPTVVQQARIAQNGILGDFIIRYDVNREQSIGDIQVLNGYFVHYFAPKDLPPLPKNVVFVLDSSASMVGTKLRQTKDALFTILHDLRPQDRFSIIGFSNRIKVWKDHLISVTPDSIRDGKVYIHHMSPTGGTDINGALQRAIRLLNKYVAHSGIGDRSVSLIVFLTDGKPTVGETHTLKILNNTREAARGQVCIFTIGIGNDVDFRLLEKLSLENCGLTRRVHEEEDAGSQLIGFYDEIRTPLLSDIRIDYPPSSVVQATKTLFPNYFNGSEIIIAGKLVDRKLDHLHVEVTASNSKKFIILKTDVPVRPQKAGKDVTGSPRPGGDGEGDTNHIERLWSYLTTKELLSSWLQSDDEPEKERLRQRAQALAVSYRFLTPFTSMKLRGPVPRMDGLEEAHGMSAAMGPEPVVQSVRGAGTQPGPLLKKPYQPRIKISKTSVDGDPHFVVDFPLSRLTVCFNIDGQPGDILRLVSDHRDSGVTVNGELIGAPAPPNGHKKQRTYLRTITILINKPERSYLEITPSRVILDGGDRLVLPCNQSVVVGSWGLEVSVSANANVTVTIQGSIAFVILIHLYKKPAPFQRHHLGFYIANSEGLSSNCHGLLGQFLNQDARLTEDPAGPSQNLTHPLLLQVGEGPEAVLTVKGHQVPVVWKQRKIYNGEEQIDCWFARNNAAKLIDGEYKDYLASHPFDTGMTLGRGMSREL

SEQ ID NO: 7335 - protein, 119 aa, Homo Sapiens
  misc_feature (1)..(1): Xaa can be any naturally occurring amino acid
XPSTVINQNETFANIIFKPTVVQQARIAQNGILGDFIIRYDVNREQSIGDIQVLNGYFVHYFAPKDLPPLPKNVVFVLDSSASMVGTKLRQDIGFSLAVQNWVPKGYLDISCVTLQVHV

SEQ ID NO: 7336 - protein, 1313 aa, Homo Sapiens
MSGWRYLICVSFLLTILLELTYQGPPVPASSSTKLLMTSYSMRSTVVSRYAHTLVTSVLFNPHAEAHEAIFDLDLPHLAFISNFTMTINNKVYIAEVKEKHQAKKIYEEAHQQGKTAAHVGIRDRESEKFRISTSLAAGTEVTFSLAYEELLQRHQGQYQLVVSLRPGQLVKRLSIEVTVSERTGISYVHIPPLRTGRLRTNAHASEVDSPPSTRIERGETCVRITYCPTLQDQSSISGSGIMADFLVQYDVVMEDIIGDVQIYDDYFIHYFAPRGLPPMEKNVVFVIDVSSSMFGTKMEQTKTAMNVILSDLQANDYFNIISFSDTVNVWKAGGSIQATIQNVHSAKDYLHCMEADGWTDVNSALLAAASVLNHSNQEPGRGPSVGRIPLIIFLTDGEPTAGVTTPSVILSNVRQALGHRVSLFSLAFGDDADFTLLRRLSLENRGIARRIYEDTDAALQLKGLYEEISMPLLADVRLNYLGGLVGASPWAVFPNYFGGSELVVAGQVQPGKQELGIHLAARGPKDQLLVAHHSEGATNNSQKAFGCPGEPAPNVAHFIRRLWAYVTIGELLDAHFQARDTTTRHLLAAKVLNLSLEYNFVTPLTSLVMVQPKQASEETRRQTSTSAGPDTIMPSSSSRHGLGVSTAQPALVPKVISPKSRPVKPKFYLSSTTTASTKKMLSSKELEPLGESPHTLSMPTYPKAKIPAQQDSGTLAQPTLRTKPTILVPSNSGTLLPLKPGSLSHQNPDILPTNSRTQVPPVKPGIPASPKADTVKCVTPLHSKPGAPSHPQLGALTSQAPKGLPQSRPGVSTLQVPKYPLHTRPRVPAPKTRNNMPHLGPGILLSKTPKILLSLKPSAPPHQISTSISLSKPETPNPHMPQTPLPPRPDRPRPPLPESLSTFPNTISSSTGPSSTTTTSVLGEPLPMPFTPTLPPGRFWHQYDLLPGPQRTRQVLGPSRPGVPTMSLLNSSRPTPEGSPPNLPILLPSSILPEAISLLLLPEELELLSESMVESKFVESLNPPAFYTFLTPDEDGSPNWDGNSEEILGGAGGSMESQGSSVGLAKGTLPSIFTFSSSVDGDPHFVIQIPHSEEKICFTLNGHPGDLLQLIEDPKAGLHVSGKLLGAPPRPGHKDQTRTYFQIITVTTDKPRAYTITISRSSISLRGEGTLRLSWDQPALLKRPQLELYVAAAARLTLRLGPYLEFLVLRHRYRHPSTLQLPHLGFYVANGSGLSPSARGLIGQFQHADIRLVTGPMGPCLRRHHGPDVPVILGKRLLKDSPRLLPRWASCWLVKRSHVELLLGHPYLSYVL

SEQ ID NO: 7337 - protein, 313 aa, Homo Sapiens
MNQLSFLLFLIATTRGWSTDEANTYFKEWTCSSSPSLPRSCKEIKDECPSAFDGLYFLRTENGVIYQTFCDMTSGGGGWTLVASVHENDMRGKCTVGDRWSSQQGSKAVYPEGDGNWANYNTFGSAEAATSDDYKNPGYYDIQAKDLGIWHVPNKSPMQHWRNSSLLRYRTDTGFLQTLGHNLFGIYQKYPVKYGEGKCWTDNGPVIPVVYDFGDAQKTASYYSPYGQREFTAGFVQFRVFNNERAANALCAGMRVTGCNTEHHCIGGGGYFPEASPQQCGDFSGFDWSGYGTHVGYSSSREITEAAVLLFYR

SEQ ID NO: 7338 - protein, 325 aa, Homo Sapiens
MLSMLRTMTRLCFLLFFSVATSGCSAAAASSLEMLSREFETCAFSFSSLPRSCKEIKERCHSAGDGLYFLRTKNGVVYQTFCDMTSGGGGWTLVASVHENDMRGKCTVGDRWSSQQGNKADYPEGDGNWANYNTFGSAEAATSDDYKNPGYYDIQAKDLGIWHVPNKSPMQHWRNSALLRYRTNTGFLQRLGHNLFGIYQKYPVKYRSGKCWNDNGPAIPVVYDFGDAKKTASYYSPYGQREFVAGFVQFRVFNNERAANALCAGIKVTGCNTEHHCIGGGGFFPQGKPRQCGDFSAFDWDGYGTHVKSSCSREITEAAVLLFYR

SEQ ID NO: 7339 - protein, 243 aa, Homo Sapiens
MACWWPLLLELWTVMPTWAGDELLNICMNAKHHKRVPSPEDKLYEECIPWKDNACCTLTTSWEAHLDVSPLYNFSLFHCGLLMPGCRKHFIQAICFYECSPNLGPWIQPVAPSGQGERVVNVPLCQEDCEEWWEDCRMSYTCKSNWRGGWDWSQGKNRCPKGAQCLPFSHYFPTPADLCEKTWSNSFKASPERRNSGRCLQKWFEPAQGNPNVAVARLFASSAPSWELSYTIMVCSLFLPFLS

SEQ ID NO: 7340 - protein, 250 aa, Homo Sapiens
MACWWPLLLELWTVMPTWAGDELLNICMNAKHHKRVPSPEDKLYEECIPWKDNACCTLTTSWEAHLDVSPLYNFSLFHCGLLMPGCRKHFIQAICFYECSPNLGPWIQPVGSLGWEVAPSGQGERVVNVPLCQEDCEEWWEDCRMSYTCKSNWRGGWDWSQGKNRCPKGAQCLPFSHYFPTPADLCEKTWSNSFKASPERRNSGRCLQKWFEPAQGNPNVAVARLFASSAPSWELSYTIMVCSLFLPFLS

SEQ ID NO: 7341 - protein, 184 aa, Homo Sapiens
MALLLCLVCLTAALAHGCLHCHSNFSKKFSFYRHHVNFKSWWVGDIPVSGALLTDWSDDTMKELHLAIPAKITREKLDQVATAVYQMMDQLYQGKMYFPGKGRETEAGPPHPGTPRPPPEPDLLLPRRLRVFPQRAAKHLPGAGAPHPERHHRKPHRLSAPLWSSAQWKSAVQGLLNYINNWHK

SEQ ID NO: 7342 - protein, 232 aa, Homo Sapiens
MALLLCLVCLTAALAHGCLHCHSNFSKKFSFYRHHVNFKSWWVGDIPVSGALLTDWSDDTMKELHLAIPAKITREKLDQVATAVYQMMDQLYQGKMYFPGYFPNELRNIFREQVHLIQNAIIESRIDCQHRCGIFQYETISCNNCTDSHVACFGYNCESSAQWKSAVQGLLNYINNWHKQDTSMRPRSSAFSWPGTHRATPAFLVSPALRCLEPPHLANLTLEDAAECLKQH

SEQ ID NO: 7343 - protein, 214 aa, Homo Sapiens
MALLLCLVCLTAALAHGCLHCHSNFSKKFSFYRHHVNFKSWWVGDIPVSGALLTDWSDDTMKELHLAIPAKITREKLDQVATAVYQMMDQLYQGKMYFPGYFPNELRNIFREQVHLIQNAIIESRIDCQHRCGIFQYETISCNNCTDSHVACFGYNCESSAQWKSAVQGLLNYINNWHKQDTSMSLVSPALRCLEPPHLANLTLEDAAECLKQH

SEQ ID NO: 7344 - protein, 208 aa, Homo Sapiens
MALLLCLVCLTAALAHGCLHCHSNFSKKFSFYRHHVNFKSWWVGDIPVSGALLTDWSDDTMKELHLAIPAKITREKLDQVATAVYQMMDQLYQGKMYFPGYFPNELRNIFREQVHLIQNAIIESRIDCQHRCGIFQYETISCNNCTDSHVACFGYNCESSAQWKSAVQGLLNYINNWHNLVSPALRCLEPPHLANLTLEDAAECLKQH

SEQ ID NO: 7345 - protein, 152 aa, Homo Sapiens
VSGALLTDWSDDTMKELHLAIPAKITREKLDQVATAVYQMMDQLYQGKMYFPGYFPNELRNIFREQVHLIQNAIIESIFQYETISCNNCTDSHVACFGYNCESSAQWKSAVQGLLNYINNWHNLVSPALRCLEPPHLANLTLEDAAECLKQH

SEQ ID NO: 7346 - protein, 152 aa, Homo Sapiens
  misc_feature (1)..(1): Xaa can be any naturally occurring amino acid
XPQQLLQEVLLLPPPCELQVLVGGRHPRVRGAAHRLERRHDEGAAPGHPRQDHPGEAGPSGDSSVPDDGSAVPGEDVLPRVFPQRAAKHLPGAGAPHPERHHRKPHRLSAPLWSSAQWKSAVQGLLNYINNWHKPRSSAFSWPGTHRATPAL

SEQ ID NO: 7347 - protein, 138 aa, Homo Sapiens
  misc_feature (1)..(1): Xaa can be any naturally occurring amino acid
XSALPQQLLQEVLLLPPPCELQVLVGGRHPRVRGAAHRLERRHDEGAAPGHPRQDHPGEAGPSGDSSVPDDGSAVPGEDVLPRVFPQRAAKHLPGAGAPHPERHHRKPHRLSAPLWHLPVRDHLLQQLHRLARRLLWL

SEQ ID NO: 7348 - protein, 155 aa, Homo Sapiens
MFCPLKLILLPVLLDYSLGLNDLNVSPPELTVHVGDSALMGCVFQSTEDKCIFKIDWTLSPGEHAKDEYVLYYYSNLSVPIGRFQNRVHLMGDILCNDGSLLLQDVQEADQGTYICEIRLKGESQVFKKAVVLHVLPEEPKELMVHVGGLIQMGC

SEQ ID NO: 7349 - protein, 383 aa, Homo Sapiens
MFCPLKLILLPVLLDYSLGLNDLNVSPPELTVHVGDSALMGCVFQSTEDKCIFKIDWTLSPGEHAKDEYVLYYYSNLSVPIGRFQNRVHLMGDILCNDGSLLLQDVQEADQGTYICEIRLKGESQVFKKAVVLHVLPEEPKELMVHVGGLIQMGCVFQSTEVKHVTKEEIVFRYYHKLRMSVEYSQSWGHFQNRVNLVGDIFRNDGSIMLQGVRESDGGNYTCSIHLGNLVFKKTIVLHVSPEEPRTLVTPAALRPLVLGGNQLVIIVGIVCATILLLPVLILIVKKTCGNKSSVNSTVLVKNTKKTNPEIKEKPCHFERCEGEKHIYSPIIVREVIEEEEPSEKSEATYMTMHPVWPSLRSDRNNSLEKKSGGGMPKTQQAF

SEQ ID NO: 7350 - protein, 394 aa, Homo Sapiens
MFCPLKLILLPVLLDYSLGLNDLNVSPPELTVHVGDSALMGCVFQSTEDKCIFKIDWTLSPGEHAKDEYVLYYYSNLSVPIGRFQNRVHLMGDILCNDGSLLLQDVQEADQGTYICEIRLKGESQVFKKAVVLHVLPEEPKELMVHVGGLIQMGCVFQSTEVKHVTKVEWIFSGRRAKEEIVFRYYHKLRMSVEYSQSWGHFQNRVNLVGDIFRNDGSIMLQGVRESDGGNYTCSIHLGNLVFKKTIVLHVSPEEPRTLVTPAALRPLVLGGNQLVIIVGIVCATILLLPVLILIVKKTCGNKSSVNSTVLVKNTKKTNPEIKEKPCHFERCEGEKHIYSPIIVREVIEEEEPSEKSEATYMTMHPVWPSLRSDRNNSLEKKSGGGMPKTQQAF

SEQ ID NO: 7351 - protein, 66 aa, Homo Sapiens
MFCPLKLILLPVLLEHRRQMYIQDRLDSVTRRARQGRICAILLLQSQCAYWALPEPRTLDGGHLMQ

SEQ ID NO: 7352 - protein, 121 aa, Homo Sapiens
MGCVFQSTEDKCIFKIDWTLSPGEHAKDEYVLYYYSNLSVPIGRFQNRVHLMGDILCNDGSLLLQDVQEADQGTYICEIRLKGESQVFKKAVVLHVLPEEPKELMVHVGGLIQMGCVFQST

SEQ ID NO: 7353 - protein, 220 aa, Homo Sapiens
MGCVFQSTEDKCIFKIDWTLSPGEHAKDEYVLYYYSNLSVPIGRFQNRVHLMGDILCNDGSLLLQDVQEADQGTYICEIRLKGESQVFKKAVVLHVLPEEPKELMVHVGGLIQMGCVFQSTEVKHVTKVEWIFSGRRAKEEIVFRYYHKLRMSVEYSQSWGHFQNRVNLVGDIFRNDGSIMLQGVRESDGGNYTCSIHLGNLVFKKTIVLHVSPEEPRKW

SEQ ID NO: 7354 - protein, 305 aa, Homo Sapiens
MGCVFQSTEDKCIFKIDWTLSPGEHAKDEYVLYYYSNLSVPIGRFQNRVHLMGDILCNDGSLLLQDVQEADQGTYICEIRLKGESQVFKKAVVLHVLPEEPKELMVHVGGLIQMGCVFQSTEVKHVTKVEWIFSGRRAKEEIVFRYYHKLRMSVEYSQSWGHFQNRVNLVGDIFRNDGSIMLQGVRESDGGNYTCSIHLGNLVFKKTIVLHVSPEEPRTLVTPAALRPLVLGGNQLVIIVGIVCATILLLPVLILIVKKTCGNKSSVNSTVLVKNTKKTNPEIKEKPCHFERCEGEVNTRFSLKH

SEQ ID NO: 7355 - protein, 355 aa, Homo Sapiens
MGCVFQSTEDKCIFKIDWTLSPGEHAKDEYVLYYYSNLSVPIGRFQNRVHLMGDILCNDGSLLLQDVQEADQGTYICEIRLKGESQVFKKAVVLHVLPEEPKELMVHVGGLIQMGCVFQSTEVKHVTKVEWIFSGRRAKEEIVFRYYHKLRMSVEYSQSWGHFQNRVNLVGDIFRNDGSIMLQGVRESDGGNYTCSIHLGNLVFKKTIVLHVSPEEPRTLVTPAALRPLVLGGNQLVIIVGIVCATILLLPVLILIVKKTCGNKSSVNSTVLVKNTKKTNPEIKEKPCHFERCEGEKHIYSPIIVREVIEEEEPSEKSEATYMTMHPVWPSLRSDRNNSLEKKSGGGMPKTQQAF

SEQ ID NO: 7356 - protein, 384 aa, Homo Sapiens
MVSGDYSLGLNDLNVSPPELTVHVGDSALMGCVFQSTEDKCIFKIDWTLSPGEHAKDEYVLYYYSNLSVPIGRFQNRVHLMGDILCNDGSLLLQDVQEADQGTYICEIRLKGESQVFKKAVVLHVLPEEPKELMVHVGGLIQMGCVFQSTEVKHVTKVEWIFSGRRAKEEIVFRYYHKLRMSVEYSQSWGHFQNRVNLVGDIFRNDGSIMLQGVRESDGGNYTCSIHLGNLVFKKTIVLHVSPEEPRTLVTPAALRPLVLGGNQLVIIVGIVCATILLLPVLILIVKKTCGNKSSVNSTVLVKNTKKTNPEIKEKPCHFERCEGEKHIYSPIIVREVIEEEEPSEKSEATYMTMHPVWPSLRSDRNNSLEKKSGGGMPKTQQAF

SEQ ID NO: 7357 - protein, 70 aa, Homo Sapiens
MKNHLLFWGVLAVFIKAVHVKAQEDERIVLVDNKCKCARITSRIIRSSEDPNEDIVERNIRIIVPLNNRE

SEQ ID NO: 7358 - protein, 159 aa, Homo Sapiens
MKNHLLFWGVLAVFIKAVHVKAQEDERIVLVDNKCKCARITSRIIRSSEDPNEDIVERNIRIIVPLNNRENISDPTSPLRTRFVYHLSDLCKKCDPTEVELDNQIVTATQSNICDEDSATETCYTYDRNKCYTAVVPLVYGGETKMVETALTPDACYPD

SEQ ID NO: 7359 - protein, 159 aa, Homo Sapiens; identical to SEQ ID NO: 7358

SEQ ID NO: 7360 - protein, 159 aa, Homo Sapiens; identical to SEQ ID NO: 7358

SEQ ID NO: 7361 - protein, 158 aa, Homo Sapiens
MKNHLLFWGVLAVFIKAVHVKENGIHSEFRAQEDERIVLVDNKCKCARITSRIIRSSEDPNEDIVERNIRIIVPLNNRENISDPTSPLRTRFVYHLSDLCKKCDPTEVELDNQIVTATQSNICDEDSATETCYTYDRNKCYTAVVPLVYGGETKMVET

SEQ ID NO: 7362 - protein, 157 aa, Homo Sapiens
MKNHLLFWGVLAVFIKAVHVKGSRDSSASASRVAGITAQEDERIVLVDNKCKCARITSRIIRSSEDPNEDIVERNIRIIVPLNNRENISDPTSPLRTRFVYHLSDLCKKCDPTEVELDNQIVTATQSNICDEDSATETCYTYDRNKCYTAVVPLVYG

SEQ ID NO: 7363 - protein, 285 aa, Homo Sapiens
MAGGWAQGSRRAARLPEGGRLMAPASRLLALWALAAVALPGSGAEGDGGWRPGGPGAVAEEERCTVERRADLTYAEFVQQYAFVRPVILQGLTDNSRFRALCSRDRLLASFGDRVVRLSTANTYSYHKVDLPFQEYVEQLLHPQDPTSLGNDTLYFFGDNNFTEWASLFRHYSPPPFGLLGTAPAYSFGIAGAGSGVPFHWHGPGYSEVIYGRKRWFLYPPEKTPEFHPNKTTLAWLRDTYPALPPSARPLECTIRAGEVLYFPDRWWHATLNLDTSVFISTFLG

SEQ ID NO: 7364 - protein, 264 aa, Homo Sapiens
MAPASRLLALWALAAVALPGSGAEGDGGWRPGGPGAVAEEERCTVERRADLTYAEFVQQYAFVRPVILQGLTDNSRFRALCSRDRLLASFGDRVVRLSTANTYSYHKVDLPFQEYVEQLLHPQDPTSLGNDTLYFFGDNNFTEWASLFRHYSPPPFGLLGTAPAYSFGIAGAGSGVPFHWHGPGYSEVIYGRKRWFLYPPEKTPEFHPNKTTLAWLRDTYPALPPSARPLECTIRAGEVLYFPDRWWHATLNLDTSVFISTFLG

SEQ ID NO: 7365 - protein, 219 aa, Homo Sapiens
MAPASRLLALWALAAVALPGSGAEGDGGWRPGGPGAVAEEERCTVERRADLTYAEFVQQYAFVRPVILQGLTDNSRFRALCSRDRLLASFGDRVVRLSTANTYSYHKVDLPFQEYVEQLLHPQDPTSLGNDTLYFFGDNNFTEWASLFRHYSPPPFGLLGTAPAYSFGIAGAGSGVPFHWHGPGYSEVIYGRKVLYFPDRWWHATLNLDTSVFISTFLG

SEQ ID NO: 7366 - protein, 234 aa, Homo Sapiens
MAPASRLLALWALAAVALPGSGAEGDGGWYAFVRPVILQGLTDNSRFRALCSRDRLLASFGDRVVRLSTANTYSYHKVDLPFQEYVEQLLHPQDPTSLGNDTLYFFGDNNFTEWASLFRHYSPPPFGLLGTAPAYSFGIAGAGSGVPFHWHGPGYSEVIYGRKRWFLYPPEKTPEFHPNKTTLAWLRDTYPALPPSARPLECTIRAGEVLYFPDRWWHATLNLDTSVFISTFLG

SEQ ID NO: 7367 - protein, 81 aa, Homo Sapiens
  misc_feature (1)..(1): Xaa can be any naturally occurring amino acid
XWTCPSRSMWSSCCTPRTPPPWAMTPCTSSGTTTSPSGPLSFGTTPHPHLACWEPLQLTALESQELARGCPSTGMDPGTQK

SEQ ID NO: 7368 - protein, 331 aa, Homo Sapiens
MSMTTRAWEELDGGLGSCQALEDHSALAETQEDRASATPRLADSGSVPHDSQVAEGPSVDTRPKKMEKEPAARGTPGTGKERLKAGASPRSVPARKKAQTAPPLQPPPPPPALSEELPWGDLSLNKCLVLASLVALLGSAFQLCRDAVPGEAALQARVPEPWVPPSSAPREPSSPLPKFEAQAPPSAPPAPRAEAEVRPKIPGSREAAENDEEEPGEATGEAVREDRVTLADRGPKERPRREGKPRKEKPRKEERPKKERPRKEERPRAAREPREALPQRWESREGGHRPWARDSRDAEPRKKQAWVSPRRPDEEQRPGSRQKLRAGKGRD

SEQ ID NO: 7369 - protein, 206 aa, Homo Sapiens
ENLKRLKCLRRYRQRYGVEALLHRQLKERRMLATDGAAQQAHTTRSSQRCLAFVDDVRCSNQSLPMTRHCLTHICQDTNQVLFKCCQGSEEVPCNKPVPVSLSEDPCCPLHFQLPPQMYKPEQDLDVVGDGMQCPPSPLLFDPSLTLEDHLVKEIAEDPVDILGQMQMAGDGCRSQGSRNSEKASAPLSQSGLATANGKPEPTSIS

SEQ ID NO: 7370 - protein, 675 aa, Homo Sapiens
MAVLFPLSSCGWAAISLFLSAQSCYSASKQCQSQSPSCRLPGARISGDWSRRTKWRSHRLPRPGPVVRSEAGRDKGGVRGGGVAAAWGWCCRFPSCCSCASPEDTFSVVWFGVGPGMEGHAKGRQSHRCLWRLGEGGGDLRSVPYGDDFCMSFGNCPRDLCGAGIFGKGKGFLVFRLTPQVLVMNRIRIHVLPTNRGRITPVPRSQEPLSCAFTHRPCSHPRLEGQEFCIKHILEDKNAPFKQCSYISTKNGKRCPNAAPKPEKKDGVSFCAEHVRRNALALHAQMKKTNPGPVGETLLCQLSSYAKTELGSQTPESSRSEASRILDEDSWSDGEQEPITVDQTWRGDPDSEADSIDSDQEDPLKHAGVYTAEEVALIMREKLIRLQSLYIDQFKRLQHLLKEKKRRYLHNRKVEHEALGSSLLTGPEGLLAKERENLKRLKCLRRYRQRYGVEALLHRQLKERRMLATDGAAQQAHTTRSSQRCLAFVDDVRCSNQSLPMTRHCLTHICQDTNQVLFKCCQGSEEVPCNKPVPVSLSEDPCCPLHFQLPPQMYKPEQVLSVPDDLEAGPMDLYLSAAELQPTESLPLEFSDDLDVVGDGMQCPPSPLLFDPSLTLEDHLVKEIAEDPVDILGQMQMAGDGCRSQGSRNSEKASAPLSQSGLATANGKPEPTSIS

SEQ ID NO: 7371 - protein, 69 aa, Homo Sapiens
MNRIRIHVLPTNRGRITPVPRSQEPLSCAFTHRPCSHPRLEGQEFCIKHILEDKNAPFKQCSYISTKNG

SEQ ID NO: 7372 - protein, 108 aa, Homo Sapiens
MNRIRIHVLPTNRGRITPVPRSQEPLSCAFTHRPCSHPRLEGQEFCIKHILEDKNAPFKQCSYISTKNGKRCPNAAPKPEKKDGVSFCAEHVRRNALALHAQMKKTNP

SEQ ID NO: 7373 - protein, 492 aa, Homo Sapiens
MNRIRIHVLPTNRGRITPVPRSQEPLSCAFTHRPCSHPRLEGQEFCIKHILEDKNAPFKQCSYISTKNGKRCPNAAPKPEKKDGVSFCAEHVRRNALALHAQMKKTNPGPVGETLLCQLSSYAKTELGSQTPESSRSEASRILDEDSWSDGEQEPITVDQTWRGDPDSEADSIDSDQEDPLKHAGVYTAEEVALIMREKLIRLQSLYIDQFKRLQHLLKEKKRRYLHNRKVEHEALGSSLLTGPEGLLAKERENLKRLKCLRRYRQRYGVEALLHRQLKERRMLATDGAAQQAHTTRSSQRCLAFVDDVRCSNQSLPMTRHCLTHICQDTNQVLFKCCQGSEEVPCNKPVPVSLSEDPCCPLHFQLPPQMYKPEQVLSVPDDLEAGPMDLYLSAAELQPTESLPLEFSDDLDVVGDGMQCPPSPLLFDPSLTLEDHLVKEIAEDPVDILGQMQMAGDGCRSQGSRNSEKASAPLSQSGLATANGKPEPTSIS

SEQ ID NO: 7374 - protein, 454 aa, Homo Sapiens
MNRIRIHVLPTNRGRITPVPRSQEPLSCAFTHRPCSHPRLEGQEFCIKHILEDKNAPFKQCSYISTKNGKRCPNAAPKPEKKDGVSFCAEHVRRNALALHAQMKKTNPGPVGETLLCQLSSYAKTELGSQTPESSRSEASRILDEDSWSDGEQEPITVDQTWRGDPDSEADSIDSDQEDPLKHAGVYTAEEVALIMREKLIRLQSLYIDQFKRLQHLLKEKKRRYLHNRKVEHEALGSSLLTGPEGLLAKERENLKRLKCLRRYRQRYGVEALLHRQLKERRMLATDGAAQQAHTTRSSQRCLAFVDDVRCSNQSLPMTRHCLTHICQDTNQVLFKCCQGSEEVPCNKPVPVSLSEDPCCPLHFQLPPQMYKPEQDLDVVGDGMQCPPSPLLFDPSLTLEDHLVKEIAEDPGQMQMAGDGCRSQGSRNSEKASAPLSQSGLATANGKPEPTSIS

SEQ ID NO: 7375 - protein, 155 aa, Homo Sapiens
MNRIRIHVLPTNRGRITPVPRSQEPLSCAFTHRPCSHPRLEGQEFCIKHILEDKNAPFKQCSYISTKNGKRCPNAAPKPEKKDGVSFCAEHVRRNALALHAQMKKTNPGPVGETLLCQLSSYAKTELGSQTPESSRSEASRILDMLVSTQQKKWP

SEQ ID NO: 7376 - protein, 133 aa, Homo Sapiens
MNRIRIHVLPTNRGRITPVPRVSFCAEHVRRNALALHAQMKKTNPGPVGETLLCQLSSYAKTELGSQTPESSRSEASRILDEDSWSDGEQEPITVDQTWRGDPDSEADSIDSDQEDPLKHAGVYTAEEVALIM

SEQ ID NO: 7377 - protein, 74 aa, Homo Sapiens
PNAAPKPEKKDGVSFCAEHVRRNALALHAQMKKTNPGPVGETLLCQLSSYAKTELGSQTPESSRSEASRILGLG

SEQ ID NO: 7378 - protein, 340 aa, Homo Sapiens
  misc_feature (1)..(1): Xaa can be any naturally occurring amino acid
XLPTNRGRITPVPRSQEPLSCAFTHRPCSHPRLEGQEFCIKHILEDKNAPFKQCSYISTKNGKRCPNAAPKPEKKDGVSFCAEHVRRNALALHAQMKKTNPGPVGETLLCQLSSYAKTELGSQTPESSRSEASRILDEDSWSDGEQEPITVDQTWRGDPDSEADSIDSDQEDPLKHAGVYTAEEVALIMREKLIRLQSLYIDQFKRLQHLLKEKKRRYLHNRKVEHEALGSSLLTGPEGLLAKERENLKRLKCLRRYRQRYGVEALLHRQLKERRMLATDGAAQQAHTTRSSQRCLAFVDDVRCSNQSLPMTRHCLTQKDATAIGDLLTLYCGLMETALD

SEQ ID NO: 7379 - protein, 25 aa, Homo Sapiens
  misc_feature (1)..(1): Xaa can be any naturally occurring amino acid
XPESSRSEASRILDMLVSTQQKKWP

SEQ ID NO: 7380 - protein, 304 aa, Homo Sapiens
MLPPPRPAAALALPVLLLLLVVLTPPPTGARPSPGPDYLRRGWMRLLAEGEGCAPCRPEECAAPRGCLAGRVRDACGCCWECANLEGQLCDLDPSAHFYGHCGEQLECRLDTGGDLSRGEVPEPLCACRSQSPLCGSDGHTYSQICRLQEAARARPDANLTVAHPGPCESGPQIVSHPYDTWNVTGQDVIFGCEVFAYPMASIEWRKDGLDIQLPGDDPHISVQFRGGPQRFEVTGWLQIQAVRPSDEGTYRCLGRNALGQVEAPASLTVLTPDQLNSTGIPQLRSLNLVPEEEAESEENDDYY

SEQ ID NO: 7381 - protein, 230 aa, Homo Sapiens
MGIQGMELCAMAVVVLLFIAVLKQFGILEPISMEDSSDSELELSTVRHQPEGLDQLQAQTKFTKKELQSLYRGFKNECPTGLVDEDTFKLIYAQFFPQGDATTYAHFLFNAFDADGNGAIHFEDFVVGLSILLRGTVHEKLKWAFNLYDINKDGYITKEEMLAIMKSIYDMMGRHTYPILREDAPAEHVERFFEKMDRNQDGVVTIEEFLEACQKDENIMSSMQLFENVI

SEQ ID NO: 7382 - protein, 256 aa, Homo Sapiens
MQPAKEVTKASDGSLLGDLGHTPLSKKEGIKWQRPRLSRQALMRCCLVKWILSSTAPQGSDSSDSELELSTVRHQPEGLDQLQAQTKFTKKELQSLYRGFKNECPTGLVDEDTFKLIYAQFFPQGDATTYAHFLFNAFDADGNGAIHFEDFVVGLSILLRGTVHEKLKWAFNLYDINKDGYITKEEMLAIMKSIYDMMGRHTYPILREDAPAEHVERFFEKMDRNQDGVVTIEEFLEACQKDENIMSSMQLFENVI

SEQ ID NO: 7383 - protein, 256 aa, Homo Sapiens
MQPRKEVTKASDGSLLGDLGHTPLSKKEGIKWQRPRLSRQALMRCCLVKWILSSTAPQGSDSSDSELELSTVRHQPEGLDQLQAQTKFTKKELQSLYRGFKNECPTGLVDEDTFKLIYAQFFPQGDATTYAHFLFNAFDADGNGAIHFEDFVVGLSILLRGTVHEKLKWAFNLYDINKDGYITKEEMLAIMKSIYDMMGRHTYPILREDAPAEHVERFFEKMDRNQDGVVTIEEFLEACQKDENIMSSMQLFENVI

SEQ ID NO: 7384 - protein, 252 aa, Homo Sapiens
MGGLRPWSRYGLLVVAHLLALGLGAVVFQALEGPPACRLQAELRAELAAFQAEHRACLPPGALEELLGTALATQAHGVSTLGNSSEGRTWDLPSALLFAASILTTTGYGHMAPLSPGGKAFCMVYAALGLPASLALVATLRHCLLPVLSRPRAWVAVHWQLSPARAALLQAVALGLLVASSFVLLPALVLWGLQGDCSLLGAVYFCFSSLSTIGLEDLLPGRGRSLHPVIYHLGQLALLGGGTSLQGTAWEG

SEQ ID NO: 7385 - protein, 252 aa, Homo Sapiens; identical to SEQ ID NO: 7384

SEQ ID NO: 7386 - protein, 257 aa, Homo Sapiens
MGGLRPWSRYGLLVVAHLLALGLGAVVFQALEGPPACRLQAELRAELAAFQAEHRACLPPGALEELLGTALATQAHGVSTLGNSSEGRTWDLPSALLFAASILTTTGYGHMAPLSPGGKAFCMVYAALGLPASLALVATLRHCLLPVLSRPRAWVAVHWQLSPARAALLQAVALGLLVASSFVLLPALVLWGLQGDCSLLGAVYFCFSSLSTIGLEDLLPGRGRSLHPVIYHLGQLALLGKSSHLTACGGRGKRSLD

SEQ ID NO: 7387 - protein, 307 aa, Homo Sapiens
MGGLRPWSRYGLLVVAHLLALGLGAVVFQALEGPPACRLQAELRAELAAFQAEHRACLPPGALEELLGTALATQAHGVSTLGNSSEGRTWDLPSALLFAASILTTTGYGHMAPLSPGGKAFCMVYAALGLPASLALVATLRHCLLPVLSRPRAWVAVHWQLSPARAALLQAVALGLLVASSFVLLPALVLWGLQGDCSLLGAVYFCFSSLSTIGLEDLLPGRGRSLHPVIYHLGQLALLGYLLLGLLAMLLAVETFSELPQVRAMGKFFRPSGPVTAEDQGGILGQDELALSTLPPAAPASGQAPAC

SEQ ID NO: 7388 - protein, 72 aa, Homo Sapiens
  misc_feature (1)..(1): Xaa can be any naturally occurring amino acid
XHLGQLALLGLLAMLLAVETFSELPQVRAMGKFFRPSGPVTAEDQGGILGQDELALSTLPPAAPASGQAPAC

SEQ ID NO: 7389 - protein, 28 aa, Homo Sapiens
  misc_feature (1)..(1): Xaa can be any naturally occurring amino acid
XLHPVIYHLGQLALLGGGTSLQGTAWEG

SEQ ID NO: 7390 - protein, 57 aa, Homo Sapiens
MGGDLVLGLGALRRRKRLLEQEKSLAGWALVLAGTGIGLMVLHAEMLWFGGCSTHFG

SEQ ID NO: 7391 - protein, 427 aa, Homo Sapiens
MGGDLVLGLGALRRRKRLLEQEKSLAGWALVLAGTGIGLMVLHAEMLWFGGCSWALYLFLVKCTISISTFLLLCLIVAFHAKEVQLFMTDNGLRDWRVALTGRQAAQIVLELVVCGLHPAPVRGPPCVQDLGAPLTSPQPWPGFLGQGEALLSLAMLLRLYLVPRAVLLRSGVLLNASYRSIGALNQVRFRHWFVAKLYMNTHPGRLLLGLTLGLWLTTAWVLSVAERQAVNATGHLSDTLWLIPITFLTIGYGDVVPGTMWGKIVCLCTGVMGVCCTALLVAVVARKLEFNKAEKHVHNFMMDIQYTKEMKESAARVLQEAWMFYKHTRRKESHAARRHQRKLLAAINAFRQVRLKHRKLREQVNSMVDISKMHMILYDLQQNLSSSHRALEKQIDTLAGKLDALTELLSTALGPRQLPEPSQQSK

SEQ ID NO: 7392 - protein, 295 aa, Homo Sapiens
MHDQHFHLLTPLPHRGLSCQRGPAVHDRQRAAGLARGADRAAGNASYRSIGALNQVRFRHWFVAKLYMNTHPGRLLLGLTLGLWLTTAWVLSVAERQAVNATGHLSDTLWLIPITFLTIGYGDVVPGTMWGKIVCLCTGVMGVCCTALLVAVVARKLEFNKAEKHVHNFMMDIQYTKEMKESAARVLQEAWMFYKHTRRKESHAARRHQRKLLAAINAFRQVRLKHRKLREQVNSMVDISKMHMILYDLQQNLSSSHRALEKQIDTLAGKLDALTELLSTALGPRQLPEPSQQSK

SEQ ID NO: 7393 - protein, 113 aa, Homo Sapiens
SDTLWLIPITFLTIGYGDVVPGTMWGKIVCLCTGVMGVCCTALLVAVVARKLEFNKAEKHVHNFMMDIQYTKEMKESAARVLQEAWMFYKHTRRKESHAARRHQRKLLAAINA

SEQ ID NO: 7394 - protein, 59 aa, Homo Sapiens
VDISKMHMILYDLQQNLSSSHRALEKQIDTLAGKLDALTELLSTALGPRQLPEPSQQSK

SEQ ID NO: 7395 - protein, 165 aa, Homo Sapiens
  misc_feature (1)..(1): Xaa can be any naturally occurring amino acid
XVCCTALLVAVVARKLEFNKAEKHVHNFMMDIQYTKEEGVSCCPQASAQAAGRHQRVRAALYAHVSMCTHVQVTSLHGCVCACPCLSRFRQVRLKHRKLREQVNSMVDISKMHMILYDLQQNLSSSHRALEKQIDTLAGKLDALTELLSTALGPRQLPEPSQQSK

SEQ ID NO: 7396 - protein, 113 aa, Homo Sapiens
MFQTKLRNETWEDLPKMSCTTEIQAAFILSSFVTFFSGLIILLIFRLIWRSVKKWQIIKGTGIILELFTSGTIARSHVRSLHFQGQFRDHIEMLLSAQTFVGQVLPCWKLFII

SEQ ID NO: 7397 - protein, 1149 aa, Homo Sapiens
MFQTKLRNETWEDLPKMSCTTEIQAAFILSSFVTFFSGLIILLIFRLIWRSVKKWQIIKGTGIILELFTSGTIARSHVRSLHFQGQFRDHIEMLLSAQTFVGQVLVILVFVLSIGSLIIYFINSADPVGSCSSYEDKTIPIDLVFNAFFSFYFGLRFMAADDKIKFWLEMNSIVDIFTIPPTFISYYLKSNWLGLRFLRALRLLELPQILQILRAIKTSNSVKFSKLLSIILSTWFTAAGFIHLVENSGDPWLKGRNSQNISYFESIYLVMATTSTVGFGDVVAKTSLGRTFIMFFTLGSLILFANYIPEMVELFANKRKYTSSYEALKGKKFIVVCGNITVDSVTAFLRNFLRDKSGEINTEIVFLGETPPSLELETIFKCYLAYTTFISGSAMKWEDLRRVAVESAEACLIIANPLCSDSHAEDISNIMRVLSIKNYDSTTRIIIQILQSHNKVYLPKIPSWNWDTGDNIICFAELKLGFIAQGCLVPGLCTFLTSLFVEQNKKVMPKQTWKKHFLNSMKNKILTQRLSDDFAGMSFPEVARLCFLKMHLLLIAIEYKSLFTDGFCGLILNPPPQVRIRKNTLGFFIAETPKDVRRALFYCSVCHDDVFIPELITNCGCKSRSRQHITVPSVKRMKKCLKGISSRISGQDSPPRVSASTSSISNFTTRTLQHDVEQDSDQLDSSGMFHWCKPTSLDKVTLKRTGKSKYKFRNHIVACVFGDAHSAPMGLRNFVMPLRASNYTRKELKDIVFIGSLDYLQREWRFLWNFPQIYILPGCALYSGDLHAANIEQCSMCAVLSPPPQPSSNQTLVDTEAIMATLTIGSLQIDSSSDPSPSVSEETPGYTNGHNEKSNCRKVPILTELKNPSNIHFIEQLGGLEGSLQETNLHLSTAFSTGTVFSGSFLDSLLATAFYNYHVLELLQMLVTGGVSSQLEQHLDKDKVYGVADSCTSLLSGRNRCKLGLLSLHETILSDVNPRNTFGQLFCGSLDLFGILCVGLYRIIDEEELNPENKRFVITRPANEFKLLPSDLVFCAIPFSTACYKRNEEFSLQKSYEIVNKASQTTETHSDTNCPPTIDSVTETLYSPVYSYQPRTNSLSFPKQIAWNQSRTNSIISSQIPLGDNAKENERKTSDEVYDEDPFAYSEPL

SEQ ID NO: 7398 - protein, 308 aa, Homo Sapiens
MFQTKLRNETWEDLPKMSCTTEIQAAFILSSFVTFFSGLIILLIFRLIWRSVKKWQIIKGTGIILELFTSGTIARSHVRSLHFQGQFRDHIEMLLSAQTFVGQVLVILVFVLSIGSLIIYFINSADPVGSCSSYEDKTIPIDLVFNAFFSFYFGLRFMAADDKIKFWLEMNSIVDIFTIPPTFISYYLKSNWLGLRFLRALRLLELPQILQILRAIKTSNSVKFSKLLSIILSTWFTAAGFIHLVENSGDPWLKGRNSQNISYFESIYLVMATTSTVGFGDVVAKTSLGRTFIMFFTLGSLVKNIFNI

SEQ ID NO: 7399 - protein, 947 aa, Homo Sapiens
MFQTKLRNETWEDLPKMSCTTEIQAAFILSSFVTFFSGLIILLIFRLIWRSVKKWQIIKGTGIILELFTSGTIARSHVRSLHFQGQFRDHIEMLLSAQTFVGQVLVILVFVLSIGSLIIYFINSADPVGSCSSYEDKTIPIDLVFNAFFSFYFGLRFMAADDKIKFWLEMNSIVDIFTIPPTFISYYLKSNWLGLRFLRALRLLELPQILQILRAIKTSNSVKFSKLLSIILSTWFTAAGFIHLVENSGDPWLKGRNSQNISYFESIYLVMATTSTVGFGDVVAKTSLGRTFIMFFTLGSLILFANYIPEMVELFANKRKYTSSYEALKGKKFIVVCGNITVDSVTAFLRNFLRDKSGEINTEIVFLGETPPSLELETIFKCYLAYTTFISGSAMKWEDLRRVAVESAEACLIIANPLCSDSHAEDISNIMRVLSIKNYDSTTRIIIQILQSHNKVYLPKIPSWNWDTGDNIICFAELKLGFIAQGCLVPGLCTFLTSLFVEQNKKVMPKQTWKKHFLNSMKNKILTQRLSDDFAGMSFPEVARLCFLKMHLLLIAIEYKSLFTDGFCGLILNPPPQVRIRKNTLGFFIAETPKDVRRALFYCSVCHDDVFIPELITNCGCKSRSRQHITVPSVKRMKKCLKGISSRISGQDSPPRVSASTSSISNFTTRTLQHDVEQDSDQLDSSGMFHWCKPTSLDKVTLKRTGKSKYKFRNHIVACVFGDAHSAPMGLRNFVMPLRASNYTRKELKDIVFIGSLDYLQREWRFLWNFPQIYILPGCALYSGDLHAANIEQCSMCAVLSPPPQPSSNQTLVDTEAIMATLTIGSLQIDSSSDPSPSVSEETPGYTNGHNEKSNCRKVPILTELKNPSNIHFIEQLGGLEGSLQETNLHLSTAFSTGTVFSGSFLDSLLATLMWKLAIKGSQFQGRSSGLCWPSTIIMSWNCFRCW

SEQ ID NO: 7400 - protein, 51 aa, Homo Sapiens
MIKKTEFSNVCSIFYLILQAMLKGLLQLSCPGIASDAGDRRSKFSAGTTFR

SEQ ID NO: 7401 - protein, 1628 aa, Homo Sapiens
MAGVGAAALSLLLHLGALALAAGAEGGAVPREPPGQQTTAHSSVLAGNSQEQWHPLREWLGRLEAAVMELREQNKDLQTRVRQLESCECHPASPQCWGLGRAWPEGARWEPDACTACVCQDGAAHCGPQAHLPHCRGCSQNGQTYGNGETFSPDACTTCRCLEGTITCNQKPCPRGPCPEPGACCPHCKPGCDYEGQLYEEGVTFLSSSNPCLQCTCLRSRVRCMALKCPPSPCPEPVLRPGHCCPTCQGCTEGGSHWEHGQEWTTPGDPCRICRCLEGHIQCRQRECASLCPYPARPLPGTCCPVCDGCFLNGREHRSGEPVGSGDPCSHCRCANGSVQCEPLPCPPVPCRHPGKIPGQCCPVCDGCEYQGHQYQSQETFRLQERGLCVRCSCQAGEVSCEEQECPVTPCALPASGRQLCPACELDGEEFAEGVQWEPDGRPCTACVCQDGVPKCGAVLCPPAPCQHPTQPPGACCPSCDSCTYHSQVYANGQNFTDADSPCHACHCQDGTVTCSLVDCPPTTCARPQSGPGQCCPRCPDCILEEEVFVDGESFSHPRDPCQECRCQEGHAHCQPRPCPRAPCAHPLPGTCCPNDCSGCAFGGKEYPSGADFPHPSDPCRLCRCLSGNVQCLARRCVPLPCPEPVLLPGECCPQCPAAPAPAGCPRPGAAHARHQEYFSPPGDPCRRCLCLDGSVSCQRLPCPPAPCAHPRQGPCCPSCDGCLYQGKEFASGERFPSPTAACHLCLCWEGSVSCEPKACAPALCPFPARGDCCPDCDGCEYLGESYLSNQEFPDPREPCNLCTCLGGFVTCGRRPCEPPGCSHPLIPSGHCCPTCQGCRYHGVTTASGETLPDPLDPTCSLCTCQEGSMRCQKKPCPPALCPHPSPGPCFCPVCHSCLSQGREHQDGEEFEGPAGSCEWCRCQAGQVSCVRLQCPPLPCKLQVTERGSCCPRCRGCLAHGEEHPEGSRWVPPDSACSSCVCHEGVVTCARIQCISSCAQPRQGPHDCCPQCSDCEHEGRKYEPGESFQPGADPCEVCICEPQPEGPPSLRCHRRQCPSLVGCPPSQLLPPGPQHCCPTCAEALSNCSEGLLGSELAPPDPCYTCQCQDLTWLCIHQACPELSCPLSERHTPPGSCCPVCRECVVEAEGRRVADGESWRDPSNACIACTCHRGHVECHLEECQALSCPHGWAKVPQADSCCERCQAPTQSCVHQGREVASGERWTVDTCTSCSCMAGTVRCQSQRCSPLSCGPDKAPALSPGSCCPRCLPRPASCMAFGDPHYRTFDGRLLHFQGSCSYVLAKDCHSGDFSVHVTNDDRGRSGVAWTQEVAVLLGDMAVRLLQDGAVTVDGHPVALPFLQEPLLYVELRGHTVILHAQPGLQVLWDGQSQVEVSVPGSYQGRTCGLCGNFNGFAQDDLQGPEGLLLPSEAAFGNSWQVSEGLWPGRPCSAGREVDPCRAAGYRARREANARCGVLKSSPFSRCHAVVPPEPFFAACVYDLCACGPGSSADACLCDALEAYASHCRQAGVTPTWRGPTLCVVGCPLERGFVFDECGPPCPRTCFNQHIPLGELAAHCVRPCVPGCQCPAGLVEHEAHCIPPEACPQVLLTGDQPLGARPSPSREPQETP

SEQ ID NO: 7402 - protein, 1504 aa, Homo Sapiens
MAGVGAAALSLLLHLGALALAAGAEGGAVPREPPGQQTTAHSSVLAGNSQEQWHPLREWLGRLEAAVMELREQNKDLQTRVRQLESCECHPASPQCWGLGRAWPEGARWEPDACTACVCQDGAAHCGPQAHLPHCRGCSQNGQTYGNGETFSPDACTTCRCLTGAVQCQGPSCSELNCLESCTPPGECCPICRCTEGGSHWEHGQEWTTPGDPCRICRCLEGHIQCRQRECASLCPYPARPLPGTCCPVCDGCFLNGREHRSGEPVGSGDPCSHCRCANGSVQCEPLPCPPVPCRHPGKIPGQCCPVCDGCEYQGHQYQSQETFRLQERGLCVRCSCQAGEVSCEEQECPVTPCALPASGRQLCPACELDGEEFAEGVQWEPDGRPCTACVCQDGVPKCGAVLCPPAPCQHPTQPPGACCPSCDSCTYHSQVYANGQNFTDADSPCHACHCQDGTVTCSLVDCPPTTCARPQSGPGQCCPRCPDCILEEEVFVDGESFSHPRDPCQECRCQEGHAHCQPRPCPRAPCAHPLPGTCCPNDCSGCAFGGKEYPSGADFPHPSDPCRLCRCLSGNVQCLARRCVPLPCPEPVLLPGECCPQCPAPAGCPRPGAAHARHQEYFSPPGDPCRRCLCLDGSVSCQRLPCPPAPCAHPRQGPCCPSCDGCLYQGKEFASGERFPSPTAACHLCLCWEGSVSCEPKACAPALCPFPARGDCCPDCDGCEYLGESYLSNQEFPDPREPCNLCTCLGGFVTCGRRPCEPPGCSHPLIPSGHCCPTCQGCRYHGVTTASGETLPDPLDPTCSLCTCQEGSMRCQKKPCPPALCPHPSPGPCFCPVCHSCLSQGREHQDGEEFEGPAGSCEWCRCQAGQVSCVRLQCPPLPCKLQVTERGSCCPRCRGCLAHGEEHPEGSRWVPPDSACSSCVCHEGVVTCARIQCISSCAQPRQGPHDCCPQCSDCEHEGRKYEPGESFQPGADPCEVCICEPQPEGPPSLRCHRRQCPSLVGCPPSQLLPPGPQHCCPTCAEALSNCSEGLLGSELAPPDPCYTCQCQDLTWLCIHQACPELSCPLSERHTPPGSCCPVCRAPTQSCVHQGREVASGERWTVDTCTSCSCMAGTVRCQSQRCSPLSCGPDKAPALSPGSCCPRCLPRPASCMAFGDPHYRTFDGRLLHFQGSCSYVLAKDCHSGDFSVHVTNDDRGRSGVAWTQEVAVLLGDMAVRLLQDGAVTVDGHPVALPFLQEPLLYVELRGHTVILHAQPGLQVLWDGQSQVEVSVPGSYQGRTCGLCGNFNGFAQDDLQGPEGLLLPSEAAFGNSWQVSEGLWPGRPCSAGREVDPCRAAGYRARREANARCGVLKSSPFSRCHAVVPPEPFFAACVYDLCACGPGSSADACLCDALEAYASHCRQAGVTPTWRGPTLCVVGCPLERGFVFDECGPPCPRTCFNQHIPLGELAAHCVRPCVPGCQCPAGLVEHEAHCIPPEACPQVLLTGDQPLGARPSPSREPQETP

SEQ ID NO: 7403 - protein, 1568 aa, Homo Sapiens
MAGVGAAALSLLLHLGALALAAGAEGGAVPREPPGQQTTAHSSVLAGNSQEQWHPLREWLGRLEAAVMELREQNKDLQTRVRQLESCECHPASPQCWGLGRAWPEGARWEPDACTACVCQDGAAHCGPQAHLPHCRGCSQNGQTYGNGETFSPDACTTCRCLTGAVQCQGPSCSELNCLESCTPPGECCPICRPGCDYEGQLYEEGVTFLSSSNPCLQCTCLRSRVRCMALKCPPSPCPEPVLRPGHCCPTCQGCTEGGSHWEHGQEWTTPGDPCRICRCLEGHIQCRQRECASLCPYPARPLPGTCCPVCDGCFLNGREHRSGEPVGSGDPCSHCRCANGSVQCEPLPCPPVPCRHPGKIPGQCCPVCDGCEYQGHQYQSQETFRLQERGLCVRCSCQAGEVSCEEQECPVTPCALPASGRQLCPACELDGEEFAEGVQWEPDGRPCTACVCQDGVPKCGAVLCPPAPCQHPTQPPGACCPSCDSCTYHSQVYANGQNFTDADSPCHACHCQDGTVTCSLVDCPPTTCARPQSGPGQCCPRCPDCILEEEVFVDGESFSHPRDPCQECRCQEGHAHCQPRPCPRAPCAHPLPGTCCPNDCSGCAFGGKEYPSGADFPHPSDPCRLCRCLSGNVQCLARRCVPLPCPEPVLLPGECCPQCPAAPAPAGCPRPGAAHARHQEYFSPPGDPCRRCLCLDGSVSCQRLPCPPAPCAHPRQGPCCPSCDGCLYQGKEFASGERFPSPTAACHLCLCWEGSVSCEPKACAPALCPFPARGDCCPDCDGCEYLGESYLSNQEFPDPREPCNLCTCLGGFVTCGRRPCEPPGCSHPLIPSGHCCPTCQGCRYHGVTTASGETLPDPLDPTCSLCTCQEGSMRCQKKPCPPALCPHPSPGPCFCPVCHSCLSQGREHQDGEEFEGPAGSCEWCRCQAGQVSCVRLQCPPLPCKLQVTERGSCCPRCRGCLAHGEEHPEGSRWVPPDSACSSCVCHEGVVTCARIQCISSCAQPRQGPHDCCPQCSDCEHEGRKYEPGESFQPGADPCEVCICEPQPEGPPSLRCHRRQCPSLVGCPPSQLLPPGPQHCCPTCAEALSNCSEGLLGSELAPPDPCYTCQCQDLTWLCIHQACPELSCPLSERHTPPGSCCPVCRAPTQSCVHQGREVASGERWTVDTCTSCSCMAGTVRCQSQRCSPLSCGPDKAPALSPGSCCPRCLPRPASCMAFGDPHYRTFDGRLLHFQGSCSYVLAKDCHSGDFSVHVTNDDRGRSGVAWTQEVAVLLGDMAVRLLQDGAVTVDGHPVALPFLQEPLLYVELRGHTVILHAQPGLQVLWDGQSQVEVSVPGSYQGRTCGLCGNFNGFAQDDLQGPEGLLLPSEAAFGNSWQVSEGLWPGRPCSAGREVDPCRAAGYRARREANARCGVLKSSPFSRCHAVVPPEPFFAACVYDLCACGPGSSADACLCDALEAYASHCRQAGVTPTWRGPTLCVVGCPLERGFVFDECGPPCPRTCFNQHIPLGELAAHCVRPCVPGCQCPAGLVEHEAHCIPPEACPQVLLTGDQPLGARPSPSREPQETP

SEQ ID NO: 7404 - protein, 1275 aa, Homo Sapiens
MAGVGAAALSLLLHLGALALAAGAEGGAVPREPPGQQTTAHSSVLAGNSQEQWHPLREWLGRLEAAVMELREQNKDLQTRVRQLESCECHPASPQCWGLGRAWPEGARWEPDACTACVCQDGAAHCGPQAHLPHCRGCSQNGQTYGNGETFSPDACTTCRCLTGAVQCQGPSCSELNCLESCTPPGECCPICRPGCDYEGQLYEEGVTFLSSSNPCLQCTCLRSRVRCMALKCPPSPCPEPVLRPGHCCPTCQGCTEGGSHWEHGQEWTTPGDPCRICRCLEGHIQCRQRECASLCPYPARPLPGTCCPVCDGCFLNGREHRSGEPVGSGDPCSHCRCANGSVQCEPLPCPPVPCRHPGKIPGQCCPVCDGCEYQGHQYQSQETFRLQERGLCVRCSCQAGEVSCEEQECPVTPCALPASGRQLCPACELDGEEFAEGVQWEPDGRPCTACVCQDGVPKCGAVLCPPAPCQHPTQPPGACCPSCDSCTYHSQVYANGQNFTDADSPCHACHCQDGTVTCSLVDCPPTTCARPQSGPGQCCPRCPDCILEEEVFVDGESFSHPRDPCQECRCQEGHAHCQPRPCPRAPCAHPLPGTCCPNDCSGCAFGGKEYPSGADFPHPSDPCRLCRCLSGNVQCLARRCVPLPCPEPVLLPGECCPQCPAAPAPAGCPRPGAAHARHQEYFSPPGDPCRRCLCLDGSVSCQRLPCPPAPCAHPRQGPCCPSCDGCLYQGKEFASGERFPSPTAACHLCLCWEGSVSCEPKACAPALCPFPARGDCCPDCDGCEYLGESYLSNQEFPDPREPCNLCTCLGGFVTCGRRPCEPPGCSHPLIPSGHCCPTCQGCRYHGVTTASGETLPDPLDPTCSLCTCQEGSMRCQKKPCPPALCPHPSPGPCFCPVCHSCLSQGREHQDGEEFEGPAGSCEWCRCQAGQVSCVRLQCPPLPCKLQVTERGSCCPRCRGCLAHGEEHPEGSRWVPPDSACSSCVCHEGVVTCARIQCISSCAQPRQGPHDCCPQCSDCEHEGRKYEPGESFQPGADPCEVCICEPQPEGPPSLRCHRRQCPSLVGCPPSQLLPPGPQHCCPTCAEALSNCSEGLLGSELAPPDPCYTCQCQDLTWLCIHQACPELSCPLSERHTPPGSCCPVCRAPTQSCVHQGREVASGERWTVDTCTSCSCMAGTVRCQSQRCSPLSCGPDKAPALSPGSCCPRCLPRPASCMAFGDPHYRTFDGRLLHFQGSCSYVLAKDCHSGDFRWMGTRWPCPSCRSRCCMWSCEDTL

SEQ ID NO: 7405 - protein, 502 aa, Homo Sapiens
MFGTLLLYCFFLATVPALAETGGERQLSPEKSEIWGPGLKADVVLPARYFYIQAVDTSGNKFTSSPGEKVFQVKVSAPEEQFTRVGVQVLDRKDGSFIVRYRMYASYKNLKVEIKFQGQHVAKSPYILKGPVYHENCDCPLQDSAAWLREMNCPETIAQIQRDLAHFPAVDPEKIAVEIPKRFGQRQSLCHYTLKDNKVYIKTHGEHVGFRIFMDAILLSLTRKVKMPDVELFVNLGDWPLEKKKSNSNIHPIFSWCGSTDSKDIVMPTYDLTDSVLETMGRVSLDMMSVQANTGPPWESKNSTAVWRGRDSRKERLELVKLSRKHPELIDAAFTNFFFFKHDENLYGPIVKHISFFDFFKHKYQINIDGTVAAYRLPYLLVGDSVVLKQDSIYYEHFYNELQPWKHYIPVKSNLSDLLEKLKWAKDHDEEAKKIAKAGQEFARNNLMGDDIFCYYFKLFQEYANLQVSEPQIREGMKRVEPQTEDDLFPCTCHRKKTKDEL

SEQ ID NO: 7406 - protein, 507 aa, Homo Sapiens
MRRLPRALLLQLRLALLVAAGAPEVLVSAPRSLVWGPGLQAAVVLPVRYFYLQAVNSEGQNLTRSPAGETPFKVVVKSLSPKELVRIHVPKPLDRNDGTFLMRYRMYETVDEGLKIEVLYGDEHVAQSPYILKGPVYHEYCECPEDPQAWQKTLSCPTKEPQIAKDFASFPSINLQQMLKEVPKRFGDERGAIVHYTILNNHVYRRSLGKYTDFKMFSDEILLSLTRKVLLPDLEFYVNLGDWPLEHRKVNGTPSPIPIISWCGSLDSRDVVLPTYDITHSMLEAMRGVTNDLLSIQGNTGPSWINKTERAFFRGRDSREERLQLVQLSKENPQLLDAGITGYFFFQEKEKELGKAKLMGFFDFFKYKYQVNVDGTVAAYRYPYLMLGDSLVLKQDSPYYEHFYMALEPWKHYVPIKRNLSDLLEKVKWAKENDEEAKKIAKEGQLMARDLLQPHRLYCYYYQVLQKYAERQSSKPEVRDGMELVPQPEDSTAICQCHRKKPSREEL

SEQ ID NO: 7407 - protein, 451 aa, Homo Sapiens
MVELFIFLFLLGETPFKVVVKSLSPKELVRIHVPKPLDRNDGTFLMRYRMYETVDEGLKIEVLYGDEHVAQSPYILKGPVYHEYCECPEDPQAWQKTLSCPTKEPQIAKDFASFPSINLQQMLKEVPKRFGDERGAIVHYTILNNHVYRRSLGKYTDFKMFSDEILLSLTRKVLLPDLEFYVNLGDWPLEHRKVNGTPSPIPIISWCGSLDSRDVVLPTYDITHSMLEAMRGVTNDLLSIQGNTGPSWINKTERAFFRGRDSREERLQLVQLSKENPQLLDAGITGYFFFQEKEKELGKAKLMGFFDFFKYKYQVNVDGTVAAYRYPYLMLGDSLVLKQDSPYYEHFYMALEPWKHYVPIKRNLSDLLEKVKWAKENDEEAKKIAKEGQLMARDLLQPHRLYCYYYQVLQKYAERQSSKPEVRDGMELVPQPEDSTAICQCHRKKPSREEL

SEQ ID NO: 7408 - protein, 409 aa, Homo Sapiens
MVELFIFLFLLGETPFKVVVKSLSPKELVRIHVPKPLDRNDGTFLMRYRMYETVDEGLKIEVLYGDEHVAQSPYILKGPVYHEYCECPEDPQAWQKTLSCPTKEPQIAKDFASFPSINLQQMLKEVPKRFGDERGAIVHYTILNNHVYRRSLGKYTDFKMFSDEILLSLTRKVLLPDLEFYVNLGDWPLEHRKVNGTPSPIPIISWCGSLDSRDVVLPTYDITHSMLEAMRGVTNDLLSIQGNTGPSWINKTERAFFRGRDSREERLQLVQLSKENPQLLDAGITGYFFFQEKEKELGKAKLMGFFDFFKYKYQVNVDGTVAAYRYPYLMLGDSLVLKQDSPYYEHFYMALEPWKHYVPIKRNLSDLLEKVKWAKSFTLSPRLECSGTISTHCNLCLPGSRNFVPQPPE

SEQ ID NO: 7409 - protein, 160 aa, Homo Sapiens
  misc_feature (1)..(1): Xaa can be any naturally occurring amino acid
XEAMRGVTNDLLSIQGNTGPSWINKTERAFFRGRDSREERLQLVQLSKENPQLLDAGITGYFFFQEKEKELGKAKLMGFFDFFKENDEEAKKIAKEGQLMARDLLQPHRLYCYYYQVLQKYAERQSSKPEVRDGMELVPQPEDSTAICQCHRKKPSREEL

SEQ ID NO: 7410 - protein, 302 aa, Homo Sapiens [sequence omitted]

SEQ ID NO: 7411 - protein, 876 aa, Homo Sapiens
MLSGKKAAAAAAAAAAAATGTEAGPGTAGGSENGSEVAAQPAGLSGPAEVGPGAVGERTPRKKEPPRASPPGGLAEPPGSAGPQAGPTVVPGSATPMETGIAETPEGRRTSRRKRAKVEYREMDESLANLSEDEYYSEEERNAKAEKEKKLPPPPPQAPPEEENESEPEEPSGQAGGLQDDSSGGYGDGQASGVEGAAFQSRLPHDRMTSQEAACFPDIISGPQQTQKVFLFIRNRTLQLWLDNPKIQLTFEATLQQLEAPYNSDTVLVHRVHSYLERHGLINFGIYKRIKPLPTKKTGKVIIIGSGVSGLAAARQLQSFGMDVTLLEARDRVGGRVATFRKGNYVADLGAMVVTGLGGNPMAVVSKQVNMELAKIKQKCPLYEANGQADTVKVPKEKDEMVEQEFNRLLEATSYLSHQLDFNVLNNKPVSLGQALEVVIQLQEKHVKDEQIEHWKKIVKTQEELKELLNKMVNLKEKIKELHQQYKEASEVKPPRDITAEFLVKSKHRDLTALCKEYDELAETQGKLEEKLQELEANPPSDVYLSSRDRQILDWHFANLEFANATPLSTLSLKHWDQDDDFEFTGSHLTVRNGYSCVPVALAEGLDIKLNTAVRQVRYTASGCEVIAVNTRSTSQTFIYKCDAVLCTLPLGVLKQQPPAVQFVPPLPEWKTSAVQRMGFGNLNKVVLCFDRVFWDPSVNLFGHVGSTTASRGELFLFWNLYKAPILLALVAGEAAGIMENISDDVIVGRCLAILKGIFGSSAVPQPKETVVSRWRADPWARGSYSYVAAGSSGNDYDLMAQPITPGPSIPGAPQPIPRLFFAGEHTIRNYPATVHGALLSGLREAGRIADQFLGAMYTLPRQATPGVPAQQSPSM

SEQ ID NO: 7412 - protein, 852 aa, Homo Sapiens
MLSGKKAAAAAAAAAAAATGTEAGPGTAGGSENGSEVAAQPAGLSGPAEVGPGAVGERTPRKKEPPRASPPGGLAEPPGSAGPQAGPTVVPGSATPMETGIAETPEGRRTSRRKRAKVEYREMDESLANLSEDEYYSEEERNAKAEKEKKLPPPPPQAPPEEENESEPEEPSGVEGAAFQSRLPHDRMTSQEAACFPDIISGPQQTQKVFLFIRNRTLQLWLDNPKIQLTFEATLQQLEAPYNSDTVLVHRVHSYLERHGLINFGIYKRIKPLPTKKTGKVIIIGSGVSGLAAARQLQSFGMDVTLLEARDRVGGRVATFRKGNYVADLGAMVVTGLGGNPMAVVSKQVNMELAKIKQKCPLYEANGQAVPKEKDEMVEQEFNRLLEATSYLSHQLDFNVLNNKPVSLGQALEVVIQLQEKHVKDEQIEHWKKIVKTQEELKELLNKMVNLKEKIKELHQQYKEASEVKPPRDITAEFLVKSKHRDLTALCKEYDELAETQGKLEEKLQELEANPPSDVYLSSRDRQILDWHFANLEFANATPLSTLSLKHWDQDDDFEFTGSHLTVRNGYSCVPVALAEGLDIKLNTAVRQVRYTASGCEVIAVNTRSTSQTFIYKCDAVLCTLPLGVLKQQPPAVQFVPPLPEWKTSAVQRMGFGNLNKVVLCFDRVFWDPSVNLFGHVGSTTASRGELFLFWNLYKAPILLALVAGEAAGIMENISDDVIVGRCLAILKGIFGSSAVPQPKETVVSRWRADPWARGSYSYVAAGSSGNDYDLMAQPITPGPSIPGAPQPIPRLFFAGEHTIRNYPATVHGALLSGLREAGRIADQFLGAMYTLPRQATPGVPAQQSPSM

SEQ ID NO: 7413 - protein, 858 aa, Homo Sapiens
MLSGKKAAAAAAAAAAAATGTEAGPGTAGGSENGSEVAAQPAGLSGPAEVGPGAVGERTPRKKEPPRASPPGGLAEPPGSAGPQAGPTVVPGSATPMETGIAETPEGRRTSRRKRAKVEYREMDESLANLSEDEYYSEEERNAKAEKEKKLPPPPPQAPPEEENESEPEEPSGVEGAAFQSRLPHDRMTSQEAACFPDIISGPQQTQKVFLFIRNRTLQLWLDNPKIQLTFEATLQQLEAPYNSDTVLVHRVHSYLERHGLINFGIYKRIKPLPTKKTGKVIIIGSGVSGLAAARQLQSFGMDVTLLEARDRVGGRVATFRKGNYVADLGAMVVTGLGGNPMAVVSKQVNMELAKIKQKCPLYEANGQAVPKEKDEMVEQEFNRLLEATSYLSHQLDFNVLNNKPVSLGQALEVVIQLQEKHVKDEQIEHWKKIVKTQEELKELLNKMVNLKEKIKELHQQYKEASEVKPPRDITAEFLVKSKHRDLTALCKEYDELAETQGKLEEKLQELEANPPSPLFFCSDVYLSSRDRQILDWHFANLEFANATPLSTLSLKHWDQDDDFEFTGSHLTVRNGYSCVPVALAEGLDIKLNTAVRQVRYTASGCEVIAVNTRSTSQTFIYKCDAVLCTLPLGVLKQQPPAVQFVPPLPEWKTSAVQRMGFGNLNKVVLCFDRVFWDPSVNLFGHVGSTTASRGELFLFWNLYKAPILLALVAGEAAGIMENISDDVIVGRCLAILKGIFGSSAVPQPKETVVSRWRADPWARGSYSYVAAGSSGNDYDLMAQPITPGPSIPGAPQPIPRLFFAGEHTIRNYPATVHGALLSGLREAGRIADQFLGAMYTLPRQATPGVPAQQSPSM

SEQ ID NO: 7414 - protein, 274 aa, Homo Sapiens
IFVEFDGCNWKQHSWVKVHAEEVIVLLLEGSLVWAPREDPVLLQGIRVSIAQWPALTFTPLVDKLGLGSVVPVEYLLDRELRFLSDANGLHLFQMGTDSQNQILLEHAALRETVNALISDQKLQEIFSRGPYSVQGHRVKIYQPEGEEGWLYGVVSHQDSITRLMEVSVTESGEIKSVDPRLIHVMLMDNSAPQSEGGTLKAVKSSKGKKKRESIEGKDGRRRKSASDSGCDPASKKLKGDRGEVDSNGSDGDKPQHSLCHLHQRKRQDSGGAG

SEQ ID NO: 7415 - protein, 1761 aa, Homo Sapiens
MADAAASPVGKRLLLLFADTAASASASAPAAAAASGDPGPALRTRAWRAGTVRAMSGAVPQDLAIFVEFDGCNWKQHSWVKVHAEEVIVLLLEGSLVWAPREDPVLLQGIRVSIAQWPALTFTPLVDKLGLGSVVPVEYLLDRELRFLSDANGLHLFQMGTDSQNQILLEHAALRETVNALISDQKLQEIFSRGPYSVQGHRVKIYQPEGEEGWLYGVVSHQDSITRLMEVSVTESGEIKSVDPRLIHVMLMDNSAPQSEGGTLKAVKSSKGKKKRESIEGKDGRRRKSASDSGCDPASKKLKGDRGEVDSNGSDGGEASRGPWKGGNASGEPGLDQRAKQPPSTFVPQINRNIRFATYTKENGRTLVVQDEPVGGDTPASFTPYSTATGQTPLAPEVGGAENKEAGKTLEQVGQGIVASAAVVTTASSTPNTVRISDTGLAAGTVPEKQKGSRSQASGENSRNSILASSGFGAPLPSSSQPLTFGSGRSQSNGVLATENKPLGFSFGCSSAQEAQKDTDLSKNLFFQCMSQTLPTSNYFTTVSESLADDSSSRDSFKQSLESLSSGLCKGRSVLGTDTKPGSKAGSSVDRKVPAESMPTLTPAFPRSLLNARTPENHENLFLQPPKLSREEPSNPFLAFVEKVEHSPFSSFASQASGSSSSATTVTSKVAPSWPESHSSADSASLAKKKPLFITTDSSKLVSGVLGSALTSGGPSLSAMGNGRSSSPTSSLTQPIEMPTLSSSPTEERPTVGPGQQDNPLLKTFSNVFGRHSGGFLSSPADFSQENKAPFEAVKRFSLDERSLACRQDSDSSTNSDLSDLSDSEEQLQAKTGLKGIPEHLMGKLGPNGERSAELLLGKSKGKQAPKGRPRTAPLKVGQSVLKDVSKVKKLKQSGEPFLQDGSCINVAPHLHKCRECRLERYRKFKEQEQDDSTVACRFFHFRRLIFTRKGVLRVEGFLSPQQSDPDAMNLWIPSSSLAEGIDLETSKYILANVGDQFCQLVMSEKEAMMMVEPHQKVAWKRAVRGVREMCDVCETTLFNIHWVCRKCGFGVCLDCYRLRKSRPRSETEEMGDEEVFSWLKCAKGQSHEPENLMPTQIIPGTALYNIGDMVHAARGKWGIKANCPCISRQNKSVLRPAVTNGMSQLPSINPSASSGNETTFSGGGGPAPVTTPEPDHVPKADSTDIRSEEPLKTDSSASNSNSELKAIRPPCPDTAPPSSALHWLADLATQKAKEETKEAGSLRSVLNKESHSPFGLDSFNSTAKVSPLTPKLFNSLLLGPTASNNKTEGSSLRDLLHSGPGKLPQTPLDTGIPFPPVFSTSSAGVKSKASLPNFLDHIIASVVENKKTSDASKRACNLTDTQKEVKEMVMGLNVLDPHTSHSWLCDGRLLCLHDPSNKNNWKIFRECWKQGQPVLVSGVHKKLKSELWKPEAFSQEFGDQDVDLVNCRNCAIISDVKVRDFWDGFEIICKRLRSEDGQPMVLKLKDWPPGEDFRDMMPTRFEDLMENLPLPEYTKRDGRLNLASRLPSYFVRPDLGPKMYNAYGLITAEDRRVGTTNLHLDVSDAVNVMVYVGIPIGEGAHDEEVLKTIDEGDADEVTKQRIHDGKEKPGALWHIYAAKDAEKIRELLRKVGEEQGQENPPDHDPIHDQSWYLDQTLRKRLYEEYGVQGWAIVQFLGDAVFIPAGAPHQVHNLYSCIKVAEDFVSPEHVKHCFRLTQEFRHLSNTHTNHEDKLQVKNIIYHAVKDAVGTLKAHESKLARS

SEQ ID NO: 7416 - protein, 759 aa, Homo Sapiens
MSEKEAMMMVEPHQKVAWKRAVRGVREMCDVCETTLFNIHWVCRKCGFGVCLDCYRLRKSRPRSETEEMGDEEVFSWLKCAKGQSHEPENLMPTQIIPGTALYNIGDMVHAARGKWGIKANCPCISRQNKSVLRPAVTNGMSQLPSINPSASSGNETTFSGGGGPAPVTTPEPDHVPKADSTDIRSEEPLKTDSSASNSNSELKAIRPPCPDTAPPSSALHWLADLATQKAKEETKEAGSLRSVLNKESHSPFGLDSFNSTAKVSPLTPKLFNSLLLGPTASNNKTEGSSLRDLLHSGPGKLPQTPLDTGIPFPPVFSTSSAGVKSKASLPNFLDHIIASVVENKKTSDASKRACNLTDTQKEVKEMVMGLNVLDPHTSHSWLCDGRLLCLHDPSNKNNWKIFRECWKQGQPVLVSGVHKKLKSELWKPEAFSQEFGDQDVDLVNCRNCAIISDVKVRDFWDGFEIICKRLRSEDGQPMVLKLKDWPPGEDFRDMMPTRFEDLMENLPLPEYTKRDGRLNLASRLPSYFVRPDLGPKMYNAYGLITAEDRRVGTTNLHLDVSDAVNVMVYVGIPIGEGAHDEEVLKTIDEGDADEVTKQRIHDGKEKPGALWHIYAAKDAEKIRELLRKVGEEQGQENPPDHDPIHDQSWYLDQTLRKRLYEEYGVQGWAIVQFLGDAVFIPAGAPHQVHNLYSCIKVAEDFVSPEHVKHCFRLTQEFRHLSNTHTNHEDKLQVKNIIYHAVKDAVGTLKAHESKLARS

SEQ ID NO: 7417 - protein, 20 aa, Homo Sapiens
VPEKQKGSRSQASGELASQC

SEQ ID NO: 7418 - protein, 1384 aa, Homo Sapiens
MAAGKASGESEEASPSLTAEEREALGGLDSRLFGFVRFHEDGARTKALLGKAVRCYESLILKAEGKVESDFFCQLGHFNLLLEDYPKALSAYQRYYSLQSDYWKNAAFLYGLGLVYFHYNAFQWAIKAFQEVLYVDPSFCRAKEIHLRLGLMFKVNTDYESSLKHFQLALVDCNPCTLSNAEIQFHIAHLYETQRKYHSAKEAYEQLLQTENLSAQVKATVLQQLGWMHHTVDLLGDKATKESYAIQYLQKSLEADPNSGQSWYFLGRCYSSIGKVQDAFISYRQSIDKSEASADTWCSIGVLYQQQNQPMDALQAYICAVQLDHGHAAAWMDLGTLYESCNQPQDAIKCYLNATRSKSCSNTSALAARIKYLQACKPHHPNTEPVLGLSQTPISQQSLPLHMIPSSQVDDLSSPAKRKRTSSPTKNTSDNWSGGHAVSHPPVQQQAHSWCLTPQKLQHLEQLRANRNNLNPAQKLMLEQLESQFVLMQQHQMRPTGVAQVRSTGIPNGPTADSSLPTNSVSGQQPQLALTRVPSVSQPGVRPACPGQPLANGPFSAGHVPCSTSRTLGSTDTILIGNNHITGSGSNGNVPYLQRNALTLPHNRTNLTSSAEEPWKNQLSNSTQGLHKGQSSHSAGPNGERPLSSTGPSQHLQAAGSGIQNQNGHPTLPSNSVTQGAALNHLSSHTATSGGQQGITLTKESKPSGNILTVPETSRHTGETPNSTASVEGLPNHVHQMTADAVCSPSHGDSKSPGLLSSDNPQLSALLMGKANNNVGTGTCDKVNNIHPAVHTKTDNSVASSPSSAISTATPSPKSTEQTTTNSVTSLNSPHSGLHTINGEGMEESQSPMKTDLLLVNHKPSPQIIPSMSVSIYPSSAEVLKACRNLGKNGLSNSSILLDKCPPPRPPSSPYPPLPKDKLNPPTPSIYLENKRDAFFPPLHQFCTNPNNPVTVIRGLAGALKLDLGLFSTKTLVEANNEHMVEVRTQLLQPADENWDPTGTKKIWHCESNRSHTTIAKYAQYQASSFQESLREENEKRSHHKDHSDSESTSSDNSGRRRKGPFKTIKFGTNIDLSDDKKWKLQLHELTKLPAFVRVVSAGNLLSHVGHTILGMNTVQLYMKVPGSRTPGHQENNNFCSVNINIGPGDCEWFVVPEGYWGVLNDFCEKNNLNFLMGSWWPNLEDLYEANVPVYRFIQRPGDLVWINAGTVHWVQAIGWCNNIAWNVGPLTACQYKLAVERYEWNKLQSVKSIVPMVHLSWNMARNIKVSDPKLFEMIKYCLLRTLKQCQTLREALIAAGKEIIWHGRTKEEPAHYCSICEVEVFDLLFVTNESNSRKTYIVHCQDCARKTSGNLENFVVLEQYKMEDLMQVYDQFTLAPPLPSASS

SEQ ID NO: 7419 - protein, 1269 aa, Homo Sapiens
MAAGKASGESEEASPSLTAEEREALGGLDSRLFGFVRFHEDGARTKALLGKAVRCYESLILKAEGKVESDFFCQLGHFNLLLEDYPKALSAYQRYYSLQSDYWKNAAFLYGLGLVYFHYNAFQWAIKAFQEVLYVDPSFCRAKEIHLRLGLMFKVNTDYESSLKHFQLALVDCNPCTLSNAEIQFHIAHLYETQRKYHSAKEAYEQLLQTENLSAQVKATVLQQLGWMHHTVDLLGDKATKESYAIQYLQKSLEADPNSGQSWYFLGRCYSSIGKVQDAFISYRQSIDKSEASADTWCSIGVLYQQQNQPMDALQAYICAVQLDHGHAAAWMDLGTLYESCNQPQDAIKCYLNATRSKSCSNTSALAARIKYLQACKPHHPNTEPVLGLSQTPISQQSLPLHMIPSSQVDDLSSPAKRKRTSSPTKNTSDNWSGGHAVSHPPVQQQAHSWCLTPQKLQMRPTGVAQVRSTGIPNGPTADSSLPTNSVSGQQPQLALTRVPSVSQPGVRPACPGQPLANGPFSAGHVPCSTSRTLGSTDTILIGNNHITGSGSNGNVPYLQRNALTLPHNRTNLTSSAEEPWKNQLSNSTQGLHKGQSSHSAGPNGERPLSSTGPSQHLQAAGSGIQNQNGHPTLPSNSVTQGAALNHLSSHTATSGGQQGITLTKESKPSGNILTVPETSRHTGETPNSTASVEGLPNHVHQMTADAVCSPSHGDSKSPGLLSSDNPQLSALLMGKANNNVGTGTCDKVNNIHPAVHTKTDNSVASSPSSAISTATPSPKSTEQTTTNSVTSLNSPHSGLHTINGEGMEESQSPMKTDLLLVNHKPSPQIIPSMSVSIYPSSAEVLKACRNLGKNGLSNSSILLDKCPPPRPPSSPYPPLPKDKLNPPTPSIYLENKRDAFFPPLHQFCTNPNNPVTVIRGLAGALKLDLGLFSTKTLVEANNEHMVEVRTQLLQPADENWDPTGTKKIWHCESNRSHTTIAKYAQYQASSFQESLREENEKRSHHKDHSDSESTSSDNSGRRRKGPFKTIKFGTNIDLSDDKKWKLQLHELTKLPAFVRVVSAGNLLSHVGHTILGMNTVQLYMKVPGSRTPGHQENNNFCSVNINIGPGDCEWFVVPEGYWGVLNDFCEKNNLNFLMGSWWPNLEDLYEANVPVYRFIQRPGDLVWINAGTVHWVQAIGWCNNIAWNVGPLTACQYKLAVERYEWNKLQSVKSIVPMVHLSWNMARNIKVLSSKNSEAMSDIEGSSHCCRKRDYMAWADKRRTSSLL

SEQ ID NO: 7420 - protein, 1332 aa, Homo Sapiens
MAAGKASGESEEASPSLTAEEREALGGLDSRLFGFVRFHEDGARTKALLGKAVRCYESLILKAEGKVESDFFCQLGHFNLLLEDYPKALSAYQRYYSLQSDYWKNAAFLYGLGLVYFHYNAFQWAIKAFQEVLYVDPSFCRAKEIHLRLGLMFKVNTDYESSLKHFQLALVDCNPCTLSNAEIQFHIAHLYETQRKYHSAKEAYEQLLQTENLSAQVKATVLQQLGWMHHTVDLLGDKATKESYAIQYLQKSLEADPNSGQSWYFLGRCYSSIGKVQDAFISYRQSIDKSEASADTWCSIGVLYQQQNQPMDALQAYICAVQLDHGHAAAWMDLGTLYESCNQPQDAIKCYLNATRSKSCSNTSALAARIKYLQNTSDNWSGGHAVSHPPVQQQAHSWCLTPQKLQHLEQLRANRNNLNPAQKLMLEQLESQFVLMQQHQMRPTGVAQVRSTGIPNGPTADSSLPTNSVSGQQPQLALTRVPSVSQPGVRPACPGQPLANGPFSAGHVPCSTSRTLGSTDTILIGNNHITGSGSNGNVPYLQRNALTLPHNRTNLTSSAEEPWKNQLSNSTQGLHKGQSSHSAGPNGERPLSSTGPSQHLQAAGSGIQNQNGHPTLPSNSVTQGAALNHLSSHTATSGGQQGITLTKESKPSGNILTVPETSRHTGETPNSTASVEGLPNHVHQMTADAVCSPSHGDSKSPGLLSSDNPQLSALLMGKANNNVGTGTCDKVNNIHPAVHTKTDNSVASSPSSAISTATPSPKSTEQTTTNSVTSLNSPHSGLHTINGEGMEESQSPMKTDLLLVNHKPSPQIIPSMSVSIYPSSAEVLKACRNLGKNGLSNSSILLDKCPPPRPPSSPYPPLPKDKLNPPTPSIYLENKRDAFFPPLHQFCTNPNNPVTVIRGLAGALKLDLGLFSTKTLVEANNEHMVEVRTQLLQPADENWDPTGTKKIWHCESNRSHTTIAKYAQYQASSFQESLREENEKRSHHKDHSDSESTSSDNSGRRRKGPFKTIKFGTNIDLSDDKKWKLQLHELTKLPAFVRVVSAGNLLSHVGHTILGMNTVQLYMKVPGSRTPGHQENNNFCSVNINIGPGDCEWFVVPEGYWGVLNDFCEKNNLNFLMGSWWPNLEDLYEANVPVYRFIQRPGDLVWINAGTVHWVQAIGWCNNIAWNVGPLTACQYKLAVERYEWNKLQSVKSIVPMVHLSWNMARNIKVSDPKLFEMIKYCLLRTLKQCQTLREALIAAGKEIIWHGRTKEEPAHYCSICEVEVFDLLFVTNESNSRKTYIVHCQDCARKTSGNLENFVVLEQYKMEDLMQVYDQFTLAPPLPSASS

SEQ ID NO: 7421 - protein, 1429 aa, Homo Sapiens
MAAGKASGESEEASPSLTAEEREALGGLDSRLFGFVRFHEDGARTKALLGKAVRCYESLILKAEGKVESDFFCQLGHFNLLLEDYPKALSAYQRYYSLQSDYWKNAAFLYGLGLVYFHYNAFQWAIKAFQEVLYVDPSFCRAKEIHLRLGLMFKVNTDYESSLKHFQLALVDCNPCTLSNAEIQFHIAHLYETQRKYHSAKEAYEQLLQTENLSAQVKATVLQQLGWMHHTVDLLGDKATKESYAIQYLQKSLEADPNSGQSWYFLGRCYSSIGKVQDAFISYRQSIDKSEASADTWCSIGVLYQQQNQPMDALQAYICAVQLDHGHAAAWMDLGTLYESCNQPQDAIKCYLNATRSKSCSNTSALAARIKYLQAQLCNLPQGSLQNKTKLLPSIEEAWSLPIPAELTSRQGAMNTAQQACKPHHPNTEPVLGLSQTPISQQSLPLHMIPSSQVDDLSSPAKRKRTSSPTKNTSDNWSGGHAVSHPPVQQQAHSWCLTPQKLQHLEQLRANRNNLNPAQKLMLEQLESQFVLMQQHQMRPTGVAQVRSTGIPNGPTADSSLPTNSVSGQQPQLALTRVPSVSQPGVRPACPGQPLANGPFSAGHVPCSTSRTLGSTDTILIGNNHITGSGSNGNVPYLQRNALTLPHNRTNLTSSAEEPWKNQLSNSTQGLHKGQSSHSAGPNGERPLSSTGPSQHLQAAGSGIQNQNGHPTLPSNSVTQGAALNHLSSHTATSGGQQGITLTKESKPSGNILTVPETSRHTGETPNSTASVEGLPNHVHQMTADAVCSPSHGDSKSPGLLSSDNPQLSALLMGKANNNVGTGTCDKVNNIHPAVHTKTDNSVASSPSSAISTATPSPKSTEQTTTNSVTSLNSPHSGLHTINGEGMEESQSPMKTDLLLVNHKPSPQIIPSMSVSIYPSSAEVLKACRNLGKNGLSNSSILLDKCPPPRPPSSPYPPLPKDKLNPPTPSIYLENKRDAFFPPLHQFCTNPNNPVTVIRGLAGALKLDLGLFSTKTLVEANNEHMVEVRTQLLQPADENWDPTGTKKIWHCESNRSHTTIAKYAQYQASSFQESLREENEKRSHHKDHSDSESTSSDNSGRRRKGPFKTIKFGTNIDLSDDKKWKLQLHELTKLPAFVRVVSAGNLLSHVGHTILGMNTVQLYMKVPGSRTPGHQENNNFCSVNINIGPGDCEWFVVPEGYWGVLNDFCEKNNLNFLMGSWWPNLEDLYEANVPVYRFIQRPGDLVWINAGTVHWVQAIGWCNNIAWNVGPLTACQYKLAVERYEWNKLQSVKSIVPMVHLSWNMARNIKVSDPKLFEMIKYCLLRTLKQCQTLREALIAAGKEIIWHGRTKEEPAHYCSICEVEVFDLLFVTNESNSRKTYIVHCQDCARKTSGNLENFVVLEQYKMEDLMQVYDQFTLAPPLPSASS

SEQ ID NO: 7422 - protein, 1401 aa, Homo Sapiens
MKSCGVSLATAAAAAAAFGDEEKKMAAGKASGESEEASPSLTAEEREALGGLDSRLFGFVRFHEDGARTKALLGKAVRCYESLILKAEGKVESDFFCQLGHFNLLLEDYPKALSAYQRYYSLQSDYWKNAAFLYGLGLVYFHYNAFQWAIKAFQEVLYVDPSFCRAKEIHLRLGLMFKVNTDYESSLKHFQLALVDCNPCTLSNAEIQFHIAHLYETQRKYHSAKEAYEQLLQTENLSAQVKATVLQQLGWMHHTVDLLGDKATKESYAIQYLQKSLEADPNSGQSWYFLGRCYSSIGKVQDAFISYRQSIDKSEASADTWCSIGVLYQQQNQPMDALQAYICAVQLDHGHAAAWMDLGTLYESCNQPQDAIKCYLNATRSKSCSNTSALAARIKYLQAQLCNLPQGSLQNKTKLLPSIEEAWSLPIPAELTSRQGAMNTAQQNTSDNWSGGHAVSHPPVQQQAHSWCLTPQKLQHLEQLRANRNNLNPAQKLMLEQLESQFVLMQQHQMRPTGVAQVRSTGIPNGPTADSSLPTNSVSGQQPQLALTRVPSVSQPGVRPACPGQPLANGPFSAGHVPCSTSRTLGSTDTILIGNNHITGSGSNGNVPYLQRNALTLPHNRTNLTSSAEEPWKNQLSNSTQGLHKGQSSHSAGPNGERPLSSTGPSQHLQAAGSGIQNQNGHPTLPSNSVTQGAALNHLSSHTATSGGQQGITLTKESKPSGNILTVPETSRHTGETPNSTASVEGLPNHVHQMTADAVCSPSHGDSKSPGLLSSDNPQLSALLMGKANNNVGTGTCDKVNNIHPAVHTKTDNSVASSPSSAISTATPSPKSTEQTTTNSVTSLNSPHSGLHTINGEGMEESQSPMKTDLLLVNHKPSPQIIPSMSVSIYPSSAEVLKACRNLGKNGLSNSSILLDKCPPPRPPSSPYPPLPKDKLNPPTPSIYLENKRDAFFPPLHQFCTNPNNPVTVIRGLAGALKLDLGLFSTKTLVEANNEHMVEVRTQLLQPADENWDPTGTKKIWHCESNRSHTTIAKYAQYQASSFQESLREENEKRSHHKDHSDSESTSSDNSGRRRKGPFKTIKFGTNIDLSDDKKWKLQLHELTKLPAFVRVVSAGNLLSHVGHTILGMNTVQLYMKVPGSRTPGHQENNNFCSVNINIGPGDCEWFVVPEGYWGVLNDFCEKNNLNFLMGSWWPNLEDLYEANVPVYRFIQRPGDLVWINAGTVHWVQAIGWCNNIAWNVGPLTACQYKLAVERYEWNKLQSVKSIVPMVHLSWNMARNIKVSDPKLFEMIKYCLLRTLKQCQTLREALIAAGKEIIWHGRTKEEPAHYCSICEVEVFDLLFVTNESNSRKTYIVHCQDCARKTSGNLENFVVLEQYKMEDLMQVYDQFTLAPPLPSASS

SEQ ID NO: 7423 - protein, 224 aa, Homo Sapiens
MKSCGVSLATAAAAAAAFGDEEKKMAAGKASGESEEASPSLTAEEREALGGLDSRLFGFVRFHEDGARTKALLGKAVRCYESLILKAEGKVESDFFCQLGHFNLLLEDYPKALSAYQRYYSLQSDYWKNAAFLYGLGLVYFHYNAFQWAIKAFQEVLYVDPSFCRAKEIHLRLGLMFKVNTDYESSLKHFQLALVDCNPCTLSNAEIQFHIAHLYETQVGCITL

SEQ ID NO: 7424 - protein, 161 aa, Homo Sapiens
  misc_feature (1)..(1): Xaa can be any naturally occurring amino acid
XARNIKVSDPKLFEMIKIFSLSPNFRAEKCLRDHLVQPLRSNGEPEPLRFTGEYCLLRTLKQCQTLREALIAAGKEIIWHGRTKEEPAHYCSICEVEVFDLLFVTNESNSRKTYIVHCQDCARKTSGNLENFVVLEQYKMEDLMQVYDQFTLAPPLPSASS

SEQ ID NO: 7425 - protein, 999 aa, Homo Sapiens
  misc_feature (1)..(1): Xaa can be any naturally occurring amino acid
XGTLYESCNQPQDAIKCYLNATRSKSCSNTSALAARIKYLQNTSDNWSGGHAVSHPPVQQQAHSWCLTPQKLQHLEQLRANRNNLNPAQKLMLEQLESQFVLMQQHQMRPTGVAQVRSTGIPNGPTADSSLPTNSVSGQQPQLALTRVPSVSQPGVRPACPGQPLANGPFSAGHVPCSTSRTLGSTDTILIGNNHITGSGSNGNVPYLQRNALTLPHNRTNLTSSAEEPWKNQLSNSTQGLHKGQSSHSAGPNGERPLSSTGPSQHLQAAGSGIQNQNGHPTLPSNSVTQGAALNHLSSHTATSGGQQGITLTKESKPSGNILTVPETSRHTGETPNSTASVEGLPNHVHQMTADAVCSPSHGDSKSPGLLSSDNPQLSALLMGKANNNVGTGTCDKVNNIHPAVHTKTDNSVASSPSSAISTATPSPKSTEQTTTNSVTSLNSPHSGLHTINGEGMEESQSPMKTDLLLVNHKPSPQIIPSMSVSIYPSSAEVLKACRNLGKNGLSNSSILLDKCPPPRPPSSPYPPLPKDKLNPPTPSIYLENKRDAFFPPLHQFCTNPNNPVTVIRGLAGALKLDLGLFSTKTLVEANNEHMVEVRTQLLQPADENWDPTGTKKIWHCESNRSHTTIAKYAQYQASSFQESLREENEKRSHHKDHSDSESTSSDNSGRRRKGPFKTIKFGTNIDLSDDKKWKLQLHELTKLPAFVRVVSAGNLLSHVGHTILGMNTVQLYMKVPGSRTPGHQENNNFCSVNINIGPGDCEWFVVPEGYWGVLNDFCEKNNLNFLMGSWWPNLEDLYEANVPVYRFIQRPGDLVWINAGTVHWVQAIGWCNNIAWNVGPLTACQYKLAVERYEWNKLQSVKSIVPMVHLSWNMARNIKVSDPKLFEMIKYCLLRTLKQCQTLREALIAAGKEIIWHGRTKEEPAHYCSICEVEVFDLLFVTNESNSRKTYIVHCQDCARKTSGNLENFVVLEQYKMEDLMQVYDQFTLAPPLPSASS

SEQ ID NO: 7426 - protein, 224 aa, Homo Sapiens
  misc_feature (1)..(1): Xaa can be any naturally occurring amino acid
XLQAYICAVQLDHGHAAAWMDLGTLYESCNQPQDAIKCYLNATRSKSCSNTSALAARIKYLQAQLCNLPQGSLQNKTKLLPSIEEAWSLPIPAELTSRQGAMNTAQQNTSDNWSGGHAVSHPPVQQQAHSWCLTPQKLQMRPTGVAQVRSTGIPNGPTADSSLPTNSVSGQQPQLALTRVPSVSQPGVRPACPGQPLANGPFSAGHVPCSTSRTLGSTDTILIG

SEQ ID NO: 7427 - protein, 1044 aa, Homo Sapiens
  misc_feature (1)..(1): Xaa can be any naturally occurring amino acid
XNKTKLLPSIEEAWSLPIPAELTSRQGAMNTAQQACKPHHPNTEPVLGLSQTPISQQSLPLHMIPSSQVDDLSSPAKRKRTSSPTKNTSDNWSGGHAVSHPPVQQQAHSWCLTPQKLQHLEQLRANRNNLNPAQKLMLEQLESQFVLMQQHQMRPTGVAQVRSTGIPNGPTADSSLPTNSVSGQQPQLALTRVPSVSQPGVRPACPGQPLANGPFSAGHVPCSTSRTLGSTDTILIGNNHITGSGSNGNVPYLQRNALTLPHNRTNLTSSAEEPWKNQLSNSTQGLHKGQSSHSAGPNGERPLSSTGPSQHLQAAGSGIQNQNGHPTLPSNSVTQGAALNHLSSHTATSGGQQGITLTKESKPSGNILTVPETSRHTGETPNSTASVEGLPNHVHQMTADAVCSPSHGDSKSPGLLSSDNPQLSALLMGKANNNVGTGTCDKVNNIHPAVHTKTDNSVASSPSSAISTATPSPKSTEQTTTNSVTSLNSPHSGLHTINGEGMEESQSPMKTDLLLVNHKPSPQIIPSMSVSIYPSSAEVLKACRNLGKNGLSNSSILLDKCPPPRPPSSPYPPLPKDKLNPPTPSIYLENKRDAFFPPLHQFCTNPNNPVTVIRGLAGALKLDLGLFSTKTLVEANNEHMVEVRTQLLQPADENWDPTGTKKIWHCESNRSHTTIAKYAQYQASSFQESLREENEKRSHHKDHSDSESTSSDNSGRRRKGPFKTIKFGTNIDLSDDKKWKLQLHELTKLPAFVRVVSAGNLLSHVGHTILGMNTVQLYMKVPGSRTPGHQENNNFCSVNINIGPGDCEWFVVPEGYWGVLNDFCEKNNLNFLMGSWWPNLEDLYEANVPVYRFIQRPGDLVWINAGTVHWVQAIGWCNNIAWNVGPLTACQYKLAVERYEWNKLQSVKSIVPMVHLSWNMARNIKVSDPKLFEMIKYCLLRTLKQCQTLREALIAAGKEIIWHGRTKEEPAHYCSICEVEVFDLLFVTNESNSRKTYIVHCQDCARKTSGNLENFVVLEQYKMEDLMQVYDQFTLAPPLPSASS

SEQ ID NO: 7428 - protein, 941 aa, Homo Sapiens
MAGAAAAVAAGAAAGAAAAAVSVAAPGRASAPPPPPPVYCVCRQPYDVNRFMIECDICKDWFHGSCVGVEEHHAVDIDLYHCPNCAVLHGSSLMKKRRNWHRHDYTEIDDGSKPVQAGTRTFIKELRSRVFPSADEIIIKMHGSQLTQRYLEKHGFDVPIMVPKLDDLGLRLPSPTFSVMDVERYVGGDKVIDVIDVARQADSKMTLHNYVKYFMNPNRPKVLNVISLEFSDTKMSELVEVPDIAKKLSWVENYWPDDSVFPKPFVQKYCLMGVQDSYTDFHIDFGGTSVWYHVLWGEKIFYLIKPTDENLARYESWSSSVTQSEVFFGDKVDKCYKCVVKQGHTLFVPTGWIHAVLTSQDCMAFGGNFLHNLNIGMQLRCYEMEKRLKTPDLFKFPFFEAICWFVAKNLLETLKELREDGFQPQTYLVQGVKALHTALKLWMKKELVSEHAFEIPDNVRPGHLIKELSKVIRAIEEENGKPVKSQGIPIVCPVSRSSNEATSPYHSRRKMRKLRDHNVRTPSNLDILELHTREVLKRLEMCPWEEDILSSKLNGKFNKHLQPSSTVPEWRAKDNDLRLLLTNGRIIKDERQPFADQSLYTADSENEEDKRRTKKAKMKIEESSGVEGVEHEESQKPLNGFFTRVKSELRSRSSGYSDISESEDSGPECTALKSIFTTEESESSGDEKKQEITSNFKEESNVMRNFLQKSQKPSRSEIPIKRECPTSTSTEEEAIQGMLSMAGLHYSTCLQRQIQSTDCSGERNSLQDPSSCHGSNHEVRQLYRYDKPVECGYHVKTEDPDLRTSSWIKQFDTSRFHPQDLSRSQKCIRKEGSSEISQRVQSRNYVDSSGSSLQNGKYMQNSNLTSGACQISNGSLSPERPVGETSFSVPLHPTKRPASNPPPISNQATKGKRPKKGMATAKQRLGKILKLNRNGHARFFV

SEQ ID NO: 7429 - protein, 404 aa, Homo Sapiens
  misc_feature (1)..(1): Xaa can be any naturally occurring amino acid
XAKNLLETLKELREDGFQPQTYLVQGVKALHTALKLWMKKELVSEHAFEIPDNVRPGHLIKELSKVIRAIEEENGKPVKSQGIPIVCPVSRSSNEATSPYHSRRKMRKLRDHNVRTPSNLDILELHTREVLKRLEMCPWEEDILSSKLNGKFNKHLQPSSTVPEWRAKDNDLRLLLTNGRIIKDERQPFADQSLYTADSENEEDKRRTKKAKMKIEESSGVEGVEHEESQKPLNGFFTRVKSELRSRSSGYSDISESEDSGPECTALKSIFTTEESESSGDEKKQEITSNFKEESNVMRNFLQKSQKPSRSEIPIKRECPTSTSTEEEAIQGMLSMAGLHYSTCLQRQIQSTDCSGERNSLQDPSSCHGSNHEVRQLYRYDKPVECETRSHLCCPDWSPTPELK

SEQ ID NO: 7430 - protein, 39 aa, Homo Sapiens
MLLLAAAFLVAFVLLLYMVSPLISPKPLALPGAHVVFFR

SEQ ID NO: 7431 - protein, 155 aa, Homo Sapiens
MLLLAAAFLVAFVLLLYMVSPLISPKPLALPGAHVVVTGGSSGIGKCIAIECYKQGAFITLVARNEDKLLQAKKEIEMHSINDKQVVLCISVDVSQDYNQVENVIKQAQEKLGPVDMLVNCAGMAVSGKFEDLERLMSINYLGSVYPSRAVITTM

SEQ ID NO: 7432 - protein, 332 aa, Homo Sapiens
MLLLAAAFLVAFVLLLYMVSPLISPKPLALPGAHVVVTGGSSGIGKCIAIECYKQGAFITLVARNEDKLLQAKKEIEMHSINDKQVVLCISVDVSQDYNQVENVIKQAQEKLGPVDMLVNCAGMAVSGKFEDLEVSTFERLMSINYLGSVYPSRAVITTMKERRVGRIVFVSSQAGQLGLFGFTAYSASKFAIRGLAEALQMEVKPYNVYITVAYPPDTDTPGFAEENRTKPLETRLISETTSVCKPEQVAKQIVKDAIQGNFNSSLGSDGYMLSALTCGMAPVTSITEGLQQVVTMGLFRTIALFYLGSFDSIVRRCMMQREKSENADKTA

SEQ ID NO: 7433 - protein, 332 aa, Homo Sapiens; identical to SEQ ID NO: 7432

SEQ ID NO: 7434 - protein, 298 aa, Homo Sapiens
MLLLAAAFLVAFVLLLYMVSPLISPKPLALPGAHVVVTGGSSGIGKCIAIECYKQGAFITLVARNEDKLLQAKKEIEMHSINDKQVVLCISVDVSQDYNQVENVIKQAQEKLGPVDMLVNCAGMAVSGKFEDLEVSTFERLMSINYLGSVYPSRAVITTMKERRVGRIVFVSSQAGQLGLFGFTAYSASKFAIRGLAEALQMEVKPYNVYITVAYPPDTDTPGFAEENRTKPLETRLISETTSVCKPEQVAKQIVKDAIVVTMGLFRTIALFYLGSFDSIVRRCMMQREKSENADKTA

SEQ ID NO: 7435 - protein, 268 aa, Homo Sapiens
MLLLAAAFLVAFVLLLYMVSPLISPKPLALPGAHVVVTGGSSGIGKCIAIECYKQGAFITLVARNEDKLLQAKKEIEMHSINDKQVVLCISVDVSQDYNQVENVIKQAQEKLGPVDMLVNCAGMAVSGKFEDLEVSTFEVKPYNVYITVAYPPDTDTPGFAEENRTKPLETRLISETTSVCKPEQVAKQIVKDAIQGNFNSSLGSDGYMLSALTCGMAPVTSITEGLQQVVTMGLFRTIALFYLGSFDSIVRRCMMQREKSENADKTA

SEQ ID NO: 7436 - protein, 39 aa, Homo Sapiens
MLLLAAAFLVAFVLLLYMVSPLISPKPLALPGAHVVWEG

SEQ ID NO: 7437 - protein, 352 aa, Homo Sapiens
MAGTICFIMWVLFITDTVWSRSVRQVYEVHDSDDWTIHDFECPMECFCPPSFPTALYCENRGLKEIPAIPSRIWYLYLQNNLIETIPEKPFENATQLRWINLNKNKITNYGIEKGALSQLKKLLFLFLEDNELEEVPSPLPRSLEQLQLARNKVSRIPQGTFSNLENLTLLDLQNNKLVDNAFQRDTFKGLKNLMQLNMAKNALRNMPPRLPANTMQLFLDNNSIEGIPENYFNVIPKVAFLRLNHNKLSDEGLPSRGFDVSSILDLQLSHNQLTKVPRISAHLQHLHLDHNKIKSVNVSVICPSPSMLPAERDSFSYGPHLRYLRLDGNEIKPPIPMALMTCFRLLQAVII

SEQ ID NO: 7438 - protein, 287 aa, Homo Sapiens
DPSPPLPWWDKSRLLFHGDWHMDIEQANLHQLATEFVFKGDLDINVRTASKYDDCCFLHLPDLCMTLDLQWLCHGNPHDHHSVTLRAPEFLPEVPLGQLHDSYRAFRSENLNLSIKMDLTRHSGTISQPRILLYSSTLRWMQNFWATWTSVTRPICRGKLFNNLKPSKKKLGQHYKQLSYTALFPQLQVHYWASFAQQRGIQIECSQGHVFTRGTQRLIPQAGTVMRRLISDWSVTQMVSDLSQVTVHLMASPTEENADHCLDPLVTKTHLLSLSSLTYQRHSNRTA

SEQ ID NO: 7439 - protein, 2235 aa, Homo Sapiens
MPLFFSALLVLLLVALSALFLGRWLVVRLATKWCQRKLQAELKIGSFRFFWIQNVSLKFQQHQQTVEIDNLWISSKLLSHDLPHYVALCFGEVRIRTDLQKVSDLSAPFSQSAGVDQKELSFSPSLLKIFCQLFSIHVDAINIMVLKVDTSESLWHIQISRSRFLLDSDGKRLICEVSLCKINSKVLKSGQLEDTCLVELSLALDLCLKVGISSRHLTAITVDVWTLHAELHEGLFQSQLLCQGPSLASKPVPCSEVTENLVEPTLPGLFLLQQLPDQVKVKMENTSVVLSMNSQKRHLTWTLKLLQFLYHRDEDQLPLRSFTANSDMAQMSTELLLEDGLLLSQSRQRIVCLNSLKASVQVTTIDLSASLVLNTCIIHYRHQEFSHWLHLLALETQGSSSPVLKQRKKRTFPQILAPIIFSTSISNVNISIQLGDTPPFALGFNSISLDYQHLRPQSIHQRGVLTVDHLCWRVGSDSHIQRAPHPPNMHVWGEALVLDSFTLQGSYNQPLGLSSTQSDTLFLDCTIRGLQVEASDTCAQCLSRILSLMGPQSGKSAVSRHSSFGESVSLLWKVDLKVEDMNLFTLSALVGASEVRLDTLTILGSAETSTVGIQGLVLALVKSVTEKMQPCCKAPDIPTPVLSLSMLSITYHSSIRSLEVQCGAGLTLLWSPPDHMYLYQHVLATLQCRDLLRATVFPETVPSLALETSGTTSELEGRAPEPLPPKRLLNLTLEVSTAKLTAFVAEDKFITLAAESVSLSRHGGSLQAYCPELAAGFDGNSIFNFKEVEVQLLPELEEMILHRNPFPALQTLRNRVWLLSFGSVSVEFPYQYDFSRTLDEAVGVQKWLKGLHQGTRAWASPSPVPLPPDLLLKVEHFSWVFLDDVFEVKLHDNYELMKDESKESAKRLQLLDAKVAALRKQHGELLPARKIEELYASLERKNIEIYIQRSRRLYGNTPMRRALLTWSLAGLELVALADASFHGPEHVVEQVQELDPGSPFPPEGLDLVIQWCRMLKCNVKSFLVRIRDYPRYLFEIRDWRLMGRLVGTEQSGQPCSRRRQILHLGLPWGNVAVERNMPPLKFYHDFHSEIFQYTVVWGPCWDPAWTLIGQCVDLLTKPSADPSPPLPWWDKSRLLFHGDWHMDIEQANLHQLATEDPYNTTENMHWEWSHLSFHWKPGQFVFKGDLDINVRTASKYDDCCFLHLPDLCMTLDLQWLCHGNPHDHHSVTLRAPEFLPEVPLGQLHDSYRAFRSENLNLSIKMDLTRHSGTISQPRILLYSSTLRWMQNFWATWTSVTRPICRGKLFNNLKPSKKKLGQHYKQLSYTALFPQLQVHYWASFAQQRGIQIECSQGHVFTRGTQRLIPQAGTVMRRLISDWSVTQMVSDLSQVTVHLMASPTEENADHCLDPLVTKTHLLSLSSLTYQRHSNRTAEEELSARDGDPTFHTHQLHLVDLRISWTTTNRDIAFGLYDGYKKAAVLKRNLSTEALKGLKIDPQMPAKKPKRGVPTSASAPPRVNTPSFSGQPDKGSSGGAYMLQKLIEETDRFVVFTEEESGMSDQLCGIAACQTDDIYNRNCLIELVNCQMVLRGAETEGCVIVSAAKAQLLQCQHHPAWYGDTLKQKTSWTCLLDGMQYFATTESSPTEQDGRQLWLEVKNIEEHRQRSLDSVQELMESGQAVGGMVTTTTDWNQPAEAQQAQQVQRIISRCNCRMYYISYSHDIDPELATQIKPPEVLENQEKEDLLKKQEGAVDTFTLIHHELEISTNPAQYAMILDIVNNLLLHVEPKRKEHSEKKQRVRFQLEISSNPEEQRSSILHLQEAVRQHVAQIRQLEKQMYSIMKSLQDDSKNENLLDLNQKLQLQLNQEKANLQLESEELNILIRCFKDFQLQRANKMELRKQQEDVSVVRRTEFYFAQARWRLTEEDGQLGIAELELQRFLYSKVNKSDDTAEHLLELGWFTMNNLLPNAVYKVVLRPQSSCQSGRQLALRLFSKVRPPVGGISVKEHFEVNVVPLTIQLTHQFFHRMMGFFFPGRSVEDDEVGDEEDKSKLVTTGIPVVKPRQLIATDDAVPLGPGKGVAQGLTRSSGVRRSFRKSPEHPVDDIDKMKERAAMNNSFIYIKIPQVPLCVSYKGEKNSVDWGDLNLVLPCLEYHNNTWTWLDFAMAVKRDSRKALVAQVIKEKLRLKSATGSEVRGKLETKSDLNMQQQEEEEKARLLIGLSVGDKNPGKKSIFGRRK

SEQ ID NO: 7440 - protein, 86 aa, Homo Sapiens
MPLFFSALLVLLLVALSALFLGRWLVVRLATKWCQRKLQAELKIGSFRFFWIQNVSLKFQQHQQTVTLCGIVLWRSAYQNGPTESF

SEQ ID NO: 7441 - protein, 2092 aa, Homo Sapiens
MVLKVDTSESLWHIQISRSRFLLDSDGKRLICEVSLCKINSKVLKSGQLEDTCLVELSLALDLCLKVGISSRHLTAITVDVWTLHAELHEGLFQSQLLCQGPSLASKPVPCSEVTENLVEPTLPGLFLLQQLPDQVKVKMENTSVVLSMNSQKRHLTWTLKLLQFLYHRDEDQLPLRSFTANSDMAQMSTELLLEDGLLLSQSRQRIVCLNSLKASVQVTTIDLSASLVLNTCIIHYRHQEFSHWLHLLALETQGSSSPVLKQRKKRTFPQILAPIIFSTSISNVNISIQLGDTPPFALGFNSISLDYQHLRPQSIHQRGVLTVDHLCWRVGSDSHIQRAPHPPNMHVWGEALVLDSFTLQGSYNQPLGLSSTQSDTLFLDCTIRGLQVEASDTCAQCLSRILSLMGPQSGKSAVSRHSSFGESVSLLWKVDLKVEDMNLFTLSALVGASEVRLDTLTILGSAETSTVGIQGLVLALVKSVTEKMQPCCKAPDIPTPVLSLSMLSITYHSSIRSLEVQCGAGLTLLWSPPDHMYLYQHVLATLQCRDLLRATVFPETVPSLALETSGTTSELEGRAPEPLPPKRLLNLTLEVSTAKLTAFVAEDKFITLAAESVSLSRHGGSLQAYCPELAAGFDGNSIFNFKEVEVQLLPELEEMILHRNPFPALQTLRNRVWLLSFGSVSVEFPYQYDFSRTLDEAVGVQKWLKGLHQGTRAWASPSPVPLPPDLLLKVEHFSWVFLDDVFEVKLHDNYELMKDESKESAKRLQLLDAKVAALRKQHGELLPARKIEELYASLERKNIEIYIQRSRRLYGNTPMRRALLTWSLAGLELVALADASFHGPEHVVEQVQELDPGSPFPPEGLDLVIQWCRMLKCNVKSFLVRIRDYPRYLFEIRDWRLMGRLVGTEQSGQPCSRRRQILHLGLPWGNVAVERNMPPLKFYHDFHSEIFQYTVVWGPCWDPAWTLIGQCVDLLTKPSADPSPPLPWWDKSRLLFHGDWHMDIEQANLHQLATEDPYNTTENMHWEWSHLSFHWKPGQFVFKGDLDINVRTASKYDDCCFLHLPDLCMTLDLQWLCHGNPHDHHSVTLRAPEFLPEVPLGQLHDSYRAFRSENLNLSIKMDLTRHSGTISQPRILLYSSTLRWMQNFWATWTSVTRPICRGKLFNNLKPSKKKLGQHYKQLSYTALFPQLQVHYWASFAQQRGIQIECSQGHVFTRGTQRLIPQAGTVMRRLISDWSVTQMVSDLSQVTVHLMASPTEENADHCLDPLVTKTHLLSLSSLTYQRHSNRTAEEELSARDGDPTFHTHQLHLVDLRISWTTTNRDIAFGLYDGYKKAAVLKRNLSTEALKGLKIDPQMPAKKPKRGVPTSASAPPRVNTPSFSGQPDKGSSGGAYMLQKLIEETDRFVVFTEEESGMSDQLCGIAACQTDDIYNRNCLIELVNCQMVLRGAETEGCVIVSAAKAQLLQCQHHPAWYGDTLKQKTSWTCLLDGMQYFATTESSPTEQDGRQLWLEVKNIEEHRQRSLDSVQELMESGQAVGGMVTTTTDWNQPAEAQQAQQVQRIISRCNCRMYYISYSHDIDPELATQIKPPEVLENQEKEDLLKKQEGAVDTFTLIHHELEISTNPAQYAMILDIVNNLLLHVEPKRKEHSEKKQRVRFQLEISSNPEEQRSSILHLQEAVRQHVAQIRQLEKQMYSIMKSLQDDSKNENLLDLNQKLQLQLNQEKANLQLESEELNILIRCFKDFQLQRANKMELRKQQEDVSVVRRTEFYFAQARWRLTEEDGQLGIAELELQRFLYSKVNKSDDTAEHLLELGWFTMNNLLPNAVYKAILRPQSSCQSGRQLALRLFSKVRPPVGGISVKEHFEVNVVPLTIQLTHQFFHRMMGFFFPGRSVEDDEVGDEEDKSKLVTTGIPVVKPRQLIATDDAVPLGPGKGVAQGLTRSSGVRRSFRKSPEHPVDDIDKMKERAAMNNSFIYIKIPQVPLCVSYKGEKNSVDWGDLNLVLPCLEYHNNTWTWLDFAMAVKRDSRKALVAQVIKEKLRLKSATGSEVRGKLETKSDLNMQQQEEEEKARLLIGLSVGDKNPGKKSIFGRRK

SEQ ID NO: 7442 - protein, 2092 aa, Homo Sapiens
MVLKVDTSESLWHIQISRSRFLLDSDGKRLICEVSLCKINSKVLKSGQLEDTCLVELSLALDLCLKVGISSRHLTAITVDVWTLHAELHEGLFQSQLLCQGPSLASKPVPCSEVTENLVEPTLPGLFLLQQLPDQVKVKMENTSVVLSMNSQKRHLTWTLKLLQFLYHRDEDQLPLRSFTANSDMAQMSTELLLEDGLLLSQSRQRIVCLNSLKASVQVTTIDLSASLVLNTCIIHYRHQEFSHWLHLLALETQGSSSPVLKQRKKRTFPQILAPIIFSTSISNVNISIQLGDTPPFALGFNSISLDYQHLRPQSIHQRGVLTVDHLCWRVGSDSHIQRAPHPPNMHVWGEALVLDSFTLQGSYNQPLGLSSTQSDTLFLDCTIRGLQVEASDTCAQCLSRILSLMGPQSGKSAVSRHSSFGESVSLLWKVDLKVEDMNLFTLSALVGASEVRLDTLTILGSAETSTVGIQGLVLALVKSVTEKMQPCCKAPDIPTPVLSLSMLSITYHSSIRSLEVQCGAGLTLLWSPPDHMYLYQHVLATLQCRDLLRATVFPETVPSLALETSGTTSELEGRAPEPLPPKRLLNLTLEVSTAKLTAFVAEDKFITLAAESVSLSRHGGSLQAYCPELAAGFDGNSIFNFKEVEVQLLPELEEMILHRNPFPALQTLRNRVWLLSFGSVSVEFPYQYDFSRTLDEAVGVQKWLKGLHQGTRAWASPSPVPLPPDLLLKVEHFSWVFLDDVFEVKLHDNYELMKDESKESAKRLQLLDAKVAALRKQHGELLPARKIEELYASLERKNIEIYIQRSRRLYGNTPMRRALLTWSLAGLELVALADASFHGPEHVVEQVQELDPGSPFPPEGLDLVIQWCRMLKCNVKSFLVRIRDYPRYLFEIRDWRLMGRLVGTEQSGQPCSRRRQILHLGLPWGNVAVERNMPPLKFYHDFHSEIFQYTVVWGPCWDPAWTLIGQCVDLLTKPSADPSPPLPWWDKSRLLFHGDWHMDIEQANLHQLATEDPYNTTENMHWEWSHLSFHWKPGQFVFKGDLDINVRTASKYDDCCFLHLPDLCMTLDLQWLCHGNPHDHHSVTLRAPEFLPEVPLGQLHDSYRAFRSENLNLSIKMDLTRHSGTISQPRILLYSSTLRWMQNFWATWTSVTRPICRGKLFNNLKPSKKKLGQHYKQLSYTALFPQLQVHYWASFAQQRGIQIECSQGHVFTRGTQRLIPQAGTVMRRLISDWSVTQMVSDLSQVTVHLMASPTEENADHCLDPLVTKTHLLSLSSLTYQRHSNRTAEEELSARDGDPTFHTHQLHLVDLRISWTTTNRDIAFGLYDGYKKAAVLKRNLSTEALKGLKIDPQMPAKKPKRGVPTSASAPPRVNTPSFSGQPDKGSSGGAYMLQKLIEETDRFVVFTEEESGMSDQLCGIAACQTDDIYNRNCLIELVNCQMVLRGAETEGCVIVSAAKAQLLQCQHHPAWYGDTLKQKTSWTCLLDGMQYFATTESSPTEQDGRQLWLEVKNIEEHRQRSLDSVQELMESGQAVGGMVTTTTDWNQPAEAQQAQQVQRIISRCNCRMYYISYSHDIDPELATQIKPPEVLENQEKEDLLKKQEGAVDTFTLIHHELEISTNPAQYAMILDIVNNLLLHVEPKRKEHSEKKQRVRFQLEISSNPEEQRSSILHLQEAVRQHVAQIRQLEKQMYSIMKSLQDDSKNENLLDLNQKLQLQLNQEKANLQLESEELNILIRCFKDFQLQRANKMELRKQQEDVSVVRRTEFYFAQARWRLTEEDGQLGIAELELQRFLYSKVNKSDDTAEHLLELGWFTMNNLLPNAVYKVVLRPQSSCQSGRQLALRLFSKVRPPVGGISVKEHFEVNVVPLTIQLTHQFFHRMMGFFFPGRSVEDDEVGDEEDKSKLVTTGIPVVKPRQLIATDDAVPLGPGKGVAQGLTRSSGVRRSFRKSPEHPVDDIDKMKERAAMNNSFIYIKIPQVPLCVSYKGEKNSVDWGDLNLVLPCLEYHNNTWTWLDFAMAVKRDSRKALVAQVIKEKLRLKSATGSEVRGKLETKSDLNMQQQEEEEKARLLIGLSVGDKNPGKKSIFGRRK

SEQ ID NO: 7443 - protein, 21 aa, Homo Sapiens
  misc_feature (1)..(1): Xaa can be any naturally occurring amino acid
XQGPSLASKPVPCSAARPGQG

SEQ ID NO: 7444 - protein, 1072 aa, Homo Sapiens
MAPPTGVLSSLLLLVTIAGCARKQCSEGRTYSNAVISPNLETTRIMRVSHTFPVVDCTAACCDLSSCDLAWWFEGRCYLVSCPHKENCEPKKMGPIRSYLTFVLRPVQRPAQLLDYGDMMLNRGSPSGIWGDSPEDIRKDLTFLGKDWGLEEMSEYSDDYRELEKDLLQPSGKQEPRGSAEYTDWGLLPGSEGAFNSSVGDSPAVPAETQQDPELHYLNESASTPAPKLPERSVLLPLPTTPSSGEVLEKEKASQLQEQSSNSSGKEVLMPSHSLPPASLELSSVTVEKSPVLTVTPGSTEHSIPTPPTSAAPSESTPSELPISPTTAPRTVKELTVSAGDNLIITLPDNEVELKAFVAPAPPVETTYNYEWNLISHPTDYQGEIKQGHKQTLNLSQLSVGLYVFKVTVSSENAFGEGFVNVTVKPARRVNLPPVAVVSPQLQELTLPLTSALIDGSQSTDDTEIVSYHWEEINGPFIEEKTSVDSPVLRLSNLDPGNYSFRLTVTDSDGATNSTTAALIVNNAVDYPPVANAGPNHTITLPQNSITLNGNQSSDDHQIVLYEWSLGPGSEGKHVVMQGVQTPYLHLSAMQEGDYTFQLKVTDSSRQQSTAVVTVIVQPENNRPPVAVAGPDKELIFPVESATLDGSSSSDDHGIVFYHWEHVRGPSAVEMENIDKAIATVTGLQVGTYHFRLTVKDQQGLSSTSTLTVAVKKENNSPPRARAGGRHVLVLPNNSITLDGSRSTDDQRIVSYLWIRDGQSPAAGDVIDGSDHSVALQLTNLVEGVYTFHLRVTDSQGASDTDTATVEVQPDPRKSGLVELTLQVGVGQLTEQRKDTLVRQLAVLLNVLDSDIKVQKIRAHSDLSTVIVFYVQSRPPFKVLKAAEVARNLHMRLSKEKADFLLFKVLRVDTAGCLLKCSGHGHCDPLTKRCICSHLWMENLIQRYIWDGESNCEWSIFYVTVLAFTLIVLTGGFTWLCICCCKRQKRTKIRKKTKYTILDNMDEQERMELRPKYGIKHRSTEHNSSLMVSESEFDSDQDTIFSREKMERGNPKVSMNGSIRNGASFSYCSKDR

SEQ ID NO: 7445 - protein, 1011 aa, Homo Sapiens
MAPPTGVLSSLLLLVTIAGCARKQCSEGRTYSNAVISPNLETTRIMRVSHTFPVVDCTAACCDLSSCDLAWWFEGRCYLVSCPHKENCEPKKMGPIRSYLTFVLRPVQRPAQLLDYGDMMLNRGSPSGIWGDSPEDIRKDLTFLGKDWGLEEMSEYSDDYRELEKDLLQPSGKQEPRGSAEYTDWGLLPGSEGAFNSSVGDSPAVPAETQQDPELHYLNESASTPAPKLPERSVLLPLPTTPSSGEVLEKEKASQLQEQSSNSSGKEVLMPSHSLPPASLELSSVTVEKSPVLTVTPGSTEHSIPTPPTSAAPSESTPSELPISPTTAPRTVKELTVSAGDNLIITLPDNEVELKAFVAPAPPVETTYNYEWNLISHPTDYQGEIKQGHKQTLNLSQLSVGLYVFKVTVSSENAFGEGFVNVTVKPARRVNLPPVAVVSPQLQELTLPLTSALIDGSQSTDDTEIVSYHWEEINGPFIEEKTSVDSPVLRLSNLDPGNYSFRLTVTDSDGATNSTTAALIVNNAVDYPPVANAGPNHTITLPQNSITLNGNQSSDDHQIVLYEWSLGPGSEGKHVVMQGVQTPYLHLSAMQEGDYTFQLKVTDSSRQQSTAVVTVIVQPENNRPPVAVAGPDKELIFPVESATLDGSSSSDDHGIVFYHWEHVRGPSAVEMENIDKAIATVTGLQVGTYHFRLTVKDQQGLSSTSTLTVAVKKENNSPPRARAGGRHVLVLPNNSITLDGSRSTDDQRIVSYLWIRDGQSPAAGDVIDGSDHSVALQLTNLVEGVYTFHLRVTDSQGASDTDTATVEVQPDPRKSGLVELTLQVGVGQLTEQRKDTLVRQLAVLLNVLDSDIKVQKIRAHSDLSTVIVFYVQSRPPFKVLKAAEVARNLHMRLSKEKADFLLFKVLRVDTAGCLLKCSGHGHCDPLTKRCICSHLWMENLIQRYIWDGESNCGIKHRSTEHNSSLMVSESEFDSDQDTIFSREKMERGNPKVSMNGSIRNGASFSYCSKDR

SEQ ID NO: 7446 - protein, 1072 aa, Homo Sapiens; identical to SEQ ID NO: 7444

SEQ ID NO: 7447 - protein, 483 aa, Homo Sapiens
MQEGDYTFQLKVTDSSRQQSTAVVTVIVQPENNRPPVAVAGPDKELIFPVESATLDGSSSSDDHGIVFYHWEHVRGPSAVEMENIDKAIATVTGLQVGTYHFRLTVKDQQGLSSTSTLTVAVKKENNSPPRARAGGRHVLVLPNNSITLDGSRSTDDQRIVSYLWIRDGQSPAAGDVIDGSDHSVALQLTNLVEGVYTFHLRVTDSQGASDTDTATVEVQPDPRKSGLVELTLQVGVGQLTEQRKDTLVRQLAVLLNVLDSDIKVQKIRAHSDLSTVIVFYVQSRPPFKVLKAAEVARNLHMRLSKEKADFLLFKVLRVDTAGCLLKCSGHGHCDPLTKRCICSHLWMENLIQRYIWDGESNCEWSIFYVTVLAFTLIVLTGGFTWLCICCCKRQKRTKIRKKTKYTILDNMDEQERMELRPKYGIKHRSTEHNSSLMVSESEFDSDQDTIFSREKMERGNPKVSMNGSIRNGASFSYCSKDR

SEQ ID NO: 7448 - protein, 1027 aa, Homo Sapiens
MRVSHTFPVVDCTAACCDLSSCDLAWWFEGRCYLVSCPHKENCEPKKMGPIRSYLTFVLRPVQRPAQLLDYGDMMLNRGSPSGIWGDSPEDIRKDLTFLGKDWGLEEMSEYSDDYRELEKDLLQPSGKQEPRGSAEYTDWGLLPGSEGAFNSSVGDSPAVPAETQQDPELHYLNESASTPAPKLPERSVLLPLPTTPSSGEVLEKEKASQLQEQSSNSSGKEVLMPSHSLPPASLELSSVTVEKSPVLTVTPGSTEHSIPTPPTSAAPSESTPSELPISPTTAPRTVKELTVSAGDNLIITLPDNEVELKAFVAPAPPVETTYNYEWNLISHPTDYQGEIKQGHKQTLNLSQLSVGLYVFKVTVSSENAFGEGFVNVTVKPARRVNLPPVAVVSPQLQELTLPLTSALIDGSQSTDDTEIVSYHWEEINGPFIEEKTSVDSPVLRLSNLDPGNYSFRLTVTDSDGATNSTTAALIVNNAVDYPPVANAGPNHTITLPQNSITLNGNQSSDDHQIVLYEWSLGPGSEGKHVVMQGVQTPYLHLSAMQEGDYTFQLKVTDSSRQQSTAVVTVIVQPENNRPPVAVAGPDKELIFPVESATLDGSSSSDDHGIVFYHWEHVRGPSAVEMENIDKAIATVTGLQVGTYHFRLTVKDQQGLSSTSTLTVAVKKENNSPPRARAGGRHVLVLPNNSITLDGSRSTDDQRIVSYLWIRDGQSPAAGDVIDGSDHSVALQLTNLVEGVYTFHLRVTDSQGASDTDTATVEVQPDPRKSGLVELTLQVGVGQLTEQRKDTLVRQLAVLLNVLDSDIKVQKIRAHSDLSTVIVFYVQSRPPFKVLKAAEVARNLHMRLSKEKADFLLFKVLRVDTAGCLLKCSGHGHCDPLTKRCICSHLWMENLIQRYIWDGESNCEWSIFYVTVLAFTLIVLTGGFTWLCICCCKRQKRTKIRKKTKYTILDNMDEQERMELRPKYGIKHRSTEHNSSLMVSESEFDSDQDTIFSREKMERGNPKVSMNGSIRNGASFSYCSKDR

SEQ ID NO: 7449 - protein, 1063 aa, Homo Sapiens
MTRLGWPSPCCARKQCSEGRTYSNAVISPNLETTRIMRVSHTFPVVDCTAACCDLSSCDLAWWFEGRCYLVSCPHKENCEPKKMGPIRSYLTFVLRPVQRPAQLLDYGDMMLNRGSPSGIWGDSPEDIRKDLTFLGKDWGLEEMSEYSDDYRELEKDLLQPSGKQEPRGSAEYTDWGLLPGSEGAFNSSVGDSPAVPAETQQDPELHYLNESASTPAPKLPERSVLLPLPTTPSSGEVLEKEKASQLQEQSSNSSGKEVLMPSHSLPPASLELSSVTVEKSPVLTVTPGSTEHSIPTPPTSAAPSESTPSELPISPTTAPRTVKELTVSAGDNLIITLPDNEVELKAFVAPAPPVETTYNYEWNLISHPTDYQGEIKQGHKQTLNLSQLSVGLYVFKVTVSSENAFGEGFVNVTVKPARRVNLPPVAVVSPQLQELTLPLTSALIDGSQSTDDTEIVSYHWEEINGPFIEEKTSVDSPVLRLSNLDPGNYSFRLTVTDSDGATNSTTAALIVNNAVDYPPVANAGPNHTITLPQNSITLNGNQSSDDHQIVLYEWSLGPGSEGKHVVMQGVQTPYLHLSAMQEGDYTFQLKVTDSSRQQSTAVVTVIVQPENNRPPVAVAGPDKELIFPVESATLDGSSSSDDHGIVFYHWEHVRGPSAVEMENIDKAIATVTGLQVGTYHFRLTVKDQQGLSSTSTLTVAVKKENNSPPRARAGGRHVLVLPNNSITLDGSRSTDDQRIVSYLWIRDGQSPAAGDVIDGSDHSVALQLTNLVEGVYTFHLRVTDSQGASDTDTATVEVQPDPRKSGLVELTLQVGVGQLTEQRKDTLVRQLAVLLNVLDSDIKVQKIRAHSDLSTVIVFYVQSRPPFKVLKAAEVARNLHMRLSKEKADFLLFKVLRVDTAGCLLKCSGHGHCDPLTKRCICSHLWMENLIQRYIWDGESNCEWSIFYVTVLAFTLIVLTGGFTWLCICCCKRQKRTKIRKKTKYTILDNMDEQERMELRPKYGIKHRSTEHNSSLMVSESEFDSDQDTIFSREKMERGNPKVSMNGSIRNGASFSYCSKDR

SEQ ID NO: 7450 - protein, 82 aa, Homo Sapiens
ILLTVLTCYFWKKNQKLEYKYSKLVMNATLKDCDLPAADSCAIMEGEDVEDDLIFTSKKSLFGKIKSFTSKVSGSSPLGAES

SEQ ID NO: 7451 - protein, 62 aa, Homo Sapiens
MAEPGHSHHLSARVRGRTERRIPRLWRLLLWAGTAFQVTQGTGPELHACKEPSPATPGSFWI

SEQ ID NO: 7452 - protein, 91 aa, Homo Sapiens
MAEPGHSHHLSARVRGRTERRIPRLWRLLLWAGTAFQVTQGTGPELHACKESEYHYEYTACDSTGSRWRVAVPHTPGLCTSLPDPIKGTEC

SEQ ID NO: 7453 - protein, 152 aa, Homo Sapiens
MAEPGHSHHLSARVRGRTERRIPRLWRLLLWAGTAFQVTQGTGPELHACKESEYHYEYTACDSTGSRWRVAVPHTPGLCTSLPDPIKGTECSFSCNAGEFLDMKDQSCKPCAEGRYSLGTGIRFDEWDELPHGFASLSANMELDDSAAESTG

SEQ ID NO: 7454 - protein, 156 aa, Homo Sapiens
MAEPGHSHHLSARVRGRTERRIPRLWRLLLWAGTAFQVTQGTGPELHACKESEYHYEYTACDSTGSRWRVAVPHTPGLCTSLPDPIKGTECSFSCNAGEFLDMKDQSCKPCAEGRYSLGTGIRFDEWDELPHGFASLSANMELDDSAAESTGNCTS

SEQ ID NO: 7455 - protein, 205 aa, Homo Sapiens
MAEPGHSHHLSARVRGRTERRIPRLWRLLLWAGTAFQVTQGTGPELHACKESEYHYEYTACDSTGSRWRVAVPHTPGLCTSLPDPIKGTECSFSCNAGEFLDMKDQSCKPCAEGRYSLGTGIRFDEWDELPHGFASLSANMELDDSAAESTGNCTSSKWVPRGDYIASNTDECTATLMYAVNLKQSGTVNFEYYYPDSSIIFEFF

SEQ ID NO: 7456 - protein, 1013 aa, Homo Sapiens
MAEPGHSHHLSARVRGRTERRIPRLWRLLLWAGTAFQVTQGTGPELHACKESEYHYEYTACDSTGSRWRVAVPHTPGLCTSLPDPIKGTECSFSCNAGEFLDMKDQSCKPCAEGRYSLGTGIRFDEWDELPHGFASLSANMELDDSAAESTGNCTSSKWVPRGDYIASNTDECTATLMYAVNLKQSGTVNFEYYYPDSSIIFEFFVQNDQCQPNADDSRWMKTTEKGWEFHSVELNRGNNVLYWRTTAFSVWTKVPKPVLVRNIAITGVAYTSECFPCKPGTYADKQGSSFCKLCPANSYSNKGETSCHQCDPDKYSEKGSSSCNVRPACTDKDYFYTHTACDANGETQLMYKWAKPKICSEDLEGAVKLPASGVKTHCPPCNPGFFKTNNSTCQPCPYGSYSNGSDCTRCPAGTEPAVGFEYKWWNTLPTNMETTVLSGINFEYKGMTGWEVAGDHIYTAAGASDNDFMILTLVVPGFRPPQSVMADTENKEVARITFVFETLCSVNCELYFMVGVNSRTNTPVETWKGSKGKQSYTYIIEENTTTSFTWAFQRTTFHEASRKYTNDVAKIYSINVTNVMNGVASYCRPCALEASDVGSSCTSCPAGYYIDRDSGTCHSCPTNTILKAHQPYGVQACVPCGPGTKNNKIHSLCYNDCTFSRNTPTRTFNYNFSALANTVTLAGGPSFTSKGLKYFHHFTLSLCGNQGRKMSVCTDNVTDLRIPEGESGFSKSITAYVCQAVIIPPEVTGYKAGVSSQPVSLADRLIGVTTDMTLDGITSPAELFHLESLGIPDVIFFYRSNDVTQSCSSGRSTTIRVRCSPQKTVPGSLLLPGTCSDGTCDGCNFHFLWESAAACPLCSVADYHAIVSSCVAGIQKTTYVWREPKLCSGGISLPEQRVTICKTIDFWLKVGISAGTCTAILLTVLTCYFWKKNQKLEYKYSKLVMNATLKDCDLPAADSCAIMEGEDVEDDLIFTSKKSLFGKIKSFTSKRTPDGFDSVPLKTSSGGLDMDL

SEQ ID NO: 7457 - protein, 901 aa, Homo Sapiens
MAEPGHSHHLSARVRGRTERRIPRLWRLLLWAGTAFQVTQGTGPELHACKESEYHYEYTACDSTGSRWRVAVPHTPGLCTSLPDPIKGTECSFSCNAGEFLDMKDQSCKPCAEGRYSLGTGIRFDEWDELPHGFASLSANMELDDSAAESTGNCTSSKWVPRGDYIASNTDECTATLMYAVNLKQSGTVNFEYYYPDSSIIFEFFVQNDQCQPNADDSRWMKTTEKGWEFHSVELNRGNNVLYWRTTAFSVWTKVPKPVLVRNIAITEKGSSSCNVRPACTDKDYFYTHTACDANGETQLMYKWAKPKICSEDLEGAVKLPASGVKTHCPPCNPGFFKTNNSTCQPCPYGSYSNGSDCTRCPAGTEPAVGFEYKWWNTLPTNMETTVLSGINFEYKGMTGWEVAGDHIYTAAGASDNDFMILTLVVPGFRPPQSVMADTENKEVARITFVFETLCSVNCELYFMVGVNSRTNTPVETWKGSKGKQSYTYIIEENTTTSFTWAFQRTTFHEASRKYTNDVAKIYSINVTNVMNGVASYCRPCALEASDVGSSCTSCPAGYYIDRDSGTCHSCPTNTILKAHQPYGVQACVPCGPGTKNNKIHSLCYNDCTFSRNTPTRTFNYNFSALANTVTLAGGPSFTSKGLKYFHHFTLSLCGNQGRKMSVCTDNVTDLRIPEGESGFSKSITAYVCQAVIIPPEVTGYKAGVSSQPVSLADRLIGVTTDMTLDGITSPAELFHLESLGIPDVIFFYRSNDVTQSCSSGRSTTIRVRCSPQKTVPGSLLLPGTCSDGTCDGCNFHFLWESAAACPLCSVADYHAIVSSCVAGIQKTTYVWREPKLCSGGISLPEQRVTICKTIDFWLKVGISAGTCTAILLTVLTCYFWKKNQKLEYKYSKLVMNATLK

SEQ ID NO: 7458 - protein, 926 aa, Homo Sapiens
MAEPGHSHHLSARVRGRTERRIPRLWRLLLWAGTAFQVTQGTGPELHACKESEYHYEYTACDSTGSRWRVAVPHTPGLCTSLPDPIKGTECSFSCNAGEFLDMKDQSCKPCAEGRYSLGTGIRFDEWDELPHGFASLSANMELDDSAAESTGNCTSSKWVPRGDYIASNTDECTATLMYAVNLKQSGTVNFEYYYPDSSIIFEFFVQNDQCQPNADDSRWMKTTEKGWEFHSVELNRGNNVLYWRTTAFSVWTKVPKPVLTQLMYKWAKPKICSEDLEGAVKLPASGVKTHCPPCNPGFFKTNNSTCQPCPYGSYSNGSDCTRCPAGTEPAVGFEYKWWNTLPTNMETTVLSGINFEYKGMTGWEVAGDHIYTAAGASDNDFMILTLVVPGFRPPQSVMADTENKEVARITFVFETLCSVNCELYFMVGVNSRTNTPVETWKGSKGKQSYTYIIEENTTTSFTWAFQRTTFHEASRKYTNDVAKIYSINVTNVMNGVASYCRPCALEASDVGSSCTSCPAGYYIDRDSGTCHSCPTNTILKAHQPYGVQACVPCGPGTKNNKIHSLCYNDCTFSRNTPTRTFNYNFSALANTVTLAGGPSFTSKGLKYFHHFTLSLCGNQGRKMSVCTDNVTDLRIPEGESGFSKSITAYVCQAVIIPPEVTGYKAGVSSQPVSLADRLIGVTTDMTLDGITSPAELFHLESLGIPDVIFFYRSNDVTQSCSSGRSTTIRVRCSPQKTVPGSLLLPGTCSDGTCDGCNFHFLWESAAACPLCSVADYHAIVSSCVAGIQKTTYVWREPKLCSGGISLPEQRVTICKTIDFWLKVGISAGTCTAILLTVLTCYFWKKNQKLEYKYSKLVMNATLKDCDLPAADSCAIMEGEDVEDDLIFTSKKSLFGKIKSFTSKRTPDGFDSVPLKTSSGGLDMDL

SEQ ID NO: 7459 - protein, 838 aa, Homo Sapiens
MYAFYSLLIYIFYSLFRRDGGAAAAAEPGDPAQRARKPRGRRRPDLPAPELWTELTGLAASSEPEDGSEGAAEGRAAAVSLEEALLRLAEFLSVQLGAEESCGGPADLGQSGEVPSLLTVTSQLLALLAWLRSPRGRQALLQGTQPAPRVRPPSPDGSTSQEESPSHFTAVPGEPLGDETQGQQPLQLEEDQRAWQRLEQLILGQLEELKQQLEQQEEELGRLRLGVGATDSEKRVQHLTLENEALKQSLSLMRDLLLHWGPGPPIRAPQEEAEALLELQGRLQEAQDTTEALRAQLGVQEVQLQGLQGALQQLQQETEQNCRRELQQMHGQLAGLRARMASLRQGCGDLRGLVSTFTQSCQGSLSEARGQVSWALGALSSGGPGTQLPEGQQGPPAGCPGRLPELKGNIRVLCRLRPGTSSSLVSVEPGPGGTVTTCYRGRHRRFRLDWVFPPDASQEEVFRELEPAVLSCLRGYSVCIFTYGQTGTGKTYSMEGPPEDPGIVPRALQSLFREMGAGRQHRVTLSMVEIYNEAVRDLLAPGPPERLAVRQGPEGQGGIQVAGLTHWDVPNLETLHQMLKLGRSNRATAATAMNQRSSRSHALVTLTLRAASPPRAPGTAGTLHLVDLAGSERARKAGAAGPPRGDPDGARRLREAQTINRSLLALGGVMAALRAHRPHVPFRDSQLTRLLQPALGPGTTAVLLLQVGAGAGQVCACRSPPTRARPPAPLARRSPRGRRISGRQSAPSSSPTEWVKWSWGQPGAAGSRAPPGRLLPSAPTLRSPGPPAPLRRPLAVLHAPVPTTARARLSRPQRACPSSPGSRPCPWGLRPGLCWQRR

SEQ ID NO: 7460 - protein, 744 aa, Homo Sapiens
MYAFYSLLIYIFYSLFRRDGGAAAAAEPGDPAQRARKPRGRRRPDLPAPELWTELTGLAASSEPEDGSEGAAEGRAAAVSLEEALLRLAEFLSVQLGAEESCGGPADLGQSGEVPSLLTVTSQLLALLAWLRSPRGRQALLQGTQPAPRVRPPSPDGSTSQEESPSHFTAVPGEPLGDETQGQQPLQLEEDQRAWQRLEQLILGQLEELKQQLEQQEEELGRLRLGVGATDSEKRVQHLTLENEALKQSLSLMRDLLLHWGPGPPIRAPQEEAEALLELQGRLQEAQDTTEALRAQLQQETEQNCRRELQQMHGQLAGLRARMASLRQGCGDLRGLVSTFTQSCQGSLSEARGQVSWALGALSSGGPGTQLPEGQQGPPAGCPGRLPELKGNIRVLCRLRPGTSSSLVSVEPGPGGTVTTCYRGRHRRFRLDWVFPPDASQEEVFRELEPAVLSCLRGYSVCIFTYGQTGTGKTYSMEGPPEDPGIVPRALQSLFREMGAGRQHRVTLSMVEIYNEAVRDLLAPGPPERLAVRQGPEGQGGIQVAGLTHWDVPNLETLHQMLKLGRSNRATAATAMNQRSSRSHALVTLTLRAASPPRAPGTAGTLHLVDLAGSERARKAGAAGPPRGDPDGARRLREAQTINRSLLALGGVMAALRAHRPHVPFRDSQLTRLLQPALGPGTTAVLLLQISTRPEDLGETVCSLKFADRVGQVELGPARRRRVPRSSGTPSSLSTDTPLTGTPC

SEQ ID NO: 7461 - protein, 791 aa, Homo Sapiens
MYAFYSLLIYIFYSLFRRDGGAAAAAEPGDPAQRARKPRGRRRPDLPAPELWTELTGLAASSEPEDGSEGAAEGRAAAVSLEEALLRLAEFLSVQLGAEESCGGPADLGQSGEVPSLLTVTSQLLALLAWLRSPRGRQALLQGTQPAPRVRPPSPDGSTSQEESPSHFTAVPGEPLGDETQGQQPLQLEEDQRAWQRLEQLILGQLEELKQQLEQQEEELGRLRLGVGATDSEKRVQHLTLENEALKQSLSLMRDLLLHWGPGPPIRAPQEEAEALLELQGRLQEAQDTTEALRAQLGVQEVQLQGLQGALQQLQQETEQNCRRELQQMHGQLAGLRARMASLRQGCGDLRGLVSTFTQSCQGSLSEARGQVSWALGALSSGGPGTQLPEGQQGPPAGCPGRLPELKGNIRVLCRLRPGTSSSLVSVEPGPGGTVTTCYRGRHRRFRLDWVFPPDASQEEVFRELEPAVLSCLRGYSVCIFTYGQTGTGKTYSMEGPPEDPGIVPRALQSLFREMGAGRQHRVTLSMVEIYNEAVRDLLAPGPPERLAVRQGPEGQGGIQVAGLTHWDVPNLETLHQMLKLGRSNRATAATAMNQRSSRSHALVTLTLRAASPPRAPGTAGTLHLVDLAGSERARKAGAAGPPRGDPDGARRLREAQTINRSLLALGGVMAALRAHRPHVPFRDSQLTRLLQPALGPGTTAVLLLQISTRPEDLGETVCSLKFADRVGQVELGPARRRRVPRSSGTPSSLSTDTPLTGTPCTPTPSPGSPPCPSPDNGSGSALAPAEGLPL

SEQ ID NO: 7462 - protein, 325 aa, Homo Sapiens
MSMSPTVIILACLGFFLDQSVWAHVGGQDKPFCSAWPSAVVPQGGHVTLRCHYRRGFNIFTLYKKDGVPVPELYNRIFWNSFLISPVTPAHAGTYRCRGFHPHSPTEWSAPSNPLVIMVTGLYEKPSLTARPGPTVRAGENVTLSCSSQSSFDIYHLSREGEAHELRLPAVPSINGTFQADFPLGPATHGETYRCFGSFHGSPYEWSDPSDPLPVSVTDAAVMNQEPAGHRTVNREDSDEQDPQEVTYAQLDHCIFTQRKITGPSQRSKRPSTDTSVCIELPNAEPRALSPAHEHHSQALMGSSRETTALSQTQLASSNVPAAGI

SEQ ID NO: 7463 - protein, 342 aa, Homo Sapiens
MSMSPTVIILACLGFFLDQSVWAHVGGQDKPFCSAWPSAVVPQGGHVTLRCHYRRGFNIFTLYKKDGVPVPELYNRIFWNSFLISPVTPAHAGTYRCRGFHPHSPTEWSAPSNPLVIMVTGLYEKPSLTARPGPTVRAGENVTLSCSSQSSFDIYHLSREGEAHELRLPAVPSINGTFQADFPLGPATHGETYRCFGSFHGSPYEWSDPSDPLPVSVTGNPSSSWPSPTEPSFKTDAAVMNQEPAGHRTVNREDSDEQDPQEVTYAQLDHCIFTQRKITGPSQRSKRPSTDTSVCIELPNAEPRALSPAHEHHSQALMGSSRETTALSQTQLASSNVPAAGI

SEQ ID NO: 7464 - protein, 273 aa, Homo Sapiens
MSMSPTVIILACLGFFLDQSVWAHVGGQDKPFCSAWPSAVVPQGGHVTLRCHYRRGFNIFTLYKKDGVPVPELYNRIFWNSFLISPVTPAHAGTYRCRGFHPHSPTEWSAPSNPLVIMVTGLYEKPSLTARPGPTVRAGENVTLSCSSQSSFDIYHLSREGEAHELRLPAVPSINGTFQADFPLGPATHGETYRCFGSFHGSPYEWSDPSDPLPVSVTGNPSSSWPSPTEPSFKTGIARHLHAVIRYSVAIILFTILPFFLLHRWCSKKKMLL

SEQ ID NO: 7465 - protein, 230 aa, Homo Sapiens
MSMSPTVIILACLGFFLDQSVWAHVGLYEKPSLTARPGPTVRAGENVTLSCSSQSSFDIYHLSREGEAHELRLPAVPSINGTFQADFPLGPATHGETYRCFGSFHGSPYEWSDPSDPLPVSVTDAAVMNQEPAGHRTVNREDSDEQDPQEVTYAQLDHCIFTQRKITGPSQRSKRPSTDTSVCIELPNAEPRALSPAHEHHSQALMGSSRETTALSQTQLASSNVPAAGI

SEQ ID NO: 7466 - protein, 247 aa, Homo Sapiens
MSMSPTVIILACLGFFLDQSVWAHVGLYEKPSLTARPGPTVRAGENVTLSCSSQSSFDIYHLSREGEAHELRLPAVPSINGTFQADFPLGPATHGETYRCFGSFHGSPYEWSDPSDPLPVSVTGNPSSSWPSPTEPSFKTDAAVMNQEPAGHRTVNREDSDEQDPQEVTYAQLDHCIFTQRKITGPSQRSKRPSTDTSVCIELPNAEPRALSPAHEHHSQALMGSSRETTALSQTQLASSNVPAAGI

SEQ ID NO: 7467 - protein, 416 aa, Homo Sapiens
MSPSHVVVNVSTARSGPLTTSSAPVSRAESLRPGSRSCTMSMSPTVIILACLGFFLDQSVWAHVGGQDKPFCSAWPSAVVPQGGHVTLRCHYRRGFNIFTLYKKDGVPVPELYNRIFWNSFLISPVTPAHAGTYRCRGFHPHSPTEWSAPSNPLVIMVTGLYEKPSLTARPGPTVRAGENVTLSCSSQSSFDIYHLSREGEAHELRLPAVPSINGTFQADFPLGPATHGETYRCFGSFHGSPYEWSDPSDPLPVSVTGNPSSSWPSPTEPSFKTGIARHLHAVIRYSVAIILFTILPFFLLHRWCSKKKDAAVMNQEPAGHRTVNREDSDEQDPQEVTYAQLDHCIFTQRKITGPSQRSKRPSTDTSVCIELPNAEPRALSPAHEHHSQALMGSSRETTALSQTQLASSNVPAAGI

SEQ ID NO: 7468 - protein, 398 aa, Homo Sapiens
  misc_feature (1)..(1): Xaa can be any naturally occurring amino acid
XMSPTVIILACLGFFLDQSVWAHVGGQDKPFCSAWPSAVVPQGGHVTLRCHYRRGFNIFTLYKKDGVPVPELYNRIFWNSFLISPVTPAHAGTYRCRGFHPHSPTEWSAPSNPLVIMVTGLYEKPSLTARPGPTVRAGENVTLSCSSQSSFDIYHLSREGEAHELRLPAVPSINGTFQADFPLGPATHGETYRCFGSFHGSPYEWSDPSDPLPVSVTGNPSSSWPSPTEPSFKTGIARHLHAVIRYSVAIILFTILPFFLLHRWCSKKKVSLTKQRPENSGPCAEAGWEHADAAVMNQEPAGHRTVNREDSDEQDPQEVTYAQLDHCIFTQRKITGPSQRSKRPSTDTSVCIELPNAEPRALSPAHEHHSQALMGSSRETTALSQTQLASSNVPAAGI

SEQ ID NO: 7469 - protein, 139 aa, Homo Sapiens
MAPKLITVLCLGFCLNQKICPHAGAQDKFSLSAWPSPVVPLGGRVTLSCHSHLRFVIWTIFQTTGTRSHELHTGLSNNITISPVTPEHAGTYRCVGIYKHASKWSAESNSLKIIVTAFSLHPGGPHDEAGREVDPLLQL

SEQ ID NO: 7470 - protein, 133 aa, Homo Sapiens
MAPKLITVLCLGFCLNQKICPHAGAQDKFSLSAWPSPVVPLGGRVTLSCHSHLRFVIWTIFQTTGTRSHELHTGLSNNITISPVTPEHAGTYRCVGIYKHASKWSAESNSLKIIVTGGPHDEAGREVDPLLQL

SEQ ID NO: 7471 - protein, 133 aa, Homo Sapiens; identical to SEQ ID NO: 7470

SEQ ID NO: 7472 - protein, 352 aa, Homo Sapiens
MAPKLITVLCLGFCLNQKICPHAGAQDKFSLSAWPSPVVPLGGRVTLSCHSHLRFVIWTIFQTTGTRSHELHTGLSNNITISPVTPEHAGTYRCVGIYKHASKWSAESNSLKIIVTGLFTKPSISAHPSSLVHAGARVSLRCHSELAFDEFILYKEGHIQHSQQLDQGMEAGIHYVEAVFSMGPVTPAHAGAYRCCGCFSHSRYEWSAPSDPLDIVITGKYKKPSLSTQVDPMMRLGEKLTLFCSSEISFDQYHLFRHGVAHGQWLSGGQRHREAFQANFSVGRATPVPGGTYRCYGSFNDSPYKPPVTRCNFTPQETLRVLLCHSQNPPLNLTHLALKDSPATCICSLDSQ

SEQ ID NO: 7473 - protein, 365 aa, Homo Sapiens
MAPKLITVLCLGFCLNQKICPHAGAQDKFSLSAWPSPVVPLGGRVTLSCHSHLRFVIWTIFQTTGTRSHELHTGLSNNITISPVTPEHAGTYRCVGIYKHASKWSAESNSLKIIVTGLFTKPSISAHPSSLVHAGARVSLRCHSELAFDEFILYKEGHIQHSQQLDQGMEAGIHYVEAVFSMGPVTPAHAGAYRCCGCFSHSRYEWSAPSDPLDIVITGKYKKPSLSTQVDPMMRLGEKLTLFCSSEISFDQYHLFRHGVAHGQWLSGGQRHREAFQANFSVGRATPVPGGTYRCYGSFNDSPYKPPVTRCNFTPQETLRVLLCHSQNPPLNLTPPWQTQSPRKANGRMKRSLQQKRHRRSYMPS

SEQ ID NO: 7474 - protein, 191 aa, Homo Sapiens
MLRMRVPALLVLLFCFRGRAGPSPHFLQQPEDLVVLLGEEARLPCALGAYWGLVQWTKSGLALGGQRDLPGWSRYWISGNAANGQHDLHIRPVELEDEASYECQATQAGLRSRPAQLHVLVPPEAPQVLGGPSVSLVAGVPANLTCRSRGDARPTPELLWFRDGVLLDGATFHQTLLKEGTPGSVESTLTL

SEQ ID NO: 7475 - protein, 633 aa, Homo Sapiens
MLRMRVPALLVLLFCFRGRAGPSPHFLQQPEDLVVLLGEEARLPCALGAYWGLVQWTKSGLALGGQRDLPGWSRYWISGNAANGQHDLHIRPVELEDEASYECQATQAGLRSRPAQLHVLVPPEAPQVLGGPSVSLVAGVPANLTCRSRGDARPTPELLWFRDGVLLDGATFHQTLLKEGTPGSVESTLTLTPFSHDDGATFVCRARSQALPTGRDTAITLSLQYPPEVTLSASPHTVQEGEKVIFLCQATAQPPVTGYRWAKGGSPVLGARGPRLEVVADASFLTEPVSCEVSNAVGSANRSTALDVLFGPILQAKPEPVSVDVGEDASFSCAWRGNPLPRVTWTRRGGAQVLGSGATLRLPSVGPEDAGDYVCRAEAGLSGLRGGAAEARLTVNAPPVVTALHSAPAFLRGPARLQCLVFASPAPDAVVWSWDEGFLEAGSQGRFLVETFPAPESRGGLGPGLISVLHISGTQESDFSRSFNCSARNRLGEGGAQASLGRRDLLPTVRIVAGVAAATTTLLMVITGVALCCWRHSKASASFSEQKNLMRIPGSSDGSSSRGPEEEETGSREDRGPIVHTDHSDLVLEEEGTLETKDPTNGYYKVRGVSPPASPDSRVTSFQWKSPGISNLP

SEQ ID NO: 7476 - protein, 708 aa, Homo Sapiens
MLRMRVPALLVLLFCFRGRAGPSPHFLQQPEDLVVLLGEEARLPCALGAYWGLVQWTKSGLALGGQRDLPGWSRYWISGNAANGQHDLHIRPVELEDEASYECQATQAGLRSRPAQLHVLVPPEAPQVLGGPSVSLVAGVPANLTCRSRGDARPTPELLWFRDGVLLDGATFHQTLLKEGTPGSVESTLTLTPFSHDDGATFVCRARSQALPTGRDTAITLSLQYPPEVTLSASPHTVQEGEKVIFLCQATAQPPVTGYRWAKGGSPVLGARGPRLEVVADASFLTEPVSCEVSNAVGSANRSTALDVLFGPILQAKPEPVSVDVGEDASFSCAWRGNPLPRVTWTRRGGAQVLGSGATLRLPSVGPEDAGDYVCRAEAGLSGLRGGAAEARLTVNAPPVVTALHSAPAFLRGPARLQCLVFASPAPDAVVWSWDEGFLEAGSQGRFLVETFPAPESRGGLGPGLISVLHISGTQESDFSRSFNCSARNRLGEGGAQASLGRRDLLPTVRIVAGVAAATTTLLMVITGVALCCWRHSKASASFSEQKNLMRIPGSSDGSSSRGPEEEETGSREDRGPIVHTDHSDLVLEEEGTLETKDPTNGYYKVRGVSVSLSLGEAPGGGLFLPPPSPLGPPGTPTFYDFNPHLGMVPPCRLYRARAGYLTTPHPRAFTSYIKPTSFGPPDLAPGTPPFPYAAFPTPSHPRLQTHV

SEQ ID NO: 7477 - protein, 673 aa, Homo Sapiens
MLRMRVPALLVLLFCFRGRAGPSPHFLQQPEDLVVLLGEEARLPCALGAYWGLVQWTKSGLALGGQRDLPGWSRYWISGNAANGQHDLHIRPVELEDEASYECQATQAGLRSRPAQLHVLVPPEAPQVLGGPSVSLVAGVPANLTCRSRGDARPTPELLWFRDGVLLDGATFHQTLLKEGTPGSVESTLTLTPFSHDDGATFVCRARSQALPTGRDTAITLSLQYPPEVTLSASPHTVQEGEKVIFLCQATAQPPVTGYRWAKGGSPVLGARGPRLEVVADASFLTEPVSCEVSNAVGSANRSTALDVLFGPILQAKPEPVSVDVGEDASFSCAWRGNPLPRVTWTRRGGAQVLGSGATLRLPSVGPEDAGDYVCRAEAGLSGLRGGAAEARLTVNAPPVVTALHSAPAFLRGPARLQCLVFASPAPDAVVWSWDEGFLEAGSQGRFLVETFPAPESRGGLGPGLISVLHISGTQESDFSRSFNCSARNRLGEGGAQASLGRRASASFSEQKNLMRIPGSSDGSSSRGPEEEETGSREDRGPIVHTDHSDLVLEEEGTLETKDPTNGYYKVRGVSVSLSLGEAPGGGLFLPPPSPLGPPGTPTFYDFNPHLGMVPPCRLYRARAGYLTTPHPRAFTSYIKPTSFGPPDLAPGTPPFPYAAFPTPSHPRLQTHV

SEQ ID NO: 7478 - protein, 583 aa, Homo Sapiens
MLRMRVPALLVLLFCFRGRAGWSRYWISGNAANGQHDLHIRPVELEDEASYECQATQAGLRSRPAQLHVLVPPEAPQVLGGPSVSLVAGVPANLTCRSRGDARPTPELLWFRDGVLLDGATFHQTLLKEGTPGSVESTLTLTPFSHDDGATFVCRARSQALPTGRDTAITLSLQYPPEVTLSASPHTVQEGEKVIFLCQATAQPPVTGYRWAKGGSPVLGARGPRLEVVADASFLTEPVSCEVSNAVGSANRSTALDVLFGPILQAKPEPVSVDVGEDASFSCAWRGNPLPRVTWTRRGGAQVLGSGATLRLPSVGPEDAGDYVCRAEAGLSGLRGGAAEARLTVNAPPVVTALHSAPAFLRGPARLQCLVFASPAPDAVVWSWDEGFLEAGSQGRFLVETFPAPESRGGLGPGLISVLHISGTQESDFSRSFNCSARNRLGEGGAQASLGRRDLLPTVRIVAGVAAATTTLLMVITGVALCCWRHSKASASFSEQKNLMRIPGSSDGSSSRGPEEEETGSREDRGPIVHTDHSDLVLEEEGTLETKDPTNGYYKVRGVSPPASPDSRVTSFQWKSPGISNLP

SEQ ID NO: 7479 - protein, 138 aa, Homo Sapiens
MNSLVSWQLLLFLCATHFGEPLEKVASVGNSRPTGQQLESLGLLAPGEQSLPCTERKPAATARLSRRGTSLSPPPESSGSPQQPGLSAPHSRQIPAPQGAVLVQREKDLPNYNWNSFGLRFGKREAAPGNHGRSAGRG

SEQ ID NO: 7480 - protein, 144 aa, Homo Sapiens [sequence omitted]

SEQ ID NO: 7481 - protein, 708 aa, Homo Sapiens
MAAAAVAAAAAAAAAASLQVLEMESMETAAAGSAGLAAEVRGSGTVDFGPGPGISAMEASGGDPGPEAEDFECSSHCSELSWRQNEQRRQGLFCDITLCFGGAGGREFRAHRSVLAAATEYFTPLLSGQFSESRSGRVEMRKWSSEPGPEPDTVEAVIEYMYTGRIRVSTGSVHEVLELADRFLLIRLKEFCGEFLKKKLHLSNCVAIHSLAHMYTLSQLALKAADMIRRNFHKVIQDEEFYTLPFHLIRDWLSDLEITVDSEEVLFETVLKWVQRNAEERERYFEELFKLLRLSQMKPTYLTRHVKPERLVANNEVCVKLVADAVERHALRAENIQSGTCQHPTSHVSLLPRYGQNMDVIMVIGGVSEGGDYLSECVGYFVDEDRWVNLPHIHNHLDGHAVAVTESYVYVAGSMEPGFAKTVERYNPNLNTWEHVCSLMTRKHSFGLTEVKGKLYSIGGHGNFSPGFKDVTVYNPELDKWHNLESAPKILRDVKALAIEDRFVYIAARTPVDRDTEDGLKAVITCYDTETRQWQDVESLPLIDNYCFFQMSVVNSNFYQTASCCPKSYCLENEEAVRKIASQVSDEILESLPPEVLSIEGAAICYYKDDVFIIGGWKNSDDIDKQYRKEAYRYCAERKRWMLLPPMPQPRCRATACHVRIPYRYLHGTQRYPMPQNLMWQKDRIRQMQEIHRHALNMRRVPSSQIEC

SEQ ID NO: 7482 - protein, 235 aa, Homo Sapiens
MAEEQEFTQLCKLPAQPSHPHCVNNTYRSAQHSQALLRGLLALRDSGILFDVVLVVEGRHIEAHRILLAASCDYFRGMFAGGLKEMEQEEVLIHGVSYNAMCQILHFIYTSELELSLSNVQETLVAACQLQIPEIIHFCCDFLMSWVDEENILDVYRLAELFDLSRLTEQLDTYILKNFVAFSRTDKYRQLPLEKVYSLLSSNRLEVSCETEVYEGALLYHYSLEQVQADQISLH

SEQ ID NO: 7483 - protein, 634 aa, Homo Sapiens
MAEEQEFTQLCKLPAQPSHPHCVNNTYRSAQHSQALLRGLLALRDSGILFDVVLVVEGRHIEAHRILLAASCDYFRGMFAGGLKEMEQEEVLIHGVSYNAMCQILHFIYTSELELSLSNVQETLVAACQLQIPEIIHFCCDFLMSWVDEENILDVYRLAELFDLSRLTEQLDTYILKNFVAFSRTDKYRQLPLEKVYSLLSSNRLEVSCETEVYEGALLYHYSLEQVQADQISLHEPPKLLETVRFPLMEAEVLQRLHDKLDPSPLRDTVASALMYHRNESLQPSLQSPQTELRSDFQCVVGFGGIHSTPSTVLSDQAKYLNPLLGEWKHFTASLAPRMSNQGIAVLNNFVYLIGGDNNVQGFRAESRCWRYDPRHNRWFQIQSLQQEHADLSVCVVGRYIYAVAGRDYHNDLNAVERYDPATNSWAYVAPLKREVYAHAGATLEGKMYITCGRRGEDYLKETHCYDPGSNTWHTLADGPVRRAWHGMATLLNKLYVIGGSNNDAGYRRDVHQVACYSCTSGQWSSVCPLPAGHGEPGIAVLDNRIYVLGGRSHNRGSRTGYVHIYDVEKDCWEEGPQLDNSISGLAACVLTLPRSLLLEPPRGTPDRSQADPDFASEVMSVSDWEEFDNSSED

SEQ ID NO: 7484 - protein, 158 aa, Homo Sapiens
MAEEQEFTQLCKLPAQPSHPHCVNNTYRSAQHSQALLRGLLALRDSGILFDVVLVVEGRHIEAHRILLAASCDYFRGMFAGGLKEMEQEEVLIHGVSYNAMCQILHFIYTSELELSLSNVQETLVAACQLQMLFTSPGLNGCHSLCRSQKLSISAVIS

SEQ ID NO: 7485 - protein, 225 aa, Homo Sapiens
MFAGGLKEMEQEEVLIHGVSYNAMCQILHFIYTSELELSLSNVQETLVAACQLQIPEIIHFCCDFLMSWVDEENILDVYRLAELFDLSRLTEQLDTYILKNFVAFSRTDKYRQLPLEKVYSLLSSNRLEVSCETEVYEGALLYHYSLEQVQADQISLHEPPKLLETVRFPLMEAEVLQRLHDKLDPSPLRDTVASALMYHRNESLQPSLQSPQTELRSDFQCVVG

SEQ ID NO: 7486 - protein, 252 aa, Homo Sapiens
MGLGSSCHLSLPKRAEALLCSRKATVVRDLVAVRMAEEQEFTQLCKLPAQPSHPHCVNNTYRSAQHSQALLRGLLALRDSGILFDVVLVVEGRHIEAHRILLAASCDYFRGMFAGGLKEMEQEEVLIHGVSYNAMCQILHFIYTSELELSLSNVQETLVAACQLQIPEIIHFCCDFLMSWVDEENILDVYRLAELFDLSRLTEQLDTYILKNFVAFSRTDKYRQLPLEKVYSLLSSNRLEVSCETEVYEGAL

SEQ ID NO: 7487 - protein, 107 aa, Homo Sapiens
MPPPWHPPPRLLAVCLLTTTQATVVRDLVAVRMAEEQEFTQLCKLPAQPSHPHCVNNTYRSAQHSQALLRGLLALRDSGILFDVVLVVEGRHIEAHRILLAASCDYF

SEQ ID NO: 7488 - protein, 295 aa, Homo Sapiens
MPPPWHPPPRLLAVCLLTTTQATVVRDLVAVRMAEEQEFTQLCKLPAQPSHPHCVNNTYRSAQHSQALLRGLLALRDSGILFDVVLVVEGRHIEAHRILLAASCDYFRGMFAGGLKEMEQEEVLIHGVSYNAMCQILHFIYTSELELSLSNVQETLVAACQLQIPEIIHFCCDFLMSWVDEENILDVYRLAELFDLSRLTEQLDTYILKNFVAFSRTDKYRQLPLEKVYSLLSSNRLEVSCETEVYEGALLYHYSLEQVQADQISLHEPPKLLETVRFPLMEAEVLQRLHDKLDP

SEQ ID NO: 7489 - protein, 56 aa, Homo Sapiens
MWFLVLCLALSLGGTALVFWNPTPRILNAFSASASALASPKIASKRTPYPSSTLRP

SEQ ID NO: 7490 - protein, 262 aa, Homo Sapiens
MWFLVLCLALSLGGTGAAPPIQSRIVGGWECEQHSQPWQAALYHFSTFQCGGILVHRQWVLTAAHCISDNYQLWLGRHNLFDDENTAQFVHVSESFPHPGFNMSLLENHTRQADEDYSHDLMLLRLTEPADTITDAVKVVELPTEEPEVGSTCLASGWGSIEPENFSFPDDLQCVDLKILPNDECKKAHVQKVTDFMLCVGHLEGGKDTCVGDSGGPLMCDGVLQGVTSWGYVPCGTPNKPSVAVRVLSYVKWIEDTIAENS

SEQ ID NO: 7491 - protein, 143 aa, Homo Sapiens
MRAPHLHLSAASGARALAKLLPLLMAQLWAAEAALLPQNDTRLDPEAYGSPCARGSQPWQVSLFNGLSFHCAGVLVDQSWVLTAAHCGNKPLWARVGDDHLLLLQGEQLRRTTRSVVHPKYHQGSGPILPRRTDEHDLMLLKL

SEQ ID NO: 7492 - protein, 276 aa, Homo Sapiens
MRAPHLHLSAASGARALAKLLPLLMAQLWAAEAALLPQNDTRLDPEAYGSPCARGSQPWQVSLFNGLSFHCAGVLVDQSWVLTAAHCGNKPLWARVGDDHLLLLQGEQLRRTTRSVVHPKYHQGSGPILPRRTDEHDLMLLKLARPVVLGPRVRALQLPYRCAQPGDQCQVAGWGTTAARRVKYNKGLTCSSITILSPKECEVFYPGVVTNNMICAGLDRGQDPCQSDSGGPLVCDETLQGILSWGVYPCGSAQHPAVYTQICKYMSWINKVIRSN

SEQ ID NO: 7493 - protein, 276 aa, Homo Sapiens; identical to SEQ ID NO: 7492

SEQ ID NO: 7494 - protein, 276 aa, Homo Sapiens; identical to SEQ ID NO: 7492

SEQ ID NO: 7495 - protein, 43 aa, Homo Sapiens
MTTCCFFRESSSAGPLALLSIPSTTRAQAPSCQGERMSTISCC

SEQ ID NO: 7496 - protein, 282 aa, Homo Sapiens
MQRLRWLRDWKSSGRGLTAAKEPGARSSPLQAMRILQLILLALATGLVGGETRIIKGFECKPHSQPWQAALFEKTRLLCGATLIAPRWLLTAAHCLKPRYIVHLGQHNLQKEEGCEQTRTATESFPHPGFNNSLPNKDHRNDIMLVKMASPVSITWAVRPLTLSSRCVTAGTSCLISGWGSTSSPQLRLPHTLRCANITIIEHQKCENAYPGNITDTMVCASVQEGGKDSCQGDSGGPLVCNQSLQGIISWGQDPCAITRKPGVYTKVCKYVDWIQETMKNN

SEQ ID NO: 7497 - protein, 116 aa, Homo Sapiens
MQRLRWLRDWKSSGRGLTAAKEPGARSSPLQAMRILQLILLALATGLVGGETRIIKGFECKPHSQPWQAALFEKTRLLCGATLIAPRWLLTAAHCLKPWPLHSSPGAAQPPEGGGL

SEQ ID NO: 7498 - protein, 68 aa, Homo Sapiens
MRILQLILLALATGLVGGETRIIKGFECKPHSQPWQAALFEKTRLLCGATLIAPRWLLTAAHCLKPRY

SEQ ID NO: 7499 - protein, 170 aa, Homo Sapiens
MRILQLILLALATGLVGGETRIIKGFECKPHSQPWQAALFEKTRLLCGATLIAPRWLLTAAHCLKPRYIVHLGQHNLQKEEGCEQTRTATESFPHPGFNNSLPNKDHRNDIMLVKMASPVSITWAVRPLTLSSRCVTAGTSCLISGWGSTSSPQLRLPHTLRCANITIIE

SEQ ID NO: 7500 - protein, 250 aa, Homo Sapiens
MRILQLILLALATGLVGGETRIIKGFECKPHSQPWQAALFEKTRLLCGATLIAPRWLLTAAHCLKPRYIVHLGQHNLQKEEGCEQTRTATESFPHPGFNNSLPNKDHRNDIMLVKMASPVSITWAVRPLTLSSRCVTAGTSCLISGWGSTSSPQLRLPHTLRCANITIIEHQKCENAYPGNITDTMVCASVQEGGKDSCQGDSGGPLVCNQSLQGIISWGQDPCAITRKPGVYTKVCKYVDWIQETMKNN

SEQ ID NO: 7501 - protein, 250 aa, Homo Sapiens; identical to SEQ ID NO: 7500

SEQ ID NO: 7502 - protein, 275 aa, Homo Sapiens
MRILQLILLALATGLVGGETRIIKGFECKPHSQPWQAALFEKTRLLCGATLIAPRWLLTAAHCLKPWVSLTSPTHVSPDLSSSNYCLSHLSRYIVHLGQHNLQKEEGCEQTRTATESFPHPGFNNSLPNKDHRNDIMLVKMASPVSITWAVRPLTLSSRCVTAGTSCLISGWGSTSSPQLRLPHTLRCANITIIEHQKCENAYPGNITDTMVCASVQEGGKDSCQGDSGGPLVCNQSLQGIISWGQDPCAITRKPGVYTKVCKYVDWIQETMKNN

SEQ ID NO: 7503 - protein, 109 aa, Homo Sapiens
MRILQLILLALATVRLPHTLRCANITIIEHQKCENAYPGNITDTMVCASVQEGGKDSCQGDSGGPLVCNQSLQGIISWGQDPCAITRKPGVYTKVCKYVDWIQETMKNN

SEQ ID NO: 7504 - protein, 141 aa, Homo Sapiens
  misc_feature (1)..(1): Xaa can be any naturally occurring amino acid
XNSLPNKDHRNDIMLVKMASPVSITWAVRPLTLSSRCVTAGTSCLISGWGSTSSPQLRLPHTLRCANITIIEHQKCENAYPGNITDTMVCASVQEGGKDSCQSLQGIISWGQDPCAITRKPGVYTKVCKYVDWIQETMKNN

SEQ ID NO: 7505 - protein, 79 aa, Homo Sapiens
MGLSIFLLLCVLGEFSRSRERAGLRLDPFTPMRRPHHPPHLSSGPQPGGEEERGFLCASIYLQLSGAQPGSHTEDFQWH

SEQ ID NO: 7506 - protein, 79 aa, Homo Sapiens; identical to SEQ ID NO: 7505

SEQ ID NO: 7507 - protein, 111 aa, Homo Sapiens
MGLSIFLLLCVLGLSQAATPKIFNGTECGRNSQPWQVGLFEGTSLRCGGVLIDHRWVLTAAHCSGRPIPGSAPVPQPLHRLPCHLPWCVSRENHEQHGVCRRRPGAGCLPG

SEQ ID NO: 7508 - protein, 248 aa, Homo Sapiens
MGLSIFLLLCVLGLSQAATPKIFNGTECGRNSQPWQVGLFEGTSLRCGGVLIDHRWVLTAAHCSGSRYWVRLGEHSLSQLDWTEQIRHSGFSVTHPGYLGASTSHEHDLRLLRLRLPVRVTSSVQPLPLPNDCATAGTECHVSGWGITNHPRNPFPDLLQCLNLSIVSHATCHGVYPGRITSNMVCAGGVPGQDACQGDSGGPLVCGGVLQGLVSWGSVGPCGQDGIPGVYTYICKYVDWIRMIMRNN

SEQ ID NO: 7509 - protein, 248 aa, Homo Sapiens; identical to SEQ ID NO: 7508

SEQ ID NO: 7510 - protein, 254 aa, Homo Sapiens
MGLSIFLLLCVLGLSQAATPKIFNGTECGRNSQPWQVGLFEGTSLRCGGVLIDHRWVLTAAHCSGSRYWVRLGEHSLSQLDWTEQIRHSGFSVTHPGYLGASTSHEHDLRLLRLRLPVRVTSSVQPLPLPNDCATAGTECHVSGWGITNHPRNPFPDLLQCLNLSIVSHATCHGVYPGRITSNMVCAGGVPGQDACQGDSGGPLVCGGVLQGLVSWGSVGPCGQDGIPGVYTYICNSTLVGLGTSWNFNSCQPF

SEQ ID NO: 7511 - protein, 177 aa, Homo Sapiens
MGLSIFLLLCVLGLSQAATPKIFNGTECGRNSQPWQVGLFEGTSLRCGGVLIDHRWVLTAAHCSGSRYWVRLGEHSLSQLDWTEQIRHSGFSVTHPGYLGASTSHEHDLRLLRLRLPVRVTSSVQPLPLPNDCATAGTECHVSGWGITNHPRSKGPRARGQGSGWVQVWDAGREVES

SEQ ID NO: 7512 - protein, 98 aa, Homo Sapiens
MGLIYKCLPEKVTVNIETRCLPGVFQGSQHQWDQWVSPRWLHLLPPLSALAGCPTSARAATLWGSPGPPQMGPHCRTLSKGGAQSLPRQARPRACGSW

SEQ ID NO: 7513 - protein, 98 aa, Homo Sapiens; identical to SEQ ID NO: 7512

SEQ ID NO: 7514 - protein, 93 aa, Homo Sapiens
MWPLALVIASLTLALSGGEDFKEPSQGPRDVMAASRPEAFPKGLTLEPRPEKGGICGCLAPGTILGLKVGWLFSSGDTPWIHARATPECHTLG

SEQ ID NO: 7515 - protein, 93 aa, Homo Sapiens; identical to SEQ ID NO: 7514

SEQ ID NO: 7516 - protein, 99 aa, Homo Sapiens
MWPLALVIASLTLALSGGVSQESSKVLNTNGTSGFLPGGYTCFPHSQPWQAALLVQGRLLCGGVLVHPKWVLTAAHCLKEGLKVYLGKHALGRVEAGEQ

SEQ ID NO: 7517 - protein, 180 aa, Homo Sapiens
MWPLALVIASLTLALSGGVSQESSKVLNTNGTSGFLPGGYTCFPHSQPWQAALLVQGRLLCGGVLVHPKWVLTAAHCLKEGLKVYLGKHALGRVEAGEQVREVVHSIPHPEYRRSPTHLNHDHDIMLLELQSPVQLTGYIQTLPLSHNNRLTPGTTCRVSGWGTTTSPQGMHPHRWPEAP

SEQ ID NO: 7518 - protein, 277 aa, Homo Sapiens
MWPLALVIASLTLALSGGVSQESSKVLNTNGTSGFLPGGYTCFPHSQPWQAALLVQGRLLCGGVLVHPKWVLTAAHCLKEGLKVYLGKHALGRVEAGEQVREVVHSIPHPEYRRSPTHLNHDHDIMLLELQSPVQLTGYIQTLPLSHNNRLTPGTTCRVSGWGTTTSPQVNYPKTLQCANIQLRSDEECRQVYPGKITDNMLCAGTKEGGKDSCEGDSGGPLVCNRTLYGIVSWGDFPCGQPDRPGVYTRVSRYVLWIRETIRKYETQQQKWLKGPQ

SEQ ID NO: 7519 - protein, 204 aa, Homo Sapiens
MWPLALVIASLTLALSGGVSQESSKVLNTNGTSGFLPGGYTCFPHSQPWQAALLVQGRLLCGGVLVHPKWVLTAAHCLKEGLKVYLGKHALGRVEAVNYPKTLQCANIQLRSDEECRQVYPGKITDNMLCAGTKEGGKDSCEGDSGGPLVCNRTLYGIVSWGDFPCGQPDRPGVYTRVSRYVLWIRETIRKYETQQQKWLKGPQ

SEQ ID NO: 7520 - protein, 125 aa, Homo Sapiens
MWPLALVIASLTLALSGVNYPKTLQCANIQLRSDEECRQVYPGKITDNMLCAGTKEGGKDSCEGDSGGPLVCNRTLYGIVSWGDFPCGQPDRPGVYTRVSRYVLWIRETIRKYETQQQKWLKGPQ

SEQ ID NO: 7521 - protein, 267 aa, Homo Sapiens
MSLRVLGSGTWPSAPKMFLLLTALQVLAIAMTQSQEDENKIIGGHTCTRSSQPWQAALLAGPRRRFLCGGALLSGQWVITAAHCGRPILQVALGKHNLRRWEATQQVLRVVRQVTHPNYNSRTHDNDLMLLQLQQPARIGRAVRPIEVTQACASPGTSCRVSGWGTISSPIARYPASLQCVNINISPDEVCQKAYPRTITPGMVCAGVPQGGKDSCQGDSGGPLVCRGQLQGLVSWGMERCALPGYPGVYTNLCKYRSWIEETMRDK

SEQ ID NO: 7522 - protein, 267 aa, Homo Sapiens; identical to SEQ ID NO: 7521

SEQ ID NO: 7523 - protein, 43 aa, Homo Sapiens
MRVRLGEHNLRKRDGPEQLRTTSRVIPHPRYEARSHRNDIMLL

SEQ ID NO: 7524 - protein, 256 aa, Homo Sapiens
MWLLLTLSFLLASTAAQDGDKLLEGDECAPHSQPWQVALYERGRFNCGASLISPHWVLSAAHCQSRFMRVRLGEHNLRKRDGPEQLRTTSRVIPHPRYEARSHRNDIMLLRLVQPARLNPQVRPAVLPTRCPHPGEACVVSGWGLVSHNEPGTAGSPRSQVSLPDTLHCANISIISDTSCDKSYPGRLTNTMVCAGAEGRGAESCEGDSGGPLVCGGILQGIVSWGDVPCDNTTKPGVYTKVCHYLEWIRETMKRN

SEQ ID NO: 7525 - protein, 120 aa, Homo Sapiens
MWLLLTLSFLLASTAQDGDKLLEGDECAPHSQPWQVALYERGRFNCGASLISPHWVLSAAHCQSRFMRVRLGEHNLRKRDGPEQLRTTSRVIPHPRYEARSHRNDIMLLRLVQPARLNPQ

SEQ ID NO: 7526 - protein, 160 aa, Homo Sapiens
MWLLLTLSFLLASTAQDGDKLLEGDECAPHSQPWQVALYERGRFNCGASLISPHWVLSAAHCQSRFMRVRLGEHNLRKRDGPEQLRTTSRVIPHPRYEARSHRNDIMLLRLVQPARLNPQVRPAVLPTRCPHPGEACVVSGWGLVSHNEPGTAGSPRSQG

SEQ ID NO: 7527 - protein, 255 aa, Homo Sapiens
MWLLLTLSFLLASTAQDGDKLLEGDECAPHSQPWQVALYERGRFNCGASLISPHWVLSAAHCQSRFMRVRLGEHNLRKRDGPEQLRTTSRVIPHPRYEARSHRNDIMLLRLVQPARLNPQVRPAVLPTRCPHPGEACVVSGWGLVSHNEPGTAGSPRSQVSLPDTLHCANISIISDTSCDKSYPGRLTNTMVCAGAEGRGAESCEGDSGGPLVCGGILQGIVSWGDVPCDNTTKPGVYTKVCHYLEWIRETMKRN

SEQ ID NO: 7528 - protein, 23 aa, Homo Sapiens
MSLLKHQSLRPDEDSSHDLMLLR

SEQ ID NO: 7529 - protein, 44 aa, Homo Sapiens
MSLLKHQSLRPDEDSSHDLMLLRLSEPAKITDVVKVLGLPTQEP

SEQ ID NO: 7530 - protein, 159 aa, Homo Sapiens
MSLLKHQSLRPDEDSSHDLMLLRLSEPAKITDVVKVLGLPTQEPALGTTCYASGWGSIEPEEFLRPRSLQCVSLHLLSNDMCARAYSEKVTEFMLCAGLWTGGKDTCGGDSGGPLVCNGVLQGITSWGPEPCALPEKPAVYTKVVHYRKWIKDTIAANP

SEQ ID NO: 7531 - protein, 69 aa, Homo Sapiens
MWDLVLSIALSVGCTGAVPLIQSRIVGGWECEKHSQPWQVAVYSHGWAHCGGVLVHPQWVLTAAHCLKK

SEQ ID NO: 7532 - protein, 122 aa, Homo Sapiens
MWDLVLSIALSVGCTGAVPLIQSRIVGGWECEKHSQPWQVAVYSHGWAHCGGVLVHPQWVLTAAHCLKKACQDHRCCEGPGPAHPGASTGDHLLRLRLGQHRTRGVLAPQESSVCEPPSPVQ

SEQ ID NO: 7533 - protein, 164 aa, Homo Sapiens
MWDLVLSIALSVGCTGAVPLIQSRIVGGWECEKHSQPWQVAVYSHGWAHCGGVLVHPQWVLTAAHCLKKNSQVWLGRHNLFEPEDTGQRVPVSHSFPHPLYNMSLLKHQSLRPDEDSSHDLMLLRLSEPAKITDVVKVLGLPTQEPALGTTCYASGWGSIEPEE

SEQ ID NO: 7534 - protein, 261 aa, Homo Sapiens
MWDLVLSIALSVGCTGAVPLIQSRIVGGWECEKHSQPWQVAVYSHGWAHCGGVLVHPQWVLTAAHCLKKNSQVWLGRHNLFEPEDTGQRVPVSHSFPHPLYNMSLLKHQSLRPDEDSSHDLMLLRLSEPAKITDVVKVLGLPTQEPALGTTCYASGWGSIEPEEFLRPRSLQCVSLHLLSNDMCARAYSEKVTEFMLCAGLWTGGKDTCGGDSGGPLVCNGVLQGITSWGPEPCALPEKPAVYTKVVHYRKWIKDTIAANP

SEQ ID NO: 7535 - protein, 223 aa, Homo Sapiens
MWDLVLSIALSVGCTGAVPLIQSRIVGGWECEKHSQPWQVAVYSHGWAHCGGVLVHPQWVLTAAHCLKKNSQVWLGRHNLFEPEDTGQRVPVSHSFPHPLYNMSLLKHQSLRPDEDSSHDLMLLRLSEPAKITDVVKVLGLPTQEPALGTTCYASGWGSIEPEEFLRPRSLQCVSLHLLSNDMCARAYSEKVTEFMLCAGLWTGGKDTCGVSHPYSQHLEGKG

SEQ ID NO: 7536 - protein, 49 aa, Homo Sapiens
MWDLVLSIALSVGCTGIARSGWVGTTCLSLKTQARGSLSATASHTRSTI

SEQ ID NO: 7537 - protein, 49 aa, Homo Sapiens; identical to SEQ ID NO: 7536

SEQ ID NO: 7538 - protein, 49 aa, Homo Sapiens; identical to SEQ ID NO: 7536

SEQ ID NO: 7539 - protein, 51 aa, Homo Sapiens
  misc_feature (1)..(1): Xaa can be any naturally occurring amino acid
XEKVTEFMLCAGLWTGGKDTCGHNSPIPVLSTCLLGTCYVTSIAVDPGKQQ

SEQ ID NO: 7540 - protein, 184 aa, Homo Sapiens
  misc_feature (1)..(1): Xaa can be any naturally occurring amino acid
XPDEDSSHDLMLLRLSEPAKITDVVKVLGLPTQEPALGTTCYASGWGSIEPEEFLRPRSLQCVSLHLLSNDMCARAYSEKVTEFMLCAGLWTGGKDTCGESGAVDGAGQKKDRAWLRVILGVHLSVMVCFKVSHHGALSHVPCLKSLLCTPRWCITGSGSRTPSQPTPECPCPTPTSSKFKSTS

SEQ ID NO: 7541 - protein, 172 aa, Homo Sapiens
MWVPVVFLTLAVCGGVLVHPQWVLTAAHCIRNKSVILLGRHSLFHPEDTGQVFQVSHSFPHPLYDMSLLKNRFLRPGDDSSHDLMLLRLSEPAELTDAVKVMDLPTQEPALGTTCYASGWGSIEPEEFLTPKKLQCVDLHVISNDVCAQVHPQKVTKFMLCAGRWTGGKSTC

SEQ ID NO: 7542 - protein, 173 aa, Homo Sapiens [sequence omitted]

SEQ ID NO: 7543 - protein, 218 aa, Homo Sapiens
MWVPVVFLTLSVTWIGAAPLILSRIVGGWECEKHSQPWQVLVASRGRAVCGGVLVHPQWVLTAAHCIRKPGDDSSHDLMLLRLSEPAELTDAVKVMDLPTQEPALGTTCYASGWGSIEPEEFLTPKKLQCVDLHVISNDVCAQVHPQKVTKFMLCAGRWTGGKSTCSGDSGGPLVCNGVLQGITSWGSEPCALPERPSLYTKVVHYRKWIKDTIVANP

SEQ ID NO: 7544 - protein, 195 aa, Homo Sapiens
MWVPVVFLTLSVTWIGAAPLILSRIVGGWECEKHSQPWQVLVASRGRAVCGGVLVHPQWVLTAAHCIRKPGDDSSHDLMLLRLSEPAELTDAVKVMDLPTQEPALGTTCYASGWGSIEPEEFLTPKKLQCVDLHVISNDVCAQVHPQKVTKFMLCAGRWTGGKSTCSWVILITELTMPALPMVLHGSLVPWRGGV

SEQ ID NO: 7545 - protein, 90 aa, Homo Sapiens
MWVPVVFLTLSVTWIGAAPLILSRIVGGWECEKHSQPWQVLVASRGRAVCGGVLVHPQWVLTAAHCIRNKSVILLGRHSLFHPEDTGQAR

SEQ ID NO: 7546 - protein, 261 aa, Homo Sapiens
MWVPVVFLTLSVTWIGAAPLILSRIVGGWECEKHSQPWQVLVASRGRAVCGGVLVHPQWVLTAAHCIRNKSVILLGRHSLFHPEDTGQVFQVSHSFPHPLYDMSLLKNRFLRPGDDSSHDLMLLRLSEPAELTDAVKVMDLPTQEPALGTTCYASGWGSIEPEEFLTPKKLQCVDLHVISNDVCAQVHPQKVTKFMLCAGRWTGGKSTCSGDSGGPLVCNGVLQGITSWGSEPCALPERPSLYTKVVHYRKWIKDTIVANP

SEQ ID NO: 7547 - protein, 227 aa, Homo Sapiens
MWVPVVFLTLSVTWIGAAPLILSRIVGGWECEKHSQPWQVLVASRGRAVCGGVLVHPQWVLTAAHCIRNKSVILLGRHSLFHPEDTGQVFQVSHSFPHPLYDMSLLKNRFLRPGDDSSHDLMLLRLSEPAELTDAVKVMDLPTQEPALGTTCYASGWGSIEPEEFLTPKKLQCVDLHVISNDVCAQVHPQKVTKFMLCAGRWTGGKSTCSVSHPYSQDLEGKGEWGP

SEQ ID NO: 7548 - protein, 238 aa, Homo Sapiens
MWVPVVFLTLSVTWIGAAPLILSRIVGGWECEKHSQPWQVLVASRGRAVCGGVLVHPQWVLTAAHCIRNKSVILLGRHSLFHPEDTGQVFQVSHSFPHPLYDMSLLKNRFLRPGDDSSHDLMLLRLSEPAELTDAVKVMDLPTQEPALGTTCYASGWGSIEPEEFLTPKKLQCVDLHVISNDVCAQVHPQKVTKFMLCAGRWTGGKSTCSWVILITELTMPALPMVLHGSLVPWRGGV

SEQ ID NO: 7549 - protein, 220 aa, Homo Sapiens
MWVPVVFLTLSVTWIGAAPLILSRIVGGWECEKHSQPWQVLVASRGRAVCGGVLVHPQWVLTAAHCIRNKSVILLGRHSLFHPEDTGQVFQVSHSFPHPLYDMSLLKNRFLRPGDDSSIEPEEFLTPKKLQCVDLHVISNDVCAQVHPQKVTKFMLCAGRWTGGKSTCSGDSGGPLVCNGVLQGITSWGSEPCALPERPSLYTKVVHYRKWIKDTIVANP

SEQ ID NO: 7550 - protein, 124 aa, Homo Sapiens
MWVPVVFLTLSVTWIGAAPLILSRIVGGWECEKHSQPWQVLVASRGRAVCGGVLVHPQWVLTAAHCIRNKSVILLGRHSLFHPEDTGQVFQVSHSFPHPLYDMSLLKNRFLRPGDDSTLNQRSS

SEQ ID NO: 7551 - protein, 104 aa, Homo Sapiens
MWVPVVFLTLSVTWIGERGHGWGDAGEGASPDCQAEALSPPTQHPSPDRELGSFLSLPAPLQAHTPSPSILQQSSLPHQVPAPSHLPQNFLPIAQPAPCSQLLY

SEQ ID NO: 7552 - protein, 262 aa, Homo Sapiens
  misc_feature (1)..(1): Xaa can be any naturally occurring amino acid
XFLTLSVTWIGAAPLILSRIVGGWECEKHSQPWQVLVASRGRAVCGGVLVHPQWVLTAAHCIRNKSVILLGRHSLFHPEDTGQVFQVSHSFPHPLYDMSLLKNRFLRPGDDSSHDLMLLRLSEPAELTDAVKVMDLPTQEPALGTTCYASGWGSIEPEECTPGPDVLTPKKLQCVDLHVISNDVCAQVHPQKVTKFMLCAGRWTGGKSTCSGDSGGPLVCNGVLQGITSWGSEPCALPERPSLYTKVVHYRKWIKDTIVANP

SEQ ID NO: 7553 - protein, 75 aa, Homo Sapiens
MATAGNPWGWFLGYLILGVAGSLVSGSCSQIINGEDCSPHSQPWQAALVMENELFCSGVLVHPQWVLSAAHCFQK

SEQ ID NO: 7554 - protein, 254 aa, Homo Sapiens
MATAGNPWGWFLGYLILGVAGSLVSGSCSQIINGEDCSPHSQPWQAALVMENELFCSGVLVHPQWVLSAAHCFQNSYTIGLGLHSLEADQEPGSQMVEASLSVRHPEYNRPLLANDLMLIKLDESVSESDTIRSISIASQCPTAGNSCLVSGWGLLANGRMPTVLQCVNVSVVSEEVCSKLYDPLYHPSMFCAGGGQDQKDSCNGDSGGPLICNGYLQGLVSFGKAPCGQVGVPGVYTNLCKFTEWIEKTVQAS

SEQ ID NO: 7555 - protein, 110 aa, Homo Sapiens
MENELFCSGVLVHPQWVLSAAHCFQNSYTIGLGLHSLEADQEPGSQMVEASLSVRHPEYNRPLLANDLMLIKLDESVSESDTIRSISIASQCPTAGNSCLVSGWGLLANG

SEQ ID NO: 7556 - protein, 71 aa, Homo Sapiens
MVEASLSVRHPEYNRPLLANDLMLIKLDESVSESDTIRSISIASQCPTAGNSCLVSGWGLLANECLPCCSA

SEQ ID NO: 7557 - protein, 71 aa, Homo Sapiens; identical to SEQ ID NO: 7556

SEQ ID NO: 7558 - protein, 205 aa, Homo Sapiens
MATARPPWMWVLCALITALLLGVTEHVLANNDVSCDHPSNTVPSGSNQDLGAGAGEDARSDDSSSRIINGSDCDMHTQPWQAALLLRPNQLYCGAVLVHPQWLLTAAHCRKKVFRVRLGHYSLSPVYESGQQMFQGVKSIPHPGYSHPGHSNDLMLIKLNRRIRPTKDVRPINVSSHCPSAGTKCLVSGWGTTKSPQVHFPKVLQ

SEQ ID NO: 7559 - protein, 293 aa, Homo Sapiens
MATARPPWMWVLCALITALLLGVTEHVLANNDVSCDHPSNTVPSGSNQDLGAGAGEDARSDDSSSRIINGSDCDMHTQPWQAALLLRPNQLYCGAVLVHPQWLLTAAHCRKKVFRVRLGHYSLSPVYESGQQMFQGVKSIPHPGYSHPGHSNDLMLIKLNRRIRPTKDVRPINVSSHCPSAGTKCLVSGWGTTKSPQVHFPKVLQCLNISVLSQKRCEDAYPRQIDDTMFCAGDKAGRDSCQGDSGGPVVCNGSLQGLVSWGDYPCARPNRPGVYTNLCKFTKWIQETIQANS

SEQ ID NO: 7560 - protein, 293 aa, Homo Sapiens; identical to SEQ ID NO: 7559

SEQ ID NO: 7561 - protein, 293 aa, Homo Sapiens; identical to SEQ ID NO: 7559

SEQ ID NO: 7562 - protein, 69 aa, Homo Sapiens
MADPATRHLTPTKLPSTPRATCSVVGSLSIHCGSSQLPTAKNRIFRSSWGSITFGKGRVPRSRVLLSGL

SEQ ID NO: 7563 - protein, 244 aa, Homo Sapiens
MKKLMVVLSLIAAAWAEEQNKLVHGGPCDKTSHPYQAALYTSGHLLCGGVLIHPLWVLTAAHCKKPNLQVFLGKHNLRQRESSQEQSSVVRAVIHPDYDAASHDQDIMLLRLARPAKLSELIQPLPLERDCSANTTSCHILGWGKTADGDFPDTIQCAYIHLVSREECEHAYPGQITQNMLCAGDEKYGKDSCQGDSGGPLVCGDHLRGLVSWGNIPCGSKEKPGVYTNVCRYTNWIQKTIQAK

SEQ ID NO: 7564 - protein, 244 aa, Homo Sapiens; identical to SEQ ID NO: 7563

SEQ ID NO: 7565 - protein, 244 aa, Homo Sapiens; identical to SEQ ID NO: 7563

SEQ ID NO: 7566 - protein, 40 aa, Homo Sapiens
MKKLMVVLSLIAAGIFRSSWGSITFGKGRVPRSRVLLSGL

SEQ ID NO: 7567 - protein, 40 aa, Homo Sapiens; identical to SEQ ID NO: 7566

SEQ ID NO: 7568 - protein, 137 aa, Homo Sapiens
MLLRLARPAKLSELIQPLPLERDCSANTTSCHILGWGKTADGDFPDTIQCAYIHLVSREECEHAYPGQITQNMLCAGDEKYGKDSCQGDSGGPLVCGDHLRGLVSWGNIPCGSKEKPGVYTNVCRYTNWIQKTIQAK

SEQ ID NO: 7569 - protein, 253 aa, Homo Sapiens
MARSLLLPLQILLLSLALETAGEEAQGDKIIDGAPCARGSHPWQVALLSGNQLHCGGVLVNERWVLTAAHCKMNEYTVHLGSDTLGDRRAQRIKASKSFRHPGYSTQTHVNDLMLVKLNSQARLSSMVKKVRLPSRCEPPGTTCTVSGWGTTTSPDVTFPSDLMCVDVKLISPQDCTKVYKDLLENSMLCAGIPDSKKNACNGDSGGPLVCRGTLQGLVSWGTFPCGQPNDPGVYTQVCKFTKWINDTMKKHR

SEQ ID NO: 7570 - protein, 253 aa, Homo Sapiens; identical to SEQ ID NO: 7569

SEQ ID NO: 7571 - protein, 66 aa, Homo Sapiens
MARSLLLPLQILLLSLALETAGEEVSTPCTWAVIRWATGELRGSRPRSHSATPATPHRPMLMTSCS

SEQ ID NO: 7572 - protein, 69 aa, Homo Sapiens
MNEYTVHLGSDTLGDRRAQRIKASKSFRHPGYSTQTHVNDLMLVKLNSQARLSSMVKKVRLPSRCEPPG

SEQ ID NO: 7573 - protein, 181 aa, Homo Sapiens
MNEYTVHLGSDTLGDRRAQRIKASKSFRHPGYSTQTHVNDLMLVKLNSQARLSSMVKKVRLPSRCEPPGTTCTVSGWGTTTSPDVTFPSDLMCVDVKLISPQDCTKVYKDLLENSMLCAGIPDSKKNACNGDSGGPLVCRGTLQGLVSWGTFPCGQPNDPGVYTQVCKFTKWINDTMKKHR

SEQ ID NO: 7574 - protein, 305 aa, Homo Sapiens
MGRPRPRAAKTWMFLLLLGGAWAACGSLDLLTKLYAENLPCVHLNPQWPSQPSHCPRGWRSNPLPPAAGHSRAQEDKVLGGHECQPHSQPWQAALFQGQQLLCGGVLVGGNWVLTAAHCKKPKYTVRLGDHSLQNKDGPEQEIPVVQSIPHPCYNSSDVEDHNHDLMLLQLRDQASLGSKVKPISLADHCTQPGQKCTVSGWGTVTSPRENFPDTLNCAEVKIFPQKKCEDAYPGQITDGMVCAGSSKGADTCQGDSGGPLVCDGALQGITSWGSDPCGRSDKPGVYTNICRYLDWIKKIIGSKG

SEQ ID NO: 7575 - protein, 119 aa, Homo Sapiens
MGRPRPRAAKTWMFLLLLGGAWAENFPDTLNCAEVKIFPQKKCEDAYPGQITDGMVCAGSSKGADTCQGDSGGPLVCDGALQGITSWGSDPCGRSDKPGVYTNICRYLDWIKKIIGSKG

SEQ ID NO: 7576 - protein, 97 aa, Homo Sapiens
MGRPRPRAAKTWMFLLLLGGAWAGHSRAQEDKVLGGHECQPHSQPWQAALFQGQQLLCGGVLVGGNWVLTAAHCKKPKYTVRLGDHSLQNKDGPEQE

SEQ ID NO: 7577 - protein, 260 aa, Homo Sapiens
MGRPRPRAAKTWMFLLLLGGAWAGHSRAQEDKVLGGHECQPHSQPWQAALFQGQQLLCGGVLVGGNWVLTAAHCKKPKYTVRLGDHSLQNKDGPEQEIPVVQSIPHPCYNSSDVEDHNHDLMLLQLRDQASLGSKVKPISLADHCTQPGQKCTVSGWGTVTSPRENFPDTLNCAEVKIFPQKKCEDAYPGQITDGMVCAGSSKGADTCQGDSGGPLVCDGALQGITSWGSDPCGRSDKPGVYTNICRYLDWIKKIIGSKG

SEQ ID NO: 7578 - protein, 32 aa, Homo Sapiens
MGRPRPRAAKTWMFLLLLGGAWAGRFWRPPGV

SEQ ID NO: 7579 - protein, 32 aa, Homo Sapiens; identical to SEQ ID NO: 7578

SEQ ID NO: 7580 - protein, 139 aa, Homo Sapiens
MLLQLRDQASLGSKVKPISLADHCTQPGQKCTVSGWGTVTSPRENFPDTLNCAEVKIFPQKKCEDAYPGQITDGMVCAGSSKGADTCQGDSGGPLVCDGALQGITSWGSDPCGRSDKPGVYTNICRYLDWIKKIIGSKG

SEQ ID NO: 7581 - protein, 54 aa, Homo Sapiens
  misc_feature (1)..(1): Xaa can be any naturally occurring amino acid
XLLLLGGAWAGNTQYAWETTAYRIKMAQSKKYLWFSPSHTPATTAAMWRTTTMI

SEQ ID NO: 7582 - protein, 250 aa, Homo Sapiens
MKLGLLCALLSLLAGHGWADTRAIGAEECRPNSQPWQAGLFHLTRLFCGATLISDRWLLTAAHCRKPYLWVRLGEHHLWKWEGPEQLFRVTDFFPHPGFNKDLSANDHNDDIMLIRLPRQARLSPAVQPLNLSQTCVSPGMQCLISGWGAVSSPKALFPVTLQCANISILENKLCHWAYPGHISDSMLCAGLWEGGRGSCQGDSGGPLVCNGTLAGVVSGGAEPCSRPRRPAVYTSVCHYLDWIQEIMEN

SEQ ID NO: 7583 - protein, 61 aa, Homo Sapiens
MKLGLLCALLSLLAGICGSALESTTSGNGRVRSSCSGLRTSSPTLASTRTSAPMTTMMTSC

SEQ ID NO: 7584 - protein, 148 aa, Homo Sapiens
MILFKQATYFISLFATVSCGCLTQLYENAFFRGGDVASMYTPNAQYCQMRCTFHPRCLLFSFLPASSINDMEKRFGCFLKDSVTGTLPKVHRTGAVSGHSLKQCGHQISACHRDIYKGVDMRGVNFNVSKVSSVEECQKRCTSNIRCQ

SEQ ID NO: 7585 - protein, 638 aa, Homo Sapiens
MILFKQATYFISLFATVSCGCLTQLYENAFFRGGDVASMYTPNAQYCQMRCTFHPRCLLFSFLPASSINDMEKRFGCFLKDSVTGTLPKVHRTGAVSGHSLKQCGHQISACHRDIYKGVDMRGVNFNVSKVSSVEECQKRCTSNIRCQFFSYATQTFHKAEYRNNCLLKYSPGGTPTAIKVLSNVESGFSLKPCALSEIGCHMNIFQHLAFSDVDVARVLTPDAFVCRTICTYHPNCLFFTFYTNVWKIESQRNVCLLKTSESGTPSSSTPQENTISGYSLLTCKRTLPEPCHSKIYPGVDFGGEELNVTFVKGVNVCQETCTKMIRCQFFTYSLLPEDCKEEKCKCFLRLSMDGSPTRIAYGTQGSSGYSLRLCNTGDNSVCTTKTSTRIVGGTNSSWGEWPWQVSLQVKLTAQRHLCGGSLIGHQWVLTAAHCFDGLPLQDVWRIYSGILNLSDITKDTPFSQIKEIIIHQNYKVSEGNHDIALIKLQAPLNYTEFQKPICLPSKGDTSTIYTNCWVTGWGFSKEKGEIQNILQKVNIPLVTNEECQKRYQDYKITQRMVCAGYKEGGKDACKGDSGGPLVCKHNGMWRLVGITSWGEGCARREQPGVYTKVAEYMDWILEKTQSSDGKAQMQSPA

SEQ ID NO: 7586 - protein, 141 aa, Homo Sapiens
MYTPNAQYCQMRCTFHPRCLLFSFLPASSINDMEKRFGCFLKDSVTGTLPKVHRTGAVSGHSLKQCGHQISACHRDIYKGVDMRGVNFNVSKVSSVEECQKRCTSNIRCQFFSYATQTFHKAEYRNNCLLKYSPGGTPTAI

SEQ ID NO: 7587 - protein, 514 aa, Homo Sapiens
MYTPNAQYCQMRCTFHPRCLLFSFLPASSINDMEKRFGCFLKDSVTGTLPKVHRTGAVSGHSLKQCGHQISACHRDIYKGVDMRGVNFNVSKVSSVEECQKRCTSNIRCQFFSYATQTFHKAEYRNNCLLKYSPGGTPTAIKVLSNVESGFSLKPCALSEIGCHMNIFQHLAFSDVDVARVLTPDAFVCRTICTYHPNCLFFTFYTNVWKIESQRNVCLLKTSESGTPSSSTPQENTISGYSLLTCKRTLPEPCHSKIYPGVDFGGEELNVTFVKGVNVCQETCTKMIRCQFFTYSLLPEDCKEEKCKCFLRLSMDGSPTRIAYGTQGSSGYSLRLCNTGDNSVCTTKTSTRIVGGTNSSWGEWPWQVSLQVKLTAQRHLCGGSLIGHQWVLTAAHCFDGLPLQDVWRIYSGILNLSDITKDTPFSQIKEIIIHQNYKVSEGNHDIALIKLQAPLNYTEFQKPICLPSKGDTSTIYTNCWVTGWGFSKEKGRFRWSLSLQTQWNVAFGGHHQLG

SEQ ID NO: 7588 - protein, 686 aa, Homo Sapiens
  misc_feature (1)..(1): Xaa can be any naturally occurring amino acid
XSEDCEVAGYRVLKGTEAVIIPYALHRDPRYFPNPEEFQPERFFPENAQGRHPYAYVPFSAGPRNCIGCLTQLYENAFFRGGDVASMYTPNAQYCQMRCTFHPRCLLFSFLPASSINDMEKRFGCFLKDSVTGTLPKVHRTGAVSGHSLKQCGHQISACHRDIYKGVDMRGVNFNVSKVSSVEECQKRCTSNIRCQFFSYATQTFHKAEYRNNCLLKYSPGGTPTAIKVLSNVESGFSLKPCALSEIGCHMNIFQHLAFSDVDVARVLTPDAFVCRTICTYHPNCLFFTFYTNVWKIESQRNVCLLKTSESGTPSSSTPQENTISGYSLLTCKRTLPEPCHSKIYPGVDFGGEELNVTFVKGVNVCQETCTKMIRCQFFTYSLLPEDCKEEKCKCFLRLSMDGSPTRIAYGTQGSSGYSLRLCNTGDNSVCTTKTSTRIVGGTNSSWGEWPWQVSLQVKLTAQRHLCGGSLIGHQWVLTAAHCFDGLPLQDVWRIYSGILNLSDITKDTPFSQIKEIIIHQNYKVSEGNHDIALIKLQAPLNYTEFQKPICLPSKGDTSTIYTNCWVTGWGFSKEKGEIQNILQKVNIPLVTNEECQKRYQDYKITQRMVCAGYKEGGKDACKGDSGGPLVCKHNGMWRLVGITSWGEGCARREQPGVYTKVAEYMDWILEKTQSSDGKAQMQSPA

SEQ ID NO: 7589 - protein, 91 aa, Homo Sapiens
MARGERIYRAVKDLFLHEPEQMLWNAFPPSGRELSYTSRSQMPGETISRNLQETRREKKCWERSTERHEVRGTEDQRRQERSPGTFSKPKI

SEQ ID NO: 7590 - protein, 352 aa, Homo Sapiens
MARGRKMSKPRAVEAAAAAAAVAATAPGPEMVERRGPGRPRTDGENVFTGQSKIYSYMSPNKCSGMRFPLQEENSVTHHEVKCQGKPLAGIYRKREEKRNAGNAVRSAMKSEEQKIKDARKGPLVPFPNQKSEAAEPPKTPPSSCDSTNAAIAKQALKKPIKGKQAPRKKAQGKTQQNRKLTDFYPVRRSSRKSKAELQSEERKRIDELIESGKEEGMKIDLIDGKGRGVIATKQFSRGDFVVEYHGDLIEITDAKKREALYAQDPSTGCYMYYFQYLSKTYCVDATRETNRLGRLINHSKCGNCQTKLHDIDGVPHLILIASRDIAAGEELLYDYGDRSKASIEAHPWLKH

SEQ ID NO: 7591 - protein, 299 aa, Homo Sapiens
MRWLWLLLFPDSPVTLREVLPSQPWRLRGCSDLRGENVFTGQSKIYSYMSPNKCSGMRFPLQEENSVTHHEVKCQGKPLAGIYRKREEKRNAGNAVRSAMKSEEQKIKDARKGPLVPFPNQKSEAAEPPKTPPSSCDSTNAAIAKQALKKPIKGKQAPRKKAQGKTQQNRKLTDFYPVRRSSRKSKAELQSEERKRIDELIESGKEEGMKIDLIDGKGRGVIATKQFSRGDFVVEYHGDLIEITDAKKREALYAQDPSTGCYMYYFQYLSKTYCVDATRETNRLGRLINHSKCGNCQTK

SEQ ID NO: 7592 - protein, 322 aa, Homo Sapiens
MVERRGPGRPRTDGENVFTGQSKIYSYMSPNKCSGMRFPLQEENSVTHHEVKCQGKPLAGIYRKREEKRNAGNAVRSAMKSEEQKIKDARKGPLVPFPNQKSEAAEPPKTPPSSCDSTNAAIAKQALKKPIKGKQAPRKKAQGKTQQNRKLTDFYPVRRSSRKSKAELQSEERKRIDELIESGKEEGMKIDLIDGKGRGVIATKQFSRGDFVVEYHGDLIEITDAKKREALYAQDPSTGCYMYYFQYLSKTYCVDATRETNRLGRLINHSKCGNCQTKLHDIDGVPHLILIASRDIAAGEELLYDYGDRSKASIEAHPWLKH

SEQ ID NO: 7593 - protein, 1749 aa, Homo Sapiens
MQAMDPAAADLYEEDGKDLDFYDFEPLPTLPEDEENVSLADILSLRDRGLSEQEAWAVCLECSLSMRSVAHAAIFQSLCITPDTLAFNTSGNVCFMEQLSDDPEGAFVPPEFDVTGNTFEAHIYSLGATLKAALEYVAEPTLEPRLSQDLEALLSRMQAEDPGDRPDLESIIALCEEKLQLTSSCRVCRSLSAVGRRVLSIESFGALQDVSESSWRERPAPGNAGPRRPPGDPSTDPEVLPTPEGPESETSRGPRASPTKALLSTPVRNGESHSREGLAGLVLDAERTLGELDRDALRRSRLRKVQTFPRLLSDSPEATLCLPLTRGKSQLPISELFSPDPRKAFLDRKNGLSSFQAQPKCRLWPEQEPEHQLGRVPCAGRSTDRGPGVPGSPGQPETSHPSQGPAEAPADPRDASGEAQTPRDDERIPEGARQLESAAAEQWVSLQDLLSQLGRPFREYELWALCLACLRALQTRPEHPAYLCLDSVLVAEDGAVLFQPPPANGSYDSFFLAPELAEERLVTEKASVYCVAAVLWTAAKFSVPRNHKLALPRRLKTLLLDMARRSAPERPSAAEAIKVCGSYLLQRGMDSRKILAHLRASICQVYQEEETISLQNAFSVVELKPSVAPAPEPSPGFLPVNSDTGLVAVPGPVPGQHPCGEEATQLPAAFTSEATHFKPIVLAQNASVARDQPALAQEESEERGGQREGEGEEKLSLEAHAGSPSLKTPDGPVPGPGPQGAAPEPLGASVQRDSAQGRPCPPPQAPANQPEGASSAAPGSPVPAPPTKASALPVEQGPAEPIPPGVASGGLRPDALGPTTAHHGPRHPPKPPRSKATERPGQEPEGPGATPAGERDDQSPDSVPERPRPADRRLCLPCVDASPLPGRTACPSLQEATRLIQEEFAFDGYLDNGLEALIMGEYIFALKDLTFATFCGAISEKFCDLYWDEKLLQNLFKVVNGQASPSPSTAEEAGSQLEGSQSPRSPSSKRPSLHRLGKEKPAMARTSSRAPCSPTSVSDVDSDALSRGNFEVGFRPQRSVKAERAQQPEAGEDRRPAGGASDVEAVTRLARSKGVGPALSPGPAGFQSCSPGWCSAFYEADCFGADVHNYVKDLGRQQADGALPDAQSPELEQQLMMEKRNYRKTLKFYQKLLQKEKRNKGSDVKTMLSKLKGQLEEMKSRVQFLSLVKKYLQVMYAERWGLEPCTLPVIVNIAAAPCDTLDFSPLDESSSLIFYNVNKHPGGRQKARILQAGTPLGLMAYLYSSDAFLEGYVQQFLYTFRYFCTPHDFLHFLLDRINSTLTRAHQDPTSTFTKIYRRSLCVLQAWVEDCYAVDFPRNSGLLGKLEDFISSKILPLDGSAKHLLGLLEVGMDRRAEGNPRGTDLENPREAEEDARPFNALCKRLSEDGISRKSFPWRLPRGNGLVLPPHKERPYTIAAALPKPCFLEDFYGPCAKTSEKGPYFLTEYSTHQLFSQLTLLQQELFQKCHPVHFLNSRALGVMDKSTAIPKASSSESLSAKTCSLFLPNYVQDKYLLQLLRNADDVSTWVAAEIVTSHTSKLQVNLLSKFLLIAKSCYEQRNFATAMQILSGLEHLAVRQSPAWRILPAKIAEVMEELKAVEVFLKSDSLCLMEGRRFRAQPTLPSAHLLAMHIQQLETGGFTMTNGAHRWSKLRNIAKVVSQVHAFQENPYTFSPDPKLQSYLKQRIARFSGADISTLAADSRANFHQVSSEKHSRKIQDKLRRMKATFQ

SEQ ID NO: 7594 - protein, 1141 aa, Homo Sapiens
MRSVAHAAIFQSLCITPDTLAFNTSGNVCFMEQLSDDPEGAFVPPEFDVTGNTFEAHIYSLGATLKAALEYVAEPTLEPRLSQDLEALLSRMQAEDPGDRPDLESIIALCEEKLQLTSSCRVCRSLSAVGRRVLSIESFGALQDVSESSWRERPAPGNAGPRRPPGDPSTDPEVLPTPEGPESETSRGPRASPTKALLSTPVRNGESHSREGLAGLVLDAERTLGELDRDALRRSRLRKVQTFPRLLSDSPEATLCLPLTRGKSQLPISELFSPDPRKAFLDRKNGLSSFQAQPKCRLWPEQEPEHQLGRVPCAGRSTDRGPGVPGSPGQPETSHPSQGPAEAPADPRDASGEAQTPRDDERIPEGARQLESAAAEQWVSLQDLLSQLGRPFREYELWALCLACLRALQTRPEHPAYLCLDSVLVAEDGAVLFQPPPANGSYDSFFLAPELAEERLVTEKASVYCVAAVLWTAAKFSVPRNHKLALPRRLKTLLLDMARRSAPERPSAAEAIKVCGSYLLQRGMDSRKILAHLRASICQVYQEEETISLQNAFSVVELKPSVAPAPEPSPGFLPVNSDTGLVAVPGPVPGQHPCGEEATQLPAAFTSEATHFKPIVLAQNASVARDQPALAQEESEERGGQREGEGEEKLSLEAHAGSPSLKTPDGPVPGPGPQGAAPEPLGASVQRDSAQGRPCPPPQAPANQPEGASSAAPGSPVPAPPTKASALPVEQGPAEPIPPGVASGGLRPDALGPTTAHHGPRHPPKPPRSKATERPGQEPEGPGATPAGERDDQSPDSVPERPRPADRRLCLPCVDASPLPGRTACPSLQEATRLIQEEFAFDGYLDNGLEALIMGEYIFALKDLTFATFCGAISEKFCDLYWDEKLLQNLFKVVNGQASPSPSTAEEAGSQLEGSQSPRSPSSKRPSLHRLGKEKPAMARTSSRAPCSPTSVSDVDSDALSRGNFEVGFRPQRSVKAERAQQPEAGEDRRPAGGASDVEAVTRLARSKGVGPALSPGPAGFQSCSPGWCSAFYEADCFGADVHNYVKDLGRQQADGALPDAQSPELEQQLMMEKRNYRKTLKFYQKLLQKEKRNKGSDVKTMLSKLKGQLEEMKSRVQFLSLVKKYLQASGLRAPLCPVRQ

SEQ ID NO: 7595 - protein, 391 aa, Homo Sapiens
MKLITILFLCSRLLLSLTQESQSEEIDCNDKDLFKAVDAALKKYNSQNQSNNQFVLYRITEATKTVGSDTFYSFKYEIKEGDCPVQSGKTWQDCEYKDAAKAATGECTATVGKRSSTKFSVATQTCQITPAEGPVVTAQYDCLGCVHPISTQSPDLEPILRHGIQYFNNNTQHSSLFMLNEVKRAQRQDTGECTDNAYIDIQLRIASFSQNCDIYPGKDFVQPPTKICVGCPRDIPTNSPELEETLTHTITKLNAENNATFYFKIDNVKKARVQVVAGKKYFIDFVARETTCSKESNEELTESCETKKLGQSLDCNAEVYVVPWEKKIYPTVNCQPLGMISLMKRPPGFSPFRSSRIGEIKEETTSHLRSCEYKGRPPKAGAEPASEREVS

SEQ ID NO: 7596 - protein, 427 aa, Homo Sapiens
MKLITILFLCSRLLLSLTQESQSEEIDCNDKDLFKAVDAALKKYNSQNQSNNQFVLYRITEATKTVGSDTFYSFKYEIKEGDCPVQSGKTWQDCEYKDAAKAATGECTATVGKRSSTKFSVATQTCQITPAEGPVVTAQYDCLGCVHPISTQSPDLEPILRHGIQYFNNNTQHSSLFMLNEVKRAQRQVVAGLNFRITYSIVQTNCSKENFLFLTPDCKSLWNGDTGECTDNAYIDIQLRIASFSQNCDIYPGKDFVQPPTKICVGCPRDIPTNSPELEETLTHTITKLNAENNATFYFKIDNVKKARVQVVAGKKYFIDFVARETTCSKESNEELTESCETKKLGQSLDCNAEVYVVPWEKKIYPTVNCQPLGMISLMKRPPGFSPFRSSRIGEIKEETTSHLRSCEYKGRPPKAGAEPASEREVS

SEQ ID NO: 7597 - protein, 644 aa, Homo Sapiens
MKLITILFLCSRLLLSLTQESQSEEIDCNDKDLFKAVDAALKKYNSQNQSNNQFVLYRITEATKTVGSDTFYSFKYEIKEGDCPVQSGKTWQDCEYKDAAKAATGECTATVGKRSSTKFSVATQTCQITPAEGPVVTAQYDCLGCVHPISTQSPDLEPILRHGIQYFNNNTQHSSLFMLNEVKRAQRQVVAGLNFRITYSIVQTNCSKENFLFLTPDCKSLWNGDTGECTDNAYIDIQLRIASFSQNCDIYPGKDFVQPPTKICVGCPRDIPTNSPELEETLTHTITKLNAENNATFYFKIDNVKKARVQVVAGKKYFIDFVARETTCSKESNEELTESCETKKLGQSLDCNAEVYVVPWEKKIYPTVNCQPLGMISLMKRPPGFSPFRSSRIGEIKEETTVSPPHTSMAPAQDEERDSGKEQGHTRRHDWGHEKQRKHNLGHGHKHERDQGHGHQRGHGLGHGHEQQHGLGHGHKFKLDDDLEHQGGHVLDHGHKHKHGHGHGKHKNKGKKNGKHNGWKTEHLASSSEDSTTPSAQTQEKTEGPTPIPSLAKPGVTVTFSDFQDSDLIATMMPPISPAPIQSDDDWIPDIQIDPNGLSFNPISDFPDTTSPKCPGRPWKSVSEINPTTQMKESYYFDLTDGLS

SEQ ID NO: 7598 - protein, 427 aa, Homo Sapiens; identical to SEQ ID NO: 7596

SEQ ID NO: 7599 - protein, 644 aa, Homo Sapiens; identical to SEQ ID NO: 7597

SEQ ID NO: 7600 - protein, 458 aa, Homo Sapiens
MLFQEATAFENMTKDWNYLEGSQKDCYRDTMLDSYENTVPQGSFLQLSMMPQRAGNDPPGVSNASEMEMEISNMREKFLMSVTKLVESKSYNSKVFSKEKYFQTIKEVKEAKEKGKKSSRDYRRAAKYDVISVQGTEKLIEATHGERDRIRYYVHKEELFDILHDTHLSIGHGGRTRMLKELQGKYGNVTKEVIVLYLTLCKQCHQKNPVPKRGLAPKPMTFKDIDSTCQVEILDMQSSADGEFKFILYYQDHSTKFIILRPLRTKQAHEVVSVLLDIFTILGTPSVLDSDSGVEFTNQVVHELNELWPDLKIVSGKYHPGQSQGSLEGASRDVKNMISTWMQSNHSCHWAKGLRFMQMVRNQAFDVSLQQSPFEAMFGYKAKFGLYSSNLPRETVATLQTEEELEIAEEQLENSLWIRQEERAEIGADRSDMDDDMDPTPEASEPSTSQGTSGLLCW

SEQ ID NO: 7601 - protein, 410 aa, Homo Sapiens
MMPQRAGNDPPGVSNASEMEMEISNMREKFLMSVTKLVESKSYNSKVFSKEKYFQTIKEVKEAKEKGKKSSRDYRRAAKYDVISVQGTEKLIEATHGERDRIRYYVHKEELFDILHDTHLSIGHGGRTRMLKELQGKYGNVTKEVIVLYLTLCKQCHQKNPVPKRGLAPKPMTFKDIDSTCQVEILDMQSSADGEFKFILYYQDHSTKFIILRPLRTKQAHEVVSVLLDIFTILGTPSVLDSDSGVEFTNQVVHELNELWPDLKIVSGKYHPGQSQGSLEGASRDVKNMISTWMQSNHSCHWAKGLRFMQMVRNQAFDVSLQQSPFEAMFGYKAKFGLYSSNLPRETVATLQTEEELEIAEEQLENSLWIRQEERAEIGADRSDMDDDMDPTPEASEPSTSQGTSGLLCW

SEQ ID NO: 7602 - protein, 492 aa, Homo Sapiens
MPSFLVPSLVSSPVLLKLLFSPGPKTIWSLWQQPMLFQEATAFENMTKDWNYLEGSQKDCYRDTMLDSYENTVPQGSFLQLSMMPQRAGNDPPGVSNASEMEMEISNMREKFLMSVTKLVESKSYNSKVFSKEKYFQTIKEVKEAKEKGKKSSRDYRRAAKYDVISVQGTEKLIEATHGERDRIRYYVHKEELFDILHDTHLSIGHGGRTRMLKELQGKYGNVTKEVIVLYLTLCKQCHQKNPVPKRGLAPKPMTFKDIDSTCQVEILDMQSSADGEFKFILYYQDHSTKFIILRPLRTKQAHEVVSVLLDIFTILGTPSVLDSDSGVEFTNQVVHELNELWPDLKIVSGKYHPGQSQGSLEGASRDVKNMISTWMQSNHSCHWAKGLRFMQMVRNQAFDVSLQQSPFEAMFGYKAKFGLYSSNLPRETVATLQTEEELEIAEEQLENSLWIRQEERAEIGADRSDMDDDMDPTPEASEPSTSQGTSGLLCW

SEQ ID NO: 7603 - protein, 492 aa, Homo Sapiens; identical to SEQ ID NO: 7602

SEQ ID NO: 7604 - protein, 462 aa, Homo Sapiens
MGTQALQGFLFLLFLPLLQPRGASAGSLHSPGLSECFQVNGADYRGHQNRTGPRGAGRPCLFWDQTQQHSYSSASDPHGRWGLGAHNFCRNPDGDVQPWCYVAETEEGIYWRYCDIPSCHMPGYLGCFVDSGAPPALSGPSGTSTKLTVQVCLRFCRMKGYQLAGVEAGYACFCGSESDLARGRLAPATDCDQICFGHPGQLCGGDGRLGVYEVSVGSCQGNWTAPQGVIYSPDFPDEYGPDRNCSWALGPPGAALELTFRLFELADPRDRLELRDAASGSLLRAFDGARPPPSGPLRLGTAALLLTFRSDARGHAQGFALTYRGLQDAAEDPEAPEGSAQTPAAPLDGANVSCSPRPGAPPAAIGARVFSTVTAVSVLLLLLLGLLRPLRRRSCLLAPGKGPPALGASRGPRRSWAVWYQQPRGVALPCSPGDPQAEGSAAGYRPLSASSQSSLRSLISAL

SEQ ID NO: 7605 - protein, 420 aa, Homo Sapiens
MGTQALQGFLFLLFLPLLQPRGASAGSLHSPGLSECFQVNGADYRGHQNRTGPRGAGRPCLFWDQTQQHSYSSASDPHGRWGLGAHNFCRNPDGDVQPWCYVAETEEGIYWRYCDIPSCHMPGYLGCFVDSGAPPALSGPSGTSTKLTVQVCLRFCRMKGYQLAGVEAGYACFCGSESDLARGRLAPATDCDQICFGHPGQLCGGDGRLGVYEVSVGSCQGNWTAPQGVIYSPDFPDEYGPDRNCSWALGPPGAALELTFRLFELADPRDRLELRDAASGSLLRAFDGARPPPSGPLRLGTAALLLTFRSDARGHAQGFALTYRGLQDAAEDPEAPEGSAQTPAAPLDGANVSCSPRPGAPPAAIGGAVCWLREKGPRRWGLPGAPGEAGLCGTNSPEGWPCPAPPGTPRLRVLPRATGL

SEQ ID NO: 7606 - protein, 399 aa, Homo Sapiens
MGTQALQGFLFLLFLPLLQPRGASAGSLHSPGLSECFQVNGADYRGHQNRTGPRGAGRPCLFWDQTQQHSYSSASDPHGRWGLGAHNFCRNPDGDVQPWCYVAETEEGIYWRYCDIPSCHMPGYLGCFVDSGAPPALSGPSGTSTKLTVQVCLRFCRMKGYQLAGVEAGYACFCGSESDLARGRLAPATDCDQICFGHPGQLCGGDGRLGVYEVSVGSCQGNWTAPQGVIYSPDFPDEYGPDRNCSWALGPPGAALELTFRLFELADPRDRLELRDAASGSLLRAFDGARPPPSGPLRLGTAALLLTFRSDARGHAQGFALTYRGLQDAAEDPEAPEGSAQTPAAPLDGANVSCSPRPGAPPAAIGGEAGARDGSESGSRPLAPILTAAVCPQPGSSRR

SEQ ID NO: 7607 - protein, 424 aa, Homo Sapiens
MGTQALQGFLFLLFLPLLQPRGASAGSLHSPGLSECFQVNGADYRGHQNRTGPRGAGRPCLFWDQTQQHSYSSASDPHGRWGLGAHNFCRNPDGDVQPWCYVAETEEGIYWRYCDIPSCHMPGYLGCFVDSGAPPALSGPSGTSTKLTVQVCLRFCRMKGYQLAGVEAGYACFCGSESDLARGRLAPATDCDQICFGHPGQLCGGDGRLGVYEVSVGSCQGNWTAPQGVIYSPDFPDEYGPDRNCSWALGPPGAALELTFRLFELADPRDRLELRDAASGSLLRAFDGARPPPSGPLRLGTAALLLTFRSDARGHAQGFALTYRGLQDAAEDPEAPEGSAQTPAAPLDGANVSCSPRPGAPPAAIGARVFSTVTAVSVLLLLLLGLLRPLRRRCGALGQGLRADRWWGAGAPEGNRARKELLGS

SEQ ID NO: 7608 - protein, 381 aa, Homo Sapiens
MGTQALQGFLFLLFLPLLQPRGASAGSLHSPGLSECFQVNGADYRGHQNRTGPRGAGRPCLFWDQTQQHSYSSASDPHGRWGLGAHNFCRNPDGDVQPWCYVAETEEGIYWRYCDIPSCHMPGYLGCFVDSGAPPALSGPSGTSTKLTVQVCLRFCRMKGYQLCGGDGRLGVYEVSVGSCQGNWTAPQGVIYSPDFPDEYGPDRNCSWALGPPGAALELTFRLFELADPRDRLELRDAASGSLLRAFDGARPPPSGPLRLGTAALLLTFRSDARGHAQGFALTYRGLQDAAEDPEAPEGSAQTPAAPLDGANVSCSPRPGAPPAAIGGAVCWLREKGPRRWGLPGAPGEAGLCGTNSPEGWPCPAPPGTPRLRVLPRATGL

SEQ ID NO: 7609 - protein, 423 aa, Homo Sapiens
MGTQALQGFLFLLFLPLLQPRGASAGSLHSPGLSECFQVNGADYRGHQNRTGPRGAGRPCLFWDQTQQHSYSSASDPHGRWGLGAHNFCRNPDGDVQPWCYVAETEEGIYWRYCDIPSCHMPGYLGCFVDSGAPPALSGPSGTSTKLTVQVCLRFCRMKGYQLCGGDGRLGVYEVSVGSCQGNWTAPQGVIYSPDFPDEYGPDRNCSWALGPPGAALELTFRLFELADPRDRLELRDAASGSLLRAFDGARPPPSGPLRLGTAALLLTFRSDARGHAQGFALTYRGLQDAAEDPEAPEGSAQTPAAPLDGANVSCSPRPGAPPAAIGARVFSTVTAVSVLLLLLLGLLRPLRRRSCLLAPGKGPPALGASRGPRRSWAVWYQQPRGVALPCSPGDPQAEGSAAGYRPLSASSQSSLRSLISAL

SEQ ID NO: 7610 - protein, 85 aa, Homo Sapiens
MKIPVLPAVVLLSLLVLHSAQGATLGGPEEESTIENYASRPEAFKADEFLNWHALFESIKRKLPFLNWDAFPKLKGLRSATPDAQ

SEQ ID NO: 7611 - protein, 99 aa, Homo Sapiens
MKIPVLPAVVLLSLLVLHSAQGATLGGPEEESTIENYASRPEAFNTPFLNIDKLRSAFKADEFLNWHALFESIKRKLPFLNWDAFPKLKGLRSATPDAQ

SEQ ID NO: 7612 - protein, 153 aa, Homo Sapiens
EEKGGASLSPQYVSYNQSSYTQWDLQPDTDYEIHLFKERMFRHQMAVKTNGTVKDKEDTQVDSEARPMKDETFGEYSDNEEKAFGSSQPSLNGDIKPLGSDDSLADYGGSVDVQFNEDGSFIGQYSGKKEKEAAGGNDSSGATSPINPAVALE

SEQ ID NO: 7613 - protein, 90 aa, Homo Sapiens
MVVALRYVWPLLLCSPCLLIQIPEELMEPPVITEQSPRRLVVFPTDDISLKCEASGKPEVQFRWTRDGVHFKPKEELGVTVYQSPHSGSF

SEQ ID NO: 7614 - protein, 128 aa, Homo Sapiens
MVVALRYVWPLLLCSPCLLIQIPEELMEPPVITEQSPRRLVVFPTDDISLKCEASGKPEVQFRWTRDGVHFKPKEELGVTVYQSPHSGSFTITGNNSNFAQRFQGIYRCFASNKLGTAMSHEIRLMAE

SEQ ID NO: 7615 - protein, 1248 aa, Homo Sapiens
MVVALRYVWPLLLCSPCLLIQIPEELMEPPVITEQSPRRLVVFPTDDISLKCEASGKPEVQFRWTRDGVHFKPKEELGVTVYQSPHSGSFTITGNNSNFAQRFQGIYRCFASNKLGTAMSHEIRLMAEGAPKWPKETVKPVEVEEGESVVLPCNPPPSAEPLRIYWMNSKILHIKQDERVTMGQNGNLYFANVLTSDNHSDYICHAHFPGTRTIIQKEPIDLRVKATNSMIDRKPRLLFPTNSSSHLVALQGQPLVLECIAEGFPTPTIKWLRPSGPMPADRVTYQNHNKTLQLLKVGEEDDGEYRCLAENSLGSARHAYYVTVEAAPYWLHKPQSHLYGPGETARLDCQVQGRPQPEVTWRINGIPVEELAKDQKYRIQRGALILSNVQPSDTMVTQCEARNRHGLLLANAYIYVVQLPAKILTADNQTYMAVQGSTAYLLCKAFGAPVPSVQWLDEDGTTVLQDERFFPYANGTLGIRDLQANDTGRYFCLAANDQNNVTIMANLKVKDATQITQGPRSTIEKKGSRVTFTCQASFDPSLQPSITWRGDGRDLQELGDSDKYFIEDGRLVIHSLDYSDQGNYSCVASTELDVVESRAQLLVVGSPGPVPRLVLSDLHLLTQSQVRVSWSPAEDHNAPIEKYDIEFEDKEMAPEKWYSLGKVPGNQTSTTLKLSPYVHYTFRVTAINKYGPGEPSPVSETVVTPEAAPEKNPVDVKGEGNETTNMVITWKPLRWMDWNAPQVQYRVQWRPQGTRGPWQEQIVSDPFLVVSNTSTFVPYEIKVQAVNSQGKGPEPQVTIGYSGEDYPQAIPELEGIEILNSSAVLVKWRPVDLAQVKGHLRGYNVTYWREGSQRKHSKRHIHKDHVVVPANTTSVILSGLRPYSSYHLEVQAFNGRGSGPASEFTFSTPEGVPGHPEALHLECQSNTSLLLRWQPPLSHNGVLTGYVLSYHPLDEGGKGQLSFNLRDPELRTHNLTDLSPHLRYRFQLQATTKEGPGEAIVREGGTMALSGISDFGNISATAGENYSVVSWVPKEGQCNFRFHILFKALGEEKGGASLSPQYVSYNQSSYTQWDLQPDTDYEIHLFKERMFRHQMAVKTNGTGRVRLPPAGFATEGWFIGFVSAIILLLLVLLILCFIKRSKGGKYSVKDKEDTQVDSEARPMKDETFGEYSDNEEKAFGSSQPSLNGDIKPLGSDDSLADYGGSVDVQFNEDGSFIGQYSGKKEKEAAGGNDSSGATSPINPAVALE

SEQ ID NO: 7616 - protein, 1248 aa, Homo Sapiens; identical to SEQ ID NO: 7615

SEQ ID NO: 7617 - protein, 84 aa, Homo Sapiens
MVVALRYVWPLLLCSPCLLIQIPEEYEGHHVMEPPVITEQSPRRLVVFPTDDISLKCEASGKPEVQFRWTRDGVHFKPKEELGV

SEQ ID NO: 7618 - protein, 151 aa, Homo Sapiens
MVVALRYVWPLLLCSPCLLIQIPEEYEGHHVMEPPVITEQSPRRLVVFPTDDISLKCEASGKPEVQFRWTRDGVHFKPKEELGVTVYQSPHSGSFTITGNNSNFAQRFQGIYRCFASNKLGTAMSHEIRLMAEGAPKWPKETVKPVEVEEG

SEQ ID NO: 7619 - protein, 1253 aa, Homo Sapiens
MVVALRYVWPLLLCSPCLLIQIPEEYEGHHVMEPPVITEQSPRRLVVFPTDDISLKCEASGKPEVQFRWTRDGVHFKPKEELGVTVYQSPHSGSFTITGNNSNFAQRFQGIYRCFASNKLGTAMSHEIRLMAEGAPKWPKETVKPVEVEEGESVVLPCNPPPSAEPLRIYWMNSKILHIKQDERVTMGQNGNLYFANVLTSDNHSDYICHAHFPGTRTIIQKEPIDLRVKATNSMIDRKPRLLFPTNSSSHLVALQGQPLVLECIAEGFPTPTIKWLRPSGPMPADRVTYQNHNKTLQLLKVGEEDDGEYRCLAENSLGSARHAYYVTVEAAPYWLHKPQSHLYGPGETARLDCQVQGRPQPEVTWRINGIPVEELAKDQKYRIQRGALILSNVQPSDTMVTQCEARNRHGLLLANAYIYVVQLPAKILTADNQTYMAVQGSTAYLLCKAFGAPVPSVQWLDEDGTTVLQDERFFPYANGTLGIRDLQANDTGRYFCLAANDQNNVTIMANLKVKDATQITQGPRSTIEKKGSRVTFTCQASFDPSLQPSITWRGDGRDLQELGDSDKYFIEDGRLVIHSLDYSDQGNYSCVASTELDVVESRAQLLVVGSPGPVPRLVLSDLHLLTQSQVRVSWSPAEDHNAPIEKYDIEFEDKEMAPEKWYSLGKVPGNQTSTTLKLSPYVHYTFRVTAINKYGPGEPSPVSETVVTPEAAPEKNPVDVKGEGNETTNMVITWKPLRWMDWNAPQVQYRVQWRPQGTRGPWQEQIVSDPFLVVSNTSTFVPYEIKVQAVNSQGKGPEPQVTIGYSGEDYPQAIPELEGIEILNSSAVLVKWRPVDLAQVKGHLRGYNVTYWREGSQRKHSKRHIHKDHVVVPANTTSVILSGLRPYSSYHLEVQAFNGRGSGPASEFTFSTPEGVPGHPEALHLECQSNTSLLLRWQPPLSHNGVLTGYVLSYHPLDEGGKGQLSFNLRDPELRTHNLTDLSPHLRYRFQLQATTKEGPGEAIVREGGTMALSGISDFGNISATAGENYSVVSWVPKEGQCNFRFHILFKALGEEKGGASLSPQYVSYNQSSYTQWDLQPDTDYEIHLFKERMFRHQMAVKTNGTGRVRLPPAGFATEGWFIGFVSAIILLLLVLLILCFIKRSKGGKYSVKDKEDTQVDSEARPMKDETFGEYSDNEEKAFGSSQPSLNGDIKPLGSDDSLADYGGSVDVQFNEDGSFIGQYSGKKEKEAAGGNDSSGATSPINPAVALE

SEQ ID NO: 7620 - protein, 1257 aa, Homo Sapiens
MVVALRYVWPLLLCSPCLLIQIPEEYEGHHVMEPPVITEQSPRRLVVFPTDDISLKCEASGKPEVQFRWTRDGVHFKPKEELGVTVYQSPHSGSFTITGNNSNFAQRFQGIYRCFASNKLGTAMSHEIRLMAEGAPKWPKETVKPVEVEEGESVVLPCNPPPSAEPLRIYWMNSKILHIKQDERVTMGQNGNLYFANVLTSDNHSDYICHAHFPGTRTIIQKEPIDLRVKATNSMIDRKPRLLFPTNSSSHLVALQGQPLVLECIAEGFPTPTIKWLRPSGPMPADRVTYQNHNKTLQLLKVGEEDDGEYRCLAENSLGSARHAYYVTVEAAPYWLHKPQSHLYGPGETARLDCQVQGRPQPEVTWRINGIPVEELAKDQKYRIQRGALILSNVQPSDTMVTQCEARNRHGLLLANAYIYVVQLPAKILTADNQTYMAVQGSTAYLLCKAFGAPVPSVQWLDEDGTTVLQDERFFPYANGTLGIRDLQANDTGRYFCLAANDQNNVTIMANLKVKDATQITQGPRSTIEKKGSRVTFTCQASFDPSLQPSITWRGDGRDLQELGDSDKYFIEDGRLVIHSLDYSDQGNYSCVASTELDVVESRAQLLVVGSPGPVPRLVLSDLHLLTQSQVRVSWSPAEDHNAPIEKYDIEFEDKEMAPEKWYSLGKVPGNQTSTTLKLSPYVHYTFRVTAINKYGPGEPSPVSETVVTPEAAPEKNPVDVKGEGNETTNMVITWKPLRWMDWNAPQVQYRVQWRPQGTRGPWQEQIVSDPFLVVSNTSTFVPYEIKVQAVNSQGKGPEPQVTIGYSGEDYPQAIPELEGIEILNSSAVLVKWRPVDLAQVKGHLRGYNVTYWREGSQRKHSKRHIHKDHVVVPANTTSVILSGLRPYSSYHLEVQAFNGRGSGPASEFTFSTPEGVPGHPEALHLECQSNTSLLLRWQPPLSHNGVLTGYVLSYHPLDEGGKGQLSFNLRDPELRTHNLTDLSPHLRYRFQLQATTKEGPGEAIVREGGTMALSGISDFGNISATAGENYSVVSWVPKEGQCNFRFHILFKALGEEKGGASLSPQYVSYNQSSYTQWDLQPDTDYEIHLFKERMFRHQMAVKTNGTGRVRLPPAGFATEGWFIGFVSAIILLLLVLLILCFIKRSKGGKYSVKDKEDTQVDSEARPMKDETFGEYRSLESDNEEKAFGSSQPSLNGDIKPLGSDDSLADYGGSVDVQFNEDGSFIGQYSGKKEKEAAGGNDSSGATSPINPAVALE

SEQ ID NO: 7621 - protein, 190 aa, Homo Sapiens
  misc_feature (1)..(1): Xaa can be any naturally occurring amino acid
XDPSLQPSITWRGDGRDLQELGDSDKYFIEDGRLVIHSLDYSDQGNYSCVASTELDVVESRAQLLVVEYDIEFEDKEMAPEKWYSLGKVPGNQTSTTLKLSPYVHYTFRVTAINKYGPGEPSPVSETVVTPEAAPEKNPVDVKGEGNETTNMVITWKPLRWMDWNAPQVQYRVQWRPQGTRGPWQEQIVS

SEQ ID NO: 7622 - protein, 232 aa, Homo Sapiens
ETPSSEPMEEEEDDDLELFGGYDSFRSYNSSVGSESSSYLEESSEAENEDREAGELPTSPLHLLSPGTPRSLDGSGSEPAVCEMCGIVGTREAFFSKTKRFCSVSCSRSYSSNSKKASILARLQGKPPTKKAKVLHKAAWSAKIGAFLHSQGTGQLADGTPTGQDALVLGFDWGKFLKDHSYKAAPVSCFKHGIGCCFGMKALKMTPAMTSGATWEQWMSTPLAGVPSTARS

SEQ ID NO: 7623 - protein, 705 aa, Homo Sapiens
MEKPRSIEETPSSEPMEEEEDDDLELFGGYDSFRSYNSSVGSESSSYLEESSEAENEDREAGELPTSPLHLLSPGTPRSLDGSGSEPAVCEMCGIVGTREAFFSKTKRFCSVSCSRSYSSNSKKASILARLQGKPPTKKAKVLHKAAWSAKIGAFLHSQGTGQLADGTPTGQDALVLGFDWGKFLKDHSYKAAPVSCFKHVPLYDQWEDVMKGMKVEVLNSDAVLPSRVYWIASVIQTAGYRVLLRYEGFENDASHDFWCNLGTVDVHPIGWCAINSKILVPPRTIHAKFTDWKGYLMKRLVGSRTLPVDFHIKMVESMKYPFRQGMRLEVVDKSQVSRTRMAVVDTVIGGRLRLLYEDGDSDDDFWCHMWSPLIHPVGWSRRVGHGIKMSERRSDMAHHPTFRKIYCDAVPYLFKKVRAVYTEGGWFEEGMKLEAIDPLNLGNICVATVCKVLLDGYLMICVDGGPSTDGLDWFCYHASSHAIFPATFCQKNDIELTPPKGYEAQTFNWENYLEKTKSKAAPSRLFNMDCPNHGFKVGMKLEAVDLMEPRLICVATVKRVVHRLLSIHFDGWDSEYDQWVDCESPDIYPVGWCELTGYQLQPPVAAEPATPLKAKEATKKKKKQFGKKRKRIPPTKTRPLRQGSKKPLLEDDPQGARKISSEPVPGEIIAVRVKEEHLDVASPDKASSPELPVSVENIKQETDD

SEQ ID NO: 7624 - protein, 614 aa, Homo Sapiens
MEKPRSIEETPSSEPMEEEEDDDLELFGGYDSFRSYNSSVGSESSSYLEESSEAENEDREAGELPTSPLHLLSPGTPRSLDGSGSEPAVCEMCGIVGTREAFFSKTKRFCSVSCSRSYSSNSKKASILARLQGKPPTKKAKVLHKAAWSAKIGAFLHSQGTGQLADGTPTGQDALVLGFDWGKFLKDHSYKAAPVSCFKHVPLYDQWEDVMKGMKVEVLNSDAVLPSRVYWIASVIQTAGYRVLLRYEGFENDASHDFWCNLGTVDVHPIGWCAINSKILVPPRTIHAKFTDWKGYLMKRLVGSRTLPVDFHIKMVESMKYPFRQGMRLEVVDKSQVSRTRMAVVDTVIGGRLRLLYEDGDSDDDFWCHMWSPLIHPVGWSRRVGHGIKMSERRSDMAHHPTFRKIYCDAVPYLFKKVRAVYTEGGWFEEGMKLEAIDPLNLGNICVATVCKVLLDGYLMICVDGGPSTDGLDWFCYHASSHAIFPATFCQKNDIELTPPKGYEAQTFNWENYLEKTKSKAAPSRLFNMDCPNHGFKVGMKLEAVDLMEPRLICVATVKRVVHRLLSIHFDGWDSEYDQWVDCESPDIYPVGWCELTGYQLQPPVAAGKLPRSL

SEQ ID NO: 7625 - protein, 40 aa, Homo Sapiens
MEKPRSIERWGVAVLPRLVSNSWVQAIHLPQPPKVLGLQM

SEQ ID NO: 7626 - protein, 288 aa, Homo Sapiens
  misc_feature (1)..(1): Xaa can be any naturally occurring amino acid
XRPHLQNQWRKRKMTTWSCLVAMIVSGVITAVWAVRAAPIWRSQVKQKMRIGKQGNCRPPRCICSALGLLAPWMAVVLSQGKPPTKKAKVLHKAAWSAKIGAFLHSQGTGQLADGTPTGQDALVLGFDWGKFLKDHSYKAAPVSCFKHVPLYDQWEDVMKGMKVEVLNSDAVLPSRVYWIASVIQTAGYRVLLRYEGFENDASHDFWCNLGTVDVHPIGWCAINSKILVPPRTIHAKFTDWKGYLMKRLVGSRTLPVDFHIKVGSEPLTDVPPSALPFFCILHATHWS

SEQ ID NO: 7627 - protein, 127 aa, Homo Sapiens
MKFTTLLFLAAVAGALVYAEDASSDSTGADPAQEAGTSKPNEEISGPAEPASPPETTTTAQETSAAAVQGTAKVTSSRQELNPLKQALAKAGKGMHGGVPGGKQFIENGSEFAQKLLKKFSLLKPWA

SEQ ID NO: 7628 - protein, 138 aa, Homo Sapiens
MKFTTLLFLAAVAGALVYAEDASSDSTGADPAQEAGTSKPNEEISGPAEPASPPETTTTAQETSAAAVQGTAKVTSSRQELNPLKSIVEKSILLTEQALAKAGKGMHGGVPGGKQFIENGSEFAQKLLKKFSLLKPWA

SEQ ID NO: 7629 - protein, 85 aa, Homo Sapiens
PAQEAGTSKPNEEISGPAEPASPPETTTTAQETSAAAVQGTAKVTSSRQELNPLKQALAKAGKGMHGGVPGGKQFIESECIPRWK

SEQ ID NO: 7630 - protein, 126 aa, Homo Sapiens
MRIASISKSLTMVALAKLWEAGKLDLDIPVQHYVPEFPEKEYEGEKVSVTTRLLISHLSGIRHYEKDIKKVKEEKAYKALKMMKENVAFEQEKEGKSNEKNDFTKFKTEQENEAKCRNSKPGKKKN

SEQ ID NO: 7631 - protein, 547 aa, Homo Sapiens
MYRLMSAVTARAAAPGGLASSCGRRGVHQRAGLPPLGHGWVGGLGLGLGLALGVKLAGGLRGAAPAQSPAAPDPEASPLAEPPQEQSLAPWSPQTPAPPCSRCFARAIESSRDLLHRIKDEVGAPGIVVGVSVDGKEVWSEGLGYADVENRVPCKPETVMRIASISKSLTMVALAKLWEAGKLDLDIPVQHYVPEFPEKEYEGEKVSVTTRLLISHLSGIRHYEKDIKKVKEEKAYKALKMMKENVAFEQEKEGKSNEKNDFTKFKTEQENEAKCRNSKPGKKKNDFEQGELYLREKFENSIESLRLFKNDPLFFKPGSQFLYSTFGYTLLAAIVERASGCKYLDYMQKIFHDLDMLTTVQEENEPVIYNRARFYVYNKKKRLVNTPYVDNSYKWAGGGFLSTVGDLLKFGNAMLYGYQVGLFKNSNENLLPGYLKPETMVMMWTPVPNTEMSWDKEGKYAMAWGVVERKQTYGSCRKQRHYASHTGGAVGASSVLLVLPEELDTETINNKVPPRGIIVSIICNMQSVGLNSTALKIALEFDKDRSD

SEQ ID NO: 7632 - protein, 373 aa, Homo Sapiens
MYRLMSAVTARAAAPGGLASSCGRRGVHQRAGLPPLGHGWVGGLGLGLGLALGVKLAGGLRGAAPAQSPAAPDPEASPLAEPPQEQSLAPWSPQTPAPPCSRCFARAIESSRDLLHRIKDEVGAPGIVVGVSVDGKEVWSEGLGYADVENRVPCKPETVMRIASISKSLTMVALAKLWEAGKLDLDIPVQHYVPEFPEKEYEGEKVSVTTRLLISHLSGIRHYEKDIKKVKEEKAYKALKMMKENVAFEQEKEGKSNEKNDFTKFKTEQENEAKCRNSKPGKKKNDFEQGELYLREKFENSIESLRLFKNDPLFFKPGSQFLYSTFGYTLLAAIVERASGCKYLDYMQKIFHDLDMLTTVQEENEPVIYNRAR

SEQ ID NO: 7633 - protein, 525 aa, Homo Sapiens
MWEAQFLGLLFLQPLWVAPVKPLQPGAEVPVVWAQEGAPAQLPCSPTIPLQDLSLLRRAGVTWQHQPDSGPPAAAPGHPLAPGPHPAAPSSWGPRPRRYTVLSVGPGGLRSGRLPLQPRVQLDERGRQRGDFSLWLRPARRADAGEYRAAVHLRDRALSCRLRLRLGQASMTASPPGSLRASDWVILNCSFSRPDRPASVHWFRNRGQGRVPVRESPHHHLAESFLFLPQVSPMDSGPWGCILTYRDGFNVSIMYNLTVLGLEPPTPLTVYAGAGSRVGLPCRLPAGVGTRSFLTAKWTPPGGGPDLLVTGDNGDFTLRLEDVSQAQAGTYTCHIHLQEQQLNATVTLAIITVTPKSFGSPGSLGKLLCEVTPVSGQERFVWSSLDTPSQRSFSGPWLEAQEAQLLSQPWQCQLYQGERLLGAAVYFTELSSPGAQRSGRAPGALPAGHLLLFLILGVLSLLLLVTGAFGFHLWRRQWRPRRFSALEQGIHPPQAQSKIEELEQEPEPEPEPEPEPEPEPEPEQL

SEQ ID NO: 7634 - protein, 360 aa, Homo Sapiens
MWEAQFLGLLFLQPLWVAPVKPLQPGAEVPVVWAQEGAPAQLPCSPTIPLQDLSLLRRAGVTWQHQPDSGPPAAAPGHPLAPGPHPAAPSSWGPRPRRYTVLSVGPGGLRSGRLPLQPRVQLDERGRQRGDFSLWLRPARRADAGEYRAAVHLRDRALSCRLRLRLGQASMTASPPGSLRASDWVILNCSFSRPDRPASVHWFRNRGQGRVPVRESPHHHLAESFLFLPQVSPMDSGPWGCILTYRDGFNVSIMYNLTVLGLEPPTPLTVYAGAGSRVGLPCRLPAGVGTRSFLTAKWTPPGGGPDLLVTGDNGDFTLRLEDVSQAQAGTYTCHIHLQEQQLNATVTLAIITGQPQVGKE

SEQ ID NO: 7635 - protein, 77 aa, Homo Sapiens
MEREMGALPRPSISAEPGTVISPGSHVTFMCRGPVGVQTFRLEREDRAKYKDSYNVFRLGPSESEARFHIDSVSEGN

SEQ ID NO: 7636 - protein, 89 aa, Homo Sapiens
MEREMVLCLAQTIHTQEGALPRPSISAEPGTVISPGSHVTFMCRGPVGVQTFRLEREDRAKYKDSYNVFRLGPSESEARFHIDSVSEGN

SEQ ID NO: 7637 - protein, 152 aa, Homo Sapiens
MSPHLTALLGLVLCLAQTIHTQEGALPRPSISAEPGTVISPGSHVTFMCRGPVGVQTFRLEREDRAKYKDSYNVFRLGPSESEARFHIDSVSEGNAGLYRCLYYKPPGWSEHSDFLELLVKESSGGPDSPDTEPGSSAGTVPGTEASGFDAP

SEQ ID NO: 7638 - protein, 135 aa, Homo Sapiens
MSPHLTALLGLVLCLAQTIHTQEGALPRPSISAEPGTVISPGSHVTFMCRGPVGVQTFRLEREDRAKYKDSYNVFRLGPSESEARFHIDSVSEGNAGLYRCLYYKPPGWSEHSDFLELLVKGTVPGTEASGFDAP

SEQ ID NO: 7639 - protein, 123 aa, Homo Sapiens
MRFFVPLFLVGILFPAILAKQFTKCELSQLLKDIDGYGGIALPELICTMFHTSGYDTQAIVENNESTEYGLFQISNKLWCKSSQVPQSRNICDISCDKFLDDDITDDIMCAKKILDIKGIDYW

SEQ ID NO: 7640 - protein, 142 aa, Homo Sapiens
MRFFVPLFLVGILFPAILAKQFTKCELSQLLKDIDGYGGIALPELICTMFHTSGYDTQAIVENNESTEYGLFQISNKLWCKSSQVPQSRNICDISCDKFLDDDITDDIMCAKKILDIKGIDYWLAHKALCTEKLEQWLCEKL

SEQ ID NO: 7641 - protein, 217 aa, Homo Sapiens
MLIGGNIEVHVNPGDGTGLRKALLHAPTGTCSDGQAHSISLVRNRRIITVQLDENNPVEMKLGTLVESRTINVSNLYVGGIPEGEGTSLLTMRRSFHGCIKNLIFNLELLDFNSAVGMSKSTWTPAGCQKGLSWLPMQRTKLLPEPRAFPVGAASFTISQVQSAKEGLGQRELKWGLAVKVPAKAGAGAGAGAVLKIRAGTGRERVPQATQMTRPNP

SEQ ID NO: 7642 - protein, 3075 aa, Homo Sapiens
MRGGVLLVLLLCVAAQCRQRGLFPAILNLASNAHISTNATCGEKGPEMFCKLVEHVPGRPVRNPQCRICDGNSANPRERHPISHAIDGTNNWWQSPSIQNGREYHWVTITLDLRQVFQVAYVIIKAANAPRPGNWILERSLDGTTFSPWQYYAVSDSECLSRYNITPRRGPPTYRADDEVICTSYYSRLVPLEHGEIHTSLINGRPSADDLSPKLLEFTSARYIRLRLQRIRTLNADLMTLSHREPKELDPIVTRRYYYSIKDISVGGMCICYGHASSCPWDETTKKLQCQCEHNTCGESCNRCCPGYHQQPWRPGTVSSGNTCEACNCHNKAKDCYYDESVAKQKKSLNTAGQFRGGGVCINCLQNTMGINCETCIDGYYRPHKVSPYEDEPCRPCNCDPVGSLSSVCIKDDLHSDLHNGKQPGQCPCKEGYTGEKCDRCQLGYKDYPTCVSCGCNPVGSASDEPCTGPCVCKENVEGKACDRCKPGFYNLKEKNPRGCSECFCFGVSDVCSSLSWPVGQVNSMSGWLVTDLISPRKIPSQQDALGGRHQVSINNTAVMQRLAPKYYWAAPEAYLGNKLTAFGGFLKYTVSYDIPVETVDSNLMSHADVIIKGNGLTLSTQAEGLSLQPYEEYLNVVRLVPENFQDFHSKRQIDRDQLMTVLANVTHLLIRANYNSAKMALYRLESVSLDIASSNAIDLVVAADVEHCECPQGYTGTSCESCLSGYYRVDGILFGGICQPCECHGHAAECNVHGVCIACAHNTTGVHCEQCLPGFYGEPSRGTPGDCQPCACPLTIASNNFSPTCHLNDGDEVVCDWCAPGYSGAWCERCADGYYGNPTVPGESCVPCDCSGNVDPSEAGHCDSVTGECLKCLGNTDGAHCERCADGFYGDAVTAKNCRACECHVKGSHSAVCHLETGLCDCKPNVTGQQCDQCLHGYYGLDSGHGCRPCNCSVAGSVSDGCTDEGQCHCVPGVAGKRCDRCAHGFYAYQDGSCTPCDCPHTQNTCDPETGECVCPPHTQGVKCEECEDGHWGYDAEVGCQACNCSLVGSTHHRCDVVTGHCQCKSKFGGRACDQCSLGYRDFPDCVPCDCDLRGTSGDACNLEQGLCGCVEETGACPCKENVFGPQCNECREGTFALRADNPLGCSPCFCSGLSHLCSELEDYVRTPVTLGSDQPLLRVVSQSNLRGTTEGVYYQAPDFLLDAATVRQHIRAEPFYWRLPQQFQGDQLMAYGGKLKYSVAFYSLDGVGTSNFEPQVLIKGGRIRKQVIYMDAPAPENGVRQEQEVAMRENFWKYFNSVSEKPVTREDFMSVLSDIEYILIKASYGQGLQQSRISDISMEVGRKAEKLHPEEEVASLLENCVCPPGTVGFSCQDCAPGYHRGKLPAGSDRGPRPLVAPCVPCSCNNHSDTCDPNTGKCLNCGDNTAGDHCDVCTSGYYGKVTGSASDCALCACPHSPPASFSPTCVLEGDHDFRCDACLLGYEGKHCERCSSSYYGNPQTPGGSCQKCDCNPHGSVHGDCDRTSGQCVCRLGASGLRCDECEPRHILMETDCVSCDDECVGVLLNDLDEIGDAVLSLNLTGIIPVPYGILSNLENTTKYLQESLLKENMQKDLGKIKLEGVAEETDNLQKKLTRMLASTQKVNRATERIFKESQDLAIAIERLQMSITEIMEKTTLNQTLDEDFLLPNSTLQNMQQNGTSLLEIMQIRDFTQLHQNATLELKAAEDLLSQIQENYQKPLEELEVLKEAASHVLSKHNNELKAAEALVREAEAKMQESNHLLLMVNANLREFSDKKLHVQEEQNLTSELIVQGRGLIDAAAAQTDAVQDALEHLEDHQDKLLLWSAKIRHHIDDLVMHMSQRNAVDLVYRAEDHAAEFQRLADVLYSGLENIRNVSLNATSAAYVHYNIQSLIEESEELARDAHRTVTETSLLSESLVSNGKAAVQRSSRFLKEGNNLSRKLPGIALELSELRNKTNRFQENAVEITRQTNESLLILRAIPKGIRDKGAKTKELATSASQSAVSTLRDVAGLSQELLNTSASLSRVNTTLRETHQLLQDSTMATLLAGRKVKDVEIQANLLFDRLKPLKMLEENLSRNLSEIKLLISQARKQAASIKVAVSADRDCIRAYQPQISSTNYNTLTLNVKTQEPDNLLFYLGSSTASDFLAVEMRRGRVAFLWDLGSGSTRLEFPDFPIDDNRWHSIHVARFGNIGSLSVKEMSSNQKSPTKTSKSPGTANVLDVNNSTLMFVGGLGGQIKKSPAVKVTHFKGCLGEAFLNGKSIGLWNYIEREGKCRGCFGSSQNEDPSFHFDGSGYSVVEKSLPATVTQIIMLFNTFSPNGLLLYLGSYGTKDFLSIELFRGRVKVMTDLGSGPITLLTDRRYNNGTWYKIAFQRNRKQGVLAVIDAYNTSNKETKQGETPGASSDLNRLDKDPIYVGGLPRSRVVRRGVTTKSFVGCIKNLEISRSTFDLLRNSYGVRKGCLLEPIRSVSFLKGGYIELPPKSLSPESEWLVTFATTNSSGIILAALGGDVEKRGDREEAHVPFFSVMLIGGNIEVHVNPGDGTGLRKALLHAPTGTCSDGQAHSISLVRNRRIITVQLDENNPVEMKLGTLVESRTINVSNLYVGGIPEGEGTSLLTMRRSFHGCIKNLIFNLELLDFNSAVGHEQVDLDTCWLSERPKLAPDAEDSKLLPEPRAFPEQCVVDAALEYVPGAHQFGLTQNSHFILPFNQSAVRKKLSVELSIRTFASSGLIYYMAHQNQADYAVLQLHGGRLHFMFDLGKGRTKVSHPALLSDGKWHTVKTDYVKRKGFITVDGRESPMVTVVGDGTMLDVEGLFYLGGLPSQYQARKIGNITHSIPACIGDVTVNSKQLDKDSPVSAFTVNRCYAVAQEGTYFDGSGYAALVKEGYKVQSDVNITLEFRTSSQNGVLLGISTAKVDAIGLELVDGKVLFHVNNGAGRITAAYEPKTATVLCDGKWHTLQANKSKHRITLIVDGNAVGAESPHTQSTSVDTNNPIYVGGYPAGVKQKCLRSQTSFRGCLRKLALIKSPQVQSFDFSRAFELHGVFLHSCPGTES

SEQ ID NO: 7643 - protein, 3122 aa, Homo Sapiens
MPGAAGVLLLLLLSGGLGGVQAQRPQQQRQSQAHQQRGLFPAVLNLASNALITTNATCGEKGPEMYCKLVEHVPGQPVRNPQCRICNQNSSNPNQRHPITNAIDGKNTWWQSPSIKNGIEYHYVTITLDLQQVFQIAYVIVKAANSPRPGNWILERSLDDVEYKPWQYHAVTDTECLTLYNIYPRTGPPSYAKDDEVICTSFYSKIHPLENGEIHISLINGRPSADDPSPELLEFTSARYIRLRFQRIRTLNADLMMFAHKDPREIDPIVTRRYYYSVKDISVGGMCICYGHARACPLDPATNKSRCECEHNTCGDSCDQCCPGFHQKPWRAGTFLTKTECEACNCHGKAEECYYDENVARRNLSLNIRGKYIGGGVCINCTQNTAGINCETCTDGFFRPKGVSPNYPRPCQPCHCDPIGSLNEVCVKDEKHARRGLAPGSCHCKTGFGGVSCDRCARGYTGYPDCKACNCSGLGSKNEDPCFGPCICKENVEGGDCSRCKSGFFNLQEDNWKGCDECFCSGVSNRCQSSYWTYGKIQDMSGWYLTDLPGRIRVAPQQDDLDSPQQISISNAEARQALPHSYYWSAPAPYLGNKLPAVGGQLTFTISYDLEEEEEDTERVLQLMIILEGNDLSISTAQDEVYLHPSEEHTNVLLLKEESFTIHGTHFPVRRKEFMTVLANLKRVLLQITYSFGMDAIFRLSSVNLESAVSYPTDGSIAAAVEVCQCPPGYTGSSCESCWPRHRRVNGTIFGGICEPCQCFGHAESCDDVTGECLNCKDHTGGPYCDKCLPGFYGEPTKGTSEDCQPCACPLNIPSNNFSPTCHLDRSLGLICDGCPVGYTGPRCERCAEGYFGQPSVPGGSCQPCQCNDNLDFSIPGSCDSLSGSCLICKPGTTGRYCELCADGYFGDAVDAKNCQPCRCNAGGSFSEVCHSQTGQCECRANVQGQRCDKCKAGTFGLQSARGCVPCNCNSFGSKSFDCEESGQCWCQPGVTGKKCDRCAHGYFNFQEGGCTACECSHLGNNCDPKTGRCICPPNTIGEKCSKCAPNTWGHSITTGCKACNCSTVGSLDFQCNVNTGQCNCHPKFSGAKCTECSRGHWNYPRCNLCDCFLPGTDATTCDSETKKCSCSDQTGQCTCKVNVEGIHCDRCRPGKFGLDAKNPLGCSSCYCFGTTTQCSEAKGLIRTWVTLKAEQTILPLVDEALQHTTTKGIVFQHPEIVAHMDLMREDLHLEPFYWKLPEQFEGKKLMAYGGKLKYAIYFEAREETGFSTYNPQVIIRGGTPTHARIIVRHMAAPLIGQLTRHEIEMTEKEWKYYGDDPRVHRTVTREDFLDILYDIHYILIKATYGNFMRQSRISEISMEVAEQGRGTTMTPPADLIEKCDCPLGYSGLSCEACLPGFYRLRSQPGGRTPGPTLGTCVPCQCNGHSSLCDPETSICQNCQHHTAGDFCERCALGYYGIVKGLPNDCQQCACPLISSSNNFSPSCVAEGLDDYRCTACPRGYEGQYCERCAPGYTGSPGNPGGSCQECECDPYGSLPVPCDPVTGFCTCRPGATGRKCDGCKHWHAREGWECVFCGDECTGLLLGDLARLEQMVMSINLTGPLPAPYKMLYGLENMTQELKHLLSPQRAPERLIQLAEGNLNTLVTEMNELLTRATKVTADGEQTGQDAERTNTRAKSLGEFIKELARDAEAVNEKAIKLNETLGTRDEAFERNLEGLQKEIDQMIKELRRKNLETQKEIAEDELVAAEALLKKVKKLFGESRGENEEMEKDLREKLADYKNKVDDAWDLLREATDKIREANRLFAVNQKNMTALEKKKEAVESGKRQIENTLKEGNDILDEANRLADEINSIIDYVEDIQTKLPPMSEELNDKIDDLSQEIKDRKLAEKVSQAESHAAQLNDSSAVLDGILDEAKNISFNATAAFKAYSNIKDYIDEAEKVAKEAKDLAHEATKLATGPRGLLKEDAKGCLQKSFRILNEAKKLANDVKENEDHLNGLKTRIENADARNGDLLRTLNDTLGKLSAIPNDTAAKLQAVKDKARQANDTAKDVLAQITELHQNLDGLKKNYNKLADSVAKTNAVVKDPSKNKIIADADATVKNLEQEADRLIDKLKPIKELEDNLKKNISEIKELINQARKQANSIKVSVSSGGDCIRTYKPEIKKGSYNNIVVNVKTAVADNLLFYLGSAKFIDFLAIEMRKGKVSFLWDVGSGVGRVEYPDLTIDDSYWYRIVASRTGRNGTISVRALDGPKASIVPSTHHSTSPPGYTILDVDANAMLFVGGLTGKLKKADAVRVITFTGCMGETYFDNKPIGLWNFREKEGDCKGCTVSPQVEDSEGTIQFDGEGYALVSRPIRWYPNISTVMFKFRTFSSSALLMYLATRDLRDFMSVELTDGHIKVSYDLGSGMASVVSNQNHNDGKWKSFTLSRIQKQANISIVDIDTNQEENIATSSSGNNFGLDLKADDKIYFGGLPTLRNLSMKARPEVNLKKYSGCLKDIEISRTPYNILSSPDYVGVTKGCSLENVYTVSFPKPGFVELSPVPIDVGTEINLSFSTKNESGIILLGSGGTPAPPRRKRRQTGQAYYAILLNRGRLEVHLSTGARTMRKIVIRPEPNLFHDGREHSVHVERTRGIFTVQVDENRRYMQNLTVEQPIEVKKLFVGGAPPEFQPSPLRNIPPFEGCIWNLVINSVPMDFARPVSFKNADIGRCAHQKLREDEDGAAPAEIVIQPEPVPTPAFPTPTPVLTHGPCAAESEPALLIGSKQFGLSRNSHIAIAFDDTKVKNRLTIELEVRTEAESGLLFYMARINHADFATVQLRNGLPYFSYDLGSGDTHTMIPTKINDGQWHKIKIMRSKQEGILYVDGASNRTISPKKADILDVVGMLYVGGLPINYTTRRIGPVTYSIDGCVRNLHMAEAPADLEQPTSSFHVGTCFANAQRGTYFDGTGFAKAVGGFKVGLDLLVEFEFRTTTTTGVLLGISSQKMDGMGIEMIDEKLMFHVDNGAGRFTAVYDAGVPGHLCDGQWHKVTANKIKHRIELTVDGNQVEAQSPNPASTSADTNDPVFVGGFPDDLKQFGLTTSIPFRGCIRSLKLTKGTGKPLEVNFAKALELRGVQPVSCPAN

SEQ ID NO: 7644 - protein, 3121 aa, Homo Sapiens
MPGAAGVLLLLLLSGGLGGVQAQRPQQQRQSQAHQQRGLFPAVLNLASNALITTNATCGEKGPEMYCKLVEHVPGQPVRNPQCRICNQNSSNPNQRHPITNAIDGKNTWWQSPSIKNGIEYHYVTITLDLQQVFQIAYVIVKAANSPRPGNWILERSLDDVEYKPWQYHAVTDTECLTLYNIYPRTGPPSYAKDDEVICTSFYSKIHPLENGEIHISLINGRPSADDPSPELLEFTSARYIRLRFQRIRTLNADLMMFAHKDPREIDPIVTRRYYYSVKDISVGGMCICYGHARACPLDPATNKSRCECEHNTCGDSCDQCCPGFHQKPWRAGTFLTKTECEACNCHGKAEECYYDENVARRNLSLNIRGKYIGGGVCINCTQNTAGINCETCTDGFFRPKGVSPNYPRPCQPCHCDPIGSLNEVCVKDEKHARRGLAPGSCHCKTGFGGVSCDRCARGYTGYPDCKACNCSGLGSKNEDPCFGPCICKENVEGGDCSRCKSGFFNLQEDNWKGCDECFCSGVSNRCQSSYWTYGKIQDMSGWYLTDLPGRIRVAPQQDDLDSPQQISISNAEARQALPHSYYWSAPAPYLGNKLPAVGGQLTFTISYDLEEEEEDTERVLQLMIILEGNDLSISTAQDEVYLHPSEEHTNVLLLKEESFTIHGTHFPVRRKEFMTVLANLKRVLLQITYSFGMDAIFRLSSVNLESAVSYPTDGSIAAAVEVCQCPPGYTGSSCESCWPRHRRVNGTIFGGICEPCQCFGHAESCDDVTGECLNCKDHTGGPYCDKCLPGFYGEPTKGTSEDCQPCACPLNIPSNNFSPTCHLDRSLGLICDGCPVGYTGPRCERCAEGYFGQPSVPGGSCQPCQCNDNLDFSIPGSCDSLSGSCLICKPGTTGRYCELCADGYFGDAVDAKNCQPCRCNAGGSFSEVCHSQTGQCECRANVQGQRCDKCKAGTFGLQSARGCVPCNCNSFGSKSFDCEESGQCWCQPGVTGKKCDRCAHGYFNFQEGGCTACECSHLGNNCDPKTGRCICPPNTIGEKCSKCAPNTWGHSITTGCKACNCSTVGSLDFQCNVNTGQCNCHPKFSGAKCTECSRGHWNYPRCNLCDCFLPGTDATTCDSETKKCSCSDQTGQCTCKVNVEGIHCDRCRPGKFGLDAKNPLGCSSCYCFGTTTQCSEAKGLIRTWVTLKAEQTILPLVDEALQHTTTKGIVFQHPEIVAHMDLMREDLHLEPFYWKLPEQFEGKKLMAYGGKLKYAIYFEAREETGFSTYNPQVIIRGGTPTHARIIVRHMAAPLIGQLTRHEIEMTEKEWKYYGDDPRVHRTVTREDFLDILYDIHYILIKATYGNFMRQSRISEISMEVAEQGRGTTMTPPADLIEKCDCPLGYSGLSCEACLPGFYRLRSQPGGRTPGPTLGTCVPCQCNGHSSLCDPETSICQNCQHHTAGDFCERCALGYYGIVKGLPNDCQQCACPLISSSNNFSPSCVAEGLDDYRCTACPRGYEGQYCERCAPGYTGSPGNPGGSCQECECDPYGSLPVPCDPVTGFCTCRPGATGRKCDGCKHWHAREGWECVFCGDECTGLLLGDLARLEQMVMSINLTGPLPAPYKMLYGLENMTQELKHLLSPQRAPERLIQLAEGNLNTLVTEMNELLTRATKVTADGEQTGQDAERTNTRAKSLGEFIKELARDAEAVNEKAIKLNETLGTRDEAFERNLEGLQKEIDQMIKELRRKNLETQKEIAEDELVAAEALLKKVKKLFGESRGENEEMEKDLREKLADYKNKVDDAWDLLREATDKIREANRLFAVNQKNMTALEKKKEAVESGKRQIENTLKEGNDILDEANRLADEINSIIDYVEDIQTKLPPMSEELNDKIDDLSQEIKDRKLAEKVSQAESHAAQLNDSSAVLDGILDEAKNISFNATAAFKAYSNIKDYIDEAEKVAKEAKDLAHEATKLATGPRGLLKEDAKGCLQKSFRILNEAKKLANDVKENEDHLNGLKTRIENADARNGDLLRTLNDTLGKLSAIPNDTAAKLQAVKDKARQANDTAKDVLAQITELHQNLDGLKKNYNKLADSVAKTNAVVKDPSKNTVADADATVKNLEQEADRLIDKLKPIKELEDNLKKNISEIKELINQARKQANSIKVSVSSGGDCIRTYKPEIKKGSYNNIVVNVKTAVADNLLFYLGSAKFIDFLAIEMRKGKVSFLWDVGSGVGRVEYPDLTIDDSYWYRIVASRTGRNGTISVRALDGPKASIVPSTHHSTSPPGYTILDVDANAMLFVGGLTGKLKKADAVRVITFTGCMGETYFDNKPIGLWNFREKEGDCKGCTVSPQVEDSEGTIQFDGEGYALVSRPIRWYPNISTVMFKFRTFSSSALLMYLATRDLRDFMSVELTDGHIKVSYDLGSGMASVVSNQNHNDGKWKSFTLSRIQKQANISIVDIDTNQEENIATSSSGNNFGLDLKADDKIYFGGLPTLRNLSMKARPEVNLKKYSGCLKDIEISRTPYNILSSPDYVGVTKGCSLENVYTVSFPKPGFVELSPVPIDVGTEINLSFSTKNESGIILLGSGGTPAPPRRKRRQTGQAYYAILLNRGRLEVHLSTGARTMRKIVIRPEPNLFHDGREHSVHVERTRGIFTVQVDENRRYMQNLTVEQPIEVKKLFVGGAPPEFQPSPLRNIPPFEGCIWNLVINSVPMDFARPVSFKNADIGRCAHQKLREDEDGAAPAEIVIQPEPVPTPAFPTPTPVLTHGPCAAESEPALLIGSKQFGLSRNSHIAIAFDDTKVKNRLTIELEVRTEAESGLLFYMARINHADFATVQLRNGLPYFSYDLGSGDTHTMIPTKINDGQWHKIKIMRSKQEGILYVDGASNRTISPKKADILDVVGMLYVGGLPINYTTRRIGPVTYSIDGCVRNLHMAEAPADLEQPTSSFHVGTCFANAQRGTYFDGTGFAKAVGGFKVGLDLLVEFEFRTTTTTGVLLGISSQKMDGMGIEMIDEKLMFHVDNGAGRFTAVYDAGVPGHLCDGQWHKVTANKIKHRIELTVDGNQVEAQSPNPASTSADTNDPVFVGGFPDDLKQFGLTTSIPFRGCIRSLKLTKGTGKPLEVNFAKALELRGVQPVSCPAN

SEQ ID NO: 7645 - protein, 3118 aa, Homo Sapiens
MPGAAGVLLLLLLSGGLGGVQAQRPQQQRQSQAHQQRGLFPAVLNLASNALITTNATCGEKGPEMYCKLVEHVPGQPVRNPQCRICNQNSSNPNQRHPITNAIDGKNTWWQSPSIKNGIEYHYVTITLDLQQVFQIAYVIVKAANSPRPGNWILERSLDDVEYKPWQYHAVTDTECLTLYNIYPRTGPPSYAKDDEVICTSFYSKIHPLENGEIHISLINGRPSADDPSPELLEFTSARYIRLRFQRIRTLNADLMMFAHKDPREIDPIVTRRYYYSVKDISVGGMCICYGHARACPLDPATNKSRCECEHNTCGDSCDQCCPGFHQKPWRAGTFLTKTECEACNCHGKAEECYYDENVARRNLSLNIRGKYIGGGVCINCTQNTAGINCETCTDGFFRPKGVSPNYPRPCQPCHCDPIGSLNEVCVKDEKHARRGLAPGSCHCKTGFGGVSCDRCARGYTGYPDCKACNCSGLGSKNEDPCFGPCICKENVEGGDCSRCKSGFFNLQEDNWKGCDECFCSGVSNRCQSSYWTYGKIQDMSGWYLTDLPGRIRVAPQQDDLDSPQQISISNAEARQALPHSYYWSAPAPYLGNKLPAVGGQLTFTISYDLEEEEEDTERVLQLMIILEGNDLSISTAQDEVYLHPSEEHTNVLLLKEESFTIHGTHFPVRRKEFMTVLANLKRVLLQITYSFGMDAIFRLSSVNLESAVSYPTDGSIAAAVEVCQCPPGYTGSSCESCWPRHRRVNGTIFGGICEPCQCFGHAESCDDVTGECLNCKDHTGGPYCDKCLPGFYGEPTKGTSEDCQPCACPLNIPSNNFSPTCHLDRSLGLICDGCPVGYTGPRCERCAEGYFGQPSVPGGSCQPCQCNDNLDFSIPGSCDSLSGSCLICKPGTTGRYCELCADGYFGDAVDAKNCQPCRCNAGGSFSEVCHSQTGQCECRANVQGQRCDKCKAGTFGLQSARGCVPCNCNSFGSKSFDCEESGQCWCQPGVTGKKCDRCAHGYFNFQEGGCTACECSHLGNNCDPKTGRCICPPNTIGEKCSKCAPNTWGHSITTGCKACNCSTVGSLDFQCNVNTGQCNCHPKFSGAKCTECSRGHWNYPRCNLCDCFLPGTDATTCDSETKKCSCSDQTGQCTCKVNVEGIHCDRCRPGKFGLDAKNPLGCSSCYCFGTTTQCSEAKGLIRTWVTLKAEQTILPLVDEALQHTTTKGIVFQHPEIVAHMDLMREDLHLEPFYWKLPEQFEGKKLMAYGGKLKYAIYFEAREETGFSTYNPQVIIRGGTPTHARIIVRHMAAPLIGQLTRHEIEMTEKEWKYYGDDPRVHRTVTREDFLDILYDIHYILIKATYGNFMRQSRISEISMEVAEQGRGTTMTPPADLIEKCDCPLGYSGLSCEACLPGFYRLRSQPGGRTPGPTLGTCVPCQCNGHSSLCDPETSICQNCQHHTAGDFCERCALGYYGIVKGLPNDCQQCACPLISSSNNFSPSCVAEGLDDYRCTACPRGYEGQYCERCAPGYTGSPGNPGGSCQECECDPYGSLPVPCDPVTGFCTCRPGATGRKCDGCKHWHAREGWECVFCGDECTGLLLGDLARLEQMVMSINLTGPLPAPYKMLYGLENMTQELKHLLSPQRAPERLIQLAEGNLNTLVTEMNELLTRATKVTADGEQTGQDAERTNTRAKSLGEFIKELARDAEAVNEKAIKLNETLGTRDEAFERNLEGLQKEIDQMIKELRRKNLETQKEIAEDELVAAEALLKKVKKLFGESRGENEEMEKDLREKLADYKNKVDDAWDLLREATDKIREANRLFAVNQKNMTALEKKKEAVESGKRQIENTLKEGNDILDEANRLADEINSIIDYVEDIQTKLPPMSEELNDKIDDLSQEIKDRKLAEKVSQAESHAAQLNDSSAVLDGILDEAKNISFNATAAFKAYSNIKDYIDEAEKVAKEAKDLAHEATKLATGPRGLLKEDAKGCLQKSFRILNEAKKLANDVKENEDHLNGLKTRIENADARNGDLLRTLNDTLGKLSAIPNDTAAKLQAVKDKARQANDTAKDVLAQITELHQNLDGLKKNYNKLADSVAKTNAVVKDPSKNNAVADADATVKNLEQEADRLIDKLKPIKELEDNLKKNISEIKELINQARKQANSIKVSVSSGGDCIRTYKPEIKKGSYNNIVVNVKTAVADNLLFYLGSAKFIDFLAIEMRKGKVSFLWDVGSGVGRVEYPDLTIDDSYWYRIVASRTGRNGTISVRALDGPKASIVPSTHHSTSPPGYTILDVDANAMLFVGGLTGKLKKADAVRVITFTGCMGETYFDNKPIGLWNFREKEGDCKGCTVSPQVEDSEGTIQFDGEGYALVSRPIRWYPNISTVMFKFRTFSSSALLMYLATRDLRDFMSVELTDGHIKVSYDLGSGMASVVSNQNHNDGKWKSFTLSRIQKQANISIVDIDTNQEENIATSSSGNNFGLDLKADDKIYFGGLPTLRNLRPEVNLKKYSGCLKDIEISRTPYNILSSPDYVGVTKGCSLENVYTVSFPKPGFVELSPVPIDVGTEINLSFSTKNESGIILLGSGGTPAPPRRKRRQTGQAYYAILLNRGRLEVHLSTGARTMRKIVIRPEPNLFHDGREHSVHVERTRGIFTVQVDENRRYMQNLTVEQPIEVKKLFVGGAPPEFQPSPLRNIPPFEGCIWNLVINSVPMDFARPVSFKNADIGRCAHQKLREDEDGAAPAEIVIQPEPVPTPAFPTPTPVLTHGPCAAESEPALLIGSKQFGLSRNSHIAIAFDDTKVKNRLTIELEVRTEAESGLLFYMARINHADFATVQLRNGLPYFSYDLGSGDTHTMIPTKINDGQWHKIKIMRSKQEGILYVDGASNRTISPKKADILDVVGMLYVGGLPINYTTRRIGPVTYSIDGCVRNLHMAEAPADLEQPTSSFHVGTCFANAQRGTYFDGTGFAKAVGGFKVGLDLLVEFEFRTTTTTGVLLGISSQKMDGMGIEMIDEKLMFHVDNGAGRFTAVYDAGVPGHLCDGQWHKVTANKIKHRIELTVDGNQVEAQSPNPASTSADTNDPVFVGGFPDDLKQFGLTTSIPFRGCIRSLKLTKGTGKPLEVNFAKALELRGVQPVSCPAN

SEQ ID NO: 7646 - protein, 184 aa, Homo Sapiens
  misc_feature (1)..(1): Xaa can be any naturally occurring amino acid
XCRCNAGGSFSEVCHSQTGQCECRANVQGQRCDKCKPNMWRDPEKRFCVLCDCDPVGSVSPQCDITGRCVCKSGFVGKQCNLGRQVHQQEEQPRRAQRVLGSPQRWAIGSSSGCPRGAYRAPAPAGTFGLQSARGCVPCNCNSFGSKSFDCEESGQCWCQPGVTGKKCDRCAHGYFNFQEGGCT

SEQ ID NO: 7647 - protein, 94 aa, Homo Sapiens
LVRSASFSRGGQLSFTDLGLPPTDHLQASFGFQTFQPSGILLDHQTWTRNLQVTLEDGYIELSTSDSGGPIFKSPQTYMDGLLHYVSVISDNSG

SEQ ID NO: 7648 - protein, 3333 aa, Homo Sapiens
MAAAARPRGRALGPVLPPTPLLLLVLRVLPACGATARDPGAAAGLSLHPTYFNLAEAARIWATATCGERGPGEGRPQPELYCKLVGGPTAPGSGHTIQGQFCDYCNSEDPRKAHPVTNAIDGSERWWQSPPLSSGTQYNRVNLTLDLGQLFHVAYILIKFANSPRPDLWVLERSVDFGSTYSPWQYFAHSKVDCLKEFGREANMAVTRDDDVLCVTEYSRIVPLENGEVVVSLINGRPGAKNFTFSHTLREFTKATNIRLRFLRTNTLLGHLISKAQRDPTVTRRYYYSIKDISIGGQCVCNGHAEVCNINNPEKLFRCECQHHTCGETCDRCCTGYNQRRWRPAAWEQSHECEACNCHGHASNCYYDPDVERQQASLNTQGIYAGGGVCINCQHNTAGVNCEQCAKGYYRPYGVPVDAPDGCIPCSCDPEHADGCEQGSGRCHCKPNFHGDNCEKCAIGYYNFPFCLRIPIFPVSTPSSEDPVAGDIKGCDCNLEGVLPEICDAHGRCLCRPGVEGPRCDTCRSGFYSFPICQACWCSALGSYQMPCSSVTGQCECRPGVTGQRCDRCLSGAYDFPHCQGSSSACDPAGTINSNLGYCQCKLHVEGPTCSRCKLLYWNLDKENPSGCSECKCHKAGTVSGTGECRQGDGDCHCKSHVGGDSCDTCEDGYFALEKSNYFGCQGCQCDIGGALSSMCSGPSGVCQCREHVVGKVCQRPENNYYFPDLHHMKYEIEDGSTPNGRDLRFGFDPLAFPEFSWRGYAQMTSVQNDVRITLNVGKSSGSLFRVILRYVNPGTEAVSGHITIYPSWGAAQSKEIIFLPSKEPAFVTVPGNGFADPFSITPGIWVACIKAEGVLLDYLVLLPRDYYEASVLQLPVTEPCAYAGPPQENCLLYQHLPVTRFPCTLACEARHFLLDGEPRPVAVRQPTPAHPVMVDLSGREVELHLRLRIPQVGHYVVVVEYSTEAAQLFVVDVNVKSSGSVLAGQVNIYSCNYSVLCRSAVIDHMSRIAMYELLADADIQLKGHMARFLLHQVCIIPIEEFSAEYVRPQVHCIASYGRFVNQSATCVSLAHETPPTALILDVLSGRPFPHLPQQSSPSVDVLPGVTLKAPQNQVTLRGRVPHLGRYVFVIHFYQAAHPTFPAQVSVDGGWPRAGSFHASFCPHVLGCRDQVIAEGQIEFDISEPEVAATVKVPEGKSLVLVRVLVVPAENYDYQILHKKSMDKSLEFITNCGKNSFYLDPQTASRFCKNSARSLVAFYHKGALPCECHPTGATGPHCSPEGGQCPCQPNVIGRQCTRCATGHYGFPRCKPCSCGRRLCEEMTGQCRCPPRTVRPQCEVCETHSFSFHPMAGCEGCNCSRRGTIEAAMPECDRDSGQCRCKPRITGRQCDRCASGFYRFPECVPCNCNRDGTEPGVCDPGTGACLCKENVEGTECNVCREGSFHLDPANLKGCTSCFCFGVNNQCHSSHKRRTKFVDMLGWHLETADRVDIPVSFNPGSNSMVADLQELPATIHSASWVAPTSYLGDKVSSYGGYLTYQAKSFGLPGDMVLLEKKPDVQLTGQHMSIIYEETNTPRPDRLHHGRVHVVEGNFRHASSRAPVSREELMTVLSRLADVRIQGLYFTETQRLTLSEVGLEEASDTGSGRIALAVEICACPPAYAGDSCQGCSPGYYRDHKGLYTGRCVPCNCNGHSNQCQDGSGICVNCQHNTAGEHCERCQEGYYGNAVHGSCRACPCPHTNSFATGCVVNGGDVRCSCKAGYTGTQCERCAPGYFGNPQKFGGSCQPCSCNSNGQLGSCHPLTGDCINQEPKDSSPAEECDDCDSCVMTLLNDLATMGEQLRLVKSQLQGLSASAGLLEQMRHMETQAKDLRNQLLNYRSAISNHGSKIEGLERELTDLNQEFETLQEKAQVNSRKAQTLNNNVNRATQSAKELDVKIKNVIRNVHILLKQISGTDGEGNNVPSGDFSREWAEAQRMMRELRNRNFGKHLREAEADKRESQLLLNRIRTWQKTHQGENNGLANSIRDSLNEYEAKLSDLRARLQEAAAQAKQANGLNQENERALGAIQRQVKEINSLQSDFTKYLTTADSSLLQTNIALQLMEKSQKEYEKLAASLNEARQELSDKVRELSRSAGKTSLVEEAEKHARSLQELAKQLEEIKRNASGDELVRCAVDAATAYENILNAIKAAEDAANRAASASESALQTVIKEDLPRKAKTLSSNSDKLLNEAKMTQKKLKQEVSPALNNLQQTLNIVTVQKEVIDTNLTTLRDGLHGIQRGDIDAMISSAKSMVRKANDITDEVLDGLNPIQTDVERIKDTYGRTQNEDFKKALTDADNSVNKLTNKLPDLWRKIESINQQLLPLGNISDNMDRIRELIQQARDAASKVAVPMRFNGKSGVEVRLPNDLEDLKGYTSLSLFLQRPNSRENGGTENMFVMYLGNKDASRDYIGMAVVDGQLTCVYNLGDREAELQVDQILTKSETKEAVMDRVKFQRIYQFARLNYTKGATSSKPETPGVYDMDGRNSNTLLNLDPENVVFYVGGYPPDFKLPSRLSFPPYKGCIELDDLNENVLSLYNFKKTFNLNTTEVEPCRRRKEESDKNYFEGTGYARVPTQPHAPIPTFGQTIQTTVDRGLLFFAENGDRFISLNIEDGKLMVRYKLNSELPKERGVGDAINNGRDHSIQIKIGKLQKRMWINVDVQNTIIDGEVFDFSTYYLGGIPIAIRERFNISTPAFRGCMKNLKKTSGVVRLNDTVGVTKKCSEDWKLVRSASFSRGGQLSFTDLGLPPTDHLQASFGFQTFQPSGILLDHQTWTRNLQVTLEDGYIELSTSDSGGPIFKSPQTYMDGLLHYVSVISDNSGLRLLIDDQLLRNSKRLKHISSSRQSLRLGGSNFEGCISNVFVQRLSLSPEVLDLTSNSLKRDVSLGGCSLNKPPFLMLLKGSTRFNKTKTFRINQLLQDTPVASPRSVKVWQDACSPLPKTQANHGALQFGDIPTSHLLFKLPQELLKPRSQFAVDMQTTSSRGLVFHTGTKNSFMALYLSKGRLVFALGTDGKKLRIKSKEKCNDGKWHTVVFGHDGEKGRLVVDGLRAREGSLPGNSTISIRAPVYLGSPPSGKPKSLPTNSFVGCLKNFQLDSKPLYTPSSSFGVSSCLGGPLEKGIYFSEEGGHVVLAHSVLLGPEFKLVFSIRPRSLTGILIHIGSQPGKHLCVYLEAGKVTASMDSGAGGTSTSVTPKQSLCDGQWHSVAVTIKQHILHLELDTDSSYTAGQIPFPPASTQEPLHLGGAPANLTTLRIPVWKSFFGCLRNIHVNHIPVPVTEALEVQGPVSLNGCPDQ

SEQ ID NO: 7649 - protein, 3277 aa, Homo Sapiens
MAAAARPRGRALGPVLPPTPLLLLVLRVLPACGATARDPGAAAGLSLHPTYFNLAEAARIWATATCGERGPGEGRPQPELYCKLVGGPTAPGSGHTIQGQFCDYCNSEDPRKAHPVTNAIDGSERWWQSPPLSSGTQYNRVNLTLDLGQLFHVAYILIKFANSPRPDLWVLERSVDFGSTYSPWQYFAHSKVDCLKEFGREANMAVTRDDDVLCVTEYSRIVPLENGEVVVSLINGRPGAKNFTFSHTLREFTKATNIRLRFLRTNTLLGHLISKAQRDPTVTRRYYYSIKDISIGGQCVCNGHAEVCNINNPEKLFRCECQHHTCGETCDRCCTGYNQRRWRPAAWEQSHECEACNCHGHASNCYYDPDVERQQASLNTQGIYAGGGVCINCQHNTAGVNCEQCAKGYYRPYGVPVDAPDGCIPCSCDPEHADGCEQGSGRCHCKPNFHGDNCEKCAIGYYNFPFCLRIPIFPVSTPSSEDPVAGDIKGCDCNLEGVLPEICDAHGRCLCRPGVEGPRCDTCRSGFYSFPICQACWCSALGSYQMPCSSVTGQCECRPGVTGQRCDRCLSGAYDFPHCQGSSSACDPAGTINSNLGYCQCKLHVEGPTCSRCKLLYWNLDKENPSGCSECKCHKAGTVSGTGECRQGDGDCHCKSHVGGDSCDTCEDGYFALEKSNYFGCQGCQCDIGGALSSMCSGPSGVCQCREHVVGKVCQRPENNYYFPDLHHMKYEIEDGSTPNGRDLRFGFDPLAFPEFSWRGYAQMTSVQNDVRITLNVGKSSGSLFRVILRYVNPGTEAVSGHITIYPSWGAAQSKEIIFLPSKEPAFVTVPGNGFADPFSITPGIWVACIKAEGVLLDYLVLLPRDYYEASVLQLPVTEPCAYAGPPQENCLLYQHLPVTRFPCTLACEARHFLLDGEPRPVAVRQPTPAHPVMVDLSGREVELHLRLRIPQVGHYVVVVEYSTEAAQLFVVDVNVKSSGSVLAGQVNIYSCNYSVLCRSAVIDHMSRIAMYELLADADIQLKGHMARFLLHQVCIIPIEEFSAEYVRPQVHCIASYGRFVNQSATCVSLAHETPPTALILDVLSGRPFPHLPQQSSPSVDVLPGVTLKAPQNQVTLRGRVPHLGRYVFVIHFYQAAHPTFPAQVSVDGGWPRAGSFHASFCPHVLGCRDQVIAEGQIEFDISEPEVAATVKVPEGKSLVLVRVLVVPAENYDYQILHKKSMDKSLEFITNCGKNSFYLDPQTASRFCKNSARSLVAFYHKGALPCECHPTGATGPHCSPEGGQCPCQPNVIGRQCTRCATGHYGFPRCKPCSCGRRLCEEMTGQCRCPPRTVRPQCEVCETHSFSFHPMAGCEGCNCSRRGTIEAAMPECDRDSGQCRCKPRITGRQCDRCASGFYRFPECVPCNCNRDGTEPGVCDPGTGACLCKENVEGTECNVCREGSFHLDPANLKGCTSCFCFGVNNQCHSSHKRRTKFVDMLGWHLETADRVDIPVSFNPGSNSMVADLQELPATIHSASWVAPTSYLGDKVSSYGGYLTYQAKSFGLPGDMVLLEKKPDVQLTGQHMSIIYEETNTPRPDRLHHGRVHVVEGNFRHASSRAPVSREELMTVLSRLADVRIQGLYFTETQRLTLSEVGLEEASDTGSGRIALAVEICACPPAYAGDSCQGCSPGYYRDHKGLYTGRCVPCNCNGHSNQCQDGSGICVNCQHNTAGEHCERCQEGYYGNAVHGSCRACPCPHTNSFATGCVVNGGDVRCSCKAGYTGTQCERCAPGYFGNPQKFGGSCQPCSCNSNGQLGSCHPLTGDCINQEPKDSSPAEECDDCDSCVMTLLNDLATMGEQLRLVKSQLQGLSASAGLLEQMRHMETQAKDLRNQLLNYRSAISNHGSKIEGLERELTDLNQEFETLQEKAQVNSRKAQTLNNNVNRATQSAKELDVKIKNVIRNVHMLNRIRTWQKTHQGENNGLANSIRDSLNEYEAKLSDLRARLQEAAAQAKQANGLNQENERALGAIQRQVKEINSLQSDFTKYLTTADSSLLQTNIALQLMEKSQKEYEKLAASLNEARQELSDKVRELSRSAGKTSLVEEAEKHARSLQELAKQLEEIKRNASGDELVRCAVDAATAYENILNAIKAAEDAANRAASASESALQTVIKEDLPRKAKTLSSNSDKLLNEAKMTQKKLKQEVSPALNNLQQTLNIVTVQKEVIDTNLTTLRDGLHGIQRGDIDAMISSAKSMVRKANDITDEVLDGLNPIQTDVERIKDTYGRTQNEDFKKALTDADNSVNKLTNKLPDLWRKIESINQQLLPLGNISDNMDRIRELIQQARDAASKVAVPMRFNGKSGVEVRLPNDLEDLKGYTSLSLFLQRPNSRENGGTENMFVMYLGNKDASRDYIGMAVVDGQLTCVYNLGDREAELQVDQILTKSETKEAVMDRVKFQRIYQFARLNYTKGATSSKPETPGVYDMDGRNSNTLLNLDPENVVFYVGGYPPDFKLPSRLSFPPYKGCIELDDLNENVLSLYNFKKTFNLNTTEVEPCRRRKEESDKNYFEGTGYARVPTQPHAPIPTFGQTIQTTVDRGLLFFAENGDRFISLNIEDGKLMVRYKLNSELPKERGVGDAINNGRDHSIQIKIGKLQKRMWINVDVQNTIIDGEVFDFSTYYLGGIPIAIRERFNISTPAFRGCMKNLKKTSGVVRLNDTVGVTKKCSEDWKLVRSASFSRGGQLSFTDLGLPPTDHLQASFGFQTFQPSGILLDHQTWTRNLQVTLEDGYIELSTSDSGGPIFKSPQTYMDGLLHYVSVISDNSGLRLLIDDQLLRNSKRLKHISSSRQSLRLGGSNFEGCISNVFVQRLSLSPEVLDLTSNSLKRDVSLGGCSLNKPPFLMLLKGSTRFNKTKTFRINQLLQDTPVASPRSVKVWQDACSPLPKTQANHGALQFGDIPTSHLLFKLPQELLKPRSQFAVDMQTTSSRGLVFHTGTKNSFMALYLSKGRLVFALGTDGKKLRIKSKEKCNDGKWHTVVFGHDGEKGRLVVDGLRAREGSLPGNSTISIRAPVYLGSPPSGKPKSLPTNSFVGCLKNFQLDSKPLYTPSSSFGVSSCLGGPLEKGIYFSEEGGHVVLAHSVLLGPEFKLVFSIRPRSLTGILIHIGSQPGKHLCVYLEAGKVTASMDSGAGGTSTSVTPKQSLCDGQWHSVAVTIKQHILHLELDTDSSYTAGQIPFPPASTQEPLHLGGAPANLTTLRIPVWKSFFGCLRNIHVNHIPVPVTEALEVQGPVSLNGCPDQ

SEQ ID NO: 7650 - protein, 576 aa, Homo Sapiens
MAAAARPRGRALGPVLPPTPLLLLVLRVLPACGATARDPGAAAGLSLHPTYFNLAEAARIWATATCGERGPGEGRPQPELYCKLVGGPTAPGSGHTIQGQFCDYCNSEDPRKAHPVTNAIDGSERWWQSPPLSSGTQYNRVNLTLDLGQLFHVAYILIKFANSPRPDLWVLERSVDFGSTYSPWQYFAHSKVDCLKEFGREANMAVTRDDDVLCVTEYSRIVPLENGEVVVSLINGRPGAKNFTFSHTLREFTKATNIRLRFLRTNTLLGHLISKAQRDPTVTRRYYYSIKDISIGGQCVCNGHAEVCNINNPEKLFRCECQHHTCGETCDRCCTGYNQRRWRPAAWEQSHECEACNCHGHASNCYYDPDVERQQASLNTQGIYAGGGVCINCQHNTAGVNCEQCAKGYYRPYGVPVDAPDGCIPCSCDPEHADGCEQGSGRCHCKPNFHGDNCEKCAIGYYNFPFCLRIPIFPVSTPSSEDPVAGDIKGCDCNLEGVLPEICDAHGRCLCRPGVEGPRCDTCRSGFYSFPICQGPSEKVAIYKPESRPSAETEPASTWILDFPASRTGEINFYCL

SEQ ID NO: 7651 - protein, 1724 aa, Homo Sapiens
MPPAVRRSACSMGWLWIFGAALGQCLGYSSQQQRVPFLQPPGQSQLQASYVEFRPSQGCSPGYYRDHKGLYTGRCVPCNCNGHSNQCQDGSGICVNCQHNTAGEHCERCQEGYYGNAVHGSCRACPCPHTNSFATGCVVNGGDVRCSCKAGYTGTQCERCAPGYFGNPQKFGGSCQPCSCNSNGQLGSCHPLTGDCINQEPKDSSPAEECDDCDSCVMTLLNDLATMGEQLRLVKSQLQGLSASAGLLEQMRHMETQAKDLRNQLLNYRSAISNHGSKIEGLERELTDLNQEFETLQEKAQVNSRKAQTLNNNVNRATQSAKELDVKIKNVIRNVHILLKQISGTDGEGNNVPSGDFSREWAEAQRMMRELRNRNFGKHLREAEADKRESQLLLNRIRTWQKTHQGENNGLANSIRDSLNEYEAKLSDLRARLQEAAAQAKQANGLNQENERALGAIQRQVKEINSLQSDFTKYLTTADSSLLQTNIALQLMEKSQKEYEKLAASLNEARQELSDKVRELSRSAGKTSLVEEAEKHARSLQELAKQLEEIKRNASGDELVRCAVDAATAYENILNAIKAAEDAANRAASASESALQTVIKEDLPRKAKTLSSNSDKLLNEAKMTQKKLKQEVSPALNNLQQTLNIVTVQKEVIDTNLTTLRDGLHGIQRGDIDAMISSAKSMVRKANDITDEVLDGLNPIQTDVERIKDTYGRTQNEDFKKALTDADNSVNKLTNKLPDLWRKIESINQQLLPLGNISDNMDRIRELIQQARDAASKVAVPMRFNGKSGVEVRLPNDLEDLKGYTSLSLFLQRPNSRENGGTENMFVMYLGNKDASRDYIGMAVVDGQLTCVYNLGDREAELQVDQILTKSETKEAVMDRVKFQRIYQFARLNYTKGATSSKPETPGVYDMDGRNSNTLLNLDPENVVFYVGGYPPDFKLPSRLSFPPYKGCIELDDLNENVLSLYNFKKTFNLNTTEVEPCRRRKEESDKNYFEGTGYARVPTQPHAPIPTFGQTIQTTVDRGLLFFAENGDRFISLNIEDGKLMVRYKLNSELPKERGVGDAINNGRDHSIQIKIGKLQKRMWINVDVQNTIIDGEVFDFSTYYLGGIPIAIRERFNISTPAFRGCMKNLKKTSGVVRLNDTVGVTKKCSEDWKLVRSASFSRGGQLSFTDLGLPPTDHLQASFGFQTFQPSGILLDHQTWTRNLQVTLEDGYIELSTSDSGGPIFKSPQTYMDGLLHYVSVISDNSGLRLLIDDQLLRNSKRLKHISSSRQSLRLGGSNFEGCISNVFVQRLSLSPEVLDLTSNSLKRDVSLGGCSLNKPPFLMLLKGSTRFNKTKTFRINQLLQDTPVASPRSVKVWQDACSPLPKTQANHGALQFGDIPTSHLLFKLPQELLKPRSQFAVDMQTTSSRGLVFHTGTKNSFMALYLSKGRLVFALGTDGKKLRIKSKEKCNDGKWHTVVFGHDGEKGRLVVDGLRAREGSLPGNSTISIRAPVYLGSPPSGKPKSLPTNSFVGCLKNFQLDSKPLYTPSSSFGVSSCLGGPLEKGIYFSEEGGHVVLAHSVLLGPEFKLVFSIRPRSLTGILIHIGSQPGKHLCVYLEAGKVTASMDSGAGGTSTSVTPKQSLCDGQWHSVAVTIKQHILHLELDTDSSYTAGQIPFPPASTQEPLHLGGAPANLTTLRIPVWKSFFGCLRNIHVNHIPVPVTEALEVQGPVSLNGCPDQ

SEQ ID NO: 7652 - protein, 1668 aa, Homo Sapiens
MPPAVRRSACSMGWLWIFGAALGQCLGYSSQQQRVPFLQPPGQSQLQASYVEFRPSQGCSPGYYRDHKGLYTGRCVPCNCNGHSNQCQDGSGICVNCQHNTAGEHCERCQEGYYGNAVHGSCRACPCPHTNSFATGCVVNGGDVRCSCKAGYTGTQCERCAPGYFGNPQKFGGSCQPCSCNSNGQLGSCHPLTGDCINQEPKDSSPAEECDDCDSCVMTLLNDLATMGEQLRLVKSQLQGLSASAGLLEQMRHMETQAKDLRNQLLNYRSAISNHGSKIEGLERELTDLNQEFETLQEKAQVNSRKAQTLNNNVNRATQSAKELDVKIKNVIRNVHMLNRIRTWQKTHQGENNGLANSIRDSLNEYEAKLSDLRARLQEAAAQAKQANGLNQENERALGAIQRQVKEINSLQSDFTKYLTTADSSLLQTNIALQLMEKSQKEYEKLAASLNEARQELSDKVRELSRSAGKTSLVEEAEKHARSLQELAKQLEEIKRNASGDELVRCAVDAATAYENILNAIKAAEDAANRAASASESALQTVIKEDLPRKAKTLSSNSDKLLNEAKMTQKKLKQEVSPALNNLQQTLNIVTVQKEVIDTNLTTLRDGLHGIQRGDIDAMISSAKSMVRKANDITDEVLDGLNPIQTDVERIKDTYGRTQNEDFKKALTDADNSVNKLTNKLPDLWRKIESINQQLLPLGNISDNMDRIRELIQQARDAASKVAVPMRFNGKSGVEVRLPNDLEDLKGYTSLSLFLQRPNSRENGGTENMFVMYLGNKDASRDYIGMAVVDGQLTCVYNLGDREAELQVDQILTKSETKEAVMDRVKFQRIYQFARLNYTKGATSSKPETPGVYDMDGRNSNTLLNLDPENVVFYVGGYPPDFKLPSRLSFPPYKGCIELDDLNENVLSLYNFKKTFNLNTTEVEPCRRRKEESDKNYFEGTGYARVPTQPHAPIPTFGQTIQTTVDRGLLFFAENGDRFISLNIEDGKLMVRYKLNSELPKERGVGDAINNGRDHSIQIKIGKLQKRMWINVDVQNTIIDGEVFDFSTYYLGGIPIAIRERFNISTPAFRGCMKNLKKTSGVVRLNDTVGVTKKCSEDWKLVRSASFSRGGQLSFTDLGLPPTDHLQASFGFQTFQPSGILLDHQTWTRNLQVTLEDGYIELSTSDSGGPIFKSPQTYMDGLLHYVSVISDNSGLRLLIDDQLLRNSKRLKHISSSRQSLRLGGSNFEGCISNVFVQRLSLSPEVLDLTSNSLKRDVSLGGCSLNKPPFLMLLKGSTRFNKTKTFRINQLLQDTPVASPRSVKVWQDACSPLPKTQANHGALQFGDIPTSHLLFKLPQELLKPRSQFAVDMQTTSSRGLVFHTGTKNSFMALYLSKGRLVFALGTDGKKLRIKSKEKCNDGKWHTVVFGHDGEKGRLVVDGLRAREGSLPGNSTISIRAPVYLGSPPSGKPKSLPTNSFVGCLKNFQLDSKPLYTPSSSFGVSSCLGGPLEKGIYFSEEGGHVVLAHSVLLGPEFKLVFSIRPRSLTGILIHIGSQPGKHLCVYLEAGKVTASMDSGAGGTSTSVTPKQSLCDGQWHSVAVTIKQHILHLELDTDSSYTAGQIPFPPASTQEPLHLGGAPANLTTLRIPVWKSFFGCLRNIHVNHIPVPVTEALEVQGPVSLNGCPDQ

SEQ ID NO: 7653 - protein, 59 aa, Homo Sapiens
  misc_feature (1)..(1): Xaa can be any naturally occurring amino acid
XAGQVNIYSCNYRCDAMNSLLSPQRLCQVPGCIAQGKRLILSNVRGCTPTFATHLQNWG

SEQ ID NO: 7654 - protein, 1147 aa, Homo Sapiens
  misc_feature (1)..(1): Xaa can be any naturally occurring amino acid
XFATGCVVNGGDVRCSCKAGYTGTQCERCAPGYFGNPQKFGGSCQPCSCNSNGQLGSCHPLTGDCINQEPKDSSPAEECDDCDSCVMTLLNDLATMGEQLRLVKSQLQGLSASAGLLEQMRHMETQAKDLRNQLLNYRSAISNHGSKIEGLERELTDLNQEFETLQEKAQVNSRKAQTLNNNVNRATQSAKELDVKIKNVIRNVHILLKQISGTDGEGNNVPSGDFSREWAEAQRMMRELRNRNFGKHLREAEADKRESQLLLNRIRTWQKTHQGENNGLANSIRDSLNEYEAKLSDLRARLQEAAAQAKQANGLNQENERALGAIQRQVKEINSLQSDFTKYLTTADSSLLQTNIALQLMEKSQKEYEKLAASLNEARQELSDKVRELSRSAGKTSLVEEAEKHARSLQELAKQLEEIKRNASGDELVRCAVDAATAYENILNAIKAAEDAANRAASASESALQTVIKEDLPRKAKTLSSNSDKLLNEAKMTQKKLKQEVSPALNNLQQTLNIVTVQKEVIDTNLTTLRDGLHGIQRGDIDAMISSAKSMVRKANDITDEVLDGLNPIQTDVERIKDTYGRTQNEDFKKALTDADNSVNKLTNKLPDLWRKIESINQQLLPLGNISDNMDRIRELIQQARDAASKVAVPMRFNGKSGVEVRLPNDLEDLKGYTSLSLFLQRPNSRENGGTENMFVMYLGNKDASRDYIGMAVVDGQLTCVYNLGDREAELQVDQILTKSETKEAVMDRVKFQRIYQFARLNYTKGATSSKPETPGVYDMDGRNSNTLLNLDPENVVFYVGGYPPDFKLPSRLSFPPYKGCIELDDLNENVLSLYNFKKTFNLNTTEVEPCRRRKEESDKNYFEGTGYARVPTQPHAPIPTFGQTIQTTVDRGLLFFAENGDRFISLNIEDGKLMVRYKLNSELPKERGVGDAINNGRDHSIQIKIGKLQKRMWINVDVQNTIIDGEVFDFSTYYLGGIPIAIRERFNISTPAFRGCMKNLKKTSGVVRLNDTVGVTKKCSEDWKLVRSASFSRGGQLSFTDLGLPPTDHLQASFGFQTFQPSGILLDHQTWTRNLQVTLEDGYIELSTSDSGGPIFKSPQTYMDGLLHYVSVISDNSGLRQEGCLRPRVRDQSWKHSETMSLRKLK

SEQ ID NO: 7655 - protein, 134 aa, Homo Sapiens
  misc_feature (1)..(1): Xaa can be any naturally occurring amino acid
XFSEEGGHVVLAHSVLLGPEFKLVFSIRPRSLTGILIHIGSQPGKHLCVYLEAGKVTASMDSGAGGTSTSVTPKQSLCDGQWHSVAANLTTLRIPVWKSFFGCLRNIHVNHIPVPVTEALEVQGPVSLNGCPDQ

SEQ ID NO: 7656 - protein, 37 aa, Homo Sapiens
  misc_feature (1)..(1): Xaa can be any naturally occurring amino acid
XGWTEGPGGKFAWKLHHQHQSASLPGITSIRETKGAG

SEQ ID NO: 7657 - protein, 81 aa, Homo Sapiens
MALSSAWRSVLPLWLLWSAACSRAASGDDNAFPFDIEGSSAVGRQDPPETSEPRVALGRLPPAAEKCNAGFFHTLSGECVP

SEQ ID NO: 7658 - protein, 88 aa, Homo Sapiens
MALSSAWRSVLPLWLLWSAACSRAASGDDNAFPFDIEGSSAVGRQDPPETSEPRVALGRLPPAAEKCNAGFFHTLSGECVPCDCNGNS

SEQ ID NO: 7659 - protein, 107 aa, Homo Sapiens
MALSSAWRSVLPLWLLWSAACSRAASGDDNAFPFDIEGSSAVGRQDPPETSEPRVALGRLPPAAEKCNAGFFHTLSGECVPCDCNGNSNECLDGSGYCVHCQRNTTG

SEQ ID NO: 7660 - protein, 1823 aa, Homo Sapiens
MALSSAWRSVLPLWLLWSAACSRAASGDDNAFPFDIEGSSAVGRQDPPETSEPRVALGRLPPAAEKCNAGFFHTLSGECVPCDCNGNSNECLDGSGYCVHCQRNTTGEHCEKCLDGYIGDSIRGAPQFCQPCPCPLPHLANFAESCYRKNGAVRCICNENYAGPNCERCAPGYYGNPLLIGSTCKKCDCSGNSDPNLIFEDCDEVTGQCRNCLRNTTGFKCERCAPGYYGDARIAKNCAVCNCGGGPCDSVTGECLEEGFEPPTGMDCPTISCDKCVWDLTDDLRLAALSIEEGKSGVLSVSSGAAAHRHVNEINATIYLLKTKLSERENQYALRKIQINNAENTMKSLLSDVEELVEKENQASRKGQLVQKESMDTINHASQLVEQAHDMRDKIQEINNKMLYYGEEHELSPKEISEKLVLAQKMLEEIRSRQPFFTQRELVDEEADEAYELLSQAESWQRLHNETRTLFPVVLEQLDDYNAKLSDLQEALDQALNYVRDAEDMNRATAARQRDHEKQQERVREQMEVVNMSLSTSADSLTTPRLTLSELDDIIKNASGIYAEIDGAKSELQVKLSNLSNLSHDLVQEAIDHAQDLQQEANELSRKLHSSDMNGLVQKALDASNVYENIVNYVSEANETAEFALNTTDRIYDAVSGIDTQIIYHKDESENLLNQARELQAKAESSSDEAVADTSRRVGGALARKSALKTRLSDAVKQLQAAERGDAQQRLGQSRLITEEANRTTMEVQQATAPMANNLTNWSQNLQHFDSSAYNTAVNSARDAVRNLTEVVPQLLDQLRTVEQKRPASNVSASIQRIRELIAQTRSVASKIQVSMMFDGQSAVEVHSRTSMDDLKAFTSLSLYMKPPVKRPELTETADQFILYLGSKNAKKEYMGLAIKNDNLVYVYNLGTKDVEIPLDSKPVSSWPAYFSIVKIERVGKHGKVFLTVPSLSSTAEEKFIKKGEFSGDDSLLDLDPEDTVFYVGGVPSNFKLPTSLNLPGFVGCLELATLNNDVISLYNFKHIYNMDPSTSVPCARDKLAFTQSRAASYFFDGSGYAVVRDITRRGKFGQVTRFDIEVRTPADNGLILLMVNGSMFFRLEMRNGYLHVFYDFGFSGGPVHLEDTLKKAQINDAKYHEISIIYHNDKKMILVVDRRHVKSMDNEKMKIPFTDIYIGGAPPEILQSRALRAHLPLDINFRGCMKGFQFQKKDFNLLEQTETLGVGYGCPEDSLISRRAYFNGQSFIASIQKISFFDGFEGGFNFRTLQPNGLLFYYASGSDVFSISLDNGTVIMDVKGIKVQSVDKQYNDGLSHFVISSVSPTRYELIVDKSRVGSKNPTKGKIEQTQASEKKFYFGGSPISAQYANFTGCISNAYFTRVDRDVEVEDFQRYTEKVHTSLYECPIESSPLFLLHKKGKNLSKPKASQNKKGGKSKDAPSWDPVALKLPERNTPRNSHCHLSNSPRAIEHAYQYGGTANSRQEFEHLKGDFGAKSQFSIRLRTRSSHGMIFYVSDQEENDFMTLFLAHGRLVYMFNVGHKKLKIRSQEKYNDGLWHDVIFIRERSSGRLVIDGLRVLEESLPPTEATWKIKGPIYLGGVAPGKAVKNVQINSIYSFSGCLSNLQLNGASITSASQTFSVTPCFEGPMETGTYFSTEGGYVVLDESFNIGLKFEIAFEVRPRSSSGTLVHGHSVNGEYLNVHMKNGQVIVKVNNGIRDFSTSVTPKQSLCDGRWHRITVIRDSNVVQLDVDSEVNHVVGPLNPKPIDHREPVFVGGVPESLLTPRLAPSKPFTGCIRHFVIDGHPVSFSKAALVSGAVSINSCPAA

SEQ ID NO: 7661 - protein, 1816 aa, Homo Sapiens
MALSSAWRSVLPLWLLWSAACSRAASGDDNAFPFDIEGSSAVGRQDPPETSEPRVALGRLPPAAEKCNAGFFHTLSGECVPCDCNGNSNECLDGSGYCVHCQRNTTGEHCEKCLDGYIGDSIRGAPQFCQPCPCPLPHLANFAESCYRKNGAVRCICNENYAGPNCERCAPGYYGNPLLIGSTCKKCDCSGNSDPNLIFEDCDEVTGQCRNCLRNTTGFKCERCAPGYYGDARIAKNCAVCNCGGGPCDSVTGECLEEGFEPPTGCDKCVWDLTDDLRLAALSIEEGKSGVLSVSSGAAAHRHVNEINATIYLLKTKLSERENQYALRKIQINNAENTMKSLLSDVEELVEKENQASRKGQLVQKESMDTINHASQLVEQAHDMRDKIQEINNKMLYYGEEHELSPKEISEKLVLAQKMLEEIRSRQPFFTQRELVDEEADEAYELLSQAESWQRLHNETRTLFPVVLEQLDDYNAKLSDLQEALDQALNYVRDAEDMNRATAARQRDHEKQQERVREQMEVVNMSLSTSADSLTTPRLTLSELDDIIKNASGIYAEIDGAKSELQVKLSNLSNLSHDLVQEAIDHAQDLQQEANELSRKLHSSDMNGLVQKALDASNVYENIVNYVSEANETAEFALNTTDRIYDAVSGIDTQIIYHKDESENLLNQARELQAKAESSSDEAVADTSRRVGGALARKSALKTRLSDAVKQLQAAERGDAQQRLGQSRLITEEANRTTMEVQQATAPMANNLTNWSQNLQHFDSSAYNTAVNSARDAVRNLTEVVPQLLDQLRTVEQKRPASNVSASIQRIRELIAQTRSVASKIQVSMMFDGQSAVEVHSRTSMDDLKAFTSLSLYMKPPVKRPELTETADQFILYLGSKNAKKEYMGLAIKNDNLVYVYNLGTKDVEIPLDSKPVSSWPAYFSIVKIERVGKHGKVFLTVPSLSSTAEEKFIKKGEFSGDDSLLDLDPEDTVFYVGGVPSNFKLPTSLNLPGFVGCLELATLNNDVISLYNFKHIYNMDPSTSVPCARDKLAFTQSRAASYFFDGSGYAVVRDITRRGKFGQVTRFDIEVRTPADNGLILLMVNGSMFFRLEMRNGYLHVFYDFGFSGGPVHLEDTLKKAQINDAKYHEISIIYHNDKKMILVVDRRHVKSMDNEKMKIPFTDIYIGGAPPEILQSRALRAHLPLDINFRGCMKGFQFQKKDFNLLEQTETLGVGYGCPEDSLISRRAYFNGQSFIASIQKISFFDGFEGGFNFRTLQPNGLLFYYASGSDVFSISLDNGTVIMDVKGIKVQSVDKQYNDGLSHFVISSVSPTRYELIVDKSRVGSKNPTKGKIEQTQASEKKFYFGGSPISAQYANFTGCISNAYFTRVDRDVEVEDFQRYTEKVHTSLYECPIESSPLFLLHKKGKNLSKPKASQNKKGGKSKDAPSWDPVALKLPERNTPRNSHCHLSNSPRAIEHAYQYGGTANSRQEFEHLKGDFGAKSQFSIRLRTRSSHGMIFYVSDQEENDFMTLFLAHGRLVYMFNVGHKKLKIRSQEKYNDGLWHDVIFIRERSSGRLVIDGLRVLEESLPPTEATWKIKGPIYLGGVAPGKAVKNVQINSIYSFSGCLSNLQLNGASITSASQTFSVTPCFEGPMETGTYFSTEGGYVVLDESFNIGLKFEIAFEVRPRSSSGTLVHGHSVNGEYLNVHMKNGQVIVKVNNGIRDFSTSVTPKQSLCDGRWHRITVIRDSNVVQLDVDSEVNHVVGPLNPKPIDHREPVFVGGVPESLLTPRLAPSKPFTGCIRHFVIDGHPVSFSKAALVSGAVSINSCPAA

SEQ ID NO: 7662 - protein, 1816 aa, Homo Sapiens; identical to SEQ ID NO: 7661

SEQ ID NO: 7663 - protein, 1816 aa, Homo Sapiens; identical to SEQ ID NO: 7661

SEQ ID NO: 7664 - protein, 331 aa, Homo Sapiens
MALSSAWRSVLPLWLLWSAACSRAASGDDNAFPFDIEGSSAVGRQDPPETSEPRVALGRLPPAAEKCNAGFFHTLSGECVPCDCNGNSNECLDGSGYCVHCQRNTTGEHCEKCLDGYIGDSIRGAPQFCQPCPCPLPHLANFAESCYRKNGAVRCICNENYAGPNCERCAPGYYGNPLLIGSTCKKCDCSGNSDPNLIFEDCDEVTGQCRNCLRNTTGFKCERCAPGYYGDARIAKNCAVCNCGGGPCDSVTGECLEEGFEPPTGMDCPTISCDKCVWDLTDDLRLAALSIEEGKSGVLSVSSGAAAHRHVNEINATIYLLKTKLSERENQ

SEQ ID NO: 7665 - protein, 129 aa, Homo Sapiens
MALSSAWRSVLPLWLLWSAACSRAASGDDNAFPFDIEGSSAVGRQDPPETSEPRVALGRLPPAAEKCNAGFFHTLSGECVPCDCNGNSNECLDGSGYCVTTDGEDPGFSASALSFILSSQGAREARAPT

SEQ ID NO: 7666 - protein, 120 aa, Homo Sapiens
MALSSAWRSVLPLWLLWSAACSRAASGDDNAFPFDIEGSSAVGRQDPPETSEPRVALGRLPPAAEVQCPCHCHPAGAPAPPRAVPHSSFSLSPPLSSPQCLESFTWARSVRKLEIKSFPL

SEQ ID NO: 7667 - protein, 120 aa, Homo Sapiens; identical to SEQ ID NO: 7666

SEQ ID NO: 7668 - protein, 120 aa, Homo Sapiens; identical to SEQ ID NO: 7666

SEQ ID NO: 7669 - protein, 178 aa, Homo Sapiens
  misc_feature (1)..(1): Xaa can be any naturally occurring amino acid
XIFEDCDEVTGQCRNCLRNTTGFKCERCAPGYYGDARIAKNCAVCNCGGGPCDSVTGECLEEGFEPPTGMDCPTISCDKCVWDLTDDLRLAALSIEEGKSGVLSVSSGAAAHRHVNEINATIYLLKTKLSERENQYALRKIQINNAENTMKSLLSDVEELVEKHWNKPRRRLELQEGV

SEQ ID NO: 7670 - protein, 188 aa, Homo Sapiens
  misc_feature (1)..(1): Xaa can be any naturally occurring amino acid
XKNASGIYAEIDGAKSELQVKLSNLSNLSHDLVQEAIDHAQDLQQEANELSRKLHSSDMNGLVQKALDASNVYENIVNYVSEANETAEFALNTTDRIYDAVSGIDTQIIYHKDESENLLNQARELQAKAESSSDEAVADTSRRVGGALARKSALKTRLSDAVKQLQAAERGKHQRELKSHLLIHWSVR

SEQ ID NO: 7671 - protein, 187 aa, Homo Sapiens
  misc_feature (1)..(1): Xaa can be any naturally occurring amino acid
XSTCKKCDCSGNSDPNLIFEDCDEVTGQCRNCLRNTTGFKCERCAPGYYGDARIAKNCAVCNCGGGPCDSVTGECLEEGFEPPTGCDKCVWDLTDDLRLAALSIEEGKSGVLSVSSGAAAHRHVNEINATIYLLKTKLSERENQYALRKIQINNAENTMKSLLSDVEELVEKHWNKPRRRLELQEGV

SEQ ID NO: 7672 - protein, 38 aa, Homo Sapiens
CVPGAYNFPYCEGAVWWDGTSVAAEGAGRCVFSGRPCG

SEQ ID NO: 7673 - protein, 3695 aa, Homo Sapiens
MAKRLCAGSALCVRGPRGPAPLLLVGLALLGAARAREEAGGGFSLHPPYFNLAEGARIAASATCGEEAPARGSPRPTEDLYCKLVGGPVAGGDPNQTIRGQYCDICTAANSNKAHPASNAIDGTERWWQSPPLSRGLEYNEVNVTLDLGQVFHVAYVLIKFANSPRPDLWVLERSMDFGRTYQPWQFFASSKRDCLERFGPQTLERITRDDAAICTTEYSRIVPLENGEIVVSLVNGRPGAMNFSYSPLLREFTKATNVRLRFLRTNTLLGHLMGKALRDPTVTRRYYYSIKDISIGGRCVCHGHADACDAKDPTDPFRLQCTCQHNTCGGTCDRCCPGFNQQPWKPATANSANECQSCNCYGHATDCYYDPEVDRRRASQSLDGTYQGGGVCIDCQHHTTGVNCERCLPGFYRSPNHPLDSPHVCRRCNCESDFTDGTCEDLTGRCYCRPNFSGERCDVCAEGFTGFPSCYPTPSSSNDTREQVLPAGQIVNCDCSAAGTQGNACRKDPRVGRCLCKPNFQGTHCELCAPGFYGPGCQPCQCSSPGVADDRCDPDTGQCRCRVGFEGATCDRCAPGYFHFPLCQLCGCSPAGTLPEGCDEAGRCLCQPEFAGPHCDRCRPGYHGFPNCQACTCDPRGALDQLCGAGGLCRCRPGYTGTACQECSPGFHGFPSCVPCHCSAEGSLHAACDPRSGQCSCRPRVTGLRCDTCVPGAYNFPYCEAGSCHPAGLAPVDPALPEAQVPCMCRAHVEGPSCDRCKPGFWGLSPSNPEGCTRCSCDLRGTLGGVAECQPGTGQCFCKPHVCGQACASCKDGFFGLDQADYFGCRSCRCDIGGALGQSCEPRTGVCRCRPNTQGPTCSEPARDHYLPDLHHLRLELEEAATPEGHAVRFGFNPLEFENFSWRGYAQMAPVQPRIVARLNLTSPDLFWLVFRYVNRGAMSVSGRVSVREEGRSATCANCTAQSQPVAFPPSTEPAFITVPQRGFGEPFVLNPGTWALRVEAEGVLLDYVVLLPSAYYEAALLQLRVTEACTYRPSAQQSGDNCLLYTHLPLDGFPSAAGLEALCRQDNSLPRPCPTEQLSPSHPPLITCTGSDVDVQLQVAVPQPGRYALVVEYANEDARQEVGVAVHTPQRAPQQGLLSLHPCLYSTLCRGTARDTQDHLAVFHLDSEASVRLTAEQARFFLHGVTLVPIEEFSPEFVEPRVSCISSHGAFGPNSAACLPSRFPKPPQPIILRDCQVIPLPPGLPLTHAQDLTPAMSPAGPRPRPPTAVDPDAEPTLLREPQATVVFTTHVPTLGRYAFLLHGYQPAHPTFPVEVLINAGRVWQGHANASFCPHGYGCRTLVVCEGQALLDVTHSELTVTVRVPKGRWLWLDYVLVVPENVYSFGYLREEPLDKSYDFISHCAAQGYHISPSSSSLFCRNAAASLSLFYNNGARPCGCHEVGATGPTCEPFGGQCPCHAHVIGRDCSRCATGYWGFPNCRPCDCGARLCDELTGQCICPPRTIPPDCLLCQPQTFGCHPLVGCEECNCSGPGIQELTDPTCDTDSGQCKCRPNVTGRRCDTCSPGFHGYPRCRPCDCHEAGTAPGVCDPLTGQCYCKENVQGPKCDQCSLGTFSLDAANPKGCTRCFCFGATERCRSSSYTRQEFVDMEGWVLLSTDRQVVPHERQPGTEMLRADLRHVPEAVPEAFPELYWQAPPSYLGDRVSSYGGTLRYELHSETQRGDVFVPMESRPDVVLQGNQMSITFLEPAYPTPGHVHRGQLQLVEGNFRHTETRNTVSREELMMVLASLEQLQIRALFSQISSAVFLRRVALEVASPAGQGALASNVELCLCPASYRGDSCQECAPGFYRDVKGLFLGRCVPCQCHGHSDRCLPGSGVCVDCQHNTEGAHCERCQAGFVSSRDDPSAPCVSCPCPLSVPSNNFAEGCVLRGGRTQCLCKPGYAGASCERCAPGFFGNPLVLGSSCQPCDCSGNGDPNLLFSDCDPLTGACRGCLRHTTGPRCEICAPGFYGNALLPGNCTRCDCTPCGTEACDPHSGHCLCKAGVTGRRCDRCQEGHFGFDGCGGCRPCACGPAAEGSECHPQSGQCHCRPGTMGPQCRECAPGYWGLPEQGCRRCQCPGGRCDPHTGRCNCPPGLSGERCDTCSQQHQVPVPGGPVGHSIHCEVCDHCVVLLLDDLERAGALLPAIHEQLRGINASSMAWARLHRLNASIADLQSQLRSPLGPRHETAQQLEVLEQQSTSLGQDARRLGGQAVGTRDQASQLLAGTEATLGHAKTLLAAIRAVDRTLSELMSQTGHLGLANASAPSGEQLLRTLAEVERLLWEMRARDLGAPQAAAEAELAAAQRLLARVQEQLSSLWEENQALATQTRDRLAQHEAGLMDLREALNRAVDATREAQELNSRNQERLEEALQRKQELSRDNATLQATLHAARDTLASVFRLLHSLDQAKEELERLAASLDGARTPLLQRMQTFSPAGSKLRLVEAAEAHAQQLGQLALNLSSIILDVNQDRLTQRAIEASNAYSRILQAVQAAEDAAGQALQQADHTWATVVRQGLVDRAQQLLANSTALEEAMLQEQQRLGLVWAALQGARTQLRDVRAKKDQLEAHIQAAQAMLAMDTDETSKKIAHAKAVAAEAQDTATRVQSQLQAMQENVERWQGQYEGLRGQDLGQAVLDAGHSVSTLEKTLPQLLAKLSILENRGVHNASLALSASIGRVRELIAQARGAASKVKVPMKFNGRSGVQLRTPRDLADLAAYTALKFYLQGPEPEPGQGTEDRFVMYMGSRQATGDYMGVSLRDKKVHWVYQLGEAGPAVLSIDEDIGEQFAAVSLDRTLQFGHMSVTVERQMIQETKGDTVAPGAEGLLNLRPDDFVFYVGGYPSTFTPPPLLRFPGYRGCIEMDTLNEEVVSLYNFERTFQLDTAVDRPCARSKSTGDPWLTDGSYLDGTGFARISFDSQISTTKRFEQELRLVSYSGVLFFLKQQSQFLCLAVQEGSLVLLYDFGAGLKKAVPLQPPPPLTSASKAIQVFLLGGSRKRVLVRVERATVYSVEQDNDLELADAYYLGGVPPDQLPPSLRRLFPTGGSVRGCVKGIKALGKYVDLKRLNTTGVSAGCTADLLVGRAMTFHGHGFLRLALSNVAPLTGNVYSGFGFHSAQDSALLYYRASPDGLCQVSLQQGRVSLQLLRTEVKTQAGFADGAPHYVAFYSNATGVWLYVDDQLQQMKPHRGPPPELQPQPEGPPRLLLGGLPESGTIYNFSGCISNVFVQRLLGPQRVFDLQQNLGSVNVSTGCAPALQAQTPGLGPRGLQATARKASRRSRQPARHPACMLPPHLRTTRDSYQFGGSLSSHLEFVGILARHRNWPSLSMHVLPRSSRGLLLFTARLRPGSPSLALFLSNGHFVAQMEGLGTRLRAQSRQRSRPGRWHKVSVRWEKNRILLVTDGARAWSQEGPHRQHQGAEHPQPHTLFVGGLPASSHSSKLPVTVGFSGCVKRLRLHGRPLGAPTRMAGVTPCILGPLEAGLFFPGSGGVITLDLPGATLPDVGLELEVRPLAVTGLIFHLGQARTPPYLQLQVTEKQVLLRADDGAGEFSTSVTRPSVLCDGQWHRLAVMKSGNVLRLEVDAQSNHTVGPLLAAAAGAPAPLYLGGLPEPMAVQPWPPAYCGCMRRLAVNRSPVAMTRSVEVHGAVGASGCPAA

SEQ ID NO: 7674 - protein, 241 aa, Homo Sapiens
RLRFLRTNTLLGHLMGKALRDPTVTRRYYYSIKDISIGGRCVCHGHADACDAKDPTDPFSSPNLSGHNRQLPCCPSPDLHSSQAGTKAQDGDGRVGAANTPHLLCPVCLLSGAAEGTAEHPPPGSPSQDGQQPWCWHRHIPGPHPESSVRLQCTCQHNTCGGTCDRCCPGFNQQPWKPATANSANECQSCNCYGHATDCYYDPEVDRRRASQSLDGTYQGGGVCIDCQHHTTGVNCERCLP

SEQ ID NO: 7675 - protein, 1810 aa, Homo Sapiens
MDCPLSAPTPPPPLVRFFRAPLPACVPPTLLPVLPAALCRARVRAQEPEFSYGCAEGSCYPATGDLLIGRAQKLSVTSTCGLHKPEPYCIVSHLQEDKKCFICNSQDPYHETLNPDSHLIENVVTTFAPNRLKIWWQSENGVENVTIQLDLEAEFHFTHLIMTFKTFRPAAMLIERSSDFGKTWGVYRYFAYDCEASFPGISTGPMKKVDDIICDSRYSDIEPSTEGEVIFRALDPAFKIEDPYSPRIQNLLKITNLRIKFVKLHTLGDNLLDSRMEIREKYYYAVYDMVVRGNCFCYGHASECAPVDGFNEEVEGMVHGHCMCRHNTKGLNCELCMDFYHDLPWRPAEGRNSNACKKCNCNEHSISCHFDMAVYLATGNVSGGVCDDCQHNTMGRNCEQCKPFYYQHPERDIRDPNFCERCTCDPAGSQNEGICDSYTDFSTGLIAGQCRCKLNVEGEHCDVCKEGFYDLSSEDPFGCKSCACNPLGTIPGGNPCDSETGHCYCKRLVTGQHCDQCLPEHWGLSNDLDGCRPCDCDLGGALNNSCFAESGQCSCRPHMIGRQCNEVEPGYYFATLDHYLYEAEEANLGPGVSIVERQYIQDRIPSWTGAGFVRVPEGAYLEFFIDNIPYSMEYDILIRYEPQLPDHWEKAVITVQRPGRIPTSSRCGNTIPDDDNQVVSLSPGSRYVVLPRPVCFEKGTNYTVRLELPQYTSSDSDVESPYTLIDSLVLMPYCKSLDIFTVGGSGDGVVTNSAWETFQRYRCLENSRSVVKTPMTDVCRNIIFSISALLHQTGLACECDPQGSLSSVCDPNGGQCQCRPNVVGRTCNRCAPGTFGFGPSGCKPCECHLQGSVNAFCNPVTGQCHCFQGVYARQCDRCLPGHWGFPSCQPCQCNGHADDCDPVTGECLNCQDYTMGHNCERCLAGYYGDPIIGSGDHCRPCPCPDGPDSGRQFARSCYQDPVTLQLACVCDPGYIGSRCDDCASGYFGNPSEVGGSCQPCQCHNNIDTTDPEACDKETGRCLKCLYHTEGEHCQFCRFGYYGDALQQDCRKCVCNYLGTVQEHCNGSDCQCDKATGQCLCLPNVIGQNCDRCAPNTWQLASGTGCDPCNCNAAHSFGPSCNEFTGQCQCMPGFGGRTCSECQELFWGDPDVECRACDCDPRGIETPQCDQSTGQCVCVEGVEGPRCDKCTRGYSGVFPDCTPCHQCFALWDVIIAELTNRTHRFLEKAKALKISGVIGPYRETVDSVERKVSEIKDILAQSPAAEPLKNIGNLFEEAEKLIKDVTEMMAQVEVKLSDTTSQSNSTAKELDSLQTEAESLDNTVKELAEQLEFIKNSDIRGALDSITKYFQMSLEAEERVNASTTEPNSTVEQSALMRDRVEDVMMERESQFKEKQEEQARLLDELAGKLQSLDLSAAAEMTCGTPPGASCSETECGGPNCRTDEGERKCGGPGCGGLVTVAHNAWQKAMDLDQDVLSALAEVEQLSKMVSEAKLRADEAKQSAEDILLKTNATKEKMDKSNEELRNLIKQIRNFLTQDSADLDSIEAVANEVLKMEMPSTPQQLQNLTEDIRERVESLSQVEVILQHSAADIARAEMLLEEAKRASKSATDVKVTADMVKEALEEAEKAQVAAEKAIKQADEDIQGTQNLLTSIESETAASEETLFNASQRISELERNVEELKRKAAQNSGEAEYIEKVVYTVKQSAEDVKKTLDGELDEKYKKVENLIAKKTEESADARRKAEMLQNEAKTLLAQANSKLQLLKDLERKYEDNQRYLEDKAQELARLEGEVRSLLKDISQKVAVYSTCL

SEQ ID NO: 7676 - protein, 91 aa, Homo Sapiens
MGLLQLLAFSFLALCRARVRAQEPEFSYGCAEGSCYPATGDLLIGRAQKLSVTSTCGLHKPEPYCIVSHLQEDKKCFICNSQDPYHETLNP

SEQ ID NO: 7677 - protein, 1786 aa, Homo Sapiens
MGLLQLLAFSFLALCRARVRAQEPEFSYGCAEGSCYPATGDLLIGRAQKLSVTSTCGLHKPEPYCIVSHLQEDKKCFICNSQDPYHETLNPDSHLIENVVTTFAPNRLKIWWQSENGVENVTIQLDLEAEFHFTHLIMTFKTFRPAAMLIERSSDFGKTWGVYRYFAYDCEASFPGISTGPMKKVDDIICDSRYSDIEPSTEGEVIFRALDPAFKIEDPYSPRIQNLLKITNLRIKFVKLHTLGDNLLDSRMEIREKYYYAVYDMVVRGNCFCYGHASECAPVDGFNEEVEGMVHGHCMCRHNTKGLNCELCMDFYHDLPWRPAEGRNSNACKKCNCNEHSISCHFDMAVYLATGNVSGGVCDDCQHNTMGRNCEQCKPFYYQHPERDIRDPNFCERCTCDPAGSQNEGICDSYTDFSTGLIAGQCRCKLNVEGEHCDVCKEGFYDLSSEDPFGCKSCACNPLGTIPGGNPCDSETGHCYCKRLVTGQHCDQCLPEHWGLSNDLDGCRPCDCDLGGALNNSCFAESGQCSCRPHMIGRQCNEVEPGYYFATLDHYLYEAEEANLGPGVSIVERQYIQDRIPSWTGAGFVRVPEGAYLEFFIDNIPYSMEYDILIRYEPQLPDHWEKAVITVQRPGRIPTSSRCGNTIPDDDNQVVSLSPGSRYVVLPRPVCFEKGTNYTVRLELPQYTSSDSDVESPYTLIDSLVLMPYCKSLDIFTVGGSGDGVVTNSAWETFQRYRCLENSRSVVKTPMTDVCRNIIFSISALLHQTGLACECDPQGSLSSVCDPNGGQCQCRPNVVGRTCNRCAPGTFGFGPSGCKPCECHLQGSVNAFCNPVTGQCHCFQGVYARQCDRCLPGHWGFPSCQPCQCNGHADDCDPVTGECLNCQDYTMGHNCERCLAGYYGDPIIGSGDHCRPCPCPDGPDSGRQFARSCYQDPVTLQLACVCDPGYIGSRCDDCASGYFGNPSEVGGSCQPCQCHNNIDTTDPEACDKETGRCLKCLYHTEGEHCQFCRFGYYGDALQQDCRKCVCNYLGTVQEHCNGSDCQCDKATGQCLCLPNVIGQNCDRCAPNTWQLASGTGCDPCNCNAAHSFGPSCNEFTGQCQCMPGFGGRTCSECQELFWGDPDVECRACDCDPRGIETPQCDQSTGQCVCVEGVEGPRCDKCTRGYSGVFPDCTPCHQCFALWDVIIAELTNRTHRFLEKAKALKISGVIGPYRETVDSVERKVSEIKDILAQSPAAEPLKNIGNLFEEAEKLIKDVTEMMAQVEVKLSDTTSQSNSTAKELDSLQTEAESLDNTVKELAEQLEFIKNSDIRGALDSITKYFQMSLEAEERVNASTTEPNSTVEQSALMRDRVEDVMMERESQFKEKQEEQARLLDELAGKLQSLDLSAAAEMTCGTPPGASCSETECGGPNCRTDEGERKCGGPGCGGLVTVAHNAWQKAMDLDQDVLSALAEVEQLSKMVSEAKLRADEAKQSAEDILLKTNATKEKMDKSNEELRNLIKQIRNFLTQDSADLDSIEAVANEVLKMEMPSTPQQLQNLTEDIRERVESLSQVEVILQHSAADIARAEMLLEEAKRASKSATDVKVTADMVKEALEEAEKAQVAAEKAIKQADEDIQGTQNLLTSIESETAASEETLFNASQRISELERNVEELKRKAAQNSGEAEYIEKVVYTVKQSAEDVKKTLDGELDEKYKKVENLIAKKTEESADARRKAEMLQNEAKTLLAQANSKLQLLKDLERKYEDNQRYLEDKAQELARLEGEVRSLLKDISQKVAVYSTCL

SEQ ID NO: 7678 - protein, 850 aa, Homo Sapiens
MGLLQLLAFSFLALCRARVRAQEPEFSYGCAEGSCYPATGDLLIGRAQKLSVTSTCGLHKPEPYCIVSHLQEDKKCFICNSQDPYHETLNPDSHLIENVVTTFAPNRLKIWWQSENGVENVTIQLDLEAEFHFTHLIMTFKTFRPAAMLIERSSDFGKTWGVYRYFAYDCEASFPGISTGPMKKVDDIICDSRYSDIEPSTEGEVIFRALDPAFKIEDPYSPRIQNLLKITNLRIKFVKLHTLGDNLLDSRMEIREKYYYAVYDMVVRGNCFCYGHASECAPVDGFNEEVEGMVHGHCMCRHNTKGLNCELCMDFYHDLPWRPAEGRNSNACKKCNCNEHSISCHFDMAVYLATGNVSGGVCDDCQHNTMGRNCEQCKPFYYQHPERDIRDPNFCERCTCDPAGSQNEGICDSYTDFSTGLIAGQCRCKLNVEGEHCDVCKEGFYDLSSEDPFGCKSCACNPLGTIPGGNPCDSETGHCYCKRLVTGQHCDQCLPEHWGLSNDLDGCRPCDCDLGGALNNSCFAESGQCSCRPHMIGRQCNEVEPGYYFATLDHYLYEAEEANLGPGVSIVERQYIQDRIPSWTGAGFVRVPEGAYLEFFIDNIPYSMEYDILIRYEPQLPDHWEKAVITVQRPGRIPTSSRCGNTIPDDDNQVVSLSPGSRYVVLPRPVCFEKGTNYTVRLELPQYTSSDSDVESPYTLIDSLVLMPYCKSLDIFTVGGSGDGVVTNSAWETFQRYRCLENSRSVVKTPMTDVCRNIIFSISALLHQTGLACECDPQGSLSSVCDPNGGQCQCRPNVVGRTCNRCAPGTFGFGPSGCKRRFLKSIVMHSFRLTQPLWQGSIAAEPMLPS

SEQ ID NO: 7679 - protein, 183 aa, Homo Sapiens
MGLLQLLAFSFLETAGPGASLEWRSLETTPEPQGLSMGSPSSGKRRPPRAPAPRPQRSAGDPRACTHTHSRFPSSQISTRTLTPRMRGLPRARGFTCVALCRARVRAQEPEFSYGCAEGSCYPATGDLLIGRAQKLSVTSTCGLHKPEPYCIVSHLQEDKKCFICNSQDPYHETLNPDSHLIE

SEQ ID NO: 7680 - protein, 1798 aa, Homo Sapiens
MELTSRERGRGQPLPWELRLGLLLSVLAATLAQAPAPDVPGCSRGSCYPATGDLLVGRADRLTASSTCGLNGPQPYCIVSHLQDEKKCFLCDSRRPFSARDNPHSHRIQNVVTSFAPQRRAAWWQSENGIPAVTIQLDLEAEFHFTHLIMTFKTFRPAAMLVERSADFGRTWHVYRYFSYDCGADFPGVPLAPPRHWDDVVCESRYSEIEPSTEGEVIYRVLDPAIPIPDPYSSRIQNLLKITNLRVNLTRLHTLGDNLLDPRREIREKYYYALYELVVRGNCFCYGHASECAPAPGAPAHAEGMVHGACICKHNTRGLNCEQCQDFYRDLPWRPAEDGHSHACRKCECHGHTHSCHFDMAVYLASGNVSGGVCDGCQHNTAGRHCELCRPFFYRDPTKDLRDPAVCRSCDCDPMGSQDGGRCDSHDDPALGLVSGQCRCKEHVVGTRCQQCRDGFFGLSISDRLGCRRCQCNARGTVPGSTPCDPNSGSCYCKRLVTGRGCDRCLPGHWGLSHDLLGCRPCDCDVGGALDPQCDEGTGQCHCRQHMVGRRCEQVQPGYFRPFLDHLIWEAEDTRGQVLDVVERLVTPGETPSWTGSGFVRLQEGQTLEFLVASVPKAMDYDLLLRLEPQVPEQWAELELIVQRPGPVPAHSLCGHLVPKDDRIQGTLQPHARYLIFPNPVCLEPGISYKLHLKLVRTGGSAQPETPYSGPGLLIDSLVLLPRVLVLEMFSGGDAAALERQATFERYQCHEEGLVPSKTSPSEACAPLLISLSTLIYNGALPCQCNPQGSLSSECNPHGGQCLCKPGVVGRRCDLCAPGYYGFGPTGCQACQCSHEGALSSLCEKTSGQCLCRTGAFGLRCDRCQRGQWGFPSCRPCVCNGHADECNTHTGACLGCRDHTGGEHCERCIAGFHGDPRLPYGGQCRPCPCPEGPGSQRHFATSCHQDEYSQQIVCHCRAGYTGLRCEACAPGHFGDPSRPGGRCQLCECSGNIDPMDPDACDPHTGQCLRCLHHTEGPHCAHCKPGFHGQAARQSCHRCTCNLLGTNPQQCPSPDQCHCDPSSGQCPCLPNVQGPSCDRCAPNFWNLTSGHGCQPCACHPSRARGPTCNEFTGQCHCRAGFGGRTCSECQELHWGDPGLQCHACDCDSRGIDTPQCHRFTGHCSCRPGVSGVRCDQCARGFSGIFPACHPCHACFGDWDRVVQDLAARTQRLEQRAQELQQTGVLGAFESSFWHMQEKLGIVQGIVGARNTSAASTAQLVEATEELRREIGEATEHLTQLEADLTDVQDENFNANHALSGLERDRLALNLTLRQLDQHLDLLKHSNFLGAYDSIRHAHSQSAEAERRANTSALAVPSPVSNSASARHRTEALMDAQKEDFNSKHMANQRALGKLSAHTHTLSLTDINELVCGAPGDAPCATSPCGGAGCRDEDGQPRCGGLSCNGAAATADLALGRARHTQAELQRALAEGGSILSRVAETRRQASEAQQRAQAALDKANASRGQVEQANQELQELIQSVKDFLNQEGADPDSIEMVATRVLELSIPASAEQIQHLAGAIAERVRSLADVDAILARTVGDVRRAEQLLQDARRARSWAEDEKQKAETVQAALEEAQRAQGIAQGAIRGAVADTRDTEQTLYQVQERMAGAERALSSAGERARQLDALLEALKLKRAGNSLAASTAEETAGSAQGRAQEAEQLLRGPLGDQYQTVKALAERKAQGVLAAQARAEQLRDEARDLLQAAQDKLQRLQELEGTYEENERALESKAAQLDGLEARMRSVLQAINLQVQIYNTCQ

SEQ ID NO: 7681 - protein, 1798 aa, Homo Sapiens; identical to SEQ ID NO: 7680

SEQ ID NO: 7682 - protein, 151 aa, Homo Sapiens
MTFKTFRPAAMLVERSADFGRTWHVYRYFSYDCGADFPGVPLAPPRHWDDVVCESRYSEIEPSTEGEVIYRVLDPAIPIPDPYSSRIQNLLKITNLRVNLTRLHTLGDNLLDPRREIREKYYYALYELVVRGNCFCYGHASECAPAPGAPA

SEQ ID NO: 7683 - protein, 160 aa, Homo Sapiens
MNEIQAIAARLPNVDLVLSQTKQDIARARRLQAEAEEARSRAHAVEGQVEDVVGNLRQGTVALQEAQDTMQGTSRSLRLIQDRVAEVQQVLRPAEKLVTSMTKQLGDFWTRMEELRHQARQQGAEAVQAQQLAEGASEQALSAQEGFERIKQKYAELKDR

SEQ ID NO: 7684 - protein, 188 aa, Homo Sapiens
MRPFFLLCFALPGLLHAQQACSRGACYPPVGDLLVGRTRFLRASSTCGLTKPETYCTQYGEWQMKCCKCDSRQPHNYYSHRVENVASSSGPMRWWQSQNDVNPVSLQLDLDRRFQLQEVMMEFQGPMPAGMLIERSSDFGKTWRVYQYLAADCTSTFPRVRQGRPQSWQDVRCQSLPQRPNARLNGGK

SEQ ID NO: 7685 - protein, 1172 aa, Homo Sapiens [sequence omitted]

SEQ ID NO: 7686 - protein, 1172 aa, Homo Sapiens [sequence omitted]

SEQ ID NO: 7687 - protein, 1172 aa, Homo Sapiens [sequence omitted]

SEQ ID NO: 7688 - protein, 1761 aa, Homo Sapiens
MQFQLTLFLHLGWLSYSKAQDDCNRGACHPTTGDLLVGRNTQLMASSTCGLSRAQKYCILSYLEGEQKCFICDSRFPYDPYDQPNSHTIENVIVSFEPDREKKWWQSENGLDHVSIRLDLEALFRFSHLILTFKTFRPAAMLVERSTDYGHNWKVFKYFAKDCATSFPNITSGQAQGVGDIVCDSKYSDIEPSTGGEVVLKVLDPSFEIENPYSPYIQDLVTLTNLRINFTKLHTLGDALLGRRQNDSLDKYYYALYEMIVRGSCFCNGHASECRPMQKMRGDVFSPPGMVHGQCVCQHNTDGPNCERCKDFFQDAPWRPAADLQDNACRSCSCNSHSSRCHFDMTTYLASGGLSGGVCEDCQHNTEGQHCDRCRPLFYRDPLKTISDPYACIPCECDPDGTISGGICVSHSDPALGSVAGQCLCKENVEGAKCDQCKPNHYGLSATDPLGCQPCDCNPLGSLPFLTCDVDTGQCLCLSYVTGAHCEECTVGYWGLGNHLHGCSPCDCDIGGAYSNVCSPKNGQCECRPHVTGRSCSEPAPGYFFAPLNFYLYEAEEATTLQGLAPLGSETFGQSPAVHVVLGEPVPGNPVTWTGPGFARVLPGAGLRFAVNNIPFPVDFTIAIHYETQSAADWTVQIVVNPPGGSEHCIPKTLQSKPQSFALPAATRIMLLPTPICLEPDVQYSIDVYFSQPLQGESHAHSHVLVDSLGLIPQINSLENFCSKQDLDEYQLHNCVEIASAMGPQVLPGACERLIISMSAKLHDGAVACKCHPQGSVGSSCSRLGGQCQCKPLVVGRCCDRCSTGSYDLGHHGCHPCHCHPQGSKDTVCDQVTGQCPCHGEVSGRRCDRCLAGYFGFPSCHPCPCNRFAELCDPETGSCFNCGGFTTGRNCERCIDGYYGNPSSGQPCRPCLCPDDPSSNQYFAHSCYQNLWSSDVICNCLQGYTGTQCGECSTGFYGNPRISGAPCQPCACNNNIDVTDPESCSRVTGECLRCLHNTQGANCQLCKPGHYGSALNQTCRRCSCHASGVSPMECPPGGGACLCDPVTGACPCLPNVTGLACDRCADGYWNLVPGRGCQSCDCDPRTSQSSHCDQLTGQCPCKLGYGGKRCSECQENYYGDPPGRCIPCDCNRAGTQKPICDPDTGMCRCREGVSGQRCDRCARGHSQEFPTCLQCHLCFDQWDHTISSLSKAVQGLMRLAANMEDKRETLPVCEADFKDLRGNVSEIERILKHPVFPSGKFLKVKDYHDSVRRQIMQLNEQLKAVYEFQDLKDTIERAKNEADLLLEDLQEEIDLQSSVLNASIADSSENIKKYYHISSSAEKKINETSSTINTSANTRNDLLTILDTLTSKGNLSLERLKQIKIPDIQILNEKVCGDPGNVPCVPLPCGGALCTGRKGHRKCRGPGCHGSLTLSTNALQKAQEAKSIIRNLDKQVRGLKNQIESISEQAEVSKNNALQLREKLGNIRNQSDSEEENINLFIKKVKNFLLEENVPPEDIEKVANGVLDIHLPIPSQNLTDELVKIQKHMQLCEDYRTDENRLNEEADGAQKLLVKAKAAEKAANILLNLDKTLNQLQQAQITQGRANSTITQLTANITKIKKNVLQAENQTREMKSELELAKQRSGLEDGLSLLQTKLQRHQDHAVNAKVQAESAQHQAGSLEKEFVELKKQYAILQRKTSTTGLTKETLGKVKQLKDAAEKLAGDTEAKIRRITDLERKIQDLNLSRQAKADQLRILEDQVVAIKNEIVEQEKKYARCYS

SEQ ID NO: 7689 - protein, 1761 aa, Homo Sapiens; identical to SEQ ID NO: 7688

SEQ ID NO: 7690 - protein, 772 aa, Homo Sapiens
MQFQLTLFLHLGWLSYSKAQDDCNRGACHPTTGDLLVGRNTQLMASSTCGLSRAQKYCILSYLEGEQKCFICDSRFPYDPYDQPNSHTIENVIVSFEPDREKKWWQSENGLDHVSIRLDLEALFRFSHLILTFKTFRPAAMLVERSTDYGHNWKVFKYFAKDCATSFPNITSGQAQGVGDIVCDSKYSDIEPSTGGEVVLKVLDPSFEIENPYSPYIQDLVTLTNLRINFTKLHTLGDALLGRRQNDSLDKYYYALYEMIVRGSCFCNGHASECRPMQKMRGDVFSPPGMVHGQCVCQHNTDGPNCERCKDFFQDAPWRPAADLQDNACRSCSCNSHSSRCHFDMTTYLASGGLSGGVCEDCQHNTEGQHCDRCRPLFYRDPLKTISDPYACIPCECDPDGTISGGICVSHSDPALGSVAGQCLCKENVEGAKCDQCKPNHYGLSATDPLGCQPCDCNPLGSLPFLTCDVDTGQCLCLSYVTGAHCEECTVGYWGLGNHLHGCSPCDCDIGGAYSNVCSPKNGQCECRPHVTGRSCSEPAPGYFFAPLNFYLYEAEEATTLQGLAPLGSETFGQSPAVHVVLGEPVPGNPVTWTGPGFARVLPGAGLRFAVNNIPFPVDFTIAIHYETQSAADWTVQIVVNPPGGSEHCIPKTLQSKPQSFALPAATRIMLLPTPICLEPDVQYSIDVYFSQPLQGESHAHSHVLVDSAAVQWHNLGSLQPPPPECKQFSCFSFPSSWDYRHPPPHLANFCIFSRDGVSPHWPGWSQTPDLR

SEQ ID NO: 7691 - protein, 749 aa, Homo Sapiens
NIDVTDPESCSRVTGECLRCLHNTQGANCQLCKPGHYGSALNQTCRRCSCHASGVSPMECPPGGGACLCDPVTGACPCLPNVTGLACDRCADGYWNLVPGRGCQSCDCDPRTSQSSHCDQLTGQCPCKLGYGGKRCSECQENYYGDPPGRCIPCDCNRAGTQKPICDPDTGMCRCREGVSGQRCDRCARGHSQEFPTCLQCHLCFDQWDHTISSLSKAVQGLMRLAANMEDKRETLPVCEADFKDLRGNVSEIERILKHPVFPSGKFLKVKDYHDSVRRQIMQLNEQLKAVYEFQDLKDTIERAKNEADLLLEDLQEEIDLQSSVLNASIADSSENIKKYYHISSSAEKKINETSSTINTSANTRNDLLTILDTLTSKGNLSLERLKQIKIPDIQILNEKVCGDPGNVPCVPLPCGGALCTGRKGHRKCRGPGCHGSLTLSTNALQKAQEAKSIIRNLDKQVRGLKNQIESISEQAEVSKNNALQLREKLGNIRNQSDSEEENINLFIKKVKNFLLEENVPPEDIEKVANGVLDIHLPIPSQNLTDELVKIQKHMQLCEDYRTDENRLNEEADGAQKLLVKAKAAEKAANILLNLDKTLNQLQQAQITQGRANSTITQLTANITKIKKNVLQAENQTREMKSELELAKQRSGLEDGLSLLQTKLQRHQDHAVNAKVQAESAQHQAGSLEKEFVELKKQYAILQRKTSTTGLTKETLGKVKQLKDAAEKLAGDTEAKIRRITGCFQNSAR

SEQ ID NO: 7692 - protein, 38 aa, Homo Sapiens
MKNEFDKLVCNCKHNTYGVDCEKCLPFFNDRPWRRATA

SEQ ID NO: 7693 - protein, 1609 aa, Homo Sapiens
MRGSHRAAPALRPRGRLWPVLAVLAAAAAAGCAQAAMDECTDEGGRPQRCMPEFVNAAFNVTVVATNTCGTPPEEYCVQTGVTGVTKSCHLCDAGQPHLQHGAAFLTDYNNQADTTWWQSQTMLAGVQYPSSINLTLHLGKAFDITYVRLKFHTSRPESFAIYKRTREDGPWIPYQYYSGSCENTYSKANRGFIRTGGDEQQALCTDEFSDISPLTGGNVAFSTLEGRPSAYNFDNSPVLQEWVTATDIRVTLNRLNTFGDEVFNDPKVLKSYYYAISDFAVGGRCKCNGHASECMKNEFDKLVCNCKHNTYGVDCEKCLPFFNDRPWRRATAESASECLPCDCNGRSQECYFDPELYRSTGHGGHCTNCQDNTDGAHCERCRENFFRLGNNEACSSCHCSPVGSLSTQCDSYGRCSCKPGVMGDKCDRCQPGFHSLTEAGCRPCSCDPSGSIDECNIETGRCVCKDNVEGFNCERCKPGFFNLESSNPRGCTPCFCFGHSSVCTNAVGYSVYSISSTFQIDEDGWRAEQRDGSEASLEWSSERQDIAVISDSYFPRYFIAPAKFLGKQVLSYGQNLSFSFRVDRRDTRLSAEDLVLEGAGLRVSVPLIAQGNSYPSETTVKYVFRLHEATDYPWRPALTPFEFQKLLNNLTSIKIRGTYSERSAGYLDDVTLASARPGPGVPATWVESCTCPVGYGGQFCEMCLSGYRRETPNLGPYSPCVLCACNGHSETCDPETGVCNCRDNTAGPHCEKCSDGYYGDSTAGTSSDCQPCPCPGGSSCAVVPKTKEVVCTNCPTGTTGKRCELCDDGYFGDPLGRNGPVRLCRLCQCSDNIDPNAVGNCNRLTGECLKCIYNTAGFYCDRCKDGFFGNPLAPNPADKCKACNCNLYGTMKQQSSCNPVTGQCECLPHVTGQDCGACDPGFYNLQSGQGCERCDCHALGSTNGQCDIRTGQCECQPGITGQHCERCEVNHFGFGPEGCKPCDCHPEGSLSLQCKDDGRCECREGFVGNRCDQCEENYFYNRSWPGCQECPACYRLVKDKVADHRVKLQELESLIANLGTGDEMVTDQAFEDRLKEAEREVMDLLREAQDVKDVDQNLMDRLQRVNNTLSSQISRLQNIRNTIEETGNLAEQARAHVENTERLIEIASRELEKAKVAAANVSVTQPESTGDPNNMTLLAEEARKLAERHKQEADDIVRVAKTANDTSTEAYNLLLRTLAGENQTAFEIEELNRKYEQAKNISQDLEKQAARVHEEAKRAGDKAVEIYASVAQLSPLDSETLENEANNIKMEAENLEQLIDQKLKDYEDLREDMRGKELEVKNLLEKGKTEQQTADQLLARADAAKALAEEAAKKGRDTLQEANDILNNLKDFDRRVNDNKTAAEEALRKIPAINQTITEANEKTREAQQALGSAAADATEAKNKAHEAERIASAVQKNATSTKAEAERTFAEVTDLDNEVNNMLKQLQEAEKELKRKQDDADQDMMMAGMASQAAQEAEINARKAKNSVTSLLSIINDLLEQLGQLDTVDLNKLNEIEGTLNKAKDEMKVSDLDRKVSDLENEAKKQEAAIMDYNRDIEEIMKDIRNLEDIRKTLPSGCFNTPSIEKP

SEQ ID NO: 7694 - protein, 1193 aa, Homo Sapiens
MPALWLGCCLCFSLLLPAARATSRREVCDCNGKSRQCIFDRELHRQTGNGFRCLNCNDNTDGIHCEKCKNGFYRHRERDRCLPCNCNSKGSLSARCDNSGRCSCKPGVTGARCDRCLPGFHMLTDAGCTQDQRLLDSKCDCDPAGIAGPCDAGRCVCKPAVTGERCDRCRSGYYNLDGGNPEGCTQCFCYGHSASCRSSAEYSVHKITSTFHQDVDGWKAVQRNGSPAKLQWSQRHQDVFSSAQRLDPVYFVAPAKFLGNQQVSYGQSLSFDYRVDRGGRHPSAHDVILEGAGLRITAPLMPLGKTLPCGLTKTYTFRLNEHPSNNWSPQLSYFEYRRLLRNLTALRIRATYGEYSTGYIDNVTLISARPVSGAPAPWVEQCICPVGYKGQFCQDCASGYKRDSARLGPFGTCIPCNCQGGGACDPDTGDCYSGDENPDIECADCPIGFYNDPHDPRSCKPCPCHNGFSCSVMPETEEVVCNNCPPGVTGARCELCADGYFGDPFGEHGPVRPCQPCQCNNNVDPSASGNCDRLTGRCLKCIHNTAGIYCDQCKAGYFGDPLAPNPADKCRACNCNPMGSEPVGCRSDGTCVCKPGFGGPNCEHGAFSCPACYNQVKIQMDQFMQQLQRMEALISKAQGGDGVVPDTELEGRMQQAEQALQDILRDAQISEGASRSLGLQLAKVRSQENSYQSRLDDLKMTVERVRALGSQYQNRVRDTHRLITQMQLSLAESEASLGNTNIPASDHYVGPNGFKSLAQEATRLAESHVESASNMEQLTRETEDYSKQALSLVRKALHEGVGSGSGSPDGAVVQGLVEKLEKTKSLAQQLTREATQAEIEADRSYQHSLRLLDSVSRLQGVSDQSFQVEEAKRIKQKADSLSSLVTRHMDEFKRTQKNLGNWKEEAQQLLQNGKSGREKSDQLLSRANLAKSRAQEALSMGNATFYEVESILKNLREFDLQVDNRKAEAEEAMKRLSYISQKVSDASDKTQQAERALGSAAADAQRAKNGAGEALEISSEIEQEIGSLNLEANVTADGALAMEKGLASLKSEMREVEGELERKELEFDTNMDAVQMVITEAQKVDTRAKNAGVTIQDTLNTLDGLLHLMDQPLSVDEEGLVLLEQKLSRAKTQINSQLRPMMSELEERARQQRGHLHLLETSIDGILADVKNLENIRDNLPPGCYNTQALEQQ

SEQ ID NO: 7695 - protein, 1111 aa, Homo Sapiens
MPALWLGCCLCFSLLLPAARATSRREVCDCNGKSRQCIFDRELHRQTGNGFRCLNCNDNTDGIHCEKCKNGFYRHRERDRCLPCNCNSKGSLSARCDNSGRCSCKPGVTGARCDRCLPGFHMLTDAGCTQDQRLLDSKCDCDPAGIAGPCDAGRCVCKPAVTGERCDRCRSGYYNLDGGNPEGCTQCFCYGHSASCRSSAEYSVHKITSTFHQDVDGWKAVQRNGSPAKLQWSQRHQDVFSSAQRLDPVYFVAPAKFLGNQQVSYGQSLSFDYRVDRGGRHPSAHDVILEGAGLRITAPLMPLGKTLPCGLTKTYTFRLNEHPSNNWSPQLSYFEYRRLLRNLTALRIRATYGEYSTGYIDNVTLISARPVSGAPAPWVEQCICPVGYKGQFCQDCASGYKRDSARLGPFGTCIPCNCQGGGACDPDTGDCYSGDENPDIECADCPIGFYNDPHDPRSCKPCPCHNGFSCSVMPETEEVVCNNCPPGVTGARCELCADGYFGDPFGEHGPVRPCQPCQCNNNVDPSASGNCDRLTGRCLKCIHNTAGIYCDQCKAGYFGDPLAPNPADKCRACNCNPMGSEPVGCRSDGTCVCKPGFGGPNCEHGAFSCPACYNQVKIQMDQFMQQLQRMEALISKAQGGDGVVPDTELEGRMQQAEQALQDILRDAQISEGASRSLGLQLAKVRSQENSYQSRLDDLKMTVERVRALGSQYQNRVRDTHRLITQMQLSLAESEASLGNTNIPASDHYVGPNGFKSLAQEATRLAESHVESASNMEQLTRETEDYSKQALSLVRKALHEGVGSGSGSPDGAVVQGLVEKLEKTKSLAQQLTREATQAEIEADRSYQHSLRLLDSVSRLQGVSDQSFQVEEAKRIKQKADSLSSLVTRHMDEFKRTQKNLGNWKEEAQQLLQNGKSGREKSDQLLSRANLAKSRAQEALSMGNATFYEVESILKNLREFDLQVDNRKAEAEEAMKRLSYISQKVSDASDKTQQAERALGSAAADAQRAKNGAGEALEISSEIEQEIGSLNLEANVTADGALAMEKGLASLKSEMREVEGELERKELEFDTNMDAVQMVITEAQKVDTRAKNAGVTIQDTLNTLDGLLHLMGM

SEQ ID NO: 7696 - protein, 1575 aa, Homo Sapiens
MAAAALLLGLALLAPRAAGAGMGACYDGAGRPQRCLPVFENAAFGRLAQASHTCGSPPEDFCPHVGAAGAGAHCQRCDAADPQRHHNASYLTDFHSQDESTWWQSPSMAFGVQYPTSVNITLRLGKAYEITYVRLKFHTSRPESFAIYKRSRADGPWEPYQFYSASCQKTYGRPEGQYLRPGEDERVAFCTSEFSDISPLSGGNVAFSTLEGRPSAYNFEESPGLQEWVTSTELLISLDRLNTFGDDIFKDPKVLQSYYYAVSDFSVGGRCKCNGHASECGPDVAGQLACRCQHNTTGTDCERCLPFFQDRPWARGTAEAAHECLPCNCSGRSEECTFDRELFRSTGHGGRCHHCRDHTAGPHCERCQENFYHWDPRMPCQPCDCQSAGSLHLQCDDTGTCACKPTVTGWKCDRCLPGFHSLSEGGCRPCTCNPAGSLDTCDPRSGRCPCKENVEGNLCDRCRPGTFNLQPHNPAGCSSCFCYGHSKVCASTAQFQVHHILSDFHQGAEGWWARSVGGSEHPPQWSPNGVLLSPEDEEELTAPEKFLGDQRFSYGQPLILTFRVPPGDSPLPVQLRLEGTGLALSLRHSSLSGPQDAGHPREVELRFHLQETSEDVAPPLPPFHFQRLLANLTSLRLRVSPGPSPAGPVFLTEVRLTSARPGLSPPASWVEICSCPTGYTGQFCESCAPGYKREMPQGGPYASCVPCTCNQHGTCDPNTGICVCSHHTEGPSCERCLPGFYGNPFAGQADDCQPCPCPGQSACTTIPESREVVCTHCPPGQRGRRCEVCDDGFFGDPLGLFGHPQPCHQCQCSGNVDPNAVGNCDPLSGHCLRCLHNTTGDHCEHCQEGFYGSALAPRPADKCMPCSCHPQGSVSEQMPCDPVTGQCSCLPHVTARDCSRCYPGFFDLQPGRGCRSCKCHPLGSQEDQCHPKTGQCTCRPGVTGQACDRCQLGFFGFSIKGCRACRCSPLGAASAQCHENGTCVCRPGFEGYKCDRCHDNFFLTADGTHCQQCPSCYALVKEEAAKLKARLTLTEGWLQGSDCGSPWGPLDILLGEAPRGDVYQGHHLLPGAREAFLEQMMSLEGAVKAAREQLQRLNKGARCAQAGSQKTCTQLADLEAVLESSEEEILHAAAILASLEIPQEGPSQPTKWSHLATEARALARSHRDTATKIAATAWRALLASNTSYALLWNLLEGRVALETQRDLEDRYQEVQAAQKALRTAVAEVLPEAESVLATVQQVGADTAPYLALLASPGALPQKSRAEDLGLKAKALEKTVASWQHMATEAARTLQTAAQATLRQTEPLTKLHQEARAALTQASSSVQAATVTVMGARTLLADLEGMKLQFPRPKDQAALQRKADSVSDRLLADTRKKTKQAERMLGNAAPLSSSAKKKGREAEVLAKDSAKLAKALLRERKQAHRRASRLTSQTQATLQQASQQVLASEARRQELEEAERVGAGLSEMEQQIRESRISLEKDIETLSELLARLGSLDTHQAPAQALNETQWALERLRLQLGSPGSLQRKLSLLEQESQQQELQIQGFESDLAEIRADKQNLEAILHSLPENCASWQ

SEQ ID NO: 7697 - protein, 257 aa, Homo Sapiens
  misc_feature (1)..(1): Xaa can be any naturally occurring amino acid
XTLQTAAQATLRQTEPLTKLHQEARAALTQASSSVQAATVTVMGARTLLADLEDTRKKTKQAERMLGNAAPLSSSAKKKGREAEVLAKDSAKLAKALLRERKQAHRRASRLTSQTQATLQQASQQVLASEARRQELEEAERVGAGLSEMEQQIRESRISLEKDIETLSELLARLGSLDTHQAPAQALNETQWALERLRLQLGSPGSLQRKLSLLEQESQQQELQIQGFESDLAEIRADKQNLEAILHSLPENCASWQ

SEQ ID NO: 7698 - protein, 180 aa, Homo Sapiens
MPRQLSAAAALFASLAVILHDGSQMRAKAFPETRDYSQPTAAATVQDIKKPVQQPAKQAPHQTLAARFMDGHITFQTAATVKIPTTTPATTKNTATTSPITYTLVTTQATPNNSHTAPPVTEVTVGPSLAPYSLPPTITPPAHTTGTSSSTVSHTTGNTTQPSNQTTLPATLSIALHKST

SEQ ID NO: 7699 - protein, 416 aa, Homo Sapiens
MPRQLSAAAALFASLAVILHDGSQMRAKAFPETRDYSQPTAAATVQDIKKPVQQPAKQAPHQTLAARFMDGHITFQTAATVKIPTTTPATTKNTATTSPITYTLVTTQATPNNSHTAPPVTEVTVGPSLAPYSLPPTITPPAHTTGTSSSTVSHTTGNTTQPSNQTTLPATLSIALHKSTTGQKPVQPTHAPGTTAAAHNTTRTAAPASTVPGPTLAPQPSSVKTGIYQVLNGSRLCIKAEMGIQLIVQDKESVFSPRRYFNIDPNATQASGNCGTRKSNLLLNFQGGFVNLTFTKDEESYYISEVGAYLTVSDPETIYQGIKHAVVMFQTAVGHSFKCVSEQSLQLSAHLQVKTTDVQLQAFDFEDDHFGNVDECSSDYTIVLPVIGAIVVGLCLMGMGVYKIRLRCQSSGYQRI

SEQ ID NO: 7700 - protein, 143 aa, Homo Sapiens
MRAKAFPETRDYSQPTAAATVQDIKKPVQQPAKQAPHQTLAARFMDGHITFQTAATVKIPTTTPATTKNTATTSPITYTLVTTQATPNNSHTAPPVTEVTVGPSLAPYSLPPTITPPAHTTGTSSSTVSHTTGNTTQPSNQTT

SEQ ID NO: 7701 - protein, 392 aa, Homo Sapiens
MRAKAFPETRDYSQPTAAATVQDIKKPVQQPAKQAPHQTLAARFMDGHITFQTAATVKIPTTTPATTKNTATTSPITYTLVTTQATPNNSHTAPPVTEVTVGPSLAPYSLPPTITPPAHTTGTSSSTVSHTTGNTTQPSNQTTLPATLSIALHKSTTGQKPVQPTHAPGTTAAAHNTTRTAAPASTVPGPTLAPQPSSVKTGIYQVLNGSRLCIKAEMGIQLIVQDKESVFSPRRYFNIDPNATQASGNCGTRKSNLLLNFQGGFVNLTFTKDEESYYISEVGAYLTVSDPETIYQGIKHAVVMFQTAVGHSFKCVSEQSLQLSAHLQVKTTDVQLQAFDFEDDHFGNVDECSSDYTIVLPVIGAIVVGLCLMGMGVYKIRLRCQSSGYQRI

SEQ ID NO: 7702 - protein, 690 aa, Homo Sapiens
MLPRGRPRALGAAALLLLLLLLGFLLFDGRLRRAAALDGDPGAGPGDHNRSDCGPQPPPPPKCELLHVAIVCAGHNSSRDVITLVKSMLFYRKNPLHLHLVTDAVARNILETLFHTWMVPAVRVSFYHADQLKPQVSWIPNKHYSGLYGLMKLVLPSALPAELARVIVLDTDVTFASDISELWALFAHFSDTQAIGLVENQSDWYLGNLWKNHRPWPALGRGFNTGVILLRLDRLRQAGWEQMWRLTARRELLSLPATSLADQDIFNAVIKEHPGLVQRLPCVWNVQLSDHTLAERCYSEASDLKVIHWNSPKKLRVKNKHVEFFRNFYLTFLEYDGNLLRRELFVCPSQPPPGAEQLQQALAQLDEEDPCFEFRQQQLTVHRVHVTFLPHEPPPPRPHDVTLVAQLSMDRLQMLEALCRHWPGPMSLALYLTDAEAQQFLHFVEASPVLAARQDVAYHVVYREGPLYPVNQLRNVALAQALTPYVFLSDIDFLPAYSLYDYLRASIEQLGLGSRRKAALVVPAFETLRYRFSFPHSKVELLALLDAGTLYTFRYHEWPRGHAPTDYARWREAQAPYRVQWAANYEPYVVVPRDCPRYDPRFVGFGWNKVAHIVELDAQEYELLVLPEAFTIHLPHAPSLDISRFRSSPTYRDCLQALKDEFHQDLSRHHGAAALKYLPALQQPQSPARG

SEQ ID NO: 7703 - protein, 721 aa, Homo Sapiens
MLPRGRPRALGAAALLLLLLLLGFLLFGGDLGCERREPGGRAGAPGCFPGPLMPRVPPDGRLRRAAALDGDPGAGPGDHNRSDCGPQPPPPPKCELLHVAIVCAGHNSSRDVITLVKSMLFYRKNPLHLHLVTDAVARNILETLFHTWMVPAVRVSFYHADQLKPQVSWIPNKHYSGLYGLMKLVLPSALPAELARVIVLDTDVTFASDISELWALFAHFSDTQAIGLVENQSDWYLGNLWKNHRPWPALGRGFNTGVILLRLDRLRQAGWEQMWRLTARRELLSLPATSLADQDIFNAVIKEHPGLVQRLPCVWNVQLSDHTLAERCYSEASDLKVIHWNSPKKLRVKNKHVEFFRNFYLTFLEYDGNLLRRELFVCPSQPPPGAEQLQQALAQLDEEDPCFEFRQQQLTVHRVHVTFLPHEPPPPRPHDVTLVAQLSMDRLQMLEALCRHWPGPMSLALYLTDAEAQQFLHFVEASPVLAARQDVAYHVVYREGPLYPVNQLRNVALAQALTPYVFLSDIDFLPAYSLYDYLRASIEQLGLGSRRKAALVVPAFETLRYRFSFPHSKVELLALLDAGTLYTFRYHEWPRGHAPTDYARWREAQAPYRVQWAANYEPYVVVPRDCPRYDPRFVGFGWNKVAHIVELDAQEYELLVLPEAFTIHLPHAPSLDISRFRSSPTYRDCLQALKDEFHQDLSRHHGAAALKYLPALQQPQSPARG

SEQ ID NO: 7704 - protein, 721 aa, Homo Sapiens; identical to SEQ ID NO: 7703

SEQ ID NO: 7705 - protein, 721 aa, Homo Sapiens; identical to SEQ ID NO: 7703

SEQ ID NO: 7706 - protein, 158 aa, Homo Sapiens
WNSPKKLRVKNKHVEFFRNFYLTFLEYDGNLLRRELFVCPSQPPPGAEQLQQALAQLDEEDPCFEFRQQQLTVHRVHVTFLPHEPPPPRPHDVTLVAQLSMDRTWPTMWCTVRGPYTPSTSFATWPWPRPSRLTSSSVTLTSCLPILSTTTSGPPLSS

SEQ ID NO: 7707 - protein, 109 aa, Homo Sapiens
  misc_feature (1)..(1): Xaa can be any naturally occurring amino acid
XLLDAGTLYTFRNMSSWCCPRPSPSICPTLQAWTSPASAPAPPIVTASRPSRTNSTRTCPATMGLLPSNTSQPCSSPRALPEAEAGPALPLILALGRHQGNLPSAIPAI

SEQ ID NO: 7708 - protein, 166 aa, Homo Sapiens
IPRSPQPLGGSHRTPSSRRDSDGANSVASYENEEPACEDADEDEDDYHNPGYLVVLPDSTPATSTAAPSAPALSTPGIRDSAFSMESIDDYVNVPESGESAEASLDGSREYVNVSQELHPGAAKTEPVEAESVLEPGLPGTAELGSWKWLWGPHMASCPCSSLTTA

SEQ ID NO: 7709 - protein, 269 aa, Homo Sapiens
MEATAASWQVAVPVLGGASRPLGPRGAASLLRAPLQMEEAILVPCVLGLLLLPILAMLMALCVHCHRLPGSYDSTSSDSLYPRGIQFKRPHTVAPWPPAYPPVTSYPPLSQPDLLPIPRSPQPLGGSHRTPSSRRDSDGANSVASYENEEPACEDADEDEDDYHNPGYLVVLPDSTPATSTAAPSAPALSTPGIRDSAFSMESIDDYVNVPESGESAEASLDGSREYVNVSQELHPGAAKTEPAALSSQEAEEVEEEGAPDYENLQELN

SEQ ID NO: 7710 - protein, 85 aa, Homo Sapiens
MEEAILVPCVLGLLLLPILAMLMALCVHCHRLPGSYDSTSSDSLYPRGIQFKRPHTVAPWPPAYPPVTSYPPLSQPDLLPIPHDP

SEQ ID NO: 7711 - protein, 85 aa, Homo Sapiens; identical to SEQ ID NO: 7710

SEQ ID NO: 7712 - protein, 233 aa, Homo Sapiens
MEEAILVPCVLGLLLLPILAMLMALCVHCHRLPGSYDSTSSDSLYPRGIQFKRPHTVAPWPPAYPPVTSYPPLSQPDLLPIPRSPQPLGGSHRTPSSRRDSDGANSVASYENEEPACEDADEDEDDYHNPGYLVVLPDSTPATSTAAPSAPALSTPGIRDSAFSMESIDDYVNVPESGESAEASLDGSREYVNVSQELHPGAAKTEPAALSSQEAEEVEEEGAPDYENLQELN

SEQ ID NO: 7713 - protein, 262 aa, Homo Sapiens
MEEAILVPCVLGLLLLPILAMLMALCVHCHRLPGSYDSTSSDSLYPRGIQFKRPHTVAPWPPAYPPVTSYPPLSQPDLLPIPRSPQPLGGSHRTPSSRRDSDGANSVASYENEGASGIRGAQAGWGVWGPSWTRLTPVSLPPEPACEDADEDEDDYHNPGYLVVLPDSTPATSTAAPSAPALSTPGIRDSAFSMESIDDYVNVPESGESAEASLDGSREYVNVSQELHPGAAKTEPAALSSQEAEEVEEEGAPDYENLQELN

SEQ ID NO: 7714 - protein, 252 aa, Homo Sapiens
MEEAILVPCVLGLLLLPILAMLMALCVHCHRLPGSYDSTSSDSLYPRGIQFKRPHTVAPWPPAYPPVTSYPPLSQPDLLPIPRSPQPLRDSDGANSVASYENEGASGIRGAQAGWGVWGPSWTRLTPVSLPPEPACEDADEDEDDYHNPGYLVVLPDSTPATSTAAPSAPALSTPGIRDSAFSMESIDDYVNVPESGESAEASLDGSREYVNVSQELHPGAAKTEPAALSSQEAEEVEEEGAPDYENLQELN

SEQ ID NO: 7715 - protein, 232 aa, Homo Sapiens
MEEAILVPCVLGLLLLPILAMLMALCVHCHRLPGSYDSTSSDSLYPRGIQFKRPHTVAPWPPAYPPVTSYPPLSQPDLLPIPSPQPLGGSHRTPSSRRDSDGANSVASYENEEPACEDADEDEDDYHNPGYLVVLPDSTPATSTAAPSAPALSTPGIRDSAFSMESIDDYVNVPESGESAEASLDGSREYVNVSQELHPGAAKTEPAALSSQEAEEVEEEGAPDYENLQELN

SEQ ID NO: 7716 - protein, 232 aa, Homo Sapiens; identical to SEQ ID NO: 7715

SEQ ID NO: 7717 - protein, 261 aa, Homo Sapiens
MEEAILVPCVLGLLLLPILAMLMALCVHCHRLPGSYDSTSSDSLYPRGIQFKRPHTVAPWPPAYPPVTSYPPLSQPDLLPIPSPQPLGGSHRTPSSRRDSDGANSVASYENEGASGIRGAQAGWGVWGPSWTRLTPVSLPPEPACEDADEDEDDYHNPGYLVVLPDSTPATSTAAPSAPALSTPGIRDSAFSMESIDDYVNVPESGESAEASLDGSREYVNVSQELHPGAAKTEPAALSSQEAEEVEEEGAPDYENLQELN

SEQ ID NO: 7718 - protein, 100 aa, Homo Sapiens
MSSGTELLWPGAALLVLLGVAASLCVRCSRPGAKRREDQQSFTGSRTYSLVGQAWPGPLADMAPTRKDKLLQFYPSLEDPASSRYQNFSKGSRHGSEEAY

SEQ ID NO: 7719 - protein, 58 aa, Homo Sapiens
MSSGTELLWPGAALLVLLGVAASLCVRCSRPGAKRSEKIYQQRSLREDQQSFTGSRTY

SEQ ID NO: 7720 - protein, 64 aa, Homo Sapiens
MSSGTELLWPGAALLVLLGVAASLCVRCSRPGAKRSEKIYQQRSLREDQQSFTGSRTYSLVGQA

SEQ ID NO: 7721 - protein, 100 aa, Homo Sapiens
MSSGTELLWPGAALLVLLGVAASLCVRCSRPGAKRSEKIYQQRSLREDQQSFTGSRTYSLVGQAWPGPLADMAPTRKDKLLQFYPSLEDPASSRYQNFSK

SEQ ID NO: 7722 - protein, 111 aa, Homo Sapiens
MSSGTELLWPGAALLVLLGVAASLCVRCSRPGAKRSEKIYQQRSLREDQQSFTGSRTYSLVGQAWPGPLADMAPTRKDKLLQFYPSLEDPASSRYQNFSKGSRHGSEEAYI

SEQ ID NO: 7723 - protein, 243 aa, Homo Sapiens
MSSGTELLWPGAALLVLLGVAASLCVRCSRPGAKRSEKIYQQRSLREDQQSFTGSRTYSLVGQAWPGPLADMAPTRKDKLLQFYPSLEDPASSRYQNFSKGSRHGSEEAYIDPIAMEYYNWGRFSKPPEDDDANSYENVLICKQKTTETGAQQEGIGGLCRGDLSLSLALKTGPTSGLCPSASPEEDEESEDYQNSASIHQWRESRKVMGQLQREASPGPVGSPDEEDGEPDYVNGEVAATEA

SEQ ID NO: 7724 - protein, 243 aa, Homo Sapiens; identical to SEQ ID NO: 7723

SEQ ID NO: 7725 - protein, 243 aa, Homo Sapiens; identical to SEQ ID NO: 7723

SEQ ID NO: 7726 - protein, 243 aa, Homo Sapiens; identical to SEQ ID NO: 7723

SEQ ID NO: 7727 - protein, 481 aa, Homo Sapiens
MGALARALPSILLALLLTSTPEALGANPGLVARITDKGLQYAAQEGLLALQSELLRITLPDFTGDLRIPHVGRGRYEFHSLNIHSCELLHSALRPVPGQGLSLSISDSSIRVQGRWKVRKSFFKLQGSFDVSVKGISISVNLLLGSESSGRPTVTASSCSSDIADVEVDMSGDLGWLLNLFHNQIESKFQKVLESRICEMIQKSVSSDLQPYLQTLPVTTEIDSFADIDYSLVEAPRATAQMLEVMFKGEIFHRNHRSPVTLLAAVMSLPEEHNKMVYFAISDYVFNTASLVYHEEGYLNFSITDDMIPPDSNIRLTTKSFRPFVPRLARLYPNMNLELQGSVPSAPLLNFSPGNLSVDPYMEIDAFVLLPSSSKEPVFRLSVATNVSATLTFNTSKITGFLKPGKVKVELKESKVGLFNAELLEALLNYYILNTFYPKFNDKLAEGFPLPLLKRVQLYDLGLQIHKDFLFLGANVQYMRV

SEQ ID NO: 7728 - protein, 255 aa, Homo Sapiens
MCYRKTEDFFTIWLDLNMFLPLGVDCWIDNTRVVYNRSSGLVSNAPGVQIRVPGFGKTYSVEYLDSSKLAGYLHTLVQNLVNNGYVRDETVRAAPYDWRLEPGQQEEYYRKLAGLVEEMHAAYGKPVFLIGHSLGCLHLLYFLLRQPQAWKDRFIDGFISLGAPWGGSIKPMLVLASGDNQGIPIMSSIKLKEEQRITTTSPWMFPSRMAWPEDHVFISTPSFNYTGRDFQRFFADLHFEEGWYMWLQSRDLLAG

SEQ ID NO: 7729 - protein, 93 aa, Homo Sapiens
MGPPGSPWQWVTLLLGLLLPPAAPFWLLNVLFPPHTTPKAELSNHTRPVILARSQAGQTRCGELDVLPQDRGLLHHLAGSQHVPTPWGRLLDR

SEQ ID NO: 7730 - protein, 440 aa, Homo Sapiens
MGPPGSPWQWVTLLLGLLLPPAAPFWLLNVLFPPHTTPKAELSNHTRPVILVPGCLGNQLEAKLDKPDVVNWMCYRKTEDFFTIWLDLNMFLPLGVDCWIDNTRVVYNRSSGLVSNAPGVQIRVPGFGKTYSVEYLDSSKLAGYLHTLVQNLVNNGYVRDETVRAAPYDWRLEPGQQEEYYRKLAGLVEEMHAAYGKPVFLIGHSLGCLHLLYFLLRQPQAWKDRFIDGFISLGAPWGGSIKPMLVLASGDNQGIPIMSSIKLKEEQRITTTSPWMFPSRMAWPEDHVFISTPSFNYTGRDFQRFFADLHFEEGWYMWLQSRDLLAGLPAPGVEVYCLYGVGLPTPRTYIYDHGFPYTDPVGVLYEDGDDTVATRSTELCGLWQGRQPQPVHLLPLHGIQHLNMVFSNLTLEHINAILLGAYRQGPPASPTASPEPPPPE

SEQ ID NO: 7731 - protein, 61 aa, Homo Sapiens
SPRPGRTALLMASSLLGLPGVAPSSPCWSWPQECLCPGMCFTEDGSARARARPPEAPPALP

SEQ ID NO: 7732 - protein, 138 aa, Homo Sapiens
VQIRVPGFGKTYSVEYLDSSKLAGYLHTLVQNLVNNGYVRDETVRAAPYDWRLEPGQQEEYYRKLAGLVEEMHAAYGKPVFLIGHSLGCLHLLYFLLRQPQAWKDRFIDGFISLGAPWGGSIKPMLVLASETGSHCIA

SEQ ID NO: 7733 - protein, 80 aa, Homo Sapiens
  misc_feature (1)..(1): Xaa can be any naturally occurring amino acid
XEYYRKLAGLVEEMHAAYGKPVFLIGHSLGCLHLLYFLLRQPQAWKDRFIDGFISLGAPWGGSIKPMLVLASGSGTRAQH

SEQ ID NO: 7734 - protein, 107 aa, Homo Sapiens
  misc_feature (1)..(1): Xaa can be any naturally occurring amino acid
XLPLGVDCWIDNTRVVYNRSSGLVSNAPGVQIRVPGFGKTYSVEYLDSSKLAGPPATACAPAAPARDTASQHGLQQPDPGAHQCHPAGCLPPGSPCIPDCQPRAPAS

SEQ ID NO: 7735 - protein, 176 aa, Homo Sapiens
MKPLLLAVSLGLIAALQAHHLLASDEEIQDVSGTWYLKAMTVDREFPEMNLESVTPMTLTTLEGGNLEAKVTMLISGRCQEVKAVLEKTDEPGKYTADGGKHVAYIIRSHVKDHYIFYCEGELHGKPVRGVKLVGRDPKNNLEALEDFEKAAGARGLSTESILIPRQSETCSPGSD

SEQ ID NO: 7736 - protein, 176 aa, Homo Sapiens; identical to SEQ ID NO: 7735

SEQ ID NO: 7737 - protein, 86 aa, Homo Sapiens
MRQGLLVLALVLVLVLVLAAGSQVQEWYPRESHALNWNKFSGFWYILATATDAQGFLPARDKRKLGASVVKVNKVGQLRVLLAFRR

SEQ ID NO: 7738 - protein, 187 aa, Homo Sapiens
MRQGLLVLALVLVLVLVLAAGSQVQEWYPRESHALNWNKFSGFWYILATATDAQGFLPARDKRKLGASVVKVNKVGQLRVLLAFRRGQGCGRAQPRHPGTSGHLWASLSVKGVKAFHVLSTDYSYGLVYLRLGRATQNYKNLLLFHRQNVSSFQSLKEFMDACDILGLSKAAVILPKDASRTHTILP

SEQ ID NO: 7739 - protein, 164 aa, Homo Sapiens
MRQGLLVLALVLVLVLVLAAGSQVQEWYPRESHALNWNKFSGFWYILATATDAQGFLPARDKRKLGASVVKVNKVGQLRVLLAFRRLKGCQSQEVILRKDGKKPVFGNACAYAAGPREGQEGDRQNVSSFQSLKEFMDACDILGLSKAAVILPKDASRTHTILP

SEQ ID NO: 7740 - protein, 200 aa, Homo Sapiens
MRQGLLVLALVLVLVLVLAAGSQVQEWYPRESHALNWNKFSGFWYILATATDAQGFLPARDKRKLGASVVKVNKVGQLRVLLAFRRLKGCQSQEVILRKDGKKPVFGNACAYAAGPREGQEGVKGVKAFHVLSTDYSYGLVYLRLGRATQNYKNLLLFHRQNVSSFQSLKEFMDACDILGLSKAAVILPKDASRTHTILP

SEQ ID NO: 7741 - protein, 75 aa, Homo Sapiens
MRQGLLVLALVLVLVLVLAAGSQVQEWYPRESHALNWNKGQEEAGGVRGKGEQSGPAPRAPRLQTIGRMFRASRV

SEQ ID NO: 7742 - protein, 37 aa, Homo Sapiens
  misc_feature (1)..(1): Xaa can be any naturally occurring amino acid
XTDAQGFLPARDKRKLGASVVKVNKVGQLRVLLAFRR

SEQ ID NO: 7743 - protein, 102 aa, Homo Sapiens
ALLNAFTATFELSDDGRFEVWNAMTRGQHCDTWSYVLIPAAQPGQFTVDHGVGRSWLLPPGTLDQFICLGRAQGLSDDNIVFPDVTGGALDLSSLPWVAAPA

SEQ ID NO: 7744 - protein, 192 aa, Homo Sapiens
MRLLCGLWLWLSLLKVLQAQTPTPLPLPPPMQSFQGNQFQGEWFVLGLAGNSFRPEHRALLNAFTATFELSDDGRFEVWNAMTRGQHCDTWSYVLIPAAQPGQFTVDHGVEPGADREETRVVDSDYTQFALMLSRRHTSRLAVLRISLLGRSWLLPPGTLDQFICLGRAQGLSDDNIVFPDVTGWSPQASVC

SEQ ID NO: 7745 - protein, 90 aa, Homo Sapiens
TFELSDDGRFEVWNAMTRGQHCDTWSYVLIPAAQPGQFTVDHGVDTRAGWPSSGSACWAGAGCCLPGRWTSSSAWAELRASRMTTSSSQM

SEQ ID NO: 7746 - protein, 184 aa, Homo Sapiens
MMSFLLGAILTLLWAPTAQAEVLLQPDFNAEKFSGLWYVVSMASDCRVFLGKKDHLSMSTRAIRPTEEGGLHVHMEFPGADGCNQVDAEYLKVGSEGHFRVPALGYLDVRIVDTDYSSFAVLYIYKELEGALSTMVQLYSRTQDVSPQALKSFQDFYPTLGLPKDMMVMLPQSDACNPESKEAP

SEQ ID NO: 7747 - protein, 200 aa, Homo Sapiens
MPLGLLWLGLALLGALHAQAQDSTSDLIPAPPLSKVPLQQNFQDNQFQGKWYVVGLAGNAILREDKDPQKMYATIYELKEDKSYNVTSVLFREKAQKCDYWIRTFVPGCQPGEFTLGNIKSYPGLTSYLVRVVSTNYNQHAMVFFKKVSQNREYFKITLYGRTKELTSELKENFIRFSKSLGLPENHIVFPVPIDQCIDG

SEQ ID NO: 7748 - protein, 198 aa, Homo Sapiens
MPLGLLWLGLALLGALHAQAQDSTSDLIPAPPLSKVPLQQNFQDNQFQGKWYVVGLAGNAILREDKDPQKMYATIYELKEDKSYNVTSVLFRKKKCDYWIRTFVPGCQPGEFTLGNIKSYPGLTSYLVRVVSTNYNQHAMVFFKKVSQNREYFKITLYGRTKELTSELKENFIRFSKSLGLPENHIVFPVPIDQCIDG

SEQ ID NO: 7749 - protein, 198 aa, Homo Sapiens; identical to SEQ ID NO: 7748

SEQ ID NO: 7750 - protein, 78 aa, Homo Sapiens
MDLIKRNSGWVFENPSIGVLELWVLATNFRDYAIIFTQLEFGDEPFNTVELYSLTETASQEAMGLFTKWSRSLGFLSQ

SEQ ID NO: 7751 - protein, 163 aa, Homo Sapiens
MGGLLLAAFLALVSVPRAQAVWLGRLDPEQLLGPWYVLAVASREKGFAMEKDMKNVVGVVVTLTPENNLRTLSSQHGLGGCDQSVMDLIKRNSGWVFENPSIGVLELWVLATNFRDYAIIFTQLEFGDEPFNTVELYSLTETASQEAMGLFTKWSRSLGFLSQ

SEQ ID NO: 7752 - protein, 152 aa, Homo Sapiens
MEELDRQKIGGFWREVGVASDQSLVLTAPKRVEGLFLTLSGSNLTVKVAYNSSGSCEIEKIVGSEIDSTGKFAFPGHREIHVLDTDYEGYAILRVSLMWRGRNFRVLKYFTRSLEDKDRLGFWKFRELTADTGLYLAARPGRCAELLKEELI

SEQ ID NO: 7753 - protein, 175 aa, Homo Sapiens
MPGAAEALPTVTVTLVAGAVPPASGALTAHCIGGFWREVGVASDQSLVLTAPKRVEGLFLTLSGSNLTVKVAYNSSGSCEIEKIVGSEIDSTGKFAFPGHREIHVLDTDYEGYAILRVSLMWRGRNFRVLKYFTRSLEDKDRLGFWKFRELTADTGLYLAARPGRCAELLKEELI

SEQ ID NO: 7754 - protein, 176 aa, Homo Sapiens [sequence omitted]

SEQ ID NO: 7755 - protein, 176 aa, Homo Sapiens
MALLLLSLGLSLIAAQEFDPHTVMQRNYNVARVSGVWYSIFMASDDLNRIKENGDLRVFVRNIEHLKNGSLIFDFEYMVQGECVAVVVVCEKTEKNGEYSINYEGQNTVAVSETDYRLFITFHLQNFRNGTETHTLALYETCEKYGLGSQNIIDLTNKDPCYSKHYRSPPRPPMRW

SEQ ID NO: 7756 - protein, 518 aa, Homo Sapiens
MDEKCSFCNLQREAVSDCIPSLDSSQSTPTEELSSQGQSNTDKIECQAENYLNALFRKKDLPQNCDPNIPLVAQELMKKMIRQFAIEYISKSGKTQENRNGSIGPSIVCKSIQMNQAENSLQEEQEGPLDLTVNRMQEQNTQQGDGVLDLSTKKTSIKSEESSICDPSSENSVAGRLHRNREDYVERSAEFADGLLSKALKDIQSGALDINKAGILYGIPQKTLLLHLEALPAGKPASFKNKTRDFHDSYSYKDSKETCAVLQKVALWARAQAERTEKSKLNLLETSEIKFPTASTYLHQLTLQKMVTQFKEKNESLQYETSNPTVQLKIPQLRVSSVSKSQPDGSGLLDVMYQVSKTSSVLEGSALQKLKNILPKQNKIECSGPVTHSSVDSYFLHGDLSPLCLNSKNGTVDGTSENTEDGLDRKDSKQPRKKRGRYRQYDHEIMEEAIAMVMSGKMSVSKAQGIYGVPHSTLEYKVKERSGTLKTPPKKKLRLPDTGLYNMTDSGTGSCKNSSKPV

SEQ ID NO: 7757 - protein, 318 aa, Homo Sapiens
MDKGRERMAAAAAAAAAAAAAAQCRSPRCAAERRGFRRELDSWRHRLMHCVGFESILEGLYGPRLRRDLSLFEDCEPEELTDWSMDEKCSFCNLQREAVSDCIPSLDSSQSTPTEELSSQGQSNTDKIECQAENYLNALFRKKDLPQNCDPNIPLVAQELMKKMIRQFAIEYISKSGKTQENRNGSIGPSIVCKSIQMNQAENSLQEEQEGPLDLTVNRMQEQNTQQGDGVLDLSTKKTSIKSEESSICDPSSENSVAGMLQVKTDEKLNVSDENTASCPLSPIKMCLNRPIEWNLNLTTASLTSCTVHNQNLKSEEK

SEQ ID NO: 7758 - protein, 602 aa, Homo Sapiens
MDKGRERMAAAAAAAAAAAAAAQCRSPRCAAERRGFRRELDSWRHRLMHCVGFESILEGLYGPRLRRDLSLFEDCEPEELTDWSMDEKCSFCNLQREAVSDCIPSLDSSQSTPTEELSSQGQSNTDKIECQAENYLNALFRKKDLPQNCDPNIPLVAQELMKKMIRQFAIEYISKSGKTQENRNGSIGPSIVCKSIQMNQAENSLQEEQEGPLDLTVNRMQEQNTQQGDGVLDLSTKKTSIKSEESSICDPSSENSVAGRLHRNREDYVERSAEFADGLLSKALKDIQSGALDINKAGILYGIPQKTLLLHLEALPAGKPASFKNKTRDFHDSYSYKDSKETCAVLQKVALWARAQAERTEKSKLNLLETSEIKFPTASTYLHQLTLQKMVTQFKEKNESLQYETSNPTVQLKIPQLRVSSVSKSQPDGSGLLDVMYQVSKTSSVLEGSALQKLKNILPKQNKIECSGPVTHSSVDSYFLHGDLSPLCLNSKNGTVDGTSENTEDGLDRKDSKQPRKKRGRYRQYDHEIMEEAIAMVMSGKMSVSKAQGIYGVPHSTLEYKVKERSGTLKTPPKKKLRLPDTGLYNMTDSGTGSCKNSSKPV

SEQ ID NO: 7759 - protein, 1871 aa, Homo Sapiens
MDKGRERMAAAAAAAAAAAAAAQCRSPRCAAERRGFRRELDSWRHRLMHCVGFESILEGLYGPRLRRDLSLFEDCEPEELTDWSMDEKCSFCNLQREAVSDCIPSLDSSQSTPTEELSSQGQSNTDKIECQAENYLNALFRKKDLPQNCDPNIPLVAQELMKKMIRQFAIEYISKSGKTQENRNGSIGPSIVCKSIQMNQAENSLQEEQEGPLDLTVNRMQEQNTQQGDGVLDLSTKKTSIKSEESSICDPSSENSVAGSTVDAKSEEATKMEKRKSALNKVLESLCIHHQQQVLAMLKFLVQEQNAASLCCCNTSCVVSSESQKPLIEDDLCGLFCSCEYRLAERGCLQNEKQSPGLEPLPVCIKDLHCLSCQTVTVEHVKPVVNRGIADSYNSHRCCSGLLPNIHSTKSAFRSPLLSKEVCDLSVTLKDACRSRSPSPPPLSPIETEGFEKLKDVISEISALENNKLEANINQPPSLTPAEISSNKSDHQDKILKTKKSSNSYSLLSNDSNNSTTNHEKGETAVIFQDLMDRINEKLKSIETTDMTSLVKLSSSDYNTYNDLKLGDFITSLLHNAKASDYSFMELLSQHDKKVENKIIQTRFRKRQETLFAMRNSSDSPMFRRQSLQIKRELASLDENFTRKKYTEKSSRKLTQNNEISSSDKGEFYHDQGPSLQNSKRLQGKNHAETSFSPNYALQSLQLPLHSSETNLSFNEFSESFKTTSPEKMSIRKPQEKSADGKQFLQNDRKNPKLGNTQTLLRNDVSGLLSRTKRNIVPPGWYSVYVTNNYVFKKSPKAKKVSESTTKNDPVKNIHIESSHNIDLNKIAMNSNLQVVVKRLEDTISIAKKSWNNQPLSEGYKASKKLIEIDGKDQHADRNMTLTLNRMTCKEQSLSKSVVASGNIINSHCMPTVDLNNKRLENLKKSSILDMGRLISSVENVPAKYEGTESSSVSNYSSPIKLMFLSEVKSSEGVKYTLTSVGTSHSNVVLPSEKPTTHHVTEEKTETNEDISNANSENYHSSHYDTDTFQRELNKFSHAKETAGSSTMFIGDINSDKPQEEPKDNSSSATDPSFKRKPGRPKKIGPQVVKQIKRPIGRPPKPKIDQTNITVCQNEPFSAGRKSPECLISEVKEGIYKKSITVTVIYGRSRRTKRHVSEGRVNISNLMSLNNNAGDFPTEYNSPRNISEDKIDLGERISAVASLTTESEILGSGFEYVRPIKNKSVIPQPSKNIIRPNQKPLAISRKPGRPAKVKISGISVTINRTSPQEREVSISSCLPPLEQDNTSGKNLPEEKYDQQCTQMDKIRHTEADIFKNGSKRMIATVPLRHSIRDRKPSLHFLHSLASSSSLIYRNALLHKSYKLHLQKNKSQKEKHRHSKMKIAYKDTPRNRLSRNAKKCLEDNKLVPISEVSLDPIISSNPLLRWWATSASNDSLLEELNNRFEQITNAWVQVSGDEAENCIHKKREHIENDHFKVASPLETCLLELEVSPVKMLFQKKYDLNELCTWFMQTTETQSLSLVRKANARNPLEVINTRGIKLGTKYSDFNASPFRKHFKKFALSSPSKSAEKLHILHKVANSPLLNVKSNLAIARLKRTEFKRLHHERWKREGKLHNHGTVDWNSKRRNLRFFCQNQFLNKTEGETNADIPLQGKSIVDNQCVLPPEIRGDLQQRVVMPDFKIHASFENKFKSEAKENGTNCSQKDFQKGPRLENVCPNSWRSKTLKDCRIFLRKLNCLEHRNTFKLNTIIYSPESTDSGNTHQTHMEESKRFTLRSHSARQNSFKKQSKEIENANTNNPSADEFADHLGNSKLSKCVNFDKNPDSFEVLSNLNKRKRPPWKITEMSTKRHKRQSCNSGQMANYFSKSLACYK

SEQ ID NO: 7760 - protein, 79 aa, Homo Sapiens
MDKGRERMAAAAAAAAAAAAAAQCRSPRCAAERRGFRRELDSWRHRLMHCVGFESILEGLYGPRLRRDLSLFEGLYTIS

SEQ ID NO: 7761 - protein, 77 aa, Homo Sapiens
  misc_feature (1)..(1): Xaa can be any naturally occurring amino acid
XGRERMAAAAAAAAAAAAAAQCRSPRCAAERRGFRRELDSWRHRLMHCVGFESILEGLYGPRLRRDLSLFEGLYTIS

SEQ ID NO: 7762 - protein, 692 aa, Homo Sapiens
MGPWGWKLRWTVALLLAAAGTAVGDRCERNEFQCQDGKCISYKWVCDGSAECQDGSDESQETCLSVTCKSGDFSCGGRVNRCIPQFWRCDGQVDCDNGSDEQGCLTLCEGPNKFKCHSGECITLDKVCNMARDCRDWSDEPIKECGTNECLDNNGGCSHVCNDLKIGYECLCPDGFQLVAQRRCEDIDECQDPDTCSQLCVNLEGGYKCQCEEGFQLDPHTKACKAVGSIAYLFFTNRHEVRKMTLDRSEYTSLIPNLRNVVALDTEVASNRIYWSDLSQRMICSTQLDRAHGVSSYDTVISRDIQAPDGLAVDWIHSNIYWTDSVLGTVSVADTKGVKRKTLFRENGSKPRAIVVDPVHGFMYWTDWGTPAKIKKGGLNGVDIYSLVTENIQWPNGITLDLLSGRLYWVDSKLHSISSIDVNGGNRKTILEDEKRLAHPFSLAVFEDKVFWTDIINEAIFSANRLTGSDVNLLAENLLSPEDMVLFHNLTQPRGVNWCERTTLSNGGCQYLCLPAPQINPHSPKFTCACPDGMLLARDMRSCLTEAEAAVATQETSTVRLKVSSTAVRTQHTTTRPVPDTSRLPGATPGLTTVEIVTMSHQALGDVAGRGNEKKPSSVRALSIVLPIVLLVFLCLGVFLLWKNWRLKNINSINFDNPVYQKTTEDEVHICHNQDGYSYPSRQMVSLEDDVA

SEQ ID NO: 7763 - protein, 860 aa, Homo Sapiens [sequence omitted]

SEQ ID NO: 7764 - protein, 858 aa, Homo Sapiens
MGPWGWKLRWTVALLLAAAGTAVGDRCERNEFQCQDGKCISYKWVCDGSAECQDGSDESQETCLSVTCKSGDFSCGGRVNRCIPQFWRCDGQVDCDNGSDEQGCPPKTCSQDEFRCHDGKCISRQFVCDSDRDCLDGSDEASCPVLTCGPASFQCNSSTCIPQLWACDNDPDCEDGSDEWPQRCRGLYVFQGDSSPCSAFEFHCLSGECIHSSWRCDGGPDCKDKSDEENCAVATCRPDEFQCSDGNCIHGSRQCDREYDCKDMSDEVGCVNVTLCEGPNKFKCHSGECITLDKVCNMARDCRDWSDEPIKECGTNECLDNNGGCSHVCNDLKIGYECLCPDGFQLVAQRRCEDIDECQDPDTCSQLCVNLEGGYKCQCEEGFQLDPHTKACKAVGSIAYLFFTNRHEVRKMTLDRSEYTSLIPNLRNVVALDTEVASNRIYWSDLSQRMICSTQLDRAHGVSSYDTVISRDIQAPDGLAVDWIHSNIYWTDSVLGTVSVADTKGVKRKTLFRENGSKPRAIVVDPVHGFMYWTDWGTPAKIKKGGLNGVDIYSLVTENIQWPNGITLDLLSGRLYWVDSKLHSISSIDVNGGNRKTILEDEKRLAHPFSLAVFEDKVFWTDIINEAIFSANRLTGSDVNLLAENLLSPEDMVLFHNLTQPRGVNWCERTTLSNGGCQYLCLPAPQINPHSPKFTCACPDGMLLARDMRSCLTEAEAAVATQETSTVRLKVSSTAVRTQHTTTRPVPDTSRLPGATPGLTTVEIVTMSHQALGDVAGRGNEKKPSSVRALSIVLPIVLLVFLCLGVFLLWKNWRLKNINSINFDNPVYQKTTEDEVHICHNQDGYSYPSMVSLEDDVA

SEQ ID NO: 7765 - protein, 948 aa, Homo Sapiens
MGPWGWKLRWTVALLLAAAGTAVGDRCERNEFQCQDGKCISYKWVCDGSAECQDGSDESQETCLSVTCKSGDFSCGGRVNRCIPQFWRCDGQVDCDNGSDEQGCPPKTCSQDEFRCHDGKCISRQFVCDSDRDCLDGSDEASCPVLTCGPASFQCNSSTCIPQLWACDNDPDCEDGSDEWPQRCRGLYVFQGDSSPCSAFEFHCLSGECIHSSWRCDGGPDCKDKSDEENCAVATCRPDEFQCSDGNCIHGSRQCDREYDCKDMSDEVGCVNVTLCEGPNKFKCHSGECITLDKVCNMARDCRDWSDEPIKECGTNECLDNNGGCSHVCNDLKIGYECLCPDGFQLVAQRRCEDIDECQDPDTCSQLCVNLEGGYKCQCEEGFQLDPHTKACKAVGSIAYLFFTNRHEVRKMTLDRSEYTSLIPNLRNVVALDTEVASNRIYWSDLSQRMICSTQLDRAHGVSSYDTVISRDIQAPDGLAVDWIHSNIYWTDSVLGTVSVADTKGVKRKTLFRENGSKPRAIVVDPVHGFMYWTDWGTPAKIKKGGLNGVDIYSLVTENIQWPNGITLDLLSGRLYWVDSKLHSISSIDVNGGNRKTILEDEKRLAHPFSLAVFEDKVFWTDIINEAIFSANRLTGSDVNLLAENLLSPEDMVLFHNLTQPRGVNWCERTTLSNGGCQYLCLPAPQINPHSPKFTCACPDGMLLARDMRSCLTEAEAAVATQETSTVRLKVSSTAVRTQHTTTRPVPDTSRLPGATPGLTTVEIVTMSHQALGDVAGRGNEKKPSSVRALSIVLPIATELGLWSRGQLCDRACLSLQCSSSSFAWGSSFYGRTGGLRTSTASTLTTPSIRRPQRMRSTFATTRTATATPRDRWSVWRMTWREHLPGVPSLPRTLPETSPALFYSKTEKTKALPARALFYIFIHLGGRTGFGQCPCNGLGWDFGFFLSS

SEQ ID NO: 7766 - protein, 682 aa, Homo Sapiens
MGPWGWKLRWTVALLLAAAGTAVGDRCERNEFQCQDGKCISYKWVCDGSAECQDGSDESQETCLSVTCKSGDFSCGGRVNRCIPQFWRCDGQVDCDNGSDEQGCPVATCRPDEFQCSDGNCIHGSRQCDREYDCKDMSDEVGCVNVTLCEGPNKFKCHSGECITLDKVCNMARDCRDWSDEPIKECGTNECLDNNGGCSHVCNDLKIGYECLCPDGFQLVAQRRCEDIDECQDPDTCSQLCVNLEGGYKCQCEEGFQLDPHTKACKAVGSIAYLFFTNRHEVRKMTLDRSEYTSLIPNLRNVVALDTEVASNRIYWSDLSQRMICSTQLDRAHGVSSYDTVISRDIQAPDGLAVDWIHSNIYWTDSVLGTVSVADTKGVKRKTLFRENGSKPRAIVVDPVHGFMYWTDWGTPAKIKKGGLNGVDIYSLVTENIQWPNGITLDLLSGRLYWVDSKLHSISSIDVNGGNRKTILEDEKRLAHPFSLAVFEDKVFWTDIINEAIFSANRLTGSDVNLLAENLLSPEDMVLFHNLTQPREAEAAVATQETSTVRLKVSSTAVRTQHTTTRPVPDTSRLPGATPGLTTVEIVTMSHQALGDVAGRGNEKKPSSVRALSIVLPIVLLVFLCLGVFLLWKNWRLKNINSINFDNPVYQKTTEDEVHICHNQDGYSYPSRQMVSLEDDVA

SEQ ID NO: 7767 - protein, 819 aa, Homo Sapiens
MGPWGWKLRWTVALLLAAAGTAVGDRCERNEFQCQDGKCISYKWVCDGSAECQDGSDESQETCSPKTCSQDEFRCHDGKCISRQFVCDSDRDCLDGSDEASCPVLTCGPASFQCNSSTCIPQLWACDNDPDCEDGSDEWPQRCRGLYVFQGDSSPCSAFEFHCLSGECIHSSWRCDGGPDCKDKSDEENCAVATCRPDEFQCSDGNCIHGSRQCDREYDCKDMSDEVGCVNVTLCEGPNKFKCHSGECITLDKVCNMARDCRDWSDEPIKECGTNECLDNNGGCSHVCNDLKIGYECLCPDGFQLVAQRRCEDIDECQDPDTCSQLCVNLEGGYKCQCEEGFQLDPHTKACKAVGSIAYLFFTNRHEVRKMTLDRSEYTSLIPNLRNVVALDTEVASNRIYWSDLSQRMICSTQLDRAHGVSSYDTVISRDIQAPDGLAVDWIHSNIYWTDSVLGTVSVADTKGVKRKTLFRENGSKPRAIVVDPVHGFMYWTDWGTPAKIKKGGLNGVDIYSLVTENIQWPNGITLDLLSGRLYWVDSKLHSISSIDVNGGNRKTILEDEKRLAHPFSLAVFEDKVFWTDIINEAIFSANRLTGSDVNLLAENLLSPEDMVLFHNLTQPRGVNWCERTTLSNGGCQYLCLPAPQINPHSPKFTCACPDGMLLARDMRSCLTEAEAAVATQETSTVRLKVSSTAVRTQHTTTRPVPDTSRLPGATPGLTTVEIVTMSHQALGDVAGRGNEKKPSSVRALSIVLPIVLLVFLCLGVFLLWKNWRLKNINSINFDNPVYQKTTEDEVHICHNQDGYSYPSRQMVSLEDDVA

SEQ ID NO: 7768 - protein, 945 aa, Homo Sapiens
  misc_feature (1)..(1): Xaa can be any naturally occurring amino acid
XGRPGVPPRFLSQRRRQVPGPRSRLRDIHESPSVILGPPGEVPGFRCALWRHLRPHLVLGGALAPPAPIKFTEGPPATLKASVPYEVETLPQNLPAPPWSAAEIFSHVGDRCERNEFQCQDGKCISYKWVCDGSAECQDGSDESQETCLSVTCKSGDFSCGGRVNRCIPQFWRCDGQVDCDNGSDEQGCPPKTCSQDEFRCHDGKCISRQFVCDSDRDCLDGSDEASCPVLTCGPASFQCNSSTCIPQLWACDNDPDCEDGSDEWPQRCRGLYVFQGDSSPCSAFEFHCLSGECIHSSWRCDGGPDCKDKSDEENCAVATCRPDEFQCSDGNCIHGSRQCDREYDCKDMSDEVGCVNVTLCEGPNKFKCHSGECITLDKVCNMARDCRDWSDEPIKECGTNECLDNNGGCSHVCNDLKIGYECLCPDGFQLVAQRRCEDIDECQDPDTCSQLCVNLEGGYKCQCEEGFQLDPHTKACKAVGSIAYLFFTNRHEVRKMTLDRSEYTSLIPNLRNVVALDTEVASNRIYWSDLSQRMICSTQLDRAHGVSSYDTVISRDIQAPDGLAVDWIHSNIYWTDSVLGTVSVADTKGVKRKTLFRENGSKPRAIVVDPVHGFMYWTDWGTPAKIKKGGLNGVDIYSLVTENIQWPNGITLDLLSGRLYWVDSKLHSISSIDVNGGNRKTILEDEKRLAHPFSLAVFEDKVFWTDIINEAIFSANRLTGSDVNLLAENLLSPEDMVLFHNLTQPRGVNWCERTTLSNGGCQYLCLPAPQINPHSPKFTCACPDGMLLARDMRSCLTEAEAAVATQETSTVRLKVSSTAVRTQHTTTRPVPDTSRLPGATPGLTTVEIVTMSHQALGDVAGRGNEKKPSSVRALSIVLPIVLLVFLCLGVFLLWKNWRLKNINSINFDNPVYQKTTEDEVHICHNQDGYSYPSRQMVSLEDDVA

SEQ ID NO: 7769 - protein, 309 aa, Homo Sapiens
  misc_feature (1)..(1): Xaa can be any naturally occurring amino acid
XLDGSDEASCPVLTCGPASFQCNSSTCIPQLWACDNDPDCEDGSDEWPQRCRGLYVFQGDSSPCSAFEFHCLSGECIHSSWRCDGGPDCKDKSDEENCAVATCRPDEFQCSDGNCIHGSRQCDREYDCKDMSDEVGCVNVTLCEGPNKFKCHSGECITLDKVCNMARDCRDWSDEPIKECDIDECQDPDTCSQLCVNLEGGYKCQCEEGFQLDPHTKACKAVGSIAYLFFTNRHEVRKMTLDRSEYTSLIPNLRNVVALDTEVASNRIYWSDLSQRMICSTQLDRAHGVSSYDTVISRDIQAPDGLAVD

SEQ ID NO: 7770 - protein, 170 aa, Homo Sapiens
  misc_feature (1)..(1): Xaa can be any naturally occurring amino acid
XNVVALDTEVASNRIYWSDLSQRMICSTQLDRAHGVSSYDTVISRDIQAPDGLAVDWIHSNIYWTDSVLGTVSVADTKGVKRKTLFRENGSKPRAIVVDPVHGFMYWTDWGTPAKIKKGGLNGVDIYSLVTENIQWPNGITLGQSILDRYHQRSHFQCQPPHRFRCQLVG

SEQ ID NO: 7771 - protein, 272 aa, Homo Sapiens
MEACCLLQLPQRLLLLGAAALTATALETADLAELCGQTWQGDGLLLRSHAASRRFYFVAPDTDCGLWVQAAAPGDRIRFQFRFFLVYSLTPAPPALNTSSPAPADPCAPGSYLQFYEGPPGAPRPLGSPLCGLNIPVPVASSGPFLGLRLVTRGRQPRVDFVGEVTSFRLGPCGAYFRCQNGRCIPSSLVCDPWGMDNCGDGSDQGSWSPADCRGPSPVPSQTGSTDAHTSRSLTPSPALGSAGSLWIAAERSSPAGRDPTRQDAALEGSTE

SEQ ID NO: 7772 - protein, 272 aa, Homo Sapiens; identical to SEQ ID NO: 7771

SEQ ID NO: 7773 - protein, 77 aa, Homo Sapiens
MWHLKLCAVLMIFLLLLGQIDGSPIPEVSSAKRRPRRMTPFWRGVSLRPIGASCRDDSECITRLCRKRRCSLSVAQE

SEQ ID NO: 7774 - protein, 131 aa, Homo Sapiens
MFSTKALLLAGLISTALAGPWANICAGKSSNEIRTCDRHGCGQYSAQRSQRPHQGVDILCSAGSTVYAPFTGMIVGQEKPYQNKNAINNGVRISGREITTDTPIFNNYYPDQSAAVNIKTRSSTSKKMMTH

SEQ ID NO: 7775 - protein, 151 aa, Homo Sapiens
MFSTKALLLAGLISTALAGPWANICAGKSSNEIRTCDRHGCGQYSAQRSQRPHQGVDILCSAGSTVYAPFTGMIVGQEKPYQNKNAINNGVRISGRGFCVKMFYIKPIKYKGPIKKGEKLGTLLPLQKVYPGIQSHVHIENCDSSDPTAYL

SEQ ID NO: 7776 - protein, 111 aa, Homo Sapiens
MFSTKALLLAGLISTALAGPWANICAGKSSNEIRTCDRHGCGQYSAQRSQRPHQGVDILCSAGSTVYAPFTGMIVGQEKPYQNKNAINNGVRISGRGKRGGVYTWGASWRC

SEQ ID NO: 7777 - protein, 79 aa, Homo Sapiens
MIVGQEKPYQNKNAINNGVRISGRGFCVKMFYIKPIKYKGPIKKGEKLGTLLPLQKVYPGIQSHVHIENCDSSDPTAYL

SEQ ID NO: 7778 - protein, 64 aa, Homo Sapiens
MEQRLPPNSELVQAVLRLFQEPVPKAALHRHGRLSPRSARARVTVEWLRVRDDGSNRTSLIDSR

SEQ ID NO: 7779 - protein, 366 aa, Homo Sapiens
MQPLWLCWALWVLPLASPGAALTGEQLLGSLLRQLQLKEVPTLDRADMEELVIPTHVRAQYVALLQRSHGDRSRGKRFSQSFREVAGRFLALEASTHLLVFGMEQRLPPNSELVQAVLRLFQEPVPKAALHRHGRLSPRSARARVTVEWLRVRDDGSNRTSLIDSRLVSVHESGWKAFDVTEAVNFWQQLSRPRQPLLLQVSVQREHLGPLASGAHKLVRFASQGAPAGLGEPQLELHTLDLGDYGAQGDCDPEAPMTEGTRCCRQEMYIDLQGMKWAENWVLEPPGFLAYECVGTCRQPPEALAFKWPFLGPRQCIASETDSLPMIVSIKEGGRTRPQVVSLPNMRVQKCSCASDGALVPRRLQP

SEQ ID NO: 7780 - protein, 332 aa, Homo Sapiens
MWPLWLCWALWVLPLAGPGAALTEEQLLGSLLRQLQLSEVPVLDRADMEKLVIPAHVRAQYVVLLRRSHGDRSRGKRFSQSFREVAGRFLASEAALHRHGRLSPRSAQARVTVEWLRVRDDGSNRTSLIDSRLVSVHESGWKAFDVTEAVNFWQQLSRPRQPLLLQVSVQREHLGPLASGAHKLVRFASQGAPAGLGEPQLELHTLDLRDYGAQGDCDPEAPMTEGTRCCRQEMYIDLQGMKWAKNWVLEPPGFLAYECVGTCQQPPEALAFNWPFLGPRQCIASETASLPMIVSIKEGGRTRPQVVSLPNMRVQKCSCASDGALVPRRLQP

SEQ ID NO: 7781 - protein, 366 aa, Homo Sapiens
MWPLWLCWALWVLPLAGPGAALTEEQLLGSLLRQLQLSEVPVLDRADMEKLVIPAHVRAQYVVLLRRSHGDRSRGKRFSQSFREVAGRFLASEASTHLLVFGMEQRLPPNSELVQAVLRLFQEPVPKAALHRHGRLSPRSAQARVTVEWLRVRDDGSNRTSLIDSRLVSVHESGWKAFDVTEAVNFWQQLSRPRQPLLLQVSVQREHLGPLASGAHKLVRFASQGAPAGLGEPQLELHTLDLRDYGAQGDCDPEAPMTEGTRCCRQEMYIDLQGMKWAKNWVLEPPGFLAYECVGTCQQPPEALAFNWPFLGPRQCIASETASLPMIVSIKEGGRTRPQVVSLPNMRVQKCSCASDGALVPRRLQP

SEQ ID NO: 7782 - protein, 167 aa, Homo Sapiens
MHWGTLCGFLWLWPYLFYVQAVPIQKVQDDTKTLIKTIVTRINDISHTQSVSSKQKVTGLDFIPGLHPILTLSKMDQTLAVYQQILTSMPSRNVIQISNDLENLRDLLHVLAFSKSCHLPWASGLETLDSLGGVLEASGYSTEVVALSRLQGSLQDMLWQLDLSPGC

SEQ ID NO: 7783 - protein, 308 aa, Homo Sapiens
MDEQTGRLRLDTYCMSAKQIWAWSKCSGRLWDEHMKWMEGWTDRWTDGWMDGWMDEWSPTPALRSYGGGLSQQTFIFTDGEDEALARHTGNVVITNCSAAHSRQALSCKMAVEYDRFIESGRKWFCHVDDDNYVNLRALLRLLASYPHTRDVYVGKPSLDRPIQAMERVSENKVRPVHFWFATGGAGFCISRGLALKMSPWASGGHFMNTAERIRLPDDCTIGYIVEALLGVPLIRSGLFHSHLENLQQVPTSELHEQVTLSYGMFENKRNAVHVKGPFSVEADPSRFRSIHCHLYPDTPWCPRTAIF

SEQ ID NO: 7784 - protein, 248 aa, Homo Sapiens
MKGCLLKADFLLQTFIFTDGEDEALARHTGNVVITNCSAAHSRQALSCKMAVEYDRFIESGRKWFCHVDDDNYVNLRALLRLLASYPHTRDVYVGKPSLDRPIQAMERVSENKVRPVHFWFATGGAGFCISRGLALKMSPWASGGHFMNTAERIRLPDDCTIGYIVEALLGVPLIRSGLFHSHLENLQQVPTSELHEQVTLSYGMFENKRNAVHVKGPFSVEADPSRFRSIHCHLYPDTPWCPRTAIF

SEQ ID NO: 7785 - protein, 379 aa, Homo Sapiens
MLKRCGRRLLLALAGALLACLLVLTADPPPPPLPAERGRRALRSLAGPAGAAPAPGLGAAAAAPGALVRDVHSLSEYFSLLTRARRDAGPPPGAAPRPADGHPRPLAEPLAPRDVFIAVKTTKKFHRARLDLLLETWISRHKEMTFIFTDGEDEALARHTGNVVITNCSAAHSRQALSCKMAVEYDRFIESGRKWFCHVDDDNYVNLRALLRLLASYPHTRDVYVGKPSLDRPIQAMERVSENKVRPVHFWFATGGAGFCISRGLALKMSPWASGGHFMNTAERIRLPDDCTIGYIVEALLGVPLIRSGLFHSHLENLQQVPTSELHEQVTLSYGMFENKRNAVHVKGPFSVEADPSRFRSIHCHLYPDTPWCPRTAIF

SEQ ID NO: 7786 - protein, 361 aa, Homo Sapiens
MLKRCGRRLLLALAGALLACLLVLTADPPPPPLPAERGRRALRSLAGPAGAAPAPGLGAAAAAPGALVRDVHSLSEYFSLLTRARRDAGPPPGAAPRPADGHPRPLAEPLAPRDVFIAVKTTKKFHRARLDLLLETWISRHKEMTFIFTDGEDEALARHTGNVVITNCSAAHSRQALSCKMAVEYDRFIESGRKWFCHVDDDNYVNLRALLRLLASYPHTRDVYVGKPSLDRPIQAMERVSENKVRPVHFWFATGGAGFCISRGLALKMSPWASGGHFMNTAERIRLPDDCTIGYIVEALLGVPLIRSGLFHSHLENLQQVPTSELHEQVTLSYGMFENKRNAVHVKGPFSVEADPSRWGN

SEQ ID NO: 7787 - protein, 250 aa, Homo Sapiens
MTPGRCCLAADIQVETFIFTDGEDEALARHTGNVVITNCSAAHSRQALSCKMAVEYDRFIESGRKWFCHVDDDNYVNLRALLRLLASYPHTRDVYVGKPSLDRPIQAMERVSENKVRPVHFWFATGGAGFCISRGLALKMSPWASGGHFMNTAERIRLPDDCTIGYIVEALLGVPLIRSGLFHSHLENLQQVPTSELHEQVTLSYGMFENKRNAVHVKGPFSVEADPSRFRSIHCHLYPDTPWCPRTAIF

SEQ ID NO: 7788 - protein, 250 aa, Homo Sapiens; identical to SEQ ID NO: 7787

SEQ ID NO: 7789 - protein, 18 aa, Homo Sapiens
MTPPRLFWVWLLVAGTQA

SEQ ID NO: 7790 - protein, 41 aa, Homo Sapiens
MTPPRLFWVWLLVAGTQAPGIPSDDDLEVPGGSPGFRRERW

SEQ ID NO: 7791 - protein, 41 aa, Homo Sapiens; identical to SEQ ID NO: 7790

SEQ ID NO: 7792 - protein, 62 aa, Homo Sapiens
MTPPRLFWVWLLVAGTQGELSPWEIPKAEVWKAGAPWGCSELQGDILPGARGPAVSQIFSPA

SEQ ID NO: 7793 - protein, 62 aa, Homo Sapiens; identical to SEQ ID NO: 7792

SEQ ID NO: 7794 - protein, 144 aa, Homo Sapiens
MTPPRLFWVWLLVAGTQGSGPIMLDEVQCTGTEASLADCKSLGWLKSNCRHERDAGVVCTNETRSTHTLDLSRELSEALGQIFDSQRGCDLSISVNVQGEDALGFCGHTVILTANLEAQALWKEPGSNVTMSVDAECVPMVRDL

SEQ ID NO: 7795 - protein, 48 aa, Homo Sapiens
MTPPRLFWVWLLVAGTQGVNDGDMRLADGGATNQGRVEIFYRGPWPDL

SEQ ID NO: 7796 - protein, 113 aa, Homo Sapiens
MTPPRLFWVWLLVAGTQGVNDGDMRLADGGATNQGRVEIFYRGQWGTVCDNLWDLTDASVVCRALGFENATQALGRAAFGQGRACCLTGRLQVPGLAEEQLQARERRWCGLHQ

SEQ ID NO: 7797 - protein, 88 aa, Homo Sapiens
MTPPRLFWVWLLVAGTQGVNDGDMRLADGGATNQGRVEIFYRGQWGTVCDNLWDLTDASVVCRALGFENATQALGRAAFGQGSGPIML

SEQ ID NO: 7798 - protein, 209 aa, Homo Sapiens
MTPPRLFWVWLLVAGTQGVNDGDMRLADGGATNQGRVEIFYRGQWGTVCDNLWDLTDASVVCRALGFENATQALGRAAFGQGSGPIMLDEVQCTGTEASLADCKSLGWLKSNCRHERDAGVVCTNETRSTHTLDLSRELSEALGQIFDSQRGCDLSISVNVQGEDALGFCGHTVILTANLEAQALWKEPGSNVTMSVDAECVPMVRDLL

SEQ ID NO: 7799 - protein, 210 aa, Homo Sapiens
MTPPRLFWVWLLVAGTQGVNDGDMRLADGGATNQGRVEIFYRGQWGTVCDNLWDLTDASVVCRALGFENATQALGRAAFGQGSGPIMLDEVQCTGTEASLADCKSLGWLKSNCRHERDAGVVCTNETRSTHTLDLSRELSEALGQIFDSQRGCDLSISVNVQGEDALGFCGHTVILTANLEAQALWKEPGSNVTMSVDAECVPMVRDLLR

SEQ ID NO: 7800 - protein, 585 aa, Homo Sapiens
MTPPRLFWVWLLVAGTQGVNDGDMRLADGGATNQGRVEIFYRGQWGTVCDNLWDLTDASVVCRALGFENATQALGRAAFGQGSGPIMLDEVQCTGTEASLADCKSLGWLKSNCRHERDAGVVCTNETRSTHTLDLSRELSEALGQIFDSQRGCDLSISVNVQGEDALGFCGHTVILTANLEAQALWKEPGSNVTMSVDAECVPMVRDLLRYFYSRRIDITLSSVKCFHKLASAYGARQLQGYCASLFAILLPQDPSFQMPLDLYAYAVATGDALLEKLCLQFLAWNFEALTQAEAWPSVPTDLLQLLLPRSDLAVPSELALLKAVDTWSWGERASHEEVEGLVEKIRFPMMLPEELFELQFNLSLYWSHEALFQKKTLQALEFHTVPFQLLARYKGLNLTEDTYKPRIYTSPTWSAFVTDSSWSARKSQLVYQSRRGPLVKYSSDYFQAPSDYRYYPYQSFQTPQHPSFLFQDKRVSWSLVYLPTIQSCWNYGFSCSSDELPVLGLTKSGGSDRTIAYENKALMLCEGLFVADVTDFEGWKAAIPSALDTNSSKSTSSFPCPAGHFNGFRTVIRPFYLTNSSGVD

SEQ ID NO: 7801 - protein, 259 aa, Homo Sapiens
MTPPRLFWVWLLVAGTQGVNDGDMRLADGGATNQGRVEIFYRGQWGTVCDNLWDLTDASVVCRALGFENATQALGRAAFGQGSGPIMLDEVQCTGTEASLADCKSLGWLKSNCRHERDAGVVCTNETRSTHTLDLSRELSEALGQIFDSQRGCDLSISVNVQGEDALGFCGHTVILTANLEAQALWKEPGSNVTMSVDAECVPMVRDLLRYFYSRRIDITLSSVKCFHKLASAYGARQLQGYCASLFAILLPQDPSFQM

SEQ ID NO: 7802 - protein, 131 aa, Homo Sapiens
MTPPRLFWVWLLVAGTQGVNDGDMRLADGGATNQGRVEIFYRGQWGTVCDNLWDLTDASVVCRALGFENATQALGRAAFGQGSGPIMLDEVQCTGTEASLADCKSLGWLKSNCRHERDAGVVCTNGAFQSE

SEQ ID NO: 7803 - protein, 205 aa, Homo Sapiens
MTPPRLFWVWLLVAGTQGVNDGDMRLADGGATNQGRVEIFYRGQWGTVCDNLWDLTDASVVCRALGFENATQALGRAAFGQGSGPIMLDEVQCTGTEASLADCKSLGWLKSNCRHERDAGVVCTNGTSTPEGLTSPCRQSSASTSWPLPMGPGSCRATAQASLPSSSPRTPRSRCPWTCMPMQWPQGTPCWRSSAYSSWPGTSRP

SEQ ID NO: 7804 - protein, 52 aa, Homo Sapiens
MESERSKRMGNACIPLKRIAYFLCLLSALLLTEGKKPAKPKCPAILCEIWFY

SEQ ID NO: 7805 - protein, 72 aa, Homo Sapiens
MESERSKRMGNACIPLKRIAYFLCLLSALLLTEGKKPAKPKCPAVCTCTKDNALCENARSIPRTVPPDVISL

SEQ ID NO: 7806 - protein, 72 aa, Homo Sapiens; identical to SEQ ID NO: 7805

SEQ ID NO: 7807 - protein, 72 aa, Homo Sapiens; identical to SEQ ID NO: 7805

SEQ ID NO: 7808 - protein, 72 aa, Homo Sapiens; identical to SEQ ID NO: 7805

SEQ ID NO: 7809 - protein, 72 aa, Homo Sapiens; identical to SEQ ID NO: 7805

SEQ ID NO: 7810 - protein, 533 aa, Homo Sapiens
MESERSKRMGNACIPLKRIAYFLCLLSALLLTEGKKPAKPKCPAVCTCTKDNALCENARSIPRTVPPDVISLLFTSNSFDVISDDAFIGLPHLEYLFIENNNIKSISRHTFRGLKSLIHLSLANNNLQTLPKDIFKGLDSLTNVDLRGNSFNCDCKLKWLVEWLGHTNATVEDIYCEGPPEYKKRKINSLSSKDFDCIITEFAKSQDLPYQSLSIDTFSYLNDEYVVIAQPFTGKCIFLEWDHVEKTFRNYDNITGTSTVVCKPIVIETQLYVIVAQLFGGSHIYKRDSFANKFIKIQDIEILKIRKPNDIETFKIENNWYFVVADSSKAGFTTIYKWNGNGFYSHQSLHAWYRDTDVEYLEIVRTPQTLRTPHLILSSSSQRPVIYQWNKATQLFTNQTDIPNMEDVYAVKHFSVKGDVYICLTRFIGDSKVMKWGGSSFQDIQRMPSRGSMVFQPLQINNYQYAILGSDYSFTQVYNWDAEKAKFVKFQELNVQAPRSFTHVSINKRNFLFASSFKGNTQIYKHVIVDLSA

SEQ ID NO: 7811 - protein, 96 aa, Homo Sapiens
MESERSKRMGNACIPLKRIAYFLCLLSALLLTEGKKPAKPKCPAVCTCTKDNALCENARSIPRTVPPDVISLSFVRSGFTEISEGSFLFTPSLQLL

SEQ ID NO: 7812 - protein, 96 aa, Homo Sapiens; identical to SEQ ID NO: 7811

SEQ ID NO: 7813 - protein, 236 aa, Homo Sapiens
MESERSKRMGNACIPLKRIAYFLCLLSALLLTEGKKPAKPKCPAVCTCTKDNALCENARSIPRTVPPDVISLSFVRSGFTEISEGSFLFTPSLQLLLFTSNSFDVISDDAFIGLPHLEYLFIENNNIKSISRHTFRGLKSLIHLFRETQTQAENLHCRGAGAPQMAVGDAFLAAEPGGTETNAVFEPVWSALERRLSSGFHSHNRRFSWVNDENTKGQEMVIISVKKEWPSAFENT

SEQ ID NO: 7814 - protein, 151 aa, Homo Sapiens
MESERSKRMGNACIPLKRIAYFLCLLSALLLTEGKKPAKPKCPAVCTCTKDNALCENARSIPRTVPPDVISLSFVRSGFTEISEGSFLFTPSLQLLLFTSNSFDVISDDAFIGLPHLEYLFIENNNIKSISRHTFRGLKSLIHLRDGVGRI

SEQ ID NO: 7815 - protein, 168 aa, Homo Sapiens
MESERSKRMGNACIPLKRIAYFLCLLSALLLTEGKKPAKPKCPAVCTCTKDNALCENARSIPRTVPPDVISLSFVRSGFTEISEGSFLFTPSLQLLLFTSNSFDVISDDAFIGLPHLEYLFIENNNIKSISRHTFRGLKSLIHLSLANNNLQTLPKDIFKGLDSLTNV

SEQ ID NO: 7816 - protein, 168 aa, Homo Sapiens; identical to SEQ ID NO: 7815

SEQ ID NO: 7817 - protein, 557 aa, Homo Sapiens
MESERSKRMGNACIPLKRIAYFLCLLSALLLTEGKKPAKPKCPAVCTCTKDNALCENARSIPRTVPPDVISLSFVRSGFTEISEGSFLFTPSLQLLLFTSNSFDVISDDAFIGLPHLEYLFIENNNIKSISRHTFRGLKSLIHLSLANNNLQTLPKDIFKGLDSLTNVDLRGNSFNCDCKLKWLVEWLGHTNATVEDIYCEGPPEYKKRKINSLSSKDFDCIITEFAKSQDLPYQSLSIDTFSYLNDEYVVIAQPFTGKCIFLEWDHVEKTFRNYDNITGTSTVVCKPIVIETQLYVIVAQLFGGSHIYKRDSFANKFIKIQDIEILKIRKPNDIETFKIENNWYFVVADSSKAGFTTIYKWNGNGFYSHQSLHAWYRDTDVEYLEIVRTPQTLRTPHLILSSSSQRPVIYQWNKATQLFTNQTDIPNMEDVYAVKHFSVKGDVYICLTRFIGDSKVMKWGGSSFQDIQRMPSRGSMVFQPLQINNYQYAILGSDYSFTQVYNWDAEKAKFVKFQELNVQAPRSFTHVSINKRNFLFASSFKGNTQIYKHVIVDLSA

SEQ ID NO: 7818 - protein, 291 aa, Homo Sapiens
MESERSKRMGNACIPLKRIAYFLCLLSALLLTEGKKPAKPKCPAVCTCTKDNALCENARSIPRTVPPDVISLSFVRSGFTEISEGSFLFTPSLQLLLFTSNSFDVISDDAFIGLPHLEYLFIENNNIKSISRHTFRGLKSLIHLSLANNNLQTLPKDIFKGLDSLTNVDLRGNSFNCDCKLKWLVEWLGHTNATVEDIYCEGPPEYKKRKINSLSSKDFDCIITEFAKSQDLPYQSLSIDTFSYLNDEYVVIAQPFTGKCIFLEWDHVEKTFRNYDNITVLREIHRFTNMS

SEQ ID NO: 7819 - protein, 287 aa, Homo Sapiens
MESERSKRMGNACIPLKRIAYFLCLLSALLLTEGKKPAKPKCPAVCTCTKDNALCENARSIPRTVPPDVISLSFVRSGFTEISEGSFLFTPSLQLLLFTSNSFDVISDDAFIGLPHLEYLFIENNNIKSISRHTFRGLKSLIHLSLANNNLQTLPKDIFKGLDSLTNVDLRGNSFNCDCKLKWLVEWLGHTNATVEDIYCEGPPEYKKRKINSLSSKDFDCIITEFAKSQDLPYQSLSIDTFSYLNDEYVVIAQPFTGKCIFLEWDHVEKTFRNYDNITGQSCWCPQ

SEQ ID NO: 7820 - protein, 281 aa, Homo Sapiens
MESERSKRMGNACIPLKRIAYFLCLLSALLLTEGKKPAKPKCPAVCTCTKDNALCENARSIPRTVPPDVISLSFVRSGFTEISEGSFLFTPSLQLLLFTSNSFDVISDDAFIGLPHLEYLFIENNNIKSISRHTFRGLKSLIHLSLANNNLQTLPKDIFKGLDSLTNVDLRGNSFNCDCKLKWLVEWLGHTNATVEDIYCEGPPEYKKRKINSLSSKDFDCIITEFAKSQDLPYQSLSIDTFSYLNDEYVVIAQPFTGKCIFLEWDHVEKTFRNYDNITGS

SEQ ID NO: 7821 - protein, 509 aa, Homo Sapiens
MESERSKRMGNACIPLKRIAYFLCLLSALLLTEGKKPAKPKCPAVCTCTKDNALCENARSIPRTVPPDVISLSFVRSGFTEISEGSFLFTPSLQLLSLANNNLQTLPKDIFKGLDSLTNVDLRGNSFNCDCKLKWLVEWLGHTNATVEDIYCEGPPEYKKRKINSLSSKDFDCIITEFAKSQDLPYQSLSIDTFSYLNDEYVVIAQPFTGKCIFLEWDHVEKTFRNYDNITGTSTVVCKPIVIETQLYVIVAQLFGGSHIYKRDSFANKFIKIQDIEILKIRKPNDIETFKIENNWYFVVADSSKAGFTTIYKWNGNGFYSHQSLHAWYRDTDVEYLEIVRTPQTLRTPHLILSSSSQRPVIYQWNKATQLFTNQTDIPNMEDVYAVKHFSVKGDVYICLTRFIGDSKVMKWGGSSFQDIQRMPSRGSMVFQPLQINNYQYAILGSDYSFTQVYNWDAEKAKFVKFQELNVQAPRSFTHVSINKRNFLFASSFKGNTQIYKHVIVDLSA

SEQ ID NO: 7822 - protein, 100 aa, Homo Sapiens
MKWGGSSFQDIQRMPSRGSMVFQPLQINNYQYAILGSDYSFTQVYNWDAEKAKFVKFQELNVQAPRSFTHVSINKRNFLFASSFKGNTQIYKHVIVDLSA

SEQ ID NO: 7823 - protein, 545 aa, Homo Sapiens
MALRRGGCGALGLLLLLLGAACLIPRSAQVRRLARCPATCSCTKESIICVGSSWVPRIVPGDISSLSLVNGTFSEIKDRMFSHLPSLQLLLLNSNSFTIIRDDAFAGLFHLEYLFIEGNKIETISRNAFRGLRDLTHLSLANNHIKALPRDVFSDLDSLIELDLRGNKFECDCKAKWLYLWLKMTNSTVSDVLCIGPPEYQEKKLNDVTSFDYECTTTDFVVHQTLPYQSVSVDTFNSKNDVYVAIAQPSMENCMVLEWDHIEMNFRSYDNITGQSIVGCKAILIDDQVFVVVAQLFGGSHIYKYDESWTKFVKFQDIEVSRISKPNDIELFQIDDETFFVIADSSKAGLSTVYKWNSKGFYSYQSLHEWFRDTDAEFVDIDGKSHLILSSRSQVPIILQWNKSSKKFVPHGDIPNMEDVLAVKSFRMQNTLYLSLTRFIGDSRVMRWNSKQFVEIQALPSRGAMTLQPFSFKDNHYLALGSDYTFSQIYQWDKEKQLFKKFKEIYVQAPRSFTAVSTDRRDFFFASSFKGKTKIFEHIIVDLSL

SEQ ID NO: 7824 - protein, 256 aa, Homo Sapiens
  misc_feature (1)..(1): Xaa can be any naturally occurring amino acid
XLGLLLLLLGAACLIPRSAQVRRLARCPATCSCTKESIICVGSSWVPRIVPGDISSLSLVNGTFSEIKDRMFSHLPSLQLLLLNSNSFTIIRDDAFAGLFHLEYLFIEGNKIETISRNAFRGLRDLTHLSLANNHIKALPRDVFSDLDSLIELDLRGNKFECDCKAKWLYLWLKMTNSTVSDVLCIGPPEYQEKKLNDVTSFDYECTTTDKQEEICEGKIQNLNARVVMNCSRPSSAFRKHTGNGRVAFFLPHGVR

SEQ ID NO: 7825 - protein, 134 aa, Homo Sapiens
MAGLRARGGPGPGLLALSALGFCLMLQVSAKRPPKTPPCPPSCSCTRDTAFCVDSKAVPRNLPSEVISLTALADPTVLTRVSPQDPGECRLLRDPGWSVLPPPAAAVLVTQLQQVYTDWRQRLHRTVAPAVSLH

SEQ ID NO: 7826 - protein, 548 aa, Homo Sapiens
MAGLRARGGPGPGLLALSALGFCLMLQVSAKRPPKTPPCPPSCSCTRDTAFCVDSKAVPRNLPSEVISLTLVNAAFSEIQDGAFSHLPLLQFLLLNSNKFTLIGDNAFTGLSHLQYLFIENNDIWALSKFTFRGLKSLTHLSLANNNLQTLPRDIFRPLDILNDLDLRGNSLNCDCKVKWLVEWLAHTNTTVAPIYCASPPRFQEHKVQDLPLREFDCITTDFVLYQTLAFPAVSAEPFLYSSDLYLALAQPGVSACTILKWDYVERQLRDYDRIPAPSAVHCKPMVVDSQLYVVVAQLFGGSYIYHWDPNTTRFTRLQDIDPQRVRKPNDLEAFRIDGDWYFAVADSSKAGATSLYRWHQNGFYSHQALHPWHRDTDLEFVDGEGKPRLIVSSSSQAPVIYQWSRTQKQFVAQGEVTQVPDAQAVKHFRAGRDSYLCLSRYIGDSKILRWEGTRFSEVQALPSRGSLALQPFLVGGRRYLALGSDFSFTQIYQWDEGRQKFVRFQELAVQAPRAFCYMPAGDAQLLLAPSFKGQTLVYRHIVVDLSA

SEQ ID NO: 7827 - protein, 524 aa, Homo Sapiens
MAGLRARGGPGPGLLALSALGFCLMLQVSAKRPPKTPPCPPSCSCTRDTAFCVDSKAVPRNLPSEVISLTLVNAAFSEIQDGAFSHLPLLQFLLLNSNKFTLIGDNAFTGLSHLQYLSLANNNLQTLPRDIFRPLDILNDLDLRGNSLNCDCKVKWLVEWLAHTNTTVAPIYCASPPRFQEHKVQDLPLREFDCITTDFVLYQTLAFPAVSAEPFLYSSDLYLALAQPGVSACTILKWDYVERQLRDYDRIPAPSAVHCKPMVVDSQLYVVVAQLFGGSYIYHWDPNTTRFTRLQDIDPQRVRKPNDLEAFRIDGDWYFAVADSSKAGATSLYRWHQNGFYSHQALHPWHRDTDLEFVDGEGKPRLIVSSSSQAPVIYQWSRTQKQFVAQGEVTQVPDAQAVKHFRAGRDSYLCLSRYIGDSKILRWEGTRFSEVQALPSRGSLALQPFLVGGRRYLALGSDFSFTQIYQWDEGRQKFVRFQELAVQAPRAFCYMPAGDAQLLLAPSFKGQTLVYRHIVVDLSA

SEQ ID NO: 7828 - protein, 198 aa, Homo Sapiens
MCPCRDRTLVNAAFSEIQDGAFSHLPLLQFLLLNSNKFTLIGDNAFTGLSHLQYLFIENNDIWALSKFTFRGLKSLTHLSLANNNLQTLPRDIFRPLDILNDLDLRGNSLNCDCKVKWLVEWLAHTNTTVAPIYCASPPRFQEHKVQDLPLREFDCITTDFVLYQTLAFPAVSAEPFLYSSDLYLALAQPGVSACTIL

SEQ ID NO: 7829 - protein, 537 aa, Homo Sapiens
MGGAGILLLLLAGAGVVVAWRPPKGKCPLRCSCSKDSALCEGSPDLPVSFSPTLLSLSLVRTGVTQLKAGSFLRIPSLHLLLFTSNSFSVIEDDAFAGLSHLQYLFIEDNEIGSISKNALRGLRSLTHLSLANNHLETLPRFLFRGLDTLTHVDLRGNPFQCDCRVLWLLQWMPTVNASVGTGACAGPASLSHMQLHHLDPKTFKCRAIELSWFQTVGESALSVEPFSYQGEPHIVLAQPFAGRCLILSWDYSLQRFRPEEELPAASVVSCKPLVLGPSLFVLAARLWGGSQLWARPSPGLRLAPTQTLAPRRLLRPNDAELLWLEGQPCFVVADASKAGSTTLLCRDGPGFYPHQSLHAWHRDTDAEALELDGRPHLLLASASQRPVLFHWTGGRFERRTDIPEAEDVYATRHFQAGGDVFLCLTRYIGDSMVMRWDGSMFRLLQQLPSRGAHVFQPLLIARDQLAILGSDFAFSQVLRLEPDKGLLEPLQELGPPALVAPRAFAHITMAGRRFLFAACFKGPTQIYQHHEIDLSA

SEQ ID NO: 7830 - protein, 494 aa, Homo Sapiens
MGGAGILLLLLAGAGVVVAWRPPKGKCPLRCSCSKDSALCEGSPDLPVSFSPTLLSLSLVRTGVTQLKAGSFLRIPSLHLLLFTSNSFSVIEDDAFAGLSHLQYLFIEDNEIGSISKNALRGLRSLTHLSLANNHLETLPRFLFRGLDTLTHVDLRGNPFQCDCRVLWLLQWMPTVNASVGTGACAGPASLSHMQLHHLDPKTFKCRAIELSWFQTVGESALSVEPFSYQGEPHIVLAQPFAGRCLILSWDYSLQRFRPEEELPGEPPPRPSACPAACLAGLTCLPTSPQRPPWCPASHWCWARASSCWLPACGGAHSCGPGPVPACAWPQRRPWPRGGCCGPMTPSSCGWKGNPASWWPMPPRRAAPRCCAATGPAFTRTRACTPGTGTRTLRPWSWTAGPTCCWPRLPSGPCSSTGPVAASRDAQTSPRPRMSMPHATSRLVGTCSCASHATLGTPWSCAGTAPCFVCCSNFPRAVPTSSSHCSSPGTSWPS

SEQ ID NO: 7831 - protein, 261 aa, Homo Sapiens
MGGAGILLLLLAGAGVVVAWRPPKGKCPLRCSCSKDSALCEGSPDLPVSFSPTLLSLSLVRTGVTQLKAGSFLRIPSLHLLLFTSNSFSVIEDDAFAGLSHLQYLFIEDNEIGSISKNALRGLRSLTHLSLANNHLETLPRFLFRGLDTLTHVDLRGNPFQCDCRVLWLLQWMPTVNASVGTGACAGPASLSHMQLHHLDPKTFKCRAIGGGLSRWGGRREIWGKGCQGQEARLTPCPAISRSGKTLSKQHCLPEPQFSHL

SEQ ID NO: 7832 - protein, 378 aa, Homo Sapiens
  misc_feature (1)..(1): Xaa can be any naturally occurring amino acid
XVIEDDAFAGLSHLQYLFIEDNEIGSISKNALRGLRSLTHLSLANNHLETLPRFLFRGLDTLTHVDLRGNPFQCDCRVLWLLQWMPTVNASVGTGACAGPASLSHMQLHHLDPKTFKCRAIELSWFQTVGESALSVEPFSYQGEPHIVLAQPFAGRCLILSWDYSLQRFRPEEELPAASVVSCKPLVLGPSLFVLAARLWGGSQLWARPSPGLRLAPTQTLAPRRLLRPNDAELLWLEGQPCFVVADASKAGSTTLLCRDGPGFYPHQSLHAWHRDTDAEALELDGRPHLLLASASQRPVLFHWTGGRFERRTDIPEAEDVYATRHFQAGGDVFLCLTRYIGDSMVRLGLGAGGWLFSTDPILHTKPLNSDLPSHADL

SEQ ID NO: 7833 - protein, 19 aa, Homo Sapiens
MVWKVAVFLSVALGIGAVP

SEQ ID NO: 7834 - protein, 57 aa, Homo Sapiens
MVWKVAVFLSVALGIGAVPIDDPEDGGKHWVVIVAGSNGWYNYRHQADACHAYQIIH

SEQ ID NO: 7835 - protein, 58 aa, Homo Sapiens
MVWKVAVFLSVALGIGAVPIDDPEDGGKHWVVIVAGSNGWYNYRHQADACHAYQIIHR

SEQ ID NO: 7836 - protein, 135 aa, Homo Sapiens
MVWKVAVFLSVALGIGAVPIDDPEDGGKHWVVIVAGSNGWYNYRHQADACHAYQIIHRNGIPDEQIVVMINPTPGIVINRPNGTDVYQGVPKDYTGEDVTPQNFLAVLRGDAEAVKGIGSGKVLKSGPQDHVFIY

SEQ ID NO: 7837 - protein, 78 aa, Homo Sapiens
MVWKVAVFLSVALGIGAVPIDDPEDGGKHWVVIVAGSNGWYNYRHQADACHAYQIIHRNGIPDEQIVVMMYDDIAYSE

SEQ ID NO: 7838 - protein, 78 aa, Homo Sapiens; identical to SEQ ID NO: 7837

SEQ ID NO: 7839 - protein, 223 aa, Homo Sapiens
MVWKVAVFLSVALGIGAVPIDDPEDGGKHWVVIVAGSNGWYNYRHQADACHAYQIIHRNGIPDEQIVVMMYDDIAYSEDNPTPGIVINRPNGTDVYQGVPKDYTGEDVTPQNFLAVLRGDAEAVKGIGSGKVLKSGPQDHVFIYFTDHGSTGILVFPNEDLHVKDLNETIHYMYKHKMYRKMVFYIEACESGSMMNHLPDNINGRWLGRRPRPGLASRLLRHR

SEQ ID NO: 7840 - protein, 433 aa, Homo Sapiens
MVWKVAVFLSVALGIGAVPIDDPEDGGKHWVVIVAGSNGWYNYRHQADACHAYQIIHRNGIPDEQIVVMMYDDIAYSEDNPTPGIVINRPNGTDVYQGVPKDYTGEDVTPQNFLAVLRGDAEAVKGIGSGKVLKSGPQDHVFIYFTDHGSTGILVFPNEDLHVKDLNETIHYMYKHKMYRKMVFYIEACESGSMMNHLPDNINVYATTAANPRESSYACYYDEKRSTYLGDWYSVNWMEDSDVEDLTKETLHKQYHLVKSHTNTSHVMQYGNKTISTMKVMQFQGMKRKASSPVPLPPVTHLDLTPSPDVPLTIMKRKLMNTNDLEESRQLTEEIQRHLDARHLIEKSVRKIVSLLAASEAEVEQLLSERAPLTGHSCYPEALLHFRTHCFNWHSPTYEYALRHLYVLVNLCEKPYPLHRIKLSMDHVCLGHY

SEQ ID NO: 7841 - protein, 433 aa, Homo Sapiens; identical to SEQ ID NO: 7840

SEQ ID NO: 7842 - protein, 376 aa, Homo Sapiens
MVWKVAVFLSVALGIGAVPIDDPEDGGKHWVVIVAGSNGWYNYRHQADACHAYQIIHRNGIPDEQIVVMMYDDIAYSEDNPTPGIVINRPNGTDVYQGVPKDYTGEDVTPQNFLAVLRGDAEAVKGIGSGKVLKSGPQDHVFIYFTDHGSTGILVFPNEDLHVKDLNETIHYMYKHKMYRKMVFYIEACESGSMMNHLPDNINVYATTAANPRESSYACYYDEKRSTYLGDWYSVNWMEDSDVEDLTKETLHKQYHLVKSHTNTSHVMQYGNKTISTMKVMQFQGMKRKASSPVPLPPVTHLDLTPSPDVPLTIMKRKLMNTNDLEESRQLTEEIQRHLDYEYALRHLYVLVNLCEKPYPLHRIKLSMDHVCLGHY

SEQ ID NO: 7843 - protein, 372 aa, Homo Sapiens
MVWKVAVFLSVALGIGAVPIDDPEDGGKHWVVIVAGSNGWYNYRHQADACHAYQIIHRNGIPDEQIVVMMYDDIAYSEDNPTPGIVINRPNGTDVYQGVPKDYTGEDVTPQNFLAVLRGDAEAVKGIGSGKVLKSGPQDHVFIYFTDHGSTGILVFPNEDLHVKDLNETIHYMYKHKMYRKMVFYIEACESGSMMNHLPDNINVYATTAANPRESSYACYYDEKRSTYLGDWYSVNWMEDSDVEDLTKETLHKQYHLVKSHTNTSHVMQYGNKTISTMKVMQFQGMKRKASSPVPLPPVTHLDLTPSPDVPLTIMKRKLMNTNDLEESRQLTEEIQRHLDDKIVHGPRVPWSLLKSCLLEAFPSVSAPPTVC

SEQ ID NO: 7844 - protein, 117 aa, Homo Sapiens
MVWKVAVFLSVALGIGAVPIDDPEDGGKHWVVIVAGSNGWYNYRHQADACHAYQIIHRNGIPDEQIVVMMYDDIAYSEDNPTPGIVINRPNGTDVYQGVPKDYTGEWPPGSRVHLLH

SEQ ID NO: 7845 - protein, 48 aa, Homo Sapiens
MVWKVAVFLSVALGIGAVPIDDPEDGGKHWVVIVAGSNGWYNYRHQEL

SEQ ID NO: 7846 - protein, 91 aa, Homo Sapiens
  misc_feature (1)..(1): Xaa can be any naturally occurring amino acid
XPTPGIVINRPNGTDVYQGVPKDYTGEDVTPQNFLAVLRGGVRSLRCSGPPGEPPLQGSLQDLLHKMTCSLLPASPVFSEKLQIRVGKALY

SEQ ID NO: 7847 - protein, 951 aa, Homo Sapiens
MPGPLGLLCFLALGLLGSAGPSGAAPPLCAAPCSCDGDRRVDCSGKGLTAVPEGLSAFTQALDISMNNITQLPEDAFKNFPFLEELQLAGNDLSFIHPKALSGLKELKVLTLQNNQLKTVPSEAIRGLSALQSLRLDANHITSVPEDSFEGLVQLRHLWLDDNSLTEVPVHPLSNLPTLQALTLALNKISSIPDFAFTNLSSLVVLHLHNNKIRSLSQHCFDGLDNLETLDLNYNNLGEFPQAIKALPSLKELGFHSNSISVIPDGAFDGNPLLRTIHLYDNPLSFVGNSAFHNLSDLHSLVIRGASMVQQFPNLTGTVHLESLTLTGTKISSIPNNLCQEQKMLRTLDLSYNNIRDLPSFNGCHALEEISLQRNQIYQIKEGTFQGLISLRILDLSRNLIHEIHSRAFATLGPITNLDVSFNELTSFPTEGLNGLNQLKLVGNFKLKEALAAKDFVNLRSLSVPYAYQCCAFWGCDSYANLNTEDNSLQDHSVAQEKGTADAANVTSTLENEEHSQIIIHCTPSTGAFKPCEYLLGSWMIRLTVWFIFLVALFFNLLVILTTFASCTSLPSSKLFIGLISVSNLFMGIYTGILTFLDAVSWGRFAEFGIWWETGSGCKVAGFLAVFSSESAIFLLMLATVERSLSAKDIMKNGKSNHLKQFRVAALLAFLGATVAGCFPLFHRGEYSASPLCLPFPTGETPSLGFTVTLVLLNSLAFLLMAVIYTKLYCNLEKEDLSENSQSSMIKHVAWLIFTNCIFFCPVAFFSFAPLITAISISPEIMKSVTLIFFPLPACLNPVLYVFFNPKFKEDWKLLKRRVTKKSGSVSVSISSQGGCLEQDFYYDCGMYSHLQGNLTVCDCCESFLLTKPVSCKHLIKSHSCPALAVASCQRPEGYWSDCGTQSAHSDYADEEDSFVSDSSDQVQACGRACFYQSRGFPLVRYAYNLPRVKD

SEQ ID NO: 7848 - protein, 158 aa, Homo Sapiens
MPGPLGLLCFLALGLLGSAGPSGAAPPLCAAPCSCDGDRRVDCSGKGLTAVPEGLSAFTQALDISMNNITQLPEDAFKNFPFLEELRLDANHITSVPEDSFEGLVQLRHLWLDDNSLTEVPVHPLSNLPTLQALTLALNKISSIPDFAFTNLSSLVVL

SEQ ID NO: 7849 - protein, 927 aa, Homo Sapiens
MPGPLGLLCFLALGLLGSAGPSGAAPPLCAAPCSCDGDRRVDCSGKGLTAVPEGLSAFTQALQLAGNDLSFIHPKALSGLKELKVLTLQNNQLKTVPSEAIRGLSALQSLRLDANHITSVPEDSFEGLVQLRHLWLDDNSLTEVPVHPLSNLPTLQALTLALNKISSIPDFAFTNLSSLVVLHLHNNKIRSLSQHCFDGLDNLETLDLNYNNLGEFPQAIKALPSLKELGFHSNSISVIPDGAFDGNPLLRTIHLYDNPLSFVGNSAFHNLSDLHSLVIRGASMVQQFPNLTGTVHLESLTLTGTKISSIPNNLCQEQKMLRTLDLSYNNIRDLPSFNGCHALEEISLQRNQIYQIKEGTFQGLISLRILDLSRNLIHEIHSRAFATLGPITNLDVSFNELTSFPTEGLNGLNQLKLVGNFKLKEALAAKDFVNLRSLSVPYAYQCCAFWGCDSYANLNTEDNSLQDHSVAQEKGTADAANVTSTLENEEHSQIIIHCTPSTGAFKPCEYLLGSWMIRLTVWFIFLVALFFNLLVILTTFASCTSLPSSKLFIGLISVSNLFMGIYTGILTFLDAVSWGRFAEFGIWWETGSGCKVAGFLAVFSSESAIFLLMLATVERSLSAKDIMKNGKSNHLKQFRVAALLAFLGATVAGCFPLFHRGEYSASPLCLPFPTGETPSLGFTVTLVLLNSLAFLLMAVIYTKLYCNLEKEDLSENSQSSMIKHVAWLIFTNCIFFCPVAFFSFAPLITAISISPEIMKSVTLIFFPLPACLNPVLYVFFNPKFKEDWKLLKRRVTKKSGSVSVSISSQGGCLEQDFYYDCGMYSHLQGNLTVCDCCESFLLTKPVSCKHLIKSHSCPALAVASCQRPEGYWSDCGTQSAHSDYADEEDSFVSDSSDQVQACGRACFYQSRGFPLVRYAYNLPRVKD

SEQ ID NO: 7850 - protein, 141 aa, Homo Sapiens
MEMLQGLLLLLLLSMGGAWASREPLRPWCHPINAILAVEKEGCPVCITVNTTICAGYCPTMMRVLQAVLPPLPQVVCTYRDVRFESIRLPGCPRGVDPVVSFPVALSCRCGPCRRSTSDCGGPKDHPLTCDHPQLSGLLFL

SEQ ID NO: 7851 - protein, 699 aa, Homo Sapiens
MKQRFSALQLLKLLLLLQPPLPRALREALCPEPCNCVPDGALRCPGPTAGLTRLSLAYLPVKVIPSQAFRGLNEVIKIEISQIDSLERIEANAFDNLLNLSEILIQNTKNLRYIEPGAFINLPRLKYLSICNTGIRKFPDVTKVFSSESNFILEICDNLHITTIPGNAFQGMNNESVTLKLYGNGFEEVQSHAFNGTTLTSLELKENVHLEKMHNGAFRGATGPKTLDISSTKLQALPSYGLESIQRLIATSSYSLKKLPSRETFVNLLEATLTYPSHCCAFRNLPTKEQNFSHSISENFSKQCESTVRKVNNKTLYSSMLAESELSGWDYEYGFCLPKTPRCAPEPDAFNPCEDIMGYDFLRVLIWLINILAIMGNMTVLFVLLTSRYKLTVPRFLMCNLSFADFCMGLYLLLIASVDSQTKGQYYNHAIDWQTGSGCSTAGFFTVFASELSVYTLTVITLERWHTITYAIHLDQKLRLRHAILIMLGGWLFSSLIAMLPLVGVSNYMKVSICFPMDVETTLSQVYILTILILNVVAFFIICACYIKIYFAVRNPELMATNKDTKIAKKMAILIFTDFTCMAPISFFAISAAFKVPLITVTNSKVLLVLFYPINSCANPFLYAIFTKTFQRDFFLLLSKFGCCKRRAELYRRKDFSAYTSNCKNGFTGSNKPSQSTLKLSTLHCQGTALLDKTRYTEC

SEQ ID NO: 7852 - protein, 672 aa, Homo Sapiens
MKQRFSALQLLKLLLLLQPPLPRALREALCPEPCNCVPDGALRCPGPTAGLTRLSLAYLPVKVIPSQAFRGLNEVIKIEISQIDSLERIEANAFDNLLNLSEILIQNTKNLRYIEPGAFINLPRLKYLSICNTGIRKFPDVTKVFSSESNFILEICDNLHITTIPGNAFQGMNNESVTLKLYGNGFEEVQSHAFNGTTLTSLELKENVHLEKMHNGAFRGATGPKTLDISSTKLQALPSYGLESIQRLIATSSYSLKKLPSRETFVNLLEATLTYPSHCCAFRNLPTKDYSSMLAESELSGWDYEYGFCLPKTPRCAPEPDAFNPCEDIMGYDFLRVLIWLINILAIMGNMTVLFVLLTSRYKLTVPRFLMCNLSFADFCMGLYLLLIASVDSQTKGQYYNHAIDWQTGSGCSTAGFFTVFASELSVYTLTVITLERWHTITYAIHLDQKLRLRHAILIMLGGWLFSSLIAMLPLVGVSNYMKVSICFPMDVETTLSQVYILTILILNVVAFFIICACYIKIYFAVRNPELMATNKDTKIAKKMAILIFTDFTCMAPISFFAISAAFKVPLITVTNSKVLLVLFYPINSCANPFLYAIFTKTFQRDFFLLLSKFGCCKRRAELYRRKDFSAYTSNCKNGFTGSNKPSQSTLKLSTLHCQGTALLDKTRYTEC

SEQ ID NO: 7853 - protein, 325 aa, Homo Sapiens
MKQRFSALQLLKLLLLLQPPLPRALREALCPEPCNCVPDGALRCPGPTAGLTRLSLAYLPVKVIPSQAFRGLNEVIKIEISQIDSLERIEANAFDNLLNLSEILIQNTKNLRYIEPGAFINLPRLKYLSICNTGIRKFPDVTKVFSSESNFILEICDNLHITTIPGNAFQGMNNESVTLKLYGNGFEEVQSHAFNGTTLTSLELKENVHLEKMHNGAFRGATGPKTLDISSTKLQALPSYGLESIQRLIATSSYSLKKLPSRETFVNLLEATLTYPSHCCAFRNLPTKEQNFSHSISENFSKQCESTVRKVNNKTLSKPRINGYQ

SEQ ID NO: 7854 - protein, 329 aa, Homo Sapiens
MKQRFSALQLLKLLLLLQPPLPRALREALCPEPCNCVPDGALRCPGPTAGLTRLSLAYLPVKVIPSQAFRGLNEVIKIEISQIDSLERIEANAFDNLLNLSEILIQNTKNLRYIEPGAFINLPRLKYLSICNTGIRKFPDVTKVFSSESNFILEICDNLHITTIPGNAFQGMNNESVTLKLYGNGFEEVQSHAFNGTTLTSLELKENVHLEKMHNGAFRGATGPKTLDISSTKLQALPSYGLESIQRLIATSSYSLKKLPSRETFVNLLEATLTYPSHCCAFRNLPTKEQNFSHSISENFSKQCESTVRKVNNKTLLLHGALSAAHSLS

SEQ ID NO: 7855 - protein, 175 aa, Homo Sapiens
NCVPDGALRCPGPTAGLTRLSLAYLPVKVIPSQAFRGLNEVIKIEISQIDSLERIEANAFDNLLNLSEILIQNTKNLRYIEPGAFINLPRLKYLSICNTGIRKFPDVTKVFSSESNFILEICDNLHITTIPGNAFQGMNNESVTLPWQNCDEAIKELTLKEKRENMDWNDSEMKR

SEQ ID NO: 7856 - protein, 202 aa, Homo Sapiens
MKVLAAGVVPLLLVLHWKHGAGSPLPITPVNATCAIRHPCHNNLMNQIRSQLAQLNGSANALFILYYTAQGEPFPNNLDKLCGPNVTDFPPFHANGTEKAKLVELYRIVVYLGTSLGNITRDQKILNPSALSLHSKLNATADILRGLLSNVLCRLCSKYHVGHVDVTYGPDTSGKDVFQKKKLGCQLLGKYKQIIAVLAQAF

SEQ ID NO: 7857 - protein, 88 aa, Homo Sapiens
MKVLAAVHSPGGAVPQQPGQAMWPQRDGLPALPRQRHGEGQAGGAVPHSRVPWHLPGQHHPGPEDPQPQCPQPPQQAQRHRRHPARPP

SEQ ID NO: 7858 - protein, 75 aa, Homo Sapiens
MMDIYVCLKRPSWMVDNKRMRTASNFQWLLSTFILLYLMNQVNSQKKGAPHDLKCVTNNLQVWNCSWKAPSGTGR

SEQ ID NO: 7859 - protein, 126 aa, Homo Sapiens
MMDIYVCLKRPSWMVDNKRMRTASNFQWLLSTFILLYLMNQVNSQKKGAPHDLKCVTNNLQVWNCSWKAPSGTGRGTDYEVCIENRSRSCYQLEKTSIKIPALSHGDYEITINSLHDFGSSTSKFT

SEQ ID NO: 7860 - protein, 1097 aa, Homo Sapiens
MMDIYVCLKRPSWMVDNKRMRTASNFQWLLSTFILLYLMNQVNSQKKGAPHDLKCVTNNLQVWNCSWKAPSGTGRGTDYEVCIENRSRSCYQLEKTSIKIPALSHGDYEITINSLHDFGSSTSKFTLNEQNVSLIPDTPEILNLSADFSTSTLYLKWNDRGSVFPHRSNVIWEIKVLRKESMELVKLVTHNTTLNGKDTLHHWSWASDMPLECAIHFVEIRCYIDNLHFSGLEEWSDWSPVKNISWIPDSQTKVFPQDKVILVGSDITFCCVSQEKVLSALIGHTNCPLIHLDGENVAIKIRNISVSASSGTNVVFTTEDNIFGTVIFAGYPPDTPQQLNCETHDLKEIICSWNPGRVTALVGPRATSYTLVESFSGKYVRLKRAEAPTNESYQLLFQMLPNQEIYNFTLNAHNPLGRSQSTILVNITEKVYPHTPTSFKVKDINSTAVKLSWHLPGNFAKINFLCEIEIKKSNSVQEQRNVTIKGVENSSYLVALDKLNPYTLYTFRIRCSTETFWKWSKWSNKKQHLTTEASPSKGPDTWREWSSDGKNLIIYWKPLPINEANGKILSYNVSCSSDEETQSLSEIPDPQHKAEIRLDKNDYIISVVAKNSVGSSPPSKIASMEIPNDDLKIEQVVGMGKGILLTWHYDPNMTCDYVIKWCNSSRSEPCLMDWRKVPSNSTETVIESDEFRPGIRYNFFLYGCRNQGYQLLRSMIGYIEELAPIVAPNFTVEDTSADSILVKWEDIPVEELRGFLRGYLFYFGKGERDTSKMRVLESGRSDIKVKNITDISQKTLRIADLQGKTSYHLVLRAYTDGGVGPEKSMYVVTKENSVGLIIAILIPVAVAVIVGVVTSILCYRKREWIKETFYPDIPNPENCKALQFQKSVCEGSSALKTLEMNPCTPNNVEVLETRSAFPKIEDTEIISPVAERPEDRSDAEPENHVVVSYCPPIIEEEIPNPAADEAGGTAQVIYIDVQSMYQPQAKPEEEQENDPVGGAGYKPQMHLPINSTVEDIAAEEDLDKTAGYRPQANVNTWNLVSPDSPRSIDSNSEIVSFGSPCSINSRQFLIPPKDEDSPKSNGGGWSFTNFFQNKPND

SEQ ID NO: 7861 - protein, 1097 aa, Homo Sapiens; identical to SEQ ID NO: 7860

SEQ ID NO: 7862 - protein, 66 aa, Homo Sapiens
  misc_feature (1)..(1): Xaa can be any naturally occurring amino acid
XWSNKKQHLTTEASPSKGPDTWREWSSDGKNLIIYWKMRKHSPFLKSLILSTKQRYDLIRMTTSSA

SEQ ID NO: 7863 - protein, 289 aa, Homo Sapiens
MTPIVTVLICLRLSLGPRTHVQAGTLPKPTLWAEPGSVITQGSPVTLWCQGILETQEYRLYREKKTAPWITRIPQEIVKKGQFPIPSITWEHTGRYRCFYGSHTAGWSEPSDPLELVVTGAYIKPTLSALPSPVVTSGGNVTLHCVSQVAFGSFILCKEGEDEHPQCLNSQPRTHGWSRAIFSVGPVSPSRRWSYRCYAYDSNSPHVWSLPSDLLELLVLGAAETLSPPQNKSDSKAGAANTLSPSQNKTASHPQDYTVENLIRMGIAGLVLVVLGILLFEAQHSQRSL

SEQ ID NO: 7864 - protein, 489 aa, Homo Sapiens
MTPIVTVLICLRLSLGPRTHVQAGTLPKPTLWAEPGSVITQGSPVTLWCQGILETQEYRLYREKKTAPWITRIPQEIVKKGQFPIPSITWEHTGRYRCFYGSHTAGWSEPSDPLELVVTGAYIKPTLSALPSPVVTSGGNVTLHCVSQVAFGSFILCKEGEDEHPQCLNSQPRTHGWSRAIFSVGPVSPSRRWSYRCYAYDSNSPHVWSLPSDLLELLVLGVSKKPSLSVQPGPIVAPGESLTLQCVSDVSYDRFVLYKEGERDFLQLPGPQPQAGLSQANFTLGPVSRSYGGQYRCSGAYNLSSEWSAPSDPLDILIAGQFRGRPFISVHPGPTVASGENVTLLCQSWGPFHTFLLTKAGAADAPLRLRSIHEYPKYQAEFPMSPVTSAHSGTYRCYGSLSSNPYLLSHPSDSLELMVSGAAETLSPPQNKSDSKAGAANTLSPSQNKTASHPQDYTVENLIRMGIAGLVLVVLGILLFEAQHSQRSL

SEQ ID NO: 7865 - protein, 454 aa, Homo Sapiens
MTPILTVLICLGHLPKPTLWAEPGSVIIQGSPVTLRCQGSLQAEEYHLYRENKSASWVRRIQEPGKNGQFPIPSITWEHAGRYHCQYYSHNHSSEYSDPLELVVTGAYSKPTLSALPSPVVTSGGNVTLQCVSQVAFDGFILCKEGEDEHPQRLNSHSHARGWSWAIFSVGPVSPSRRWSYRCYAYDSNSPYVWSLPSDLLELLVPGVSKKPSLSVQPGPMVAPGESLTLQCVSDVGYDRFVLYKEGERDFLQRPGWQPQAGLSQANFTLGPVSPSHGGQYRCYSAHNLSSEWSAPSDPLDILITGQFYDRPSLSVQPVPTVAPGKNVTLLCQSRGQFHTFLLTKEGAGHPPLHLRSEHQAQQNQAEFRMGPVTSAHVGTYRCYSSLSSNPYLLSLPSDPLELVVSASLGQHPQDYTVENLIRMGVAGLVLVVLGILLFEAQHSQRSLQDAAGR

SEQ ID NO: 7866 - protein, 203 aa, Homo Sapiens
MTPILTVLICLGLSLGPRTHVQAGHLPKPTLWAEPGSVIIQGSPVTLRCQGSLQAEEYHLYRENKSASWVRRIQEPGKNGQFPIPSITWEHAGRYHCQYYSHNHSSEHQAQQNQAEFRMGPVTSAHVGTYRCYSSLSSNPYLLSLPSDPLELVVSASLGQHPQDYTVENLIRMGVAGLVLVVLGILLFEAQHSQRSLQDAAGR

SEQ ID NO: 7867 - protein, 466 aa, Homo Sapiens
MTPILTVLICLGLSLGPRTHVQAGHLPKPTLWAEPGSVIIQGSPVTLRCQGSLQAEEYHLYRENKSASWVRRIQEPGKNGQFPIPSITWEHAGRYHCQYYSHNHSSEYSDPLELVVTGAYSKPTLSALPSPVVTSGGNVTLQCVSQVAFDGFILCKEGEDEHPQRLNSHSHARGWSWAIFSVGPVSPSRRWSYRCYAYDSNSPYVWSLPSDLLELLVPGVSKKPSLSVQPGPMVAPGESLTLQCVSDVGYDRFVLYKEGERDFLQRPGWQPQAGLSQANFTLGPVSPSHGGQYRCYSAHNLSSEWSAPSDPLDILITGQFYDRPSLSVQPVPTVAPGKNVTLLCQSRGQFHTFLLTKEGAGHPPLHLRSEHQAQQNQAEFRMGPVTSAHVGTYRCYSSLSSNPYLLSLPSDPLELVVSASLGQHPQDYTVENLIRMGVAGLVLVVLGILLFEAQHSQRSLQDAAGR

SEQ ID NO: 7868 - protein, 483 aa, Homo Sapiens
MTPILTVLICLGLSLGPRTHVQAGHLPKPTLWAEPGSVIIQGSPVTLRCQGSLQAEEYHLYRENKSASWVRRIQEPGKNGQFPIPSITWEHAGRYHCQYYSHNHSSEYSDPLELVVTGAYSKPTLSALPSPVVTSGGNVTLQCVSQVAFDGFILCKEGEDEHPQRLNSHSHARGWSWAIFSVGPVSPSRRWSYRCYAYDSNSPYVWSLPSDLLELLVPGVSKKPSLSVQPGPMVAPGESLTLQCVSDVGYDRFVLYKEGERDFLQRPGWQPQAGLSQANFTLGPVSPSHGGQYRCYSAHNLSSEWSAPSDPLDILITGQFYDRPSLSVQPVPTVAPGKNVTLLCQSRGQFHTFLLTKEGAGHPPLHLRSEHQAQQNQAEFRMGPVTSAHVGTYRCYSSLSSNPYLLSLPSDPLELVVSEAAETLSPSQNKTDSTTTSLGQHPQDYTVENLIRMGVAGLVLVVLGILLFEAQHSQRSLQDAAGR

SEQ ID NO: 7869 - protein, 483 aa, Homo Sapiens; identical to SEQ ID NO: 7868

SEQ ID NO: 7870 - protein, 327 aa, Homo Sapiens
MTPILTVLICLGLSLGPRTHVQAGHLPKPTLWAEPGSVIIQGSPVTLRCQGSLQAEEYHLYRENKSASWVRRIQEPGKNGQFPIPSITWEHAGRYHCQYYSHNHSSEYSDPLELVVTGAYSKPTLSALPSPVVTSGGNVTLQCVSQVAFDGFILCKEGEDEHPQRLNSHSHARGWSWAIFSVGPVSPSRRWSYRCYAYDSNSPYVWSLPSDLLELLVPGVSKKPSLSVQPGPMVAPGESLTLQCVSDVGYDRFVLYKEGERDFLQRPGWQPQAGLSQANFTLGPVSPSHGGQYRCYSAHNLSSEWSAPSDPLDILITGQFYDRPSLS

SEQ ID NO: 7871 - protein, 85 aa, Homo Sapiens
  misc_feature (1)..(1): Xaa can be any naturally occurring amino acid
XSLPSDPLELVVSEPLSISPSPTPAGSLGHLKTREEAAWASVGSDCDEAGVHPRCAPLERSTPAVGAAHTAPPVLTWRPLCSGHP

SEQ ID NO: 7872 - protein, 158 aa, Homo Sapiens
MTPALTALLCLGLSLGPRTRMQAGPFPKPTLWAEPGSVISWGSPVTIWCQGSLEAQEYQLDKEGSPEPWDRNNPLEPKNKARFSIPSMTQHHAGRYRCHYYSSAGWSEPSDPLELVMTGFYNKPTLSALPSPVVASGGNMTLRCGSQKGYHHFVLMKE

SEQ ID NO: 7873 - protein, 632 aa, Homo Sapiens
MTPALTALLCLGLSLGPRTRMQAGPFPKPTLWAEPGSVISWGSPVTIWCQGSLEAQEYQLDKEGSPEPWDRNNPLEPKNKARFSIPSMTQHHAGRYRCHYYSSAGWSEPSDPLELVMTGFYNKPTLSALPSPVVASGGNMTLRCGSQKGYHHFVLMKEGEHQLPRTLDSQQLHSGGFQALFPVGPVTPSHRWRFTCYYYYTNTPWVWSHPSDPLEILPSGVSRKPSLLTLQGPVLAPGQSLTLQCGSDVGYDRFVLYKEGERDFLQRPGQQPQAGLSQANFTLGPVSRSYGGQYRCYGAHNLSSEWSAPSDPLDILITGQIYDTVSLSAQPGPTVASGENMTLLCQSRGYFDTFLLTKEGAAHPPLRLRSMYGAHKYQAEFPMSPVTSAHAGTYRCYGSRSSNPHLLSFPSEPLELMVSGHSGGSSLPPTGPPSTPGLGRYLEVLIGVSVAFVLLLFLLLFLLLLRQRHSKHRTSDQRKTDFQRPAGAAETEPKDRGLLRRSSPAADVQEENLYAAVKDTQSEDRVELDSQQSPHDEDPQAVTYAPVKHSSPRREMASPPSSLSGEFLDTKDRQVEEDRQMDTEAAASEASQDVTYAQLHSLTLRRKATEPPPSQEGEPPAEPSIYATLAIH

SEQ ID NO: 7874 - protein, 643 aa, Homo Sapiens
MTPALTALLCLGLSLGPRTRMQAGPFPKPTLWAEPGSVISWGSPVTIWCQGSLEAQEYQLDKEGSPEPWDRNNPLEPKNKARFSIPSMTQHHAGRYRCHYYSSAGWSEPSDPLELVMTGFYNKPTLSALPSPVVASGGNMTLRCGSQKGYHHFVLMKEGEHQLPRTLDSQQLHSGGFQALFPVGPVTPSHRWRFTCYYYYTNTPWVWSHPSDPLEILPSGVSRKPSLLTLQGPVLAPGQSLTLQCGSDVGYDRFVLYKEGERDFLQRPGQQPQAGLSQANFTLGPVSRSYGGQYRCYGAHNLSSEWSAPSDPLDILITGQIYDTVSLSAQPGPTVASGENMTLLCQSRGYFDTFLLTKEGAAHPPLRLRSMYGAHKYQAEFPMSPVTSAHAGTYRCYGSRSSNPHLLSFPSEPLELMVSGPEDQPLNPPGSGPQNAPGLGSGAGTRAAGLGRYLEVLIGVSVAFVLLLFLLLFLLLLRQRHSKHRTSDQRKTDFQRPAGAAETEPKDRGLLRRSSPAADVQEENLYAAVKDTQSEDRVELDSQSPHDEDPQAVTYAPVKHSSPRREMASPPSSLSGEFLDTKDRQVEEDRQMDTEAAASEASQDVTYAQLHSLTLRRKATEPPPSQEGEPPAEPSIYATLAIH

SEQ ID NO: 7875 - protein, 631 aa, Homo Sapiens
MTPALTALLCLGLSLGPRTRMQAGPFPKPTLWAEPGSVISWGSPVTIWCQGSLEAQEYQLDKEGSPEPWDRNNPLEPKNKARFSIPSMTQHHAGRYRCHYYSSAGWSEPSDPLELVMTGFYNKPTLSALPSPVVASGGNMTLRCGSQKGYHHFVLMKEGEHQLPRTLDSQQLHSGGFQALFPVGPVTPSHRWRFTCYYYYTNTPWVWSHPSDPLEILPSGVSRKPSLLTLQGPVLAPGQSLTLQCGSDVGYDRFVLYKEGERDFLQRPGQQPQAGLSQANFTLGPVSRSYGGQYRCYGAHNLSSEWSAPSDPLDILITGQIYDTVSLSAQPGPTVASGENMTLLCQSRGYFDTFLLTKEGAAHPPLRLRSMYGAHKYQAEFPMSPVTSAHAGTYRCYGSRSSNPHLLSFPSEPLELMVSGHSGGSSLPPTGPPSTPGLGRYLEVLIGVSVAFVLLLFLLLFLLLLRQRHSKHRTSDQRKTDFQRPAGAAETEPKDRGLLRRSSPAADVQEENLYAAVKDTQSEDRVELDSQSPHDEDPQAVTYAPVKHSSPRREMASPPSSLSGEFLDTKDRQVEEDRQMDTEAAASEASQDVTYAQLHSLTLRRKATEPPPSQEGEPPAEPSIYATLAIH

SEQ ID NO: 7876 - protein, 191 aa, Homo Sapiens
MTPALTALLCLGLSLGPRTRMQAGPFPKPTLWAEPGSVISWGSPVTIWCQGSLEAQEYQLDKEGSPEPWDRNNPLEPKNKARFSIPSMTQHHAGRYRCHYYSSAGWSEPSDPLELVMTGFYNKPTLSALPSPVVASGGNMTLRCGSQKGYHHFVLMKEGEHQLPRTLDSQQLHSGGFQALFPVGPVTPSHS

SEQ ID NO: 7877 - protein, 253 aa, Homo Sapiens [sequence omitted]

SEQ ID NO: 7878 - protein, 131 aa, Homo Sapiens
MGLPVSWAPPALWVLGCCALLLSLWALCTACRRPEDAVAPRKRARRQRARLQGSATAAEAQVGHQTARAAPGPAQQQGPAACQHGSPAPTLAGGVQGHHRTAGSPLCLPTPGAAPGSAGSCSHRRVRWPRG

SEQ ID NO: 7879 - protein, 176 aa, Homo Sapiens
MGLPVSWAPPALWVLGCCALLLSLWALCTACRRPEDAVAPRKRARRQRARLQGSATAAEAQVGHQTARAAPGPAQQQGPAACQHGSPAPTLAGGVQGHHRTAGSPLCLPTPGAAPGSAGSCSHRRVRWPRGHLFQRGAGGPSRGQPGGQPCGGRVCPRPEAQRDPSQSPRATAGED

SEQ ID NO: 7880 - protein, 107 aa, Homo Sapiens
MGLPVSWAPPALWVLGCCALLLSLWALCTACRRPEDAVAPRKRARRQRARLQGSATAAEASLLRRTHLCSLSKSDTRLHELHRGPRSSRALRPASMDLLRPHWLEVS

SEQ ID NO: 7881 - protein, 295 aa, Homo Sapiens
MGLPVSWAPPALWVLGCCALLLSLWALCTACRRPEDAVAPRKRARRQRARLQGSATAAEASLLRRTHLCSLSKSDTRLHELHRGPRSSRALRPASMDLLRPHWLEVSRDITGPQAAPSAFPHQELPRALPAAAATAGCAGLEATYSNVGLAALPGVSLAASPVVAEYARVQKRKGTHRSPQEPQQGKTEVTPAAQVDVLYSRVCKPKRRDPGPTTDPLDPKGQGAILALAGDLAYQTLPLRALDVDSGPLENVYESIRELGDPAGRSSTCGAGTPPASSCPSLGRGWRPLPASLP

SEQ ID NO: 7882 - protein, 211 aa, Homo Sapiens
MGLPVSWAPPALWVLGCCALLLSLWALCTACRRPEDAVAPRKRARRQRARLQGSATAAEAVSARLSRGPGWGPQGTDQPSSPPVPTEADPPLLPQQVGHQTARAAPGPAQQQGPAACQHGSPAPTLAGGVQGHHRTAGSPLCLPTPGAAPGSAGSCSHRRVRWPRGHLFQRGAGGPSRGQPGGQPCGGRVCPRPEAQRDPSQSPRATAGED

SEQ ID NO: 7883 - protein, 4 aa, Homo Sapiens
MLAG

SEQ ID NO: 7884 - protein, 12 aa, Homo Sapiens
MLAGGVRSMPSP

SEQ ID NO: 7885 - protein, 19 aa, Homo Sapiens
MLAGGVRSMPSPLLACWQP

SEQ ID NO: 7886 - protein, 35 aa, Homo Sapiens
MLAGGVRSMPSPLLACWQPILLLVLGSVLSGSATG

SEQ ID NO: 7887 - protein, 55 aa, Homo Sapiens
MLAGGVRSMPSPLLACWQPILLLVLGSVLSGSATGCPPRCECSAQDRAVLCHRKR

SEQ ID NO: 7888 - protein, 72 aa, Homo Sapiens
MLAGGVRSMPSPLLACWQPILLLVLGSVLSGSATGCPPRCECSAQDRAVLCHRKRFVAVPEGIPTETRLLDL

SEQ ID NO: 7889 - protein, 125 aa, Homo Sapiens
MLAGGVRSMPSPLLACWQPILLLVLGSVLSGSATGCPPRCECSAQDRAVLCHRKRFVAVPEGIPTETRLLDLGKNRIKTLNQDEFASFPHLEELELNENIVSAVEPGAFNNLFNLRTLGLRSNRL

SEQ ID NO: 7890 - protein, 179 aa, Homo Sapiens
MLAGGVRSMPSPLLACWQPILLLVLGSVLSGSATGCPPRCECSAQDRAVLCHRKRFVAVPEGIPTETRLLDLGKNRIKTLNQDEFASFPHLEELELNENIVSAVEPGAFNNLFNLRTLGLRSNRLKLIPLGVFTGLSNLTKLDISENKIVILLDYMFQDLYNLKSLEVGDNDLVYISHR

SEQ ID NO: 7891 - protein, 614 aa, Homo Sapiens
MLAGGVRSMPSPLLACWQPILLLVLGSVLSGSATGCPPRCECSAQDRAVLCHRKRFVAVPEGIPTETRLLDLGKNRIKTLNQDEFASFPHLEELELNENIVSAVEPGAFNNLFNLRTLGLRSNRLKLIPLGVFTGLSNLTKLDISENKIVILLDYMFQDLYNLKSLEVGDNDLVYISHRAFSGLNSLEQLTLEKCNLTSIPTEALSHLHGLIVLRLRHLNINAIRDYSFKRLYRLKVLEISHWPYLDTMTPNCLYGLNLTSLSITHCNLTAVPYLAVRHLVYLRFLNLSYNPISTIEGSMLHELLRLQEIQLVGGQLAVVEPYAFRGLNYLRVLNVSGNQLTTLEESVFHSVGNLETLILDSNPLACDCRLLWVFRRRWRLNFNRQQPTCATPEFVQGKEFKDFPDVLLPNYFTCRRARIRDRKAQQVFVDEGHTVQFVCRADGDPPPAILWLSPRKHLVSAKSNGRLTVFPDGTLEVRYAQVQDNGTYLCIAANAGGNDSMPAHLHVRSYSPDWPHQPNKTFAFISNQPGEGEANSTRATVPFPFDIKTLIIATTMGFISFLGVVLFCLVLLFLWSRGKGNTKHNIEIEYVPRKSDAGISSADAPRKFNMKMI

SEQ ID NO: 7892 - protein, 620 aa, Homo Sapiens
MQVSKRMLAGGVRSMPSPLLACWQPILLLVLGSVLSGSATGCPPRCECSAQDRAVLCHRKRFVAVPEGIPTETRLLDLGKNRIKTLNQDEFASFPHLEELELNENIVSAVEPGAFNNLFNLRTLGLRSNRLKLIPLGVFTGLSNLTKLDISENKIVILLDYMFQDLYNLKSLEVGDNDLVYISHRAFSGLNSLEQLTLEKCNLTSIPTEALSHLHGLIVLRLRHLNINAIRDYSFKRLYRLKVLEISHWPYLDTMTPNCLYGLNLTSLSITHCNLTAVPYLAVRHLVYLRFLNLSYNPISTIEGSMLHELLRLQEIQLVGGQLAVVEPYAFRGLNYLRVLNVSGNQLTTLEESVFHSVGNLETLILDSNPLACDCRLLWVFRRRWRLNFNRQQPTCATPEFVQGKEFKDFPDVLLPNYFTCRRARIRDRKAQQVFVDEGHTVQFVCRADGDPPPAILWLSPRKHLVSAKSNGRLTVFPDGTLEVRYAQVQDNGTYLCIAANAGGNDSMPAHLHVRSYSPDWPHQPNKTFAFISNQPGEGEANSTRATVPFPFDIKTLIIATTMGFISFLGVVLFCLVLLFLWSRGKGNTKHNIEIEYVPRKSDAGISSADAPRKFNMKMI

SEQ ID NO: 7893 - protein, 326 aa, Homo Sapiens
MVQLEQKVSKRMLAGGVRSMPSPLLACWQPILLLVLGSVLSGSATGCPPRCECSAQDRAVLCHRKRFVAVPEGIPTETRLLDLGKNRIKTLNQDEFASFPHLEELELNENIVSAVEPGAFNNLFNLRTLGLRSNRLKLIPLGVFTGLSNLTKLDISENKIVILLDYMFQDLYNLKSLEVGDNDLVYISHRAFSGLNSLEQLTLEKCNLTSIPTEALSHLHGLIVLRLRHLNINAIRDYSFKRLYRLKVLEISHWPYLDTMTPNCLYGLNLTSLSITHCNLTAVPYLAVRHLVYLRFLNLSYNPISTIEGSMLHELLRLQEIQLVGG

SEQ ID NO: 7894 - protein, 343 aa, Homo Sapiens
MACLEFVPFDVQMCLEFLPSGPKPVVFLQHGLLADSSNWVTNLANSSLGFILADAGFDVWMGNSRGNTWSRKHKTLSVSQDEFWAFSYDEMAKYDLPASINFILNKTGQEQVYYVGHSQGTTIGFIAFSQIPELAKRIKMFFALGPVASVAFCTSPMAKLGRLPDHLIKDLFGDKEFLPQSAFLKWLGTHVCTHVILKELCGNLCFLLCGFNERNLNMSRVDVYTTHSPAGTSVQNMLHWSQAVKFQKFQAFDWGSSAKNYFHYNQSYPPTYNVKDMLVPTAVWSGGHDWLADVYDVNILLTQITNLVFHESIPEWEHLDFIWGLDAPWRLYNKIINLMRKYQ

SEQ ID NO: 7895 - protein, 283 aa, Homo Sapiens
MGNSRGNTWSRKHKTLSVSQDEFWAFSYDEMAKYDLPASINFILNKTGQEQVYYVGHSQGTTIGFIAFSQIPELAKRIKMFFALGPVASVAFCTSPMAKLGRLPDHLIKDLFGDKEFLPQSAFLKWLGTHVCTHVILKELCGNLCFLLCGFNERNLNMSRVDVYTTHSPAGTSVQNMLHWSQAVKFQKFQAFDWGSSAKNYFHYNQSYPPTYNVKDMLVPTAVWSGGHDWLADVYDVNILLTQITNLVFHESIPEWEHLDFIWGLDAPWRLYNKIINLMRKYQ

SEQ ID NO: 7896 - protein, 219 aa, Homo Sapiens
MKMRFLGLVVCLVLWTLHSEGSGGKLTAVDPETNMNVSEIISYWGFPSEEYLVETEDGYILCLNRIPHGRKNHSDKGPKPVVFLQHGLLADSSNWVTNLANSSLGFILADAGFDVWMGNSRGNTWSRKHKTLSVSQDEFWAFSYDEMAKYDLPASINFILNKTGQEQVYYVGHSQGTTIGFIAFSQIPELAKRIKMFFALGPVASVAFCTSPMAKLGRL

SEQ ID NO: 7897 - protein, 399 aa, Homo Sapiens
MKMRFLGLVVCLVLWTLHSEGSGGKLTAVDPETNMNVSEIISYWGFPSEEYLVETEDGYILCLNRIPHGRKNHSDKGPKPVVFLQHGLLADSSNWVTNLANSSLGFILADAGFDVWMGNSRGNTWSRKHKTLSVSQDEFWAFSYDEMAKYDLPASINFILNKTGQEQVYYVGHSQGTTIGFIAFSQIPELAKRIKMFFALGPVASVAFCTSPMAKLGRLPDHLIKDLFGDKEFLPQSAFLKWLGTHVCTHVILKELCGNLCFLLCGFNERNLNMSRVDVYTTHSPAGTSVQNMLHWSQAVKFQKFQAFDWGSSAKNYFHYNQSYPPTYNVKDMLVPTAVWSGGHDWLADVYDVNILLTQITNLVFHESIPEWEHLDFIWGLDAPWRLYNKIINLMRKYQ

SEQ ID NO: 7898 - protein, 290 aa, Homo Sapiens
MKMRFLGLVVCLVLWTLHSEGSGGKLTAVDPETNMNVSEIISYWGFPSEEYLVETEDGYILCLNRIPHGRKNHSDKGPKPVVFLQHGLLADSSNWVTNLANSSLGFILADAGFDVWMGNSRGNTWSRKHKTLSVSQDEFWAFSYDEMAKYDLPASINFILNKTGQEQVYYVGHSQGTTIGFIAFSQIPELAKRIKMFFALGPVASVAFCTSPMAKLGRLPDHLIKDLFGDKEFLPQSAFLKWLGTHVCTHVILKELCGNLCFLLCGFNERNLNMSRVDVYTTHSPAGTSV

SEQ ID NO: 7899 - protein, 438 aa, Homo Sapiens
MDTSPLCFSILLVLCIFIQSSALGQSLKPEPFGRRAQAVETNKTLHEMKTRFLLFGETNQGCQIRINHPDTLQECGFNSSLPLVMIIHGWSESVQLSRSHVHLIGYSLGAHVSGFAGSSIGGTHKIGRITGLDAAGPLFEGSAPSNRLSPDDANFVDAIHTFTREHMGLSVGIKQPIGHYDFYPNGGSFQPGCHFLELYRHIAQHGFNAITQTIKCSHERSVHLFIDSLLHAGTQSMAYPCGDMNSFSQGLCLSCKKGRCNTLGYHVRQEPRSKSKRLFLVTRAQSPFKVYHYQFKIQFINQTETPIQTTFTMSLLGTKEKMQKIPITLGKGIASNKTYSFLITLDVDIGELIMIKFKWENSAVWANVWDTVQTIIPWSTGPRHSGLVLKTIRVKAGETQQRMTFCSENTDDLLLRPTQEKIFVKCEIKSKTSKRKIR

SEQ ID NO: 7900 - protein, 499 aa, Homo Sapiens
MDTSPLCFSILLVLCIFIQSSALGQSLKPEPFGRRAQAVETNKTLHEMKTRFLLFGETNQGCQIRINHPDTLQECGFNSSLPLVMIIHGWSVDGVLENWIWQMVAALKSQPAQPVNVGLVDWITLAHDHYTIAVRNTRLVGKEVAALLRWLEESVQLSRSHVHLIGYSLGAHVSGFAGSSIGGTHKIGRITGLDAAGPLFEGSAPSNRLSPDDANFVDAIHTFTREHMGLSVGIKQPIGHYDFYPNGGSFQPGCHFLELYRHIAQHGFNAITQTIKCSHERSVHLFIDSLLHAGTQSMAYPCGDMNSFSQGLCLSCKKGRCNTLGYHVRQEPRSKSKRLFLVTRAQSPFKVYHYQFKIQFINQTETPIQTTFTMSLLGTKEKMQKIPITLGKGIASNKTYSFLITLDVDIGELIMIKFKWENSAVWANVWDTVQTIIPWSTGPRHSGLVLKTIRVKAGETQQRMTFCSENTDDLLLRPTQEKIFVKCEIKSKTSKRKIR

SEQ ID NO: 7901 - protein, 499 aa, Homo Sapiens; identical to SEQ ID NO: 7900

SEQ ID NO: 7902 - protein, 499 aa, Homo Sapiens
MDTSPLCFSILLVLCIFIQSSALGQSLKPEPFGRRAQAVETNKTLHEMKTRFLLFGETNQGCQIRINHPDTLQECGFNSSLPLVMIIHGWSVDGVLENWIWQMVAALKSQPAQPVNVGLVDWITLAHDHYTIAVRNTRLVGKEVAALLRWLEESVQLSRSHVHLIGYSLGAHVSGFAGSSIGGTHKIGRITGLDAAGPLFEGSAPSNRLSPDDANFVDAIHTFTREHMGLSVGIKQPIGHYDFYPNGGSFQPGCHFLELYRHIAQHGFNAITQTIKCSHERSVHLFIDSLLHAGTQSMAYPCGDMNSFSQGLCLSCKKGRCNTLGYHVRQEPRSKSKRLFLVTRAQSPFKVYHYQFKIQFINQTETPIQTTFTMSLLGTKEKMQKIPITLGKGIASNKTYSFLITLDVDIGELIMIKFKWENSAVWANVWDTVQTIIPWSTGPRHSGLVLKTIRVKAGETQQRSPNRINLGRLNCSLLFCTELFSHDSLAHWSSAASEL

SEQ ID NO: 7903 - protein, 375 aa, Homo Sapiens
MFSNANSRSKMWLLLTMASLISVLGTTHGLFGKLHPGSPEVTMNISQMITYWGYPNEEYEVVTEDGYILEVNRIPYGKKNSGNTDAGYDVWLGNSRGNTWARRNLYYSPDSVEFWAFSFDEMAKYDLPATIDFIVKKTGQKQLHYVGHSQGTTIGFIAFSTNPSLAKRIKTFYALAPVATVKYTKSLINKLRFVPQSLFKFIFGDKIFYPHNFFDQFLATEVCSREMLNLLCSNALFIICGFDSKNFNTSRLDVYLSHNPAGTSVQNMFHWTQAVKSGKFQAYDWGSPVQNRMHYDQSQPPYYNVTAMNVPIAVWNGGKDLLADPQDVGLLLPKLPNLIYHKEIPFYNHLDFIWAMDAPQEVYNDIVSMISEDKK

SEQ ID NO: 7904 - protein, 408 aa, Homo Sapiens
MFSNANSRSKMWLLLTMASLISVLGTTHGLFGKLHPGSPEVTMNISQMITYWGYPNEEYEVVTEDGYILEVNRIPYGKKNSGNTGQRPVVFLQHGLLASATNWISNLPNNSLAFILADAGYDVWLGNSRGNTWARRNLYYSPDSVEFWAFSFDEMAKYDLPATIDFIVKKTGQKQLHYVGHSQGTTIGFIAFSTNPSLAKRIKTFYALAPVATVKYTKSLINKLRFVPQSLFKFIFGDKIFYPHNFFDQFLATEVCSREMLNLLCSNALFIICGFDSKNFNTSRLDVYLSHNPAGTSVQNMFHWTQAVKSGKFQAYDWGSPVQNRMHYDQSQPPYYNVTAMNVPIAVWNGGKDLLADPQDVGLLLPKLPNLIYHKEIPFYNHLDFIWAMDAPQEVYNDIVSMISEDKK

SEQ ID NO: 7905 - protein, 365 aa, Homo Sapiens
MWLLLTMASLISVLGTTHGLFGKLHPGSPEVTMNISQMITYWGYPNEEYEVVTEDGYILEVNRIPYGKKNSGNTDAGYDVWLGNSRGNTWARRNLYYSPDSVEFWAFSFDEMAKYDLPATIDFIVKKTGQKQLHYVGHSQGTTIGFIAFSTNPSLAKRIKTFYALAPVATVKYTKSLINKLRFVPQSLFKFIFGDKIFYPHNFFDQFLATEVCSREMLNLLCSNALFIICGFDSKNFNTSRLDVYLSHNPAGTSVQNMFHWTQAVKSGKFQAYDWGSPVQNRMHYDQSQPPYYNVTAMNVPIAVWNGGKDLLADPQDVGLLLPKLPNLIYHKEIPFYNHLDFIWAMDAPQEVYNDIVSMISEDKK

SEQ ID NO: 7906 - protein, 398 aa, Homo Sapiens
MWLLLTMASLISVLGTTHGLFGKLHPGSPEVTMNISQMITYWGYPNEEYEVVTEDGYILEVNRIPYGKKNSGNTGQRPVVFLQHGLLASATNWISNLPNNSLAFILADAGYDVWLGNSRGNTWARRNLYYSPDSVEFWAFSFDEMAKYDLPATIDFIVKKTGQKQLHYVGHSQGTTIGFIAFSTNPSLAKRIKTFYALAPVATVKYTKSLINKLRFVPQSLFKFIFGDKIFYPHNFFDQFLATEVCSREMLNLLCSNALFIICGFDSKNFNTSRLDVYLSHNPAGTSVQNMFHWTQAVKSGKFQAYDWGSPVQNRMHYDQSQPPYYNVTAMNVPIAVWNGGKDLLADPQDVGLLLPKLPNLIYHKEIPFYNHLDFIWAMDAPQEVYNDIVSMISEDKK

SEQ ID NO: 7907 - protein, 188 aa, Homo Sapiens
LCYCFAAGSPVPFGPEGRLEDKLHKPKATQTEVKPSVRFNLRTSKDPEHEGCYLSVGHSQPLEDCSFNMTAKTFFIIHGWTMSGIFENWLHKLVSALHTREKDANVVVVDWLPLAHQLYTDAVNNTRVVGHSIARMLDWLQVLGDERESPVTSRISNPIFLRNAGHASVAMNFWSLIKIFEIKSFIEL

SEQ ID NO: 7908 - protein, 390 aa, Homo Sapiens
MLSFSRDRLPSGRRVSGKCPPPPLGMAVGRGGSGCPEEGSGRKLELLESQLPAERAREEAGPSVRRPRDKLHKPKATQTEVKPSVRFNLRTSKDPEHEGCYLSVGHSQPLEDCSFNMTAKTFFIIHGWTMSGIFENWLHKLVSALHTREKDANVVVVDWLPLAHQLYTDAVNNTRVVGHSIARMLDWLQEKDDFSLGNVHLIGYSLGAHVAGYAGNFVKGTVGRITGLDPAGPMFEGADIHKRLSPDDADFVDVLHTYTRSFGLSIGIQMPVGHIDIYPNGGDFQPGCGLNDVLGSIAYGTITEVVKCEHERAVHLFVDSLVNQDKPSFAFQCTDSNRFKKGICLSCRKNRCNSIGYNAKKMRNKRNSKMYLKTRAGMPFRGNLQSLECP

SEQ ID NO: 7909 - protein, 426 aa, Homo Sapiens
MSNSVPLLCFWSLCYCFAAGSPVPFGPEGRLEDKLHKPKATQTEVKPSVRFNLRTSKDPEHEGCYLSVGHSQPLEDCSFNMTAKTFFIIHGWTMSGIFENWLHKLVSALHTREKDANVVVVDWLPLAHQLYTDAVNNTRVVGHSIARMLDWLQEKDDFSLGNVHLIGYSLGAHVAGYAGNFVKGTVGRITAITEVVKCEHERAVHLFVDSLVNQDKPSFAFQCTDSNRFKKGICLSCRKNRCNSIGYNAKKMRNKRNSKMYLKTRAGMPFRVYHYQMKIHVFSYKNMGEIEPTFYVTLYGTNADSQTLPLEIVERIEQNATNTFLVYTEEDLGDLLKIQLTWEGASQSWYNLWKEFRSYLSQPRNPGRELNIRRIRVKSGETQRKLTFCTEDPENTSISPGRELWFRKCRDGWRMKNETSPTVELP

SEQ ID NO: 7910 - protein, 500 aa, Homo Sapiens
MSNSVPLLCFWSLCYCFAAGSPVPFGPEGRLEDKLHKPKATQTEVKPSVRFNLRTSKDPEHEGCYLSVGHSQPLEDCSFNMTAKTFFIIHGWTMSGIFENWLHKLVSALHTREKDANVVVVDWLPLAHQLYTDAVNNTRVVGHSIARMLDWLQEKDDFSLGNVHLIGYSLGAHVAGYAGNFVKGTVGRITGLDPAGPMFEGADIHKRLSPDDADFVDVLHTYTRSFGLSIGIQMPVGHIDIYPNGGDFQPGCGLNDVLGSIAYGTITEVVKCEHERAVHLFVDSLVNQDKPSFAFQCTDSNRFKKGICLSCRKNRCNSIGYNAKKMRNKRNSKMYLKTRAGMPFRVYHYQMKIHVFSYKNMGEIEPTFYVTLYGTNADSQTLPLEIVERIEQNATNTFLVYTEEDLGDLLKIQLTWEGASQSWYNLWKEFRSYLSQPRNPGRELNIRRIRVKSGETQRKLTFCTEDPENTSISPGRELWFRKCRDGWRMKNETSPTVELP

SEQ ID NO: 7911 - protein, 354 aa, Homo Sapiens
MSNSVPLLCFWSLCYCFAAGSPVPFGPEGRLEDKLHKPKATQTEVKPSVRFNLRTSKDPEHEGCYLSVGHSQPLEDCSFNMTAKTFFIIHGWTMSGIFENWLHKLVSALHTREKDANVVVVDWLPLAHQLYTDAVNNTRVVGHSIARMLDWLQEKDDFSLGNVHLIGYSLGAHVAGYAGNFVKGTVGRITGLDPAGPMFEGADIHKRLSPDDADFVDVLHTYTRSFGLSIGIQMPVGHIDIYPNGGDFQPGCGLNDVLGSIAYGTITEVVKCEHERAVHLFVDSLVNQDKPSFAFQCTDSNRFKKGICLSCRKNRCNSIGYNAKKMRNKRNSKMYLKTRAGMPFRGNLQSLECP

SEQ ID NO: 7912 - protein, 24 aa, Homo Sapiens
MTAKTFFIIHGWTMSGIFENWLHK

SEQ ID NO: 7913 - protein, 417 aa, Homo Sapiens
MLRFYLFISLLCLSRSDAEETCPSFTRLSFHSAVVGTGLNVRLMLYTRKNLTCAQTINSSAFGNLNVTKKTTFIVHGFRPTGSPPVWMDDLVKGLLSVEDMNVVVVDWNRGATTLIYTHASSKTRKVAMVLKEFIDQMLAEGASLDDIYMIGVSLGAHISGFVGEMYDGWLGRITALGYKEPLGNIDFYPNGGLDQPGCPKTILGGFQYFKCDHQRSVYLYLSSLRESCTITAYPCDSYQDYRNGKCVSCGTSQKESCPLLGYYADNWKDHLRGKDPPMTKAFFDTAEESPFCMYHYFVDIITWNKNVRRGDITIKLRDKAGNTTESKINHEPTTFQKYHQVSLLARFNQDLDKVAAISLMFSTGSLIGPRYKLRILRMKLRSLAHPERPQLCRYDLVLMENVETVFQPILCPELQL

SEQ ID NO: 7914 - protein, 451 aa, Homo Sapiens
MLRFYLFISLLCLSRSDAEETCPSFTRLSFHSAVVGTGLNVRLMLYTRKNLTCAQTINSSAFGNLNVTKKTTFIVHGFRPTGSPPVWMDDLVKGLLSVEDMNVVVVDWNRGATTLIYTHASSKTRKVAMVLKEFIDQMLAEGASLDDIYMIGVSLGAHISGFVGEMYDGWLGRITGLDPAGPLFNGKPHQDRLDPSDAQFVDVIHSDTDALGYKEPLGNIDFYPNGGLDQPGCPKTILGGFQYFKCDHQRSVYLYLSSLRESCTITAYPCDSYQDYRNGKCVSCGTSQKESCPLLGYYADNWKDHLRGKDPPMTKAFFDTAEESPFCMYHYFVDIITWNKNVRRGDITIKLRDKAGNTTESKINHEPTTFQKYHQVSLLARFNQDLDKVAAISLMFSTGSLIGPRYKLRILRMKLRSLAHPERPQLCRYDLVLMENVETVFQPILCPELQL

SEQ ID NO: 7915 - protein, 47 aa, Homo Sapiens
MLRFYLFISLLCLSRSDASLDMNEESPLFEEGFLQSEIWEIKLIPPK

SEQ ID NO: 7916 - protein, 86 aa, Homo Sapiens
  misc_feature (1)..(1): Xaa can be any naturally occurring amino acid
XDIYMIGVSLGAHISGFVGEMYDGWLGRITGFQYFKCDHQRSVYLYLSSLRESCTITAYPCDSYQDYRNGKCVSCGTSQKESCPLL

SEQ ID NO: 7917 - protein, 73 aa, Homo Sapiens
  misc_feature (1)..(1): Xaa can be any naturally occurring amino acid
XSPFCMYHYFVDIITWNKNVRRGDITIKLRDKAGNTTESKINQISNRPKVQAQDSPNEVKVPCPSGEASAVSV

SEQ ID NO: 7918 - protein, 399 aa, Homo Sapiens
MWQLLAAACWMLLLGSMYGYDKKGNNANPEANMNISQIISYWGYPYEEYDVTTKDGYILGIYRIPHGRGCPGRTAPKPAVYLQHGLIASASNWICNLPNNSLAFLLADSGYDVWLGNSRGNTWSRKHLKLSPKSPEYWAFSLDEMAKYDLPATINFIIEKTGQKRLYYVGHSQGTTIAFIAFSTNPELAKKIKIFFALAPVVTVKYTQSPMKKLTTLSRRVVKVLFGDKMFHPHTLFDQFIATKVCNRKLFRRICSNFLFTLSGFDPQNLNMSRLDVYLSHNPAGTSVQNMLHWAQAVNSGQLQAFDWGNSDQNMMHFHQLTPPLYNITKMEVPTAIWNGGQDIVADPKDVENLLPQIANLIYYKLIPHYNHVDFYLGEDAPQEIYQDLIILMEEYLQN

SEQ ID NO: 7919 - protein, 423 aa, Homo Sapiens
MLETLSRQWIVSHRMEMWLLILVAYMFQRNVNSVHMPTKAVDPEAFMNISEIIQHQGYPCEEYEVATEDGYILSVNRIPRGLVQPKKTGSRPVVLLQHGLVGGASNWISNLPNNSLGFILADAGFDVWMGNSRGNAWSRKHKTLSIDQDEFWAFSYDEMARFDLPAVINFILQKTGQEKIYYVGYSQGTTMGFIAFSTMPELAQKIKMYFALAPIATVKHAKSPGTKFLLLPDMMIKGLFGKKEFLYQTRFLRQLVIYLCGQVILDQICSNIMLLLGGFNTNNMNMSRASVYAAHTLAGTSVQNILHWSQAVNSGELRAFDWGSETKNLEKCNQPTPVRYRVRDMTVPTAMWTGGQDWLSNPEDVKMLLSEVTNLIYHKNIPEWAHVDFIWGLDAPHRMYNEIIHLMQQEETNLSQGRCEAVL

SEQ ID NO: 7920 - protein, 383 aa, Homo Sapiens
MTRPLDRKQSEIIQHQGYPCEEYEVATEDGYILSVNRIPRGLVQPKKTGSRPVVLLQHGLVGGASNWISNLPNNSLGFILADAGFDVWMGNSRGNAWSRKHKTLSIDQDEFWAFSYDEMARFDLPAVINFILQKTGQEKIYYVGYSQGTTMGFIAFSTMPELAQKIKMYFALAPIATVKHAKSPGTKFLLLPDMMIKGLFGKKEFLYQTRFLRQLVIYLCGQVILDQICSNIMLLLGGFNTNNMNMSRASVYAAHTLAGTSVQNILHWSQAVNSGELRAFDWGSETKNLEKCNQPTPVRYRVRDMTVPTAMWTGGQDWLSNPEDVKMLLSEVTNLIYHKNIPEWAHVDFIWGLDAPHRMYNEIIHLMQQEETNLSQGRCEAVL

SEQ ID NO: 7921 - protein, 398 aa, Homo Sapiens
MMWLLLTTTCLICGTLNAGGFLDLENEVNPEVWMNTSEIIIYNGYPSEEYEVTTEDGYILLVNRIPYGRTHARSTGPRPVVYMQHALFADNAYWLENYANGSLGFLLADAGYDVWMGNSRGNTWSRRHKTLSETDEKFWAFSFDEMAKYDLPGVIDFIVNKTGQEKLYFIGHSLGTTIGFVAFSTMPELAQRIKMNFALGPTISFKYPTGIFTRFFLLPNSIIKAVFGTKGFFLEDKKTKIASTKICNNKILWLICSEFMSLWAGSNKKNMNQSRMDVYMSHAPTGSSVHNILHIKQLYHSDEFRAYDWGNDADNMKHYNQSHPPIYDLTAMKVPTAIWAGGHDVLVTPQDVARILPQIKSLHYFKLLPDWNHFDFVWGLDAPQRMYSEIIALMKAYS

SEQ ID NO: 7922 - protein, 288 aa, Homo Sapiens
MAAEGWIWRWGWGRRCLGRPGLLGPGPGPTTPLFLLLLLGSVTADITDGNSEHLKREHSLIKPYQGVGSSSMPLWDFQGSTMLTSQYVRLTPDERSKEGSIWNHQPCFLKDWEMHVHFKVHGTGKKNLHGDGIALWYTRDRLVPDNFHGLAIFLDTYPNDETTERVFPYISVMVNNGSLSYDHSKDGRWTELAGCTADFRNRDHDTFLAVRYSRGRLTVMTDLEDKNEWKNCIDITGVRLPTGYYFGASAGTGDLSDNHDIISMKLFQLMVEHTPDEESIDWTKIEPS

SEQ ID NO: 7923 - protein, 203 aa, Homo Sapiens
MAAEGWIWRWGWGRRCLGRPGLLGPGPGPTTPLFLLLLLGSVTADITDGNSEHLKREHSLIKPYQGVGSSSMPLWDFQGSTMLTSQYVRLTPDERSKEGSIWNHQPCFLKDWEMHVHFKVHGTGKKNLHGDGIALWYTRDRLVPGPVFGSKDNFHGLAIFLDTYPNDETTEHRLDQDRAQRQLPQVAQRQRGRPHGELPQRAP

SEQ ID NO: 7924 - protein, 356 aa, Homo Sapiens
MAAEGWIWRWGWGRRCLGRPGLLGPGPGPTTPLFLLLLLGSVTADITDGNSEHLKREHSLIKPYQGVGSSSMPLWDFQGSTMLTSQYVRLTPDERSKEGSIWNHQPCFLKDWEMHVHFKVHGTGKKNLHGDGIALWYTRDRLVPGPVFGSKDNFHGLAIFLDTYPNDETTERVFPYISVMVNNGSLSYDHSKDGRWTELAGCTADFRNRDHDTFLAVRYSRGRLTVMTDLEDKNEWKNCIDITGVRLPTGYYFGASAGTGDLSDNHDIISMKLFQLMVEHTPDEESIDWTKIEPSVNFLKSPKDNVDDPTGNFRSGPLTGWRVFLLLLCALLGIVVCAVVGAVVFQKRQERNKRFY

SEQ ID NO: 7925 - protein, 325 aa, Homo Sapiens
MAAEGWIWRWGWGRRCLGRPGLLGPGPGPTTPLFLLLLLGSVTADITDGNSEHLKREHSLIKPYQGVGSSSMPLWDFQGSTMLTSQYVRLTPDERSKEGSIWNHQPCFLKDWEMHVHFKVHGTGKKNLHGDGIALWYTRDRLVPGPVFGSKDNFHGLAIFLDTYPNDETTERVFPYISVMVNNGSLSYDHSKDGRWTELAGCTADFRNRDHDTFLAVRYSRGRLTVMTDLEDKNEWKNCIDITGVRLPTGYYFGASAGTGDLSDNHDIISMKLFQLMVEHTPDEESIDWTKIEPSVNFLKSPKAPPFLLPQTTWTTPRGTSAAGP

SEQ ID NO: 7926 - protein, 192 aa, Homo Sapiens
MPLWDFQGSTMLTSQYVRLTPDERSKEGSIWNHQPCFLKDWEMHVHFKVHGTGKKNLHGDGIALWYTRDRLVPGPVFGSKDNFHGLAIFLDTYPNDETTERVFPYISVMVNNGSLSYDHSKDGRWTELAGCTADFRNRDHDTFLAVRYSRGRLTVMTDLEDKNEWKNCIDITGVRLPTGYYFGASAGTGDLS

SEQ ID NO: 7927 - protein, 144 aa, Homo Sapiens
MAIGDHILQQNVNGQTISLYRFLPNIVMQANSTVTVWAAASEAKHQPPSDFLWKEQDKFRASPDCITILCKPNGQAIAWYTPIHWKQAWEKLDADVEFNRCSVVSPTFRKRVFQWTASTATITKEKQDQPKKDISNYQVEQAQV

SEQ ID NO: 7928 - protein, 291 aa, Homo Sapiens
MIGDGEDYFLSLFGDSKKLTAHSNYTQKTLKYFSMILEEVGQFTSSSLGDVEIAEVNVKGLFVKLINSSLDKEMAIGDHILQQNVNGQTISLYRFLPNIVMQANSTVTVWAAASEAKHQPPSDFLWKEQDKFRASPDCITILCKPNGQAIAWYTPIHWKQAWEKLDADVEFNRCSVVSPTFRKRVFQWTASTATITKEKQDQPKKDISNYQVEQAQVLLKREKEIPPTVFPNRSPWCQNPYVSAHPYCPLIEPHNTSTAGGRLDRQPRTRSTRPNRASGSKKKKTSESQKQ

SEQ ID NO: 7929 - protein, 369 aa, Homo Sapiens
MKDTQDIQEASKAMQNKVHEQEDKNEKQKQREDKLGVYSLVHFSPKMLGSVATTLPLSSSNSSGMPLGYYLSSPQISRVTISTTGQLTSKATVGSCSRVENSLDASPFSVPKKQDESPMIGDGEDYFLSLFGDSKKLTAHSNYTQKTLKYFSMILEEVGQFTSSSLGDVEIAEVNVKGLFVKLINSSLDKEMAIGDHILQQNVNGQTISLYRFLPNIVMQANSTVTAIAWYTPIHWKQAWEKLDADVEFNRCSVVSPTFRKRVFQWTASTATITKEKQDQPKKDISNYQVEQAQVLLKREKEIPPTVFPNRSPWCQNPYVSAHPYCPLIEPHNTSTAGGRLDRQPRTRSTRPNRASGSKKKKTSESQKQ

SEQ ID NO: 7930 - protein, 409 aa, Homo Sapiens
MKDTQDIQEASKAMQNKVHEQEDKNEKQKQREDKLGVYSLVHFSPKMLGSVATTLPLSSSNSSGMPLGYYLSSPQISRVTISTTGQLTSKATVGSCSRVENSLDASPFSVPKKQDESPMIGDGEDYFLSLFGDSKKLTAHSNYTQKTLKYFSMILEEVGQFTSSSLGDVEIAEVNVKGLFVKLINSSLDKEMAIGDHILQQNVNGQTISLYRFLPNIVMQANSTVTVWAAASEAKHQPPSDFLWKEQDKFRASPDCITILCKPNGQAIAWYTPIHWKQAWEKLDADVEFNRCSVVSPTFRKRVFQWTASTATITKEKQDQPKKDISNYQVEQAQVLLKREKEIPPTVFPNRSPWCQNPYVSAHPYCPLIEPHNTSTAGGRLDRQPRTRSTRPNRASGSKKKKTSESQKQ

SEQ ID NO: 7931 - protein, 388 aa, Homo Sapiens
MLEGSWINRREDKLGVYSLVHFSPKMLGSVATTLPLSSSNSSGMPLGYYLSSPQISRVTISTTGQLTSKATVGSCSRVENSLDASPFSVPKKQDESPMIGDGEDYFLSLFGDSKKLTAHSNYTQKTLKYFSMILEEVGQFTSSSLGDVEIAEVNVKGLFVKLINSSLDKEMAIGDHILQQNVNGQTISLYRFLPNIVMQANSTVTVWAAASEAKHQPPSDFLWKEQDKFRASPDCITILCKPNGQAIAWYTPIHWKQAWEKLDADVEFNRCSVVSPTFRKRVFQWTASTATITKEKQDQPKKDISNYQVEQAQVLLKREKEIPPTVFPNRSPWCQNPYVSAHPYCPLIEPHNTSTAGGRLDRQPRTRSTRPNRASGSKKKKTSESQKQ

SEQ ID NO: 7932 - protein, 72 aa, Homo Sapiens
MLGSVATTLPLSSSNSSGMPLGYYLSSPQISRVTISTTGQLTSKATVGSCSRVENSLDASPFSVPKKQDESP

SEQ ID NO: 7933 - protein, 166 aa, Homo Sapiens
MLGSVATTLPLSSSNSSGMPLGYYLSSPQISRVTISTTGQLTSKATVGSCSRVENSLDASPFSVPKKQDESPMIGDGEDYFLSLFGDSKKLTAHSNYTQKTLKYFSMILEEVGQFTSSSLGDVEIAEVNVKGLFVKLINSSLDKEMAIGDHILQQNVNGQTISLYR

SEQ ID NO: 7934 - protein, 170 aa, Homo Sapiens
MLGSVATTLPLSSSNSSGMPLGYYLSSPQISRVTISTTGQLTSKATVGSCSRVENSLDASPFSVPKKQDESPMIGDGEDYFLSLFGDSKKLTAHSNYTQKTLKYFSMILEEVGQFTSSSLGDVEIAEVNVKGLFVKLINSSLDKEMAIGDHILQQNVNGQTISLYRFLPN

SEQ ID NO: 7935 - protein, 325 aa, Homo Sapiens
MQQPVRAGDIGVSRVQTHHNASPFSVPKKQDESPMIGDGEDYFLSLFGDSKKLTAHSNYTQKTLKYFSMILEEVGQFTSSSLGDVEIAEVNVKGLFVKLINSSLDKEMAIGDHILQQNVNGQTISLYRFLPNIVMQANSTVTVWAAASEAKHQPPSDFLWKEQDKFRASPDCITILCKPNGQAIAWYTPIHWKQAWEKLDADVEFNRCSVVSPTFRKRVFQWTASTATITKEKQDQPKKDISNYQVEQAQVLLKREKEIPPTVFPNRSPWCQNPYVSAHPYCPLIEPHNTSTAGGRLDRQPRTRSTRPNRASGSKKKKTSESQKQ

SEQ ID NO: 7936 - protein, 105 aa, Homo Sapiens
QWTASTATITKEKQDQPKKDISNYQVEQAQVLLKREKEIPPTVFPNRSPWCQNPYVSAHPYCPLIEPHNTSTAGGRLDRQPRTRSTRPNRASGSKKKKTSESQKQ

SEQ ID NO: 7937 - protein, 163 aa, Homo Sapiens
  misc_feature (1)..(1): Xaa can be any naturally occurring amino acid
XDKFRASPDCITILCKPNGQAIAWYTPIHWKQAWEKLDADVEFNRCSVVSPTFRKRVFQWTASTATITKEKQDQPKKDISNYQVEQAQVLLKREKEIPPTVFPNRSPWCQNPYVSAHPYCPLIEPHNTSTAGGRLDRQPRTRSTRPNRASGSKKKKTSESQKQ

SEQ ID NO: 7938 - protein, 632 aa, Homo Sapiens
MKALLLLVLPWLSPANYIDNVGNLHFLYSELCKGASHYGLTKDRKRRSQDGCPDGCASLTATAPSPEVSAAATISLMTDEPGLDNPAYVSSAEDGQPAISPVDSGRSNRTRARPFERSTIRSRSFKKINRALSVLRRTKSGSAVANHADQGRENSENTTAPEVFPRLYHLIPDGEITSIKINRVDPSESLSIRLVGGSETPLVHIIIQHIYRDGVIARDGRLLPGDIILKVNGMDISNVPHNYAVRLLRQPCQVLWLTVMREQKFRSRNNGQAPDAYRPRDDSFHVILNKSSPEEQLGIKLVRKVDEPGVFIFNVLDGGVAYRHGQLEENDRVLAINGHDLRYGSPESAAHLIQASERRVHLVVSRQVRQRSPDIFQEAGWNSNGSWSPGPGERSNTPKPLHPTITCHEKVVNIQKDPGESLGMTVAGGASHREWDLPIYVISVEPGGVISRDGRIKTGDILLNVDGVELTEVSRSEAVALLKRTSSSIVLKALEVKEYEPQEDCSSPAALDSNHNMAPPSDWSPSWVMWLELPRCLYNCKDIVLRRNTAGSLGFCIVGGYEEYNGNKPFFIKSIVEGTPAYNDGRIRCGDILLAVNGRSTSGMIHACLARLLKELKGRITLTIVSWPGTFL

SEQ ID NO: 7939 - protein, 6 aa, Homo Sapiens
MNQPES

SEQ ID NO: 7940 - protein, 16 aa, Homo Sapiens
MNQPESANDPEPLCAV

SEQ ID NO: 7941 - protein, 90 aa, Homo Sapiens
MNQPESANDPEPLCAVCGQAHSLEENHFYSYPEEVDDDLICHICLQALLDPLDTPCGHTYCTLCLTNFLVEKDFCPMDRKPLVLQHCKKS

SEQ ID NO: 7942 - protein, 99 aa, Homo Sapiens
MNQPESANDPEPLCAVCGQAHSLEENHFYSYPEEVDDDLICHICLQALLDPLDTPCGHTYCTLCLTNFLVEKDFCPMDRKPLVLQHCKKSSILVNKLLN

SEQ ID NO: 7943 - protein, 126 aa, Homo Sapiens
MNQPESANDPEPLCAVCGQAHSLEENHFYSYPEEVDDDLICHICLQALLDPLDTPCGHTYCTLCLTNFLVEKDFCPMDRKPLVLQHCKKSSILVNKLLNKLLVTCPFREHCTQVLQRCDLEHHFQT

SEQ ID NO: 7944 - protein, 728 aa, Homo Sapiens
MNQPESANDPEPLCAVCGQAHSLEENHFYSYPEEVDDDLICHICLQALLDPLDTPCGHTYCTLCLTNFLVEKDFCPMDRKPLVLQHCKKSSILVNKLLNKLLVTCPFREHCTQVLQRCDLEHHFQTSCKGASHYGLTKDRKRRSQDGCPDGCASLTATAPSPEVSAAATISLMTDEPGLDNPAYVSSAEDGQPAISPVDSGRSNRTRARPFERSTIRSRSFKKINRALSVLRRTKSGSAVANHADQGRENSENTTAPEVFPRLYHLIPDGEITSIKINRVDPSESLSIRLVGGSETPLVHIIIQHIYRDGVIARDGRLLPGDIILKVNGMDISNVPHNYAVRLLRQPCQVLWLTVMREQKFRSRNNGQAPDAYRPRDDSFHVILNKSSPEEQLGIKLVRKVDEPGVFIFNVLDGGVAYRHGQLEENDRVLAINGHDLRYGSPESAAHLIQASERRVHLVVSRQVRQRSPDIFQEAGWNSNGSWSPGPGERSNTPKPLHPTITCHEKVVNIQKDPGESLGMTVAGGASHREWDLPIYVISVEPGGVISRDGRIKTGDILLNVDGVELTEVSRSEAVALLKRTSSSIVLKALEVKEYEPQEDCSSPAALDSNHNMAPPSDWSPSWVMWLELPRCLYNCKDIVLRRNTAGSLGFCIVGGYEEYNGNKPFFIKSIVEGTPAYNDGRIRCGDILLAVNGRSTSGMIHACLARLLKELKGRITLTIVSWPGTFL

SEQ ID NO: 7945 - protein, 417 aa, Homo Sapiens
MRFAWTVLLLGPLQLCALVHCAPPAAGQQQPPREPPAAPGAWRQQIQWENNGQVFSLLSLGSQYQPQRRRDPGAAVPGAANASAQQPRTPILLIRDNRTAAARTRTAGSSGVTAGRPRPTARHWFQAGYSTSRAREAGASRAENQTAPGEVPALSNLRPPSRVDGMVGDDPYNPYKYSDDNPYYNYYDTYERPRPGGRYRPGYGTGYFQYGLPDLVADPYYIQASTYVQKMSMYNLRCAAEENCLASTAYRADVRDYDHRVLLRFPQRVKNQGTSDFLPSRPRYSWEWHSCHQHYHSMDEFSHYDLLDANTQRRVAEGHKASFCLEDTSCDYGYHRRFACTAHTQGLSPGCYDTYGADIDCQWIDITDVKPGNYILKVSVNPSYLVPESDYTNNVVRCDIRYTGHHAYASGCTISPY

SEQ ID NO: 7946 - protein, 417 aa, Homo Sapiens; identical to SEQ ID NO: 7945

SEQ ID NO: 7947 - protein, 61 aa, Homo Sapiens
YNPYKYSDDNPYYNYYDTYERPRPGGRYRPGYGTGYFQYVQHTGQMSEIMITGCCSDFPKE

SEQ ID NO: 7948 - protein, 574 aa, Homo Sapiens
MALARGSRQLGALVWGACLCVLVHGQQAQPGQGSDPARWRQLIQWENNGQVYSLLNSGSEYVPAGPQRSESSSRVLLAGAPQAQQRRSHGSPRRRQAPSLPLPGRVGSDTVRGQARHPFGFGQVPDNWREVAVGDSTGMARARTSVSQQRHGGSASSVSASAFASTYRQQPSYPQQFPYPQAPFVSQYENYDPASRTYDQGFVYYRPAGGGVGAGAAAVASAGVIYPYQPRARYEEYGGGEELPEYPPQGFYPAPERPYVPPPPPPPDGLDRRYSHSLYSEGTPGFEQAYPDPGPEAAQAHGGDPRLGWYPPYANPPPEAYGPPRALEPPYLPVRSSDTPPPGGERNGAQQGRLSVGSVYRPNQNGRGLPDLVPDPNYVQASTYVQRAHLYSLRCAAEEKCLASTAYAPEATDYDVRVLLRFPQRVKNQGTADFLPNRPRHTWEWHSCHQHYHSMDEFSHYDLLDAATGKKVAEGHKASFCLEDSTCDFGNLKRYACTSHTQGLSPGCYDTYNADIDCQWIDITDVQPGNYILKVHVNPKYIVLESDFTNNVVRCNIHYTGRYVSATNCKIVQS

SEQ ID NO: 7949 - protein, 431 aa, Homo Sapiens
MALARGSRQLGALVWGACLCVLVHGQQAQPGQGSDPARWRQLIQWENNGQVYSLLNSGSEYVPAGPQRSESSSRVLLAGAPQAQQRRSHGSPRRRQAPSLPLPGRVGSDTVRGQARHPFGFGQVPDNWREVAVGDSTGMARARTSVSQQRHGGSASSVSASAFASTYRQQPSYPQQFPYPQAPFVSQYENYDPASRTYDQGFVYYRPAGGGVGAGAAAVASAGVIYPYQPRARYEEYGGGEELPEYPPQGFYPAPERPYVPPPPPPPDGLDRRYSHSLYSEGTPGFEQAYPDPGPEAAQAHGGDPRLGWYPPYANPPPEAYGPPRALEPPYLPVRSSDTPPPGGERNGAQQGRLSVGSVYRPNQNGRVTPAQTPACPGRKVEGQEQDGQAPGSGTSWGTRDHKDGGSLQTSPGRLTPGLAGERARASLRSP

SEQ ID NO: 7950 - protein, 258 aa, Homo Sapiens
MEASKVLDKSKAAAIGDQSRPLCSRKGLSGGGSGGGPPWRARSQPGHCGSLKPKSSCCFCTPPVPPSCAGPLRGIISPKTGMERPLCSHLCSCLAMLALLSPLSLAQYDSWPHYPEYFQQPAPEYHQPQAPANVAKIQLRLAGQKRKHSEGRVEVYYDGQWGTVCDDDFSIHAAHVVCRELGYVEAKSWTASSSYGKGEGPIWLDNLHCTGNEATLAACTSNGWGVTDCKHTEDVGVVCSDKRIPGFKFDNSLINQIE

SEQ ID NO: 7951 - protein, 218 aa, Homo Sapiens
MEASKVLDKSKAAESSCCFCTPPVPPSCAGPLRGIISPKTGMERPLCSHLCSCLAMLALLSPLSLAQYDSWPHYPEYFQQPAPEYHQPQAPANVAKIQLRLAGQKRKHSEGRVEVYYDGQWGTVCDDDFSIHAAHVVCRELGYVEAKSWTASSSYGKGEGPIWLDNLHCTGNEATLAACTSNGWGVTDCKHTEDVGVVCSDKRIPGFKFDNSLINQIE

SEQ ID NO: 7952 - protein, 101 aa, Homo Sapiens
MERPLCSHLCSCLAMLALLSPLSLAQYDSWPHYPEYFQQPAPEYHQPQAPANVAKIQLHLVLARRCQQQQSGHEWSEVLGNGAVPGALPPRRGGRGLPPGR

SEQ ID NO: 7953 - protein, 96 aa, Homo Sapiens
MERPLCSHLCSCLAMLALLSPLSLAQYDSWPHYPEYFQQPAPEYHQPQAPANVAKIQLRLAGQKRKHSEGRVEVYYDGQWGTVCDDDFSIHAAHVV

SEQ ID NO: 7954 - protein, 139 aa, Homo Sapiens
MERPLCSHLCSCLAMLALLSPLSLAQYDSWPHYPEYFQQPAPEYHQPQAPANVAKIQLRLAGQKRKHSEGRVEVYYDGQWGTVCDDDFSIHAAHVVCRELGYVEAKSWTASSSYGKGEGPIWLDNLHCTGNEATLAACT

SEQ ID NO: 7955 - protein, 151 aa, Homo Sapiens
MERPLCSHLCSCLAMLALLSPLSLAQYDSWPHYPEYFQQPAPEYHQPQAPANVAKIQLRLAGQKRKHSEGRVEVYYDGQWGTVCDDDFSIHAAHVVCRELGYVEAKSWTASSSYGKGEGPIWLDNLHCTGNEATLAACTSNGWGVTDCKHT

SEQ ID NO: 7956 - protein, 774 aa, Homo Sapiens
MERPLCSHLCSCLAMLALLSPLSLAQYDSWPHYPEYFQQPAPEYHQPQAPANVAKIQLRLAGQKRKHSEGRVEVYYDGQWGTVCDDDFSIHAAHVVCRELGYVEAKSWTASSSYGKGEGPIWLDNLHCTGNEATLAACTSNGWGVTDCKHTEDVGVVCSDKRIPGFKFDNSLINQIENLNIQVEDIRIRAILSTYRKRTPVMEGYVEVKEGKTWKQICDKHWTAKNSRVVCGMFGFPGERTYNTKVYKMFASRRKQRYWPFSMDCTGTEAHISSCKLGPQVSLDPMKNVTCENGLPAVVSCVPGQVFSPDGPSRFRKAYKPEQPLVRLRGGAYIGEGRVEVLKNGEWGTVCDDKWDLVSASVVCRELGFGSAKEAVTGSRLGQGIGPIHLNEIQCTGNEKSIIDCKFNAESQGCNHEEDAGVRCNTPAMGLQKKLRLNGGRNPYEGRVEVLVERNGSLVWGMVCGQNWGIVEAMVVCRQLGLGFASNAFQETWYWHGDVNSNKVVMSGVKCSGTELSLAHCRHDGEDVACPQGGVQYGAGVACSETAPDLVLNAEMVQQTTYLEDRPMFMLQCAMEENCLSASAAQTDPTTGYRRLLRFSSQIHNNGQSDFRPKNGRHAWIWHDCHRHYHSMEVFTHYDLLNLNGTKVAEGHKASFCLEDTECEGDIQKNYECANFGDQGITMGCWDMYRHDIDCQWVDITDVPPGDYLFQVVINPNFEVAESDYSNNIMKCRSRYDGHRIWMYNCHIGGSFSEETEKKFEHFSGLLNNQLSPQ

SEQ ID NO: 7957 - protein, 67 aa, Homo Sapiens
RIRAILSTYRKRTPVMEGYVEVKEGKTWKQICDKHWTAKNSRVVCGMFGFPGERTYNTKVYNNPWCD

SEQ ID NO: 7958 - protein, 207 aa, Homo Sapiens
  misc_feature (1)..(1): Xaa can be any naturally occurring amino acid
XENGLPAVVSCVPGQVFSPDGPSRFRKAYKPEQDRVSLQQPLVRLRGGAYIGEGRVEVLKNGEWGTVCDDKWDLVSASVVCRELGFGSAKEAVTGSRLGQGIGPIHLNEIQCTGNEKSIIDCKFNAESQGCNHEEDAGVRCNTPAMGLQKKLRLNGGRNPYEGRVEVLVERNGSLVWGMVCGQNWGIVEAMVVCRQLGLGFASNAFQ

SEQ ID NO: 7959 - protein, 586 aa, Homo Sapiens
MRPVSVWQWSPWGLLLCLLCSSCLGSPSPSTGPEKKAGSQGLRFRLAGFPRKPYEGRVEIQRAGEWGTICDDDFTLQAAHILCRELGFTEATGWTHSAKYGPGTGRIWLDNLSCSGTEQSVTECASRGWGNSDCTHDEDAGVICKDQRLPGFSDSNVIEARVRLKGGAHPGEGRVEVLKASTWGTVCDRKWDLHAASVVCRELGFGSAREALSGARMGQGMGAIHLSEVRCSGQELSLWKCPHKNITAEDCSHSQDAGVRCNLPYTGAETRIRLSGGRSQHEGRVEVQIGGPGPLRWGLICGDDWGTLEAMVACRQLGLGYANHGLQETWYWDSGNITEVVMSGVRCTGTELSLDQCAHHGTHITCKRTGTRFTAGVICSETASDLLLHSALVQETAYIEDRPLHMLYCAAEENCLASSARSANWPYGHRRLLRFSSQIHNLGRADFRPKAGRHSWVWHECHGHYHSMDIFTHYDILTPNGTKVAEGHKASFCLEDTECQEDVSKRYECANFGEQGITVGCWDLYRHDIDCQWIDITDVKPGNYILQVVINPNFEVAESDFTNNAMKCNCKYDGHRIWVHNCHIGI

SEQ ID NO: 7960 - protein, 608 aa, Homo Sapiens
MRPVSVWQWSPWGLLLCLLCSSCLGSPSPSTGPEKKAGSQGLRFRLAGFPRKPYEGRVEIQRAGEWGTICDDDFTLQAAHILCRELGFTEATGWTHSAKYGPGTGRIWLDNLSCSGTEQSVTECASRGWGNSDCTHDEDAGVICKDQRLPGFSDSNVIEARVRLKGGAHPGEGRVEVLKASTWGTVCDRKWDLHAASVVCRELGFGSAREALSGARMGQGMGAIHLSEVRCSGQELSLWKCPHKNITAEDCSHSQDAGVRCNLPYTGAETRIRLSGGRSQHEGRVEVQIGGPGPLRWGLICGDDWGTLEAMVACRQLGLGYANHGLQETWYWDSGNITEVVMSGVRCTGTELSLDQCAHHGTHITCKRTGTRFTAGVICSETASDLLLHSALVQETAYIEDRPLHMLYCAAEENCLASSARSANWPYGHRRLLRFSSQIHNLGRADFRPKAGRHSWVWHECHGHYHSMDIFTHYDILTPNGTKVAEGHKASFCLEDTECQEDVSKRYECANFGEQGITVGCWDLYRHDIDCQWIDITDVKPGNYILQVVINPNFEVAESDFTNNAMKCNCKYDGHRIWVHNCHIGDAFSEEANRRFERYPGQTSNQII

SEQ ID NO: 7961 - protein, 753 aa, Homo Sapiens
MRPVSVWQWSPWGLLLCLLCSSCLGSPSPSTGPEKKAGSQGLRFRLAGFPRKPYEGRVEIQRAGEWGTICDDDFTLQAAHILCRELGFTEATGWTHSAKYGPGTGRIWLDNLSCSGTEQSVTECASRGWGNSDCTHDEDAGVICKDQRLPGFSDSNVIEVEHHLQVEEVRIRPAVGWGRRPLPVTEGLVEVRLPDGWSQVCDKGWSAHNSHVVCGMLGFPSEKRVNAAFYRLLAQRQQHSFGLHGVACVGTEAHLSLCSLEFYRANDTARCPGGGPAVVSCVPGPVYAASSGQKKQQQSKPQGEARVRLKGGAHPGEGRVEVLKASTWGTVCDRKWDLHAASVVCRELGFGSAREALSGARMGQGMGAIHLSEVRCSGQELSLWKCPHKNITAEDCSHSQDAGVRCNLPYTGAETRIRLSGGRSQHEGRVEVQIGGPGPLRWGLICGDDWGTLEAMVACRQLGLGYANHGLQETWYWDSGNITEVVMSGVRCTGTELSLDQCAHHGTHITCKRTGTRFTAGVICSETASDLLLHSALVQETAYIEDRPLHMLYCAAEENCLASSARSANWPYGHRRLLRFSSQIHNLGRADFRPKAGRHSWVWHECHGHYHSMDIFTHYDILTPNGTKVAEGHKASFCLEDTECQEDVSKRYECANFGEQGITVGCWDLYRHDIDCQWIDITDVKPGNYILQVVINPNFEVAESDFTNNAMKCNCKYDGHRIWVHNCHIGDAFSEEANRRFERYPGQTSNQII

SEQ ID NO: 7962 - protein, 303 aa, Homo Sapiens
MRPVSVWQWSPWGLLLCLLCSSCLGSPSPSTGPEKKAGSQGLRFRLAGFPRKPYEGRVEIQRAGEWGTICDDDFTLQAAHILCRELGFTEATGWTHSAKYGPGTGRIWLDNLSCSGTEQSVTECASRGWGNSDCTHDEDAGVICKDQRLPGFSDSNVIEVEHHLQVEEVRIRPAVGWGRRPLPVTEGLVEVRLPDGWSQVCDKGWSAHNSHVVCGMLGFPSEKRVNAAFYRLLAQRQQHSFGLHGVACVGTEAHLSLCSLEFYRANDTARCPGGGPAVVSCVPGPVYAASSGQKKQQQSKPQG

SEQ ID NO: 7963 - protein, 471 aa, Homo Sapiens
MRPVSVWQWSPWGLLLCLLCSSCLGSPSPSTGPEKKAGSQGLRFRLAGFPRKPYEGRVEIQRAGEWGTICDDDFTLQAAHILCRELGFTEATGWTHSAKYGPGTGRIWLDNLSCSGTEQSVTECASRGWGNSDCTHDEDAGVICKDQRLPGFSDSNVIEVEHHLQVEEVRIRPAVGWGRRPLPVTEGLVEVRLPDGWSQVCDKGWSAHNSHVVCGMLGFPSEKRVNAAFYRLLAQRQQHSFGLHGVACVGTEAHLSLCSLEFYRANDTARCPGGGPAVVSCVPGPVYAASSGQKKQQQSKPQGEARVRLKGGAHPGEGRVEVLKASTWGTVCDRKWDLHAASVVCRELGFGSAREALSGARMGQDVSKRYECANFGEQGITVGCWDLYRHDIDCQWIDITDVKPGNYILQVVINPNFEVAESDFTNNAMKCNCKYDGHRIWVHNCHIGDAFSEEANRRFERYPGQTSNQII

SEQ ID NO: 7964 - protein, 697 aa, Homo Sapiens
MRPVSVWQWSPWGLLLCLLCSSCLGSPSPSTGPEKKAGSQGLRFRLAGFPRKPYEGRVEIQRAGEWGTICDDDFTLQAAHILCRELGFTEATGWTHSAKYGPGTGRIWLDNLSCSGTEQSVTECASRGWGNSDCTHDEDAGVICKDQRLPGFSDSNVIEVEHHLQVEEVRIRPAVGWGRRPLPVTEGLVEVRLPDGWSQVCDKGWSAHNSHVVCGMLGFPSEKRVNAAFYRLLAQRQQHSFGLHGVACVGTEAHLSLCSLEFYRANDTARCPGGGPAVVSCVPGPVYAASSGQKKQQQSKPQGEARVRLKGGAHPGEGRVEVLKASTWGTVCDRKWDLHAASVVCRELGFGSAREALSGARMGQGMGAIHLSEVRCSGQELSLWKCPHKNITAEDCSHSQDAGVRCNLPYTGAETRETWYWDSGNITEVVMSGVRCTGTELSLDQCAHHGTHITCKRTGTRFTAGVICSETASDLLLHSALVQETAYIEDRPLHMLYCAAEENCLASSARSANWPYGHRRLLRFSSQIHNLGRADFRPKAGRHSWVWHECHGHYHSMDIFTHYDILTPNGTKVAEGHKASFCLEDTECQEDVSKRYECANFGEQGITVGCWDLYRHDIDCQWIDITDVKPGNYILQVVINPNFEVAESDFTNNAMKCNCKYDGHRIWVHNCHIGDAFSEEANRRFERYPGQTSNQII

SEQ ID NO: 7965 - protein, 180 aa, Homo Sapiens
  misc_feature (1)..(1): Xaa can be any naturally occurring amino acid
XRQRLERPQQPRGLRDAGLPQRKEGQRGLLQARVRLKGGAHPGEGRVEVLKASTWGTVCDRKWDLHAASVVCRELGFGSAREALSGARMGQGMGAIHLSEVRCSGQELSLWKCPHKNITAEDCSHSQDAGVRCNLPYTGAETRIRLSGGRSQHEGRVEVQIGGPGPLRWGLICGDDWGTL

SEQ ID NO: 7966 - protein, 756 aa, Homo Sapiens
MAWSPPATLFLFLLLLGQPPPSRPQSLGTTKLRLVGPESKPEEGRLEVLHQGQWGTVCDDNFAIQEATVACRQLGFEAALTWAHSAKYGQGEGPIWLDNVRCVGTESSLDQCGSNGWGVSDCSHSEDVGVICHPRRHRGYLSETVSNALGPQGRRLEEVRLKPILASAKQHSPVTEGAVEVKYEGHWRQVCDQGWTMNNSRVVCGMLGFPSEVPVDSHYYRKVWDLKMRDPKSRLKSLTNKNSFWIHQVTCLGTEPHMANCQVQVAPARGKLRPACPGGMHAVVSCVAGPHFRPPKTKPQRKGSWAEEPRVRLRSGAQVGEGRVEVLMNRQWGTVCDHRWNLISASVVCRQLGFGSAREALFGARLGQGLGPIHLSEVRCRGYERTLSDCPALEGSQNGCQHENDAAVRCNVPNMGFQNQVRLAGGRIPEEGLLEVQVEVNGVPRWGSVCSENWGLTEAMVACRQLGLGFAIHAYKETWFWSGTPRAQEVVMSGVRCSGTELALQQCQRHGPVHCSHGGGRFLAGVSCMDSAPDLVMNAQLVQETAYLEDRPLSQLYCAHEENCLSKSADHMDWPYGYRRLLRFSTQIYNLGRTDFRPKTGRDSWVWHQCHRHYHSIEVFTHYDLLTLNGSKVAEGHKASFCLEDTNCPTGLQRRYACANFGEQGVTVGCWDTYRHDIDCQWVDITDVGPGNYIFQVIVNPHYEVAESDFSNNMLQCRCKYDGHRVWLHNCHTGNSYPANAELSLEQEQRLRNNLI

SEQ ID NO: 7967 - protein, 2040 aa, Homo Sapiens
MEHKEVVLLLLLFLKSAAPEQSHVVQDCYHGDGQSYRGTYSTTVTGRTCQAWSSMTPHQHNRTTENYPNAGLIMNYCRNPDAVAAPYCYTRDPGVRWEYCNLTQCSDAEGTAVAPPTVTPVPSLEAPSEQAPTEQRPGVQECYHGNGQSYRGTYSTTVTGRTCQAWSSMTPHSHSRTPEYYPNAGLIMNYCRNPDAVAAPYCYTRDPGVRWEYCNLTQCSDAEGTAVAPPTVTPVPSLEAPSEQAPTEQRPGVQECYHGNGQSYRGTYSTTVTGRTCQAWSSMTPHSHSRTPEYYPNAGLIMNYCRNPDAVAAPYCYTRDPGVRWEYCNLTQCSDAEGTAVAPPTVTPVPSLEAPSEQAPTEQRPGVQECYHGNGQSYRGTYSTTVTGRTCQAWSSMTPHSHSRTPEYYPNAGLIMNYCRNPDAVAAPYCYTRDPGVRWEYCNLTQCSDAEGTAVAPPTVTPVPSLEAPSEQAPTEQRPGVQECYHGNGQSYRGTYSTTVTGRTCQAWSSMTPHSHSRTPEYYPNAGLIMNYCRNPDAVAAPYCYTRDPGVRWEYCNLTQCSDAEGTAVAPPTVTPVPSLEAPSEQAPTEQRPGVQECYHGNGQSYRGTYSTTVTGRTCQAWSSMTPHSHSRTPEYYPNAGLIMNYCRNPDAVAAPYCYTRDPGVRWEYCNLTQCSDAEGTAVAPPTVTPVPSLEAPSEQAPTEQRPGVQECYHGNGQSYRGTYSTTVTGRTCQAWSSMTPHSHSRTPEYYPNAGLIMNYCRNPDAVAAPYCYTRDPGVRWEYCNLTQCSDAEGTAVAPPTVTPVPSLEAPSEQAPTEQRPGVQECYHGNGQSYRGTYSTTVTGRTCQAWSSMTPHSHSRTPEYYPNAGLIMNYCRNPDPVAAPYCYTRDPSVRWEYCNLTQCSDAEGTAVAPPTITPIPSLEAPSEQAPTEQRPGVQECYHGNGQSYQGTYFITVTGRTCQAWSSMTPHSHSRTPAYYPNAGLIKNYCRNPDPVAAPWCYTTDPSVRWEYCNLTRCSDAEWTAFVPPNVILAPSLEAFFEQALTEETPGVQDCYYHYGQSYRGTYSTTVTGRTCQAWSSMTPHQHSRTPENYPNAGLTRNYCRNPDAEIRPWCYTMDPSVRWEYCNLTQCLVTESSVLATLTVVPDPSTEASSEEAPTEQSPGVQDCYHGDGQSYRGSFSTTVTGRTCQSWSSMTPHWHQRTTEYYPNGGLTRNYCRNPDAEISPWCYTMDPNVRWEYCNLTQCPVTESSVLATSTAVSEQAPTEQSPTVQDCYHGDGQSYRGSFSTTVTGRTCQSWSSMTPHWHQRTTEYYPNGGLTRNYCRNPDAEIRPWCYTMDPSVRWEYCNLTQCPVMESTLLTTPTVVPVPSTELPSEEAPTENSTGVQDCYRGDGQSYRGTLSTTITGRTCQSWSSMTPHWHRRIPLYYPNAGLTRNYCRNPDAEIRPWCYTMDPSVRWEYCNLTRCPVTESSVLTTPTVAPVPSTEAPSEQAPPEKSPVVQDCYHGDGRSYRGISSTTVTGRTCQSWSSMIPHWHQRTPENYPNAGLTENYCRNPDSGKQPWCYTTDPCVRWEYCNLTQCSETESGVLETPTVVPVPSMEAHSEAAPTEQTPVVRQCYHGNGQSYRGTFSTTVTGRTCQSWSSMTPHRHQRTPENYPNDGLTMNYCRNPDADTGPWCFTMDPSIRWEYCNLTRCSDTEGTVVAPPTVIQVPSLGPPSEQDCMFGNGKGYRGKKATTVTGTPCQEWAAQEPHRHSTFIPGTNKWAGLEKNYCRNPDGDINGPWCYTMNPRKLFDYCDIPLCASSSFDCGKPQVEPKKCPGSIVGGCVAHPHSWPWQVSLRTRFGKHFCGGTLISPEWVLTAAHCLKKSSRPSSYKVILGAHQEVNLESHVQEIEVSRLFLEPTQADIALLKLSRPAVITDKVMPACLPSPDYMVTARTECYITGWGETQGTFGTGLLKEAQLLVIENEVCNHYKYICAEHLARGTDSCQGDSGGPLVCFEKDKYILQGVTSWGLGCARPNKPGVYARVSRFVTWIEGMMRNN

SEQ ID NO: 7968 - protein, 571 aa, Homo Sapiens
SGLIMNYCRNPDAVAAPYCYTRDPGVRWEYCNLTQCSDAEGTAVAPPTVTPVPSLEAPSEQAPTEQRPGVQECYHGNGQSYRGTYSTTVTGRTCQAWSSMTPHSHSRTPEYYPNAGLIMNYCRNPDAVAAPYCYTRDPGVRWEYCNLTQCSDAEGTAVAPPTVTPVPSLEAPSEQAPTEQRPGVQECYHGNGQSYRGTYSTTVTGRTCQAWSSMTPHSHSRTPEYYPNAGLIMNYCRNPDAVAAPYCYTRDPGVRWEYCNLTQCSDAEGTAVAPPTVTPVPSLEAPSEQAPTEQRPGVQECYHGNGQSYRGTYSTTVTGRTCQAWSSMTPHSHSRTPEYYPNAGLIMNYCRNPDAVAAPYCYTRDPGVRWEYCNLTQCSDAEGTAVAPPTVTPVPSLEAPSEQAPTEQRPGVQECYHGNGQSYRGTYSTTVTGRTCQAWSSMTPHSHSRTPEYYPNAGLIMNYCRNPDAVAAPYCYTRDPGVRWEYCNLTQCSDAEGTAVAPPTVTPVPSLEAPSEQAPTEQRPGVQECYHGNGQSYRGTYSTTVTGRTCQAWSSMTPHSHSRTPEYYPNA

SEQ ID NO: 7969 - protein, 613 aa, Homo Sapiens
SGLIMNYCRNPDAVAAPYCYTRDPGVRWEYCNLTQCSDAEGTAVAPPTVTPVPSLEAPSEQAPTEQRPGVQECYHGNGQSYRGTYSTTVTGRTCQAWSSMTPHSHSRTPEYYPNAGLIMNYCRNPDPVAAPYCYTRDPSVRWEYCNLTQCSDAEGTAVAPPTITPIPSLEAPSEQAPTEQRPGVQECYHGNGQSYQGTYFITVTGRTCQAWSSMTPHSHSRTPAYYPNAGLIKNYCRNPDPVAAPWCYTTDPSVRWEYCNLTRCSDAEWTAFVPPNVILAPSLEAFFEQALTEETPGVQDCYYHYGQSYRGTYSTTVTGRTCQAWSSMTPHQHSRTPENYPNAGLTRNYCRNPDAEIRPWCYTMDPSVRWEYCNLTQCLVTESSVLATLTVVPDPSTEASSEEAPTEQSPGVQDCYHGDGQSYRGSFSTTVTGRTCQSWSSMTPHWHQRTTEYYPNGGLTRNYCRNPDAEISPWCYTMDPNVRWEYCNLTQCPVTESSVLATSTAVSEQAPTEQSPTVQDCYHGDGQSYRGSFSTTVTGRTCQSWSSMTPHWHQRTTEYYPNGGLTRNYCRNPDAEIRPWCYTMDPSVRWEYCNLTQCPVMESTLLTTPTVVP

SEQ ID NO: 7970 - protein, 39 aa, Homo Sapiens
MESKALLVLTLAVWLQSLTASRGGVAAADLILKLQIFKF

SEQ ID NO: 7971 - protein, 106 aa, Homo Sapiens
MESKALLVLTLAVWLQSLTASRGGVAAADQRRDFIDIESKFALRTPEDTAEDTCHLIPGVAESVATCHFNHSSKTFMVIHGWTVTGMYESWVPKLVAALYKREPDS

SEQ ID NO: 7972 - protein, 130 aa, Homo Sapiens
MESKALLVLTLAVWLQSLTASRGGVAAADQRRDFIDIESKFALRTPEDTAEDTCHLIPGVAESVATCHFNHSSKTFMVIHGWTVTGMYESWVPKLVAALYKREPDSNVIVVDWLSRAQEHYPVSAGYTKL

SEQ ID NO: 7973 - protein, 475 aa, Homo Sapiens
MESKALLVLTLAVWLQSLTASRGGVAAADQRRDFIDIESKFALRTPEDTAEDTCHLIPGVAESVATCHFNHSSKTFMVIHGWTVTGMYESWVPKLVAALYKREPDSNVIVVDWLSRAQEHYPVSAGYTKLVGQDVARFINWMEEEFNYPLDNVHLLGYSLGAHAAGIAGSLTNKKVNRITGLDPAGPNFEYAEAPSRLSPDDADFVDVLHTFTRGSPGRSIGIQKPVGHVDIYPNGGTFQPGCNIGEAIRVIAERGLGDVDQLVKCSHERSIHLFIDSLLNEENPSKAYRCSSKEAFEKGLCLSCRKNRCNNLGYEINKVRAKRSSKMYLKTRSQMPYKVFHYQVKIHFSGTESETHTNQAFEISLYGTVAESENIPFTLPEVSTNKTYSFLIYTEVDIGELLMLKLKWKSDSYFSWSDWWSSPGFAIQKIRVKAGETQKKVIFCSREKVSHLQKGKAPAVFVKCHDKSLNKKSG

SEQ ID NO: 7974 - protein, 115 aa, Homo Sapiens
MVIHGWTVTGMYESWVPKLVAALYKREPDSNVIVVDWLSRAQEHYPVSAGYTKLVGQDVARFINWMEEEFNYPLDNVHLLGYSLGAHAAGIAGSLTNKKVNRITGLDPAGPNFEY

SEQ ID NO: 7975 - protein, 117 aa, Homo Sapiens
FPPNDPKAGTQGKCMPFFRAGFVCPTPPYKSLAREQINALTSFLDASFVYSSEPSLASRLRNLSSPLGLMAVNQEVSDHGLPYLPYDSKKPSPCEFINTTARVPCFLAGKETEAQKC

SEQ ID NO: 7976 - protein, 95 aa, Homo Sapiens
GCGAPAPVVRCDPCSPYRTITGDCNNRRKPALGAANRALARWLPAEYEDGLSLPFGWTPGKTRNGFPLPLAREVSNKIVGYLNEEGVLDQNRSTL

SEQ ID NO: 7977 - protein, 712 aa, Homo Sapiens
MRVLLHLPALLASLILLQAAASTTRAQTTRTSAISDTVSQAKVQVNKAFLDSRTRLKTAMSSETPTSRQLSEYLKHAKGRTRTAIRNGQVWEESLKRLRQKASLTNVTDPSLDLTSLSLEVGCGAPAPVVRCDPCSPYRTITGDCNNRRKPALGAANRALARWLPAEYEDGLSLPFGWTPGKTRNGFPLPLAREVSNKIVGYLNEEGVLDQNRSLLFMQWGQIVDHDLDFAPDTELGSSEYSKAQCDEYCIQGDNCFPIMFPPNDPKAGTQGKCMPFFRAGFVCPTPPYKSLAREQINALTSFLDASFVYSSEPSLASRLRNLSSPLGLMAVNQEVSDHGLPYLPYDSKKPSPCEFINTTARVPCFLAGDSRASEHILLATSHTLFLREHNRLARELKRLNPQWDGEKLYQEARKILGAFVQIITFRDYLPILLGDHMQKWIPPYQGYSESVDPRISNVFTFAFRFGHLEVPSSMFRLDENYQPWGPEPELPLHTLFFNTWRMVKDGGIDPLVRGLLAKKSKLMKQNKMMTGELRNKLFQPTHRIHGFDLAAINTQRCRDHGQPGYNSWRAFCDLSQPQTLEELNTVLKSKMLAKKLLGLYGTPDNIDIWIGAIAEPLVERGRVGPLLACLLGKQFQQIRDGDRFWWENPGVFTNEQKDSLQKMSFSRLVCDNTRITKVPRDPFWANSYPYDFVDCSAIDKLDLSPWASVKN

SEQ ID NO: 7978 - protein, 629 aa, Homo Sapiens
MRVLLHLPALLASLILLQAAASTTRDPSLDLTSLSLEVGCGAPAPVVRCDPCSPYRTITGDCNNRRKPALGAANRALARWLPAEYEDGLSLPFGWTPGKTRNGFPLPLAREVSNKIVGYLNEEGVLDQNRSLLFMQWGQIVDHDLDFAPDTELGSSEYSKAQCDEYCIQGDNCFPIMFPPNDPKAGTQGKCMPFFRAGFVCPTPPYKSLAREQINALTSFLDASFVYSSEPSLASRLRNLSSPLGLMAVNQEVSDHGLPYLPYDSKKPSPCEFINTTARVPCFLAGDSRASEHILLATSHTLFLREHNRLARELKRLNPQWDGEKLYQEARKILGAFVQIITFRDYLPILLGDHMQKWIPPYQGYSESVDPRISNVFTFAFRFGHLEVPSSMFRLDENYQPWGPEPELPLHTLFFNTWRMVKDGGIDPLVRGLLAKKSKLMKQNKMMTGELRNKLFQPTHRIHGFDLAAINTQRCRDHGQPGYNSWRAFCDLSQPQTLEELNTVLKSKMLAKKLLGLYGTPDNIDIWIGAIAEPLVERGRVGPLLACLLGKQFQQIRDGDRFWWENPGVFTNEQKDSLQKMSFSRLVCDNTRITKVPRDPFWANSYPYDFVDCSAIDKLDLSPWASVKN

SEQ ID NO: 7979 - protein, 629 aa, Homo Sapiens; identical to SEQ ID NO: 7978

SEQ ID NO: 7980 - protein, 123 aa, Homo Sapiens
MSSETPTSRQLSEYLKHAKGRTRTAIRNGQVWEESLKRLRQKASLTNVTDPSLDLTSLSLEVGCGAPAPVVRCDPCSPYRTITGDCNNRRKPALGAANRALARWLPAEYEDGLSLPFGWTPGK

SEQ ID NO: 7981 - protein, 653 aa, Homo Sapiens
MSSETPTSRQLSEYLKHAKGRTRTAIRNGQVWEESLKRLRQKASLTNVTDPSLDLTSLSLEVGCGAPAPVVRCDPCSPYRTITGDCNNRRKPALGAANRALARWLPAEYEDGLSLPFGWTPGKTRNGFPLPLAREVSNKIVGYLNEEGVLDQNRSLLFMQWGQIVDHDLDFAPDTELGSSEYSKAQCDEYCIQGDNCFPIMFPPNDPKAGTQGKCMPFFRAGFVCPTPPYKSLAREQINALTSFLDASFVYSSEPSLASRLRNLSSPLGLMAVNQEVSDHGLPYLPYDSKKPSPCEFINTTARVPCFLAGDSRASEHILLATSHTLFLREHNRLARELKRLNPQWDGEKLYQEARKILGAFVQIITFRDYLPILLGDHMQKWIPPYQGYSESVDPRISNVFTFAFRFGHLEVPSSMFRLDENYQPWGPEPELPLHTLFFNTWRMVKDGGIDPLVRGLLAKKSKLMKQNKMMTGELRNKLFQPTHRIHGFDLAAINTQRCRDHGQPGYNSWRAFCDLSQPQTLEELNTVLKSKMLAKKLLGLYGTPDNIDIWIGAIAEPLVERGRVGPLLACLLGKQFQQIRDGDRFWWENPGVFTNEQKDSLQKMSFSRLVCDNTRITKVPRDPFWANSYPYDFVDCSAIDKLDLSPWASVKN

SEQ ID NO: 7982 - protein, 69 aa, Homo Sapiens
MKNPMLEVVSLLLEKLLLISNFTLFSSGAAGEDKGRNSFYETSSFHRGDVLEVPRTHLTHYGIYLGDNR

SEQ ID NO: 7983 - protein, 230 aa, Homo Sapiens
MKNPMLEVVSLLLEKLLLISNFTLFSSGAAGEDKGRNSFYETSSFHRGDVLEVPRTHLTHYGIYLGDNRVAHMMPDILLALTDDMGRTQKVVSNKRLILGVIVKVASIRVDTVEDFAYGANILVNHLDESLQKKALLNEEVARRAEKLLGFTPYSLLWNNCEHFVTYCRYGTPISPQSDKFCETVKIIIRDQRSVLASAVLGLASIVCTGLVSYTTLPAIFIPFFLWMAG

SEQ ID NO: 7984 - protein, 230 aa, Homo Sapiens; identical to SEQ ID NO: 7983

SEQ ID NO: 7985 - protein, 214 aa, Homo Sapiens
AVLDFVKQKASQSPQKQHPLLDGVDGECPFPSRRSQHTDDSALCMSDDRPNALLSSPATETGHASPLPPSAAPTTDSTDSITGQNSRQREEELELIDQLRKHIEYRLKVSLPCDLGAALTDGVVLCHLANHVRPRSVPSIHVPSPAVPKLTMAKCRRNVENFLEACRKIGVPQEQLCLPLHILEEKGLSQVAVTVQALLELAPPKQQQHQLSAV

SEQ ID NO: 7986 - protein, 712 aa, Homo Sapiens
MAAAGLVAVAAAAEYSGTVASGGNLPGVHCGPSSGAGPGFGPGSWSRSLDRALEEAAVTGVLSLSGRKLREFPRGAANHDLTDTTRADLSRNRLSEIPIEACHFVSLENLNLYQNCIRYIPEAILNLQALTFLNISRNQLSTLPVHLCNLPLKVLIASNNKLVSLPEEIGHLRHLMELDVSCNEIQTIPSQIGNLEALRDLNVRRNHLVHLPEELAELPLIRLDFSCNKITTIPVCYRNLRHLQTITLDNNPLQSPPAQICIKGKVHIFKYLNIQACKIAPDLPDYDRRPLGFGSCHEELYSSRPYGALDSGFNSVDSGDKRWSGNEPTDEFSDLPLRVAEITKEQRLRRESQYQENRGSLVVTNGGVEHDLDQIDYIDSCTAEEEEAEVRQPKGPDPDSLSSQFMAYIEQRRISHEGSPVKPVAIREFQKTEDMRRYLHQNRVPAEPSSLLSLSASHNQLSHTDLELHQRREQLVERTRREAQLAALQYEEEKIRTKQIQRDAVLDFVKQKASQSPQKQHPLLDGVDGECPFPSRRSQHTDDSALCMSLSGLNQVGCAATLPHSSAFTPLKSDDRPNALLSSPATETVHHSPAYSFPAAIQRNQPQRPESFLFRAGVRAETNKGHASPLPPSAAPTTDSTDSITGQNSRQREEELELIDQLRKHIEYRLKVSLPCDLGAALTDGVVLCHLANHVRPRSVPSIHVPSPAVVS

SEQ ID NO: 7987 - protein, 725 aa, Homo Sapiens
MAAAGLVAVAAAAEYSGTVASGGNLPGVHCGPSSGAGPGFGPGSWSRSLDRALEEAAVTGVLSLSGRKLREFPRGAANHDLTDTTRADLSRNRLSEIPIEACHFVSLENLNLYQNCIRYIPEAILNLQALTFLNISRNQLSTLPVHLCNLPLKVLIASNNKLVSLPEEIGHLRHLMELDVSCNEIQTIPSQIGNLEALRDLNVRRNHLVHLPEELAELPLIRLDFSCNKITTIPVCYRNLRHLQTITLDNNPLQSPPAQICIKGKVHIFKYLNIQACKIAPDLPDYDRRPLGFGSCHEELYSSRPYGALDSGFNSVDSGDKRWSGNEPTDEFSDLPLRVAEITKEQRLRRESQYQENRGSLVVTNGGVEHDLDQIDYIDSCTAEEEEAEGSPVKPVAIREFQKTEDMRRYLHQNRVPAEPSSLLSLSASHNQLSHTDLELHQRREQLVERTRREAQLAALQYEEEKIRTKQIQRDAVLDFVKQKASQSPQKQHPLLDGVDGECPFPSRRSQHTDDSALCMSDDRPNALLSSPATETVHHSPAYSFPAAIQRNQPQRPESFLFRAGVRAETNKGHASPLPPSAAPTTDSTDSITGQNSRQREEELELIDQLRKHIEYRLKVSLPCDLGAALTDGVVLCHLANHVRPRSVPSIHVPSPAVPKLTMAKCRRNVENFLEACRKIGVPQEQLCLPLHILEEKGLSQVAVTVQALLELAPPKQQQHQLSAV

SEQ ID NO: 7988 - protein, 803 aa, Homo Sapiens
MAAAGLVAVAAAAEYSGTVASGGNLPGVHCGPSSGAGPGFGPGSWSRSLDRALEEAAVTGVLSLSGRKLREFPRGAANHDLTDTTRADLSRNRLSEIPIEACHFVSLENLNLYQNCIRYIPEAILNLQALTFLNISRNQLSTLPVHLCNLPLKVLIASNNKLVSLPEEIGHLRHLMELDVSCNEIQTIPSQIGNLEALRDLNVRRNHLVHLPEELAELPLIRLDFSCNKITTIPVCYRNLRHLQTITLDNNPLQSPPAQICIKGKVHIFKYLNIQACKIAPDLPDYDRRPLGFGSCHEELYSSRPYGALDSGFNSVDSGDKRWSGNEPTDEFSDLPLRVAEITKEQRLRRESQYQENRGSLVVTNGGVEHDLDQIDYIDSCTAEEEEAEVRQPKGPDPDSLSSQFMAYIEQRRISHEGSPVKPVAIREFQKTEDMRRYLHQNRVPAEPSSLLSLSASHNQLSHTDLELHQRREQLVERTRREAQLAALQYEEEKIRTKQIQRDAVLDFVKQKASQSPQKQHPLLDGVDGECPFPSRRSQHTDDSALCMSLSGLNQVGCAATLPHSSAFTPLKSDDRPNALLSSPATETVHHSPAYSFPAAIQRNQPQRPESFLFRAGVRAETNKGHASPLPPSAAPTTDSTDSITGQNSRQREEELELIDQLRKHIEYRLKVSLPCDLGAALTDGVVLCHLANHVRPRSVPSIHVPSPAVPKLTMAKCRRNVENFLEACRKIGVPQDNLCSPSDILQLNLSVKRTVETLLSLGAHSEESSFVCLSLQLLGFVAFYCTVMLTLCVLYYWLFPAR

SEQ ID NO: 7989 - protein, 777 aa, Homo Sapiens
MAAAGLVAVAAAAEYSGTVASGGNLPGVHCGPSSGAGPGFGPGSWSRSLDRALEEAAVTGVLSLSGRKLREFPRGAANHDLTDTTRADLSRNRLSEIPIEACHFVSLENLNLYQNCIRYIPEAILNLQALTFLNISRNQLSTLPVHLCNLPLKVLIASNNKLVSLPEEIGHLRHLMELDVSCNEIQTIPSQIGNLEALRDLNVRRNHLVHLPEELAELPLIRLDFSCNKITTIPVCYRNLRHLQTITLDNNPLQSPPAQICIKGKVHIFKYLNIQACKIAPDLPDYDRRPLGFGSCHEELYSSRPYGALDSGFNSVDSGDKRWSGNEPTDEFSDLPLRVAEITKEQRLRRESQYQENRGSLVVTNGGVEHDLDQIDYIDSCTAEEEEAEVRQPKGPDPDSLSSQFMAYIEQRRISHEGSPVKPVAIREFQKTEDMRRYLHQNRVPAEPSSLLSLSASHNQLSHTDLELHQRREQLVERTRREAQLAALQYEEEKIRTKQIQRDAVLDFVKQKASQSPQKQHPLLDGVDGECPFPSRRSQHTDDSALCMSLSGLNQVGCAATLPHSSAFTPLKSDDRPNALLSSPATETVHHSPAYSFPAAIQRNQPQRPESFLFRAGVRAETNKGHASPLPPSAAPTTDSTDSITGQNSRQREEELELIDQLRKHIEYRLKVSLPCDLGAALTDGVVLCHLANHVRPRSVPSIHVPSPAVPKLTMAKCRRNVENFLEACRKIGVPQEQLCLPLHILEEKGLSQVAVTVQALLELAPPKQQQHQLSAV

SEQ ID NO: 7990 - protein, 803 aa, Homo Sapiens; identical to SEQ ID NO: 7988

SEQ ID NO: 7991 - protein, 623 aa, Homo Sapiens
MAAAGLVAVAAAAEYSGTVASGGNLPGVHCGPSSGAGPGFGPGSWSRSLDRALEEAAVTGVLSLSGRKLREFPRGAANHDLTDTTRAELAELPLIRLDFSCNKITTIPVCYRNLRHLQTITLDNNPLQSPPAQICIKGKVHIFKYLNIQACKIAPDLPDYDRRPLGFGSCHEELYSSRPYGALDSGFNSVDSGDKRWSGNEPTDEFSDLPLRVAEITKEQRLRRESQYQENRGSLVVTNGGVEHDLDQIDYIDSCTAEEEEAEGSPVKPVAIREFQKTEDMRRYLHQNRVPAEPSSLLSLSASHNQLSHTDLELHQRREQLVERTRREAQLAALQYEEEKIRTKQIQRDAVLDFVKQKASQSPQKQHPLLDGVDGECPFPSRRSQHTDDSALCMSLSGLNQVGCAATLPHSSAFTPLKSDDRPNALLSSPATETVHHSPAYSFPAAIQRNQPQRPESFLFRAGVRAETNKGHASPLPPSAAPTTDSTDSITGQNSRQREEELELIDQLRKHIEYRLKVSLPCDLGAALTDGVVLCHLANHVRPRSVPSIHVPSPAVPKLTMAKCRRNVENFLEACRKIGVPQEQLCLPLHILEEKGLSQVAVTVQALLELAPPKQQQHQLSAV

SEQ ID NO: 7992 - protein, 92 aa, Homo Sapiens
MAAAGLVAVAAAAEYSGTVASGGNLPGVHCGPSSGAGPGFGPGSWSRSLDRALEEAAVTGVLSLSGRKLREFPRGAANHDLTDTTRAGCELQ

SEQ ID NO: 7993 - protein, 227 aa, Homo Sapiens
YEEEKIRTKQIQRDAVLDFVKQKASQSPQKQHPLLDGVDGECPFPSRRSQHTDDSALCMSLSGLNQVGCAATLPHSSAFTPLKSDDRPNALLSSPATETGHASPLPPSAAPTTDSTDSITGQNSRQREEELELIDQLRKHIEYRLKVSLPCDLGAALTDGVVLCHLANHVRPRSVPSIHVPSPAVPKLTMAKCRRNVENFLEACRKIGVPQDNLCSPSDILQLNLSV

SEQ ID NO: 7994 - protein, 159 aa, Homo Sapiens
MAGPGWTLLLLLLLLLLLGSMAGYGPQKKLNLSHKGIGEPCRRHEECQSNCCTINSLAPHTLCTPKTIFLQCLPWRKPNGYRCSHDSECQSSCCVRNNSPQELCTPQSVFLQCVPWRKPNGDFCSSHQECHSQCCIQLREYSPFRCIPRTGILAQCLPL

SEQ ID NO: 7995 - protein, 139 aa, Homo Sapiens
MAGPGWTLLLLLLLLLLLGSMAGYGPQKKLNLSHKGIGEPCRRHEECQSNCCTINSLAPHTLCTPKTIFLQCLPWRKVSPMGTDARTTQSARAAAASATTARRSCARPKASSCSVCPGASPTATSAAAIRSVTASAASS

SEQ ID NO: 7996 - protein, 46 aa, Homo Sapiens
MAGPGWTLLLLLLLLLLLGSMAGYGPQKKLNLSHKKLLRKPKFEGW

SEQ ID NO: 7997 - protein, 61 aa, Homo Sapiens
MAGPGWTLLLLLLLLLLLGSMAGYGPQKKLNLSHKPRAPSTDLPEPRQSGFVPETSQETQV

SEQ ID NO: 7998 - protein, 635 aa, Homo Sapiens
MAPPLLLLLLASGAAACPLPCVCQNLSESLSTLCAHRGLLFVPPNVDRRTVELRLADNFIQALGPPDFRNMTGLVDLTLSRNAITRIGARAFGDLESLRSLHLDGNRLVELGTGSLRGPVNLQHLILSGNQLGRIAPGAFDDFLESLEDLDLSYNNLRQVPWAGIGAMPALHTLNLDHNLIDALPPGAFAQLGQLSRLDLTSNRLATLAPDPLFSRGRDAEASPAPLVLSFSGNPLHCNCELLWLRRLARPDDLETCASPPGLAGRYFWAVPEGEFSCEPPLIARHTQRLWVLEGQRATLRCRALGDPAPTMHWVGPDDRLVGNSSRARAFPNGTLEIGVTGAGDAGGYTCIATNPAGEATARVELRVLALPHGGNSSAEGGRPGPSDIAASARTAAEGEGTLESEPAVQVTEVTATSGLVSWGPGRPADPVWMFQIQYNSSEDETLIYRIVPASSHHFLLKHLVPGADYDLCLLALSPAAGPSDLTATRLLGCAHFSTLPASPLCHALQAHVLGGTLTVAVGGVLVAALLVFTVALLVRGRGAGNGRLPLKLSHVQSQTNGGPSPTPKAHPPRSPPPRPQRSCSLDLGDAGCYGYARRLGGAWARRSHSVHGGLLGAGCRGVGGSAERLEESVV

SEQ ID NO: 7999 - protein, 418 aa, Homo Sapiens
MAPPLLLLLLASGAAACPLPCVCQNLSESLSTLCAHRGLLFVPPNVDRRTVELRLADNFIQALGPPDFRNMTGLVDLTLSRNAITRIGARAFGDLESLRSLHLDGNRLVELGTGSLRGPVNLQHLILSGNQLGRIAPGAFDDFLESLEDLDLSYNNLRQVPWAGIGAMPALHTLNLDHNLIDALPPGAFAQLGQLSRLDLTSNRLATLAPDPLFSRGRDAEASPAPLVLSFSGNPLHCNCELLWLRRLARPDDLETCASPPGLAGRYFWAVPEGEFSCEPPLIARHTQRLWVLEGQRATLRCRALGDPAPTMHWVGPDDRLVGNSSRARAFPNGTLEIGVTGAGDAGGYTCIATNPAGEATARVELRVLALPHGGNSRPGAAAWPGSPSLVFILSTSGSPVYLEGQGALSSVLASRPG

SEQ ID NO: 8000 - protein, 719 aa, Homo Sapiens
MEKILFYLFLIGIAVKAQICPKRCVCQILSPNLATLCAKKGLLFVPPNIDRRTVELRLADNFVTNIKRKDFANMTSLVDLTLSRNTISFITPHAFADLRNLRALHLNSNRLTKITNDMFSGLSNLHHLILNNNQLTLISSTAFDDVFALEELDLSYNNLETIPWDAVEKMVSLHTLSLDHNMIDNIPKGTFSHLHKMTRLDVTSNKLQKLPPDPLFQRAQVLATSGIISPSTFALSFGGNPLHCNCELLWLRRLSREDDLETCASPPLLTGRYFWSIPEEEFLCEPPLITRHTHEMRVLEGQRATLRCKARGDPEPAIHWISPEGKLISNATRSLVYDNGTLDILITTVKDTGAFTCIASNPAGEATQIVDLHIIKLPHLLNSTNHIHEPDPGSSDISTSTKSGSNTSSSNGDTKLSQDKIVVAEATSSTALLKFNFQRNIPGIRMFQIQYNGTYDDTLVYRMIPPTSKTFLVNNLAAGTMYDLCVLAIYDDGITSLTATRVVGCIQFTTEQDYVRCHFMQSQFLGGTMIIIIGGIIVASVLVFIIILMIRYKVCNNNGQHKVTKVSNVYSQTNGAQIQGCSVTLPQSVSKQAVGHEENAQCCKATSDNVIQSSETCSSQDSSTTTSALPPSWTSSTSVSQKQKRKTGTKPSTEPQNEAVTNVESQNTNRNNSTALQLASRPPDSVTEGPTSKRAHIKPNALLTNVDQIVQETQRLELI

SEQ ID NO: 8001 - protein, 466 aa, Homo Sapiens
MEKILFYLFLIGIAVKAQICPKRCVCQILSPNLATLCAKKGLLFVPPNIDRRTVELRLADNFVTNIKRKDFANMTSLVDLTLSRNTISFITPHAFADLRNLRALHLNSNRLTKITNDMFSGLSNLHHLILNNNQLTLISSTAFDDVFALEELDLSYNNLETIPWDAVEKMVSLHTLSLDHNMIDNIPKGTFSHLHKMTRLDVTSNKLQKLPPDPLFQRAQVLATSGIISPSTFALSFGGNPLHCNCELLWLRRLSREDDLETCASPPLLTGRYFWSIPEEEFLCEPPLITRHTHEMRVLEGQRATLRCKARGDPEPAIHWISPEGKLISNATRSLVYDNGTLDILITTVKDTGAFTCIASNPAGEATQIVDLHIIKLPHLLNSTNHIHEPDPGSSDISTSTKSGSNTSSSNGDTKLSQDKIVVAEATSSTALLKFNFQRNIPGIRMFQIQYNGTYDDTLVYRCFAD

SEQ ID NO: 8002 - protein, 465 aa, Homo Sapiens
MEKILFYLFLIGIAVKAQICPKRCVCQILSPNLATLCAKKGLLFVPPNIDRRTVELRLADNFVTNIKRKDFANMTSLVDLTLSRNTISFITPHAFADLRNLRALHLNSNRLTKITNDMFSGLSNLHHLILNNNQLTLISSTAFDDVFALEELDLSYNNLETIPWDAVEKMVSLHTLSLDHNMIDNIPKGTFSHLHKMTRLDVTSNKLQKLPPDPLFQRAQVLATSGIISPSTFALSFGGNPLHCNCELLWLRRLSREDDLETCASPPLLTGRYFWSIPEEEFLCEPPLITRHTHEMRVLEGQRATLRCKARGDPEPAIHWISPEGKLISNATRSLVYDNGTLDILITTVKDTGAFTCIASNPAGEATQIVDLHIIKLPHLLNSTNHIHEPDPGSSDISTSTKSGSNTSSSNGDTKLSQDKIVVAEATSSTALLKFNFQRNIPGIRMFQIQYNGTYDDTLVYRGWS

SEQ ID NO: 8003 - protein, 347 aa, Homo Sapiens
MSSWSRQRPKSPGGIQPHVSRTLFLLLLLAASAWGVTLSPKDCQVFRSDHGSSISCQPPAEIPGYLPADTVHLAVEFFNLTHLPANLLQGASKLQELHLSSNGLESLSPEFLRPVPQLRVLDLTRNALTGLPPGLFQASATLDTLVLKENQLEVLEVSWLHGLKALGHLDLSGNRLRKLPPGLLANFTLLRTLDLGENQLETLPPDLLRGPLQLERLHLEGNKLQVLGKDLLLPQPDLRYLFLNGNKLARVAAGAFQGLRQLDMLDLSNNSLASVPEGLWASLGQPNWDMRDGFDISGNPWICDQNLSDLYRWLQAQKDKMFSQNDTRCAGPEAVKGQTLLAVAKSQ

SEQ ID NO: 8004 - protein, 4544 aa, Homo Sapiens
MLTPPLLLLLPLLSALVAAAIDAPKTCSPKQFACRDQITCISKGWRCDGERDCPDGSDEAPEICPQSKAQRCQPNEHNCLGTELCVPMSRLCNGVQDCMDGSDEGPHCRELQGNCSRLGCQHHCVPTLDGPTCYCNSSFQLQADGKTCKDFDECSVYGTCSQLCTNTDGSFICGCVEGYLLQPDNRSCKAKNEPVDRPPVLLIANSQNILATYLSGAQVSTITPTSTRQTTAMDFSYANETVCWVHVGDSAAQTQLKCARMPGLKGFVDEHTINISLSLHHVEQMAIDWLTGNFYFVDDIDDRIFVCNRNGDTCVTLLDLELYNPKGIALDPAMGKVFFTDYGQIPKVERCDMDGQNRTKLVDSKIVFPHGITLDLVSRLVYWADAYLDYIEVVDYEGKGRQTIIQGILIEHLYGLTVFENYLYATNSDNANAQQKTSVIRVNRFNSTEYQVVTRVDKGGALHIYHQRRQPRVRSHACENDQYGKPGGCSDICLLANSHKARTCRCRSGFSLGSDGKSCKKPEHELFLVYGKGRPGIIRGMDMGAKVPDEHMIPIENLMNPRALDFHAETGFIYFADTTSYLIGRQKIDGTERETILKDGIHNVEGVAVDWMGDNLYWTDDGPKKTISVARLEKAAQTRKTLIEGKMTHPRAIVVDPLNGWMYWTDWEEDPKDSRRGRLERAWMDGSHRDIFVTSKTVLWPNGLSLDIPAGRLYWVDAFYDRIETILLNGTDRKIVYEGPELNHAFGLCHHGNYLFWTEYRSGSVYRLERGVGGAPPTVTLLRSERPPIFEIRMYDAQQQQVGTNKCRVNNGGCSSLCLATPGSRQCACAEDQVLDADGVTCLANPSYVPPPQCQPGEFACANSRCIQERWKCDGDNDCLDNSDEAPALCHQHTCPSDRFKCENNRCIPNRWLCDGDNDCGNSEDESNATCSARTCPPNQFSCASGRCIPISWTCDLDDDCGDRSDESASCAYPTCFPLTQFTCNNGRCININWRCDNDNDCGDNSDEAGCSHSCSSTQFKCNSGRCIPEHWTCDGDNDCGDYSDETHANCTNQATRPPGGCHTDEFQCRLDGLCIPLRWRCDGDTDCMDSSDEKSCEGVTHVCDPSVKFGCKDSARCISKAWVCDGDNDCEDNSDEENCESLACRPPSHPCANNTSVCLPPDKLCDGNDDCGDGSDEGELCDQCSLNNGGCSHNCSVAPGEGIVCSCPLGMELGPDNHTCQIQSYCAKHLKCSQKCDQNKFSVKCSCYEGWVLEPDGESCRSLDPFKPFIIFSNRHEIRRIDLHKGDYSVLVPGLRNTIALDFHLSQSALYWTDVVEDKIYRGKLLDNGALTSFEVVIQYGLATPEGLAVDWIAGNIYWVESNLDQIEVAKLDGTLRTTLLAGDIEHPRAIALDPRDGILFWTDWDASLPRIEAASMSGAGRRTVHRETGSGGWPNGLTVDYLEKRILWIDARSDAIYSARYDGSGHMEVLRGHEFLSHPFAVTLYGGEVYWTDWRTNTLAKANKWTGHNVTVVQRTNTQPFDLQVYHPSRQPMAPNPCEANGGQGPCSHLCLINYNRTVSCACPHLMKLHKDNTTCYEFKKFLLYARQMEIRGVDLDAPYYNYIISFTVPDIDNVTVLDYDAREQRVYWSDVRTQAIKRAFINGTGVETVVSADLPNAHGLAVDWVSRNLFWTSYDTNKKQINVARLDGSFKNAVVQGLEQPHGLVVHPLRGKLYWTDGDNISMANMDGSNRTLLFSGQKGPVGLAIDFPESKLYWISSGNHTINRCNLDGSGLEVIDAMRSQLGKATALAIMGDKLWWADQVSEKMGTCSKADGSGSVVLRNSTTLVMHMKVYDESIQLDHKGTNPCSVNNGDCSQLCLPTSETTRSCMCTAGYSLRSGQQACEGVGSFLLYSVHEGIRGIPLDPNDKSDALVPVSGTSLAVGIDFHAENDTIYWVDMGLSTISRAKRDQTWREDVVTNGIGRVEGIAVDWIAGNIYWTDQGFDVIEVARLNGSFRYVVISQGLDKPRAITVHPEKGYLFWTEWGQYPRIERSRLDGTERVVLVNVSISWPNGISVDYQDGKLYWCDARTDKIERIDLETGENREVVLSSNNMDMFSVSVFEDFIYWSDRTHANGSIKRGSKDNATDSVPLRTGIGVQLKDIKVFNRDRQKGTNVCAVANGGCQQLCLYRGRGQRACACAHGMLAEDGASCREYAGYLLYSERTILKSIHLSDERNLNAPVQPFEDPEHMKNVIALAFDYRAGTSPGTPNRIFFSDIHFGNIQQINDDGSRRITIVENVGSVEGLAYHRGWDTLYWTSYTTSTITRHTVDQTRPGAFERETVITMSGDDHPRAFVLDECQNLMFWTNWNEQHPSIMRAALSGANVLTLIEKDIRTPNGLAIDHRAEKLYFSDATLDKIERCEYDGSHRYVILKSEPVHPFGLAVYGEHIFWTDWVRRAVQRANKHVGSNMKLLRVDIPQQPMGIIAVANDTNSCELSPCRINNGGCQDLCLLTHQGHVNCSCRGGRILQDDLTCRAVNSSCRAQDEFECANGECINFSLTCDGVPHCKDKSDEKPSYCNSRRCKKTFRQCSNGRCVSNMLWCNGADDCGDGSDEIPCNKTACGVGEFRCRDGTCIGNSSRCNQFVDCEDASDEMNCSATDCSSYFRLGVKGVLFQPCERTSLCYAPSWVCDGANDCGDYSDERDCPGVKRPRCPLNYFACPSGRCIPMSWTCDKEDDCEHGEDETHCNKFCSEAQFECQNHRCISKQWLCDGSDDCGDGSDEAAHCEGKTCGPSSFSCPGTHVCVPERWLCDGDKDCADGADESIAAGCLYNSTCDDREFMCQNRQCIPKHFVCDHDRDCADGSDESPECEYPTCGPSEFRCANGRCLSSRQWECDGENDCHDQSDEAPKNPHCTSQEHKCNASSQFLCSSGRCVAEALLCNGQDDCGDSSDERGCHINECLSRKLSGCSQDCEDLKIGFKCRCRPGFRLKDDGRTCADVDECSTTFPCSQRCINTHGSYKCLCVEGYAPRGGDPHSCKAVTDEEPFLIFANRYYLRKLNLDGSNYTLLKQGLNNAVALDFDYREQMIYWTDVTTQGSMIRRMHLNGSNVQVLHRTGLSNPDGLAVDWVGGNLYWCDKGRDTIEVSKLNGAYRTVLVSSGLREPRALVVDVQNGYLYWTDWGDHSLIGRIGMDGSSRSVIVDTKITWPNGLTLDYVTERIYWADAREDYIEFASLDGSNRHVVLSQDIPHIFALTLFEDYVYWTDWETKSINRAHKTTGTNKTLLISTLHRPMDLHVFHALRQPDVPNHPCKVNNGGCSNLCLLSPGGGHKCACPTNFYLGSDGRTCVSNCTASQFVCKNDKCIPFWWKCDTEDDCGDHSDEPPDCPEFKCRPGQFQCSTGICTNPAFICDGDNDCQDNSDEANCDIHVCLPSQFKCTNTNRCIPGIFRCNGQDNCGDGEDERDCPEVTCAPNQFQCSITKRCIPRVWVCDRDNDCVDGSDEPANCTQMTCGVDEFRCKDSGRCIPARWKCDGEDDCGDGSDEPKEECDERTCEPYQFRCKNNRCVPGRWQCDYDNDCGDNSDEESCTPRPCSESEFSCANGRCIAGRWKCDGDHDCADGSDEKDCTPRCDMDQFQCKSGHCIPLRWRCDADADCMDGSDEEACGTGVRTCPLDEFQCNNTLCKPLAWKCDGEDDCGDNSDENPEECARFVCPPNRPFRCKNDRVCLWIGRQCDGTDNCGDGTDEEDCEPPTAHTTHCKDKKEFLCRNQRCLSSSLRCNMFDDCGDGSDEEDCSIDPKLTSCATNASICGDEARCVRTEKAAYCACRSGFHTVPGQPGCQDINECLRFGTCSQLCNNTKGGHLCSCARNFMKTHNTCKAEGSEYQVLYIADDNEIRSLFPGHPHSAYEQAFQGDESVRIDAMDVHVKAGRVYWTNWHTGTISYRSLPPAAPPTTSNRHRRQIDRGVTHLNISGLKMPRGIAIDWVAGNVYWTDSGRDVIEVAQMKGENRKTLISGMIDEPHAIVVDPLRGTMYWSDWGNHPKIETAAMDGTLRETLVQDNIQWPTGLAVDYHNERLYWADAKLSVIGSIRLNGTDPIVAADSKRGLSHPFSIDVFEDYIYGVTYINNRVFKIHKFGHSPLVNLTGGLSHASDVVLYHQHKQPEVTNPCDRKKCEWLCLLSPSGPVCTCPNGKRLDNGTCVPVPSPTPPPDAPRPGTCNLQCFNGGSCFLNARRQPKCRCQPRYTGDKCELDQCWEHCRNGGTCAASPSGMPTCRCPTGFTGPKCTQQVCAGYCANNSTCTVNQGNQPQCRCLPGFLGDRCQYRQCSGYCENFGTCQMAADGSRQCRCTAYFEGSRCEVNKCSRCLEGACVVNKQSGDVTCNCTDGRVAPSCLTCVGHCSNGGSCTMNSKMMPECQCPPHMTGPRCEEHVFSQQQPGHIASILIPLLLLLLLVLVAGVVFWYKRRVQGAKGFQHQRMTNGAMNVEIGNPTYKMYEGGEPDDVGGLLDADFALDPDKPTNFTNPVYATLYMGGHGSRHSLASTDEKRELLGRGPEDEIGDPLA

SEQ ID NO: 8005 - protein, 292 aa, Homo Sapiens
MLTPPLLLLLPLLSALVAAAIDAPKTCSPKQFACRDQITCISKGWRCDGERDCPDGSDEAPEICPQSKAQRCQPNEHNCLGTELCVPMSRLCNGVQDCMDGSDEGPHCRELQGNCSRLGCQHHCVPTLDGPTCYCNSSFQLQADGKTCKDFDECSVYGTCSQLCTNTDGSFICGCVEGYLLQPDNRSCKAKNEPVDRPPVLLIANSQNILATYLSGAQVSTITPTSTRQTTAMDFSYANETVCWVHVGDSAAQTQLKCARMPGLKGFVDEHTINISLSLHLCVFSKSQQEMG

SEQ ID NO: 8006 - protein, 296 aa, Homo Sapiens
MLTPPLLLLLPLLSALVAAAIDAPKTCSPKQFACRDQITCISKGWRCDGERDCPDGSDEAPEICPQSKAQRCQPNEHNCLGTELCVPMSRLCNGVQDCMDGSDEGPHCRELQGNCSRLGCQHHCVPTLDGPTCYCNSSFQLQADGKTCKDFDECSVYGTCSQLCTNTDGSFICGCVEGYLLQPDNRSCKAKNEPVDRPPVLLIANSQNILATYLSGAQVSTITPTSTRQTTAMDFSYANETVCWVHVGDSAAQTQLKCARMPGLKGFVDEHTINISLSLHRRSRKRAQENEVTQHG

SEQ ID NO: 8007 - protein, 439 aa, Homo Sapiens
MLTPPLLLLLPLLSALVAAAIDAPKTCSPKQFACRDQITCISKGWRCDGERDCPDGSDEAPEICPQSKAQRCQPNEHNCLGTELCVPMSRLCNGVQDCMDGSDEGPHCRELQGNCSRLGCQHHCVPTLDGPTCYCNSSFQLQADGKTCKDFDECSVYGTCSQLCTNTDGSFICGCVEGYLLQPDNRSCKAKNEPVDRPPVLLIANSQNILATYLSGAQVSTITPTSTRQTTAMDFSYANETVCWVHVGDSAAQTQLKCARMPGLKGFVDEHTINISLSLHHVEQMAIDWLTGNFYFVDDIDDRIFVCNRNGDTCVTLLDLELYNPKGIALDPAMGKVFFTDYGQIPKVERCDMDGQNRTKLVDSKIVFPHGITLDLVSRLVYWADAYLDYIEVVDYEGKGRQTIIQGILVRELLSEVLWGNHDPGPSGEGGSLCRGTVL

SEQ ID NO: 8008 - protein, 183 aa, Homo Sapiens
NGQDNCGDGEDERDCPEVTCAPNQFQCSITKRCIPRVWVCDRDNDCVDGSDEPANCTQMTCGVDEFRCKDSGRCIPARWKCDGEDDCGDGSDEPKEECGEPRPHSRRKTVYLDERTCEPYQFRCKNNRCVPGRWQCDYDNDCGDNSDEESCTPRPCSESEFSCANGRCIAGRWKCDGDHDCAD

SEQ ID NO: 8009 - protein, 139 aa, Homo Sapiens
  misc_feature (1)..(1): Xaa can be any naturally occurring amino acid
XRPGAFERETVITMSGDDHPRAFVLDECQNLMFWTNWNEQHPSIMRAALSGANVLTLIEKDIRTPNGLAIDHRAEKLYFSDATLDKIERCEYDGSHRYVNSLHAESTTVAARTCVCSLTRAMSTAHAEGAESSRMTSPA

SEQ ID NO: 8010 - protein, 500 aa, Homo Sapiens
MASVAQESAGSQRRLPPRHGALRGLLLLCLWLPSGRAALPPAAPLSELHAQLSGVEQLLEEFRRQLQQERPQEELELELRAGGGPQEDCPGPGSGGYSAMPDAIIRTKDSLAAGASFLRAPAAVRGWRQCVAACCSEPRCSVAVVELPRRPAPPAAVLGCYLFNCTARGRNVCKFALHSGYSSYSLSRAPDGAALATARASPRQEKDAPPLSKAGQDVVLHLPTDGVVLDGRESTDDHAIVQYEWALLQGDPSVDMKVPQSGTLKLSHLQEGTYTFQLTVTDTAGQRSSDNVSVTVLRAAYSTGGCLHTCSRYHFFCDDGCCIDITLACDGVQQCPDGSDEDFCQNLGLDRKMVTHTAASPALPRTTGPSEDAGGDSLVEKSQKATAPNKPPALSNTEKRNHSAFWGPESQIIPVMPDSSSSGKNRKEESYIFESKGDGGGGEHPAPETGAVLPLALGLAITALLLLMVACRLRLVKQKLKKARPITSEESDYLINGMYL

SEQ ID NO: 8011 - protein, 325 aa, Homo Sapiens
MASVAQESAGSQRRLPPRHGALRGLLLLCLWLPSGRAALPPAAPLSELHAQLSGVEQLLEEFRRQLQQERPQEELELELRAGGGPQEDCPGPGSGGYSAMPDAIIRTKDSLAAGASFLRAPAAVRGWRQCVAACCSEPRCSVAVVELPRRPAPPAAVLGCYLFNCTARGRNVCKFALHSGYSSYSLSRAPDGAALATARASPRQEKDAPPLSKAGQDVVLHLPTDGVVLDGRESTDDHAIVQYEWALLQGDPSVDMKVPQSGTLKLSHLQEGTYTFQLTVTDTAGQRSSDNVSVTVLRAAYSTGDGWSICCICSKREAKEFSETS

SEQ ID NO: 8012 - protein, 4599 aa, Homo Sapiens
MSEFLLALLTLSGLLPIARVLTVGADRDQQLCDPGEFLCHDHVTCVSQSWLCDGDPDCPDDSDESLDTCPEEVEIKCPLNHIACLGTNKCVHLSQLCNGVLDCPDGYDEGVHCQELLSNCQQLNCQYKCTMVRNSTRCYCEDGFEITEDGRSCKDQDECAVYGTCSQTCRNTHGSYTCSCVEGYLMQPDNRSCKAKIEPTDRPPILLIANFETIEVFYLNGSKMATLSSVNGNEIHTLDFIYNEDMICWIESRESSNQLKCIQITKAGGLTDEWTINILQSFHNVQQMAIDWLTRNLYFVDHVGDRIFVCNSNGSVCVTLIDLELHNPKAIAVDPIAGKLFFTDYGNVAKVERCDMDGMNRTRIIDSKTEQPAALALDLVNKLVYWVDLYLDYVGVVDYQGKNRHTVIQGRQVRHLYGITVFEDYLYATNSDNYNIVRINRFNGTDIHSLIKIENAWGIRIYQKRTQPTVRSHACEVDPYGMPGGCSHICLLSSSYKTRTCRCRTGFNLGSDGRSCKRPKNELFLFYGKGRPGIVRGMDLNTKIADEYMIPIENLVNPRALDFHAETNYIYFADTTSFLIGRQKIDGTERETILKDDLDNVEGIAVDWIGNNLYWTNDGHRKTINVARLEKASQSRKTLLEGEMSHPRGIVVDPVNGWMYWTDWEEDEIDDSVGRIEKAWMDGFNRQIFVTSKMLWPNGLTLDFHTNTLYWCDAYYDHIEKVFLNGTHRKIVYSGRELNHPFGLSHHGNYVFWTDYMNGSIFQLDLITSEVTLLRHERPPLFGLQIYDPRKQQGDNMCRVNNGGCSTLCLAIPGGRVCACADNQLLDENGTTCTFNPGEALPHICKAGEFRCKNRHCIQARWKCDGDDDCLDGSDEDSVNCFNHSCPDDQFKCQNNRCIPKRWLCDGANDCGSNEDESNQTCTARTCQVDQFSCGNGRCIPRAWLCDREDDCGDQTDEMASCEFPTCEPLTQFVCKSGRCISSKWHCDSDDDCGDGSDEVGCVHSCFDNQFRCSSGRCIPGHWACDGDNDCGDFSDEAQINCTKEEIHSPAGCNGNEFQCHPDGNCVPDLWRCDGEKDCEDGSDEKGCNGTIRLCDHKTKFSCWSTGRCINKAWVCDGDIDCEDQSDEDDCDSFLCGPPKHPCANDTSVCLQPEKLCNGKKDCPDGSDEGYLCDECSLNNGGCSNHCSVVPGRGIVCSCPEGLQLNKDNKTCEIVDYCSNHLKCSQVCEQHKHTVKCSCYEGWKLDVDGESCTSVDPFEAFIIFSIRHEIRRIDLHKRDYSLLVPGLRNTIALDFHFNQSLLYWTDVVEDRIYRGKLSESGGVSAIEVVVEHGLATPEGLTVDWIAGNIYWIDSNLDQIEVAKLDGSLRTTLIAGAMEHPRAIALDPRYGILFWTDWDANFPRIESASMSGAGRKTIYKDMKTGAWPNGLTVDHFEKRIVWTDARSDAIYSALYDGTNMIEIIRGHEYLSHPFAVSLYGSEVYWTDWRTNTLSKANKWTGQNVSVIQKTSAQPFDLQIYHPSRQPQAPNPCAANDGKGPCSHMCLINHNRSAACACPHLMKLSSDKKTCYEMKKFLLYARRSEIRGVDIDNPYFNFITAFTVPDIDDVTVIDFDASEERLYWTDIKTQTIKRAFINGTGLETVISRDIQSIRGLAVDWVSRNLYWISSEFDETQINVARLDGSLKTSIIHGIDKPQCLAAHPVRGKLYWTDGNTINMANMDGSNSKILFQNQKEPVGLSIDYVENKLYWISSGNGTINRCNLDGGNLEVIESMKEELTKATALTIMDKKLWWADQNLAQLGTCSKRDGRNPTILRNKTSGVVHMKVYDKEAQQGSNSCQLNNGGCSQLCLPTSETTRTCMCTVGYYLQKNRMSCQGIESFLMYSVHEGIRGIPLEPSDKMDALMPISGTSFAVGIDFHAENDTIYWTDMGFNKISRAKRDQTWKEDIITNGLGRVEGIAVDWIAGNIYWTDHGFNLIEVARLNGSFRYVIISQGLDQPRSIAVHPEKGLLFWTEWGQMPCIGKARLDGSEKVVLVSMGIAWPNGISIDYEENKLYWCDARTDKIERIDLETGGNREMVLSGSNVDMFSVAVFGAYIYWSDRAHANGSVRRGHKNDATETITMRTGLGVNLKEVKIFNRVREKGTNVCARDNGGCKQLCLYRGNSRRTCACAHGYLAEDGVTCLRHEGYLLYSGRTILKSIHLSDETNLNSPIRPYENPRYFKNVIALAFDYNQRRKGTNRIFYSDAHFGNIQLIKDNWEDRQVIVENVGSVEGLAYHRAWDTLYWTSSTTSSITRHTVDQTRPGAFDREAVITMSEDDHPHVLALDECQNLMFWTNWNEQHPSIMRSTLTGKNAQVVVSTDILTPNGLTIDYRAEKLYFSDGSLGKIERCEYDGSQRHVIVKSGPGTFLSLAVYDNYIFWSDWGRRAILRSNKYTGGDTKILRSDIPHQPMGIIAVANDTNSCELSPCALLNGGCHDLCLLTPNGRVNCSCRGDRILLEDNRCVTKNSSCNAYSEFECGNGECIDYQLTCDGIPHCKDKSDEKLLYCENRSCRRGFKPCYNRRCIPHGKLCDGENDCGDNSDELDCKVSTCATVEFRCADGTCIPRSARCNQNIDCADASDEKNCNNTDCTHFYKLGVKTTGFIRCNSTSLCVLPTWICDGSNDCGDYSDELKCPVQNKHKCEENYFSCPSGRCILNTWICDGQKDCEDGRDEFHCDSSCSWNQFACSAQKCISKHWICDGEDDCGDGLDESDSICGAITCAADMFSCQGSRACVPRHWLCDGERDCPDGSDELSTAGCAPNNTCDENAFMCHNKVCIPKQFVCDHDDDCGDGSDESPQCGYRQCGTEEFSCADGRCLLNTQWQCDGDFDCPDHSDEAPLNPKCKSAEQSCNSSFFMCKNGRCIPSGGLCDNKDDCGDGSDERNCHINECLSKKVSGCSQDCQDLPVSYKCKCWPGFQLKDDGKTCVDIDECSSGFPCSQQCINTYGTYKCLCTDGYEIQPDNPNGCKSLSDEEPFLILADHHEIRKISTDGSNYTLLKQGLNNVIAIDFDYREEFIYWIDSSRPNGSRINRMCLNGSDIKVVHNTAVPNALAVDWIGKNLYWSDTEKRIIEVSKLNGLYPTILVSKRLKFPRDLSLDPQAGYLYWIDCCEYPHIGRVGMDGTNQSVVIETKISRPMALTIDYVNRRLYWADENHIEFSNMDGSHRHKVPNQDIPGVIALTLFEDYIYWTDGKTKSLSRAHKTSGADRLSLIYSWHAITDIQVYHSYRQPDVSKHLCMINNGGCSHLCLLAPGKTHTCACPTNFYLAADNRTCLSNCTASQFRCKTDKCIPFWWKCDTVDDCGDGSDEPDDCPEFRCQPGRFQCGTGLCALPAFICDGENDCGDNSDELNCDTHVCLSGQFKCTKNQKCIPVNLRCNGQDDCGDEEDERDCPENSCSPDYFQCKTTKHCISKLWVCDEDPDCADASDEANCDKKTCGPHEFQCKNNNCIPDHWRCDSQNDCSDNSDEENCKPQTCTLKDFLCANGDCVSSRFWCDGDFDCADGSDERNCETSCSKDQFRCSNGQCIPAKWKCDGHEDCKYGEDEKSCEPASPTCSSREYICASDGCISASLKCNGEYDCADGSDEMDCVTECKEDQFRCKNKAHCIPIRWLCDGIHDCVDGSDEENCERGGNICRADEFLCNNSLCKLHFWVCDGEDDCGDNSDEAPDMCVKFLCPSTRPHRCRNNRICLQSEQMCNGIDECGDNSDEDHCGGKLTYKARPCKKDEFACSNKKCIPMDLQCDRLDDCGDGSDEQGCRIAPTEYTCEDNVNPCGDDAYCNQIKTSVFCRCKPGFQRNMKNRQCEDLNECLVFGTCSHQCINVEGSYKCVCDQNFQERNNTCIAEGSEDQVLYIANDTDILGFIYPFNYSGDHQQISHIEHNSRITGMDVYYQRDMIIWSTQFNPGGIFYKRIHGREKRQANSGLICPEFKRPRDIAVDWVAGNIYWTDHSRMHWFSYYTTHWTSLRYSINVGQLNGPNCTRLLTNMAGEPYAIAVNPKRGMMYWTVVGDHSHIEEAAMDGTLRRILVQKNLQRPTGLAVDYFSERIYWADFELSIIGSVLYDGSNSVVSVSSKQGLLHPHRIDIFEDYIYGAGPKNGVFRVQKFGHGSVEYLALNIDKTKGVLISHRYKQLDLPNPCLDLACEFLCLLNPSGATCVCPEGKYLINGTCNDDSLLDDSCKLTCENGGRCILNEKGDLRCHCWPSYSGERCEVNHCSNYCQNGGTCVPSVLGRPTCSCALGFTGPNCGKTVCEDFCQNGGTCIVTAGNQPYCHCQPEYTGDRCQYYVCHHYCVNSESCTIGDDGSVECVCPTRYEGPKCEVDKCVRCHGGHCIINKDSEDIFCNCTNGKIASSCQLCDGYCYNGGTCQLDPETNVPVCLCSTNWSGTQCERPAPKSSKSDHISTRSIAIIVPLVLLVTLITTLVIGLVLCKRKRRTKTIRRQPIINGGINVEIGNPSYNMYEVDHDHNDGGLLDPGFMIDPTKARYIGGGPSAFKLPHTAPPIYLNSDLKGPLTAGPTNYSNPVYAKLYMDGQNCRNSLGSVDERKELLPKKIEIGIRETVA

SEQ ID NO: 8013 - protein, 782 aa, Homo Sapiens [sequence omitted]

SEQ ID NO: 8014 - protein, 280 aa, Homo Sapiens
  misc_feature (1)..(1): Xaa can be any naturally occurring amino acid
XRPTCSCALGFTGPNCGKTVCEDFCQNGGTCIVTAGNQPYCHCQPEYTGDRCQYYVCHHYCVNSESCTIGDDGSVECVCPTRYEGPKCEVDKCVRCHGGHCIINKDSEDIFCNCTNGKIASSCQLCDGYCYNGGTCQLDPETNVPVCLCSVGFKSQRCDQKENPCDHYCQNEGICTLTAFNEPRCKCSTNWSGTQCERPAPKSSKSDHISTRSIAIIVPLVLLVTLITTLVIGLVLCKRKRRTKTIRRQPIINGGINVEIGNPSYNMYEVDHDHNDGGLL

SEQ ID NO: 8015 - protein, 798 aa, Homo Sapiens
  misc_feature (1)..(1): Xaa can be any naturally occurring amino acid
XSNKKCIPMDLQCDRLDDCGDGSDEQGCRIAPTEYTCEDNVNPCGDDAYCNQIKTSVFCRCKPGFQRNMKNRQCEDLNECLVFGTCSHQCINVEGSYKCVCDQNFQERNNTCIAEGSEDQVLYIANDTDILGFIYPFNYSGDHQQISHIEHNSRITGMDVYYQRDMIIWSTQFNPGGIFYKRIHGREKRQANSGLICPEFKRPRDIAVDWVAGNIYWTDHSRMHWFSYYTTHWTSLRYSINVGQLNGPNCTRLLTNMAGEPYAIAVNPKRGMMYWTVVGDHSHIEEAAMDGTLRRILVQKNLQRPTGLAVDYFSERIYWADFELSIIGSVLYDGSNSVVSVSSKQGLLHPHRIDIFEDYIYGAGPKNGVFRVQKFGHGSVEYLALNIDKTKGVLISHRYKQLDLPNPCLDLACEFLCLLNPSGATCVCPEGKYLINGTCNDDSLLDDSCKLTCENGGRCILNEKGDLRCHCWPSYSGERCEVNHCSNYCQNGGTCVPSVLGRPTCSCALGFTGPNCGKTVCEDFCQNGGTCIVTAGNQPYCHCQPEYTGDRCQYYVCHHYCVNSESCTIGDDGSVECVCPTRYEGPKCEVDKCVRCHGGHCIINKDSEDIFCNCTNGKIASSCQLCDGYCYNGGTCQLDPETNVPVCLCSTNWSGTQCERPAPKSSKSDHISTRSIAIIVPLVLLVTLITTLVIGLVLCKRKRRTKTIRRQPIINGGINVEIGNPSYNMYEVDHDHNDGGLLDPGFMIDPTKPTNYSNPVYAKLYMDGQNCRNSLGSVDERKELLPKKIEIGIRETVA

SEQ ID NO: 8016 - protein, 4655 aa, Homo Sapiens
MDRGPAAVACTLLLALVACLAPASGQECDSAHFRCGSGHCIPADWRCDGTKDCSDDADEIGCAVVTCQQGYFKCQSEGQCIPNSWVCDQDQDCDDGSDERQDCSQSTCSSHQITCSNGQCIPSEYRCDHVRDCPDGADENDCQYPTCEQLTCDNGACYNTSQKCDWKVDCRDSSDEINCTEICLHNEFSCGNGECIPRAYVCDHDNDCQDGSDEHACNYPTCGGYQFTCPSGRCIYQNWVCDGEDDCKDNGDEDGCESGPHDVHKCSPREWSCPESGRCISIYKVCDGILDCPGREDENNTSTGKYCSMTLCSALNCQYQCHETPYGGACFCPPGYIINHNDSRTCVEFDDCQIWGICDQKCESRPGRHLCHCEEGYILERGQYCKANDSFGEASIIFSNGRDLLIGDIHGRSFRILVESQNRGVAVGVAFHYHLQRVFWTDTVQNKVFSVDINGLNIQEVLNVSVETPENLAVDWVNNKIYLVETKVNRIDMVNLDGSYRVTLITENLGHPRGIAVDPTVGYLFFSDWESLSGEPKLERAFMDGSNRKDLVKTKLGWPAGVTLDMISKRVYWVDSRFDYIETVTYDGIQRKTVVHGGSLIPHPFGVSLFEGQVFFTDWTKMAVLKANKFTETNPQVYYQASLRPYGVTVYHSLRQPYATNPCKDNNGGCEQVCVLSHRTDNDGLGFRCKCTFGFQLDTDERHCIAVQNFLIFSSQVAIRGIPFTLSTQEDVMVPVSGNPSFFVGIDFDAQDSTIFFSDMSKHMIFKQKIDGTGREILAANRVENVESLAFDWISKNLYWTDSHYKSISVMRLADKTRRTVVQYLNNPRSVVVHPFAGYLFFTDWFRPAKIMRAWSDGSHLLPVINTTLGWPNGLAIDWAASRLYWVDAYFDKIEHSTFDGLDRRRLGHIEQMTHPFGLAIFGEHLFFTDWRLGAIIRVRKADGGEMTVIRSGIAYILHLKSYDVNIQTGSNACNQPTHPNGDCSHFCFPVPNFQRVCGCPYGMRLASNHLTCEGDPTNEPPTEQCGLFSFPCKNGRCVPNYYLCDGVDDCHDNSDEQLCGTLNNTCSSSAFTCGHGECIPAHWRCDKRNDCVDGSDEHNCPTHAPASCLDTQYTCDNHQCISKNWVCDTDNDCGDGSDEKNCNSTETCQPSQFNCPNHRCIDLSFVCDGDKDCVDGSDEVGCVLNCTASQFKCASGDKCIGVTNRCDGVFDCSDNSDEAGCPTRPPGMCHSDEFQCQEDGICIPNFWECDGHPDCLYGSDEHNACVPKTCPSSYFHCDNGNCIHRAWLCDRDNDCGDMSDEKDCPTQPFRCPSWQWQCLGHNICVNLSVVCDGIFDCPNGTDESPLCNGNSCSDFNGGCTHECVQEPFGAKCLCPLGFLLANDSKTCEDIDECDILGSCSQHCYNMRGSFRCSCDTGYMLESDGRTCKVTASESLLLLVASQNKIIADSVTSQVHNIYSLVENGSYIVAVDFDSISGRIFWSDATQGKTWSAFQNGTDRRVVFDSSIILTETIAIDWVGRNLYWTDYALETIEVSKIDGSHRTVLISKNLTNPRGLALDPRMNEHLLFWSDWGHHPRIERASMDGSMRTVIVQDKIFWPCGLTIDYPNRLLYFMDSYLDYMDFCDYNGHHRRQVIASDLIIRHPYALTLFEDSVYWTDRATRRVMRANKWHGGNQSVVMYNIQWPLGIVAVHPSKQPNSVNPCAFSRCSHLCLLSSQGPHFYSCVCPSGWSLSPDLLNCLRDDQPFLITVRQHIIFGISLNPEVKSNDAMVPIAGIQNGLDVEFDDAEQYIYWVENPGEIHRVKTDGTNRTVFASISMVGPSMNLALDWISRNLYSTNPRTQSIEVLTLHGDIRYRKTLIANDGTALGVGFPIGITVDPARGKLYWSDQGTDSGVPAKIASANMDGTSVKTLFTGNLEHLECVTLDIEEQKLYWAVTGRGVIERGNVDGTDRMILVHQLSHPWGIAVHDSFLYYTDEQYEVIERVDKATGANKIVLRDNVPNLRGLQVYHRRNAAESSNGCSNNMNACQQICLPVPGGLFSCACATGFKLNPDNRSCSPYNSFIVVSMLSAIRGFSLELSDHSETMVPVAGQGRNALHVDVDVSSGFIYWCDFSSSVASDNAIRRIKPDGSSLMNIVTHGIGENGVRGIAVDWVAGNLYFTNAFVSETLIEVLRINTTYRRVLLKVTVDMPRHIVVDPKNRYLFWADYGQRPKIERSFLDCTNRTVLVSEGIVTPRGLAVDRSDGYVYWVDDSLDIIARIRINGENSEVIRYGSRYPTPYGITVFENSIIWVDRNLKKIFQASKEPENTEPPTVIRDNINWLRDVTIFDKQVQPRSPAEVNNNPCLENNGGCSHLCFALPGLHTPKCDCAFGTLQSDGKNCAISTENFLIFALSNSLRSLHLDPENHSPPFQTINVERTVMSLDYDSVSDRIYFTQNLASGVGQISYATLSSGIHTPTVIASGIGTADGIAFDWITRRIYYSDYLNQMINSMAEDGSNRTVIARVPKPRAIVLDPCQGYLYWADWDTHAKIERATLGGNFRVPIVNSSLVMPSGLTLDYEEDLLYWVDASLQRIERSTLTGVDREVIVNAAVHAFGLTLYGQYIYWTDLYTQRIYRANKYDGSGQIAMTTNLLSQPRGINTVVKNQKQQCNNPCEQFNGGCSHICAPGPNGAECQCPHEGNWYLANNRKHCIVDNGERCGASSFTCSNGRCISEEWKCDNDNDCGDGSDEMESVCALHTCSPTAFTCANGRCVQYSYRCDYYNDCGDGSDEAGCLFRDCNATTEFMCNNRRCIPREFICNGVDNCHDNNTSDEKNCPDRTCQSGYTKCHNSNICIPRVYLCDGDNDCGDNSDENPTYCTTHTCSSSEFQCASGRCIPQHWYCDQETDCFDASDEPASCGHSERTCLADEFKCDGGRCIPSEWICDGDNDCGDMSDEDKRHQCQNQNCSDSEFLCVNDRPPDRRCIPQSWVCDGDVDCTDGYDENQNCTRRTCSENEFTCGYGLCIPKIFRCDRHNDCGDYSDERGCLYQTCQQNQFTCQNGRCISKTFVCDEDNDCGDGSDELMHLCHTPEPTCPPHEFKCDNGRCIEMMKLCNHLDDCLDNSDEKGCGINECHDPSISGCDHNCTDTLTSFYCSCRPGYKLMSDKRTCVDIDECTEMPFVCSQKCENVIGSYICKCAPGYLREPDGKTCRQNSNIEPYLIFSNRYYLRNLTIDGYFYSLILEGLDNVVALDFDRVEKRLYWIDTQRQVIERMFLNKTNKETIINHRLPAAESLAVDWVSRKLYWLDARLDGLFVSDLNGGHRRMLAQHCVDANNTFCFDNPRGLALHPQYGYLYWADWGHRAYIGRVGMDGTNKSVIISTKLEWPNGITIDYTNDLLYWADAHLGYIEYSDLEGHHRHTVYDGALPHPFAITIFEDTIYWTDWNTRTVEKGNKYDGSNRQTLVNTTHRPFDIHVYHPYRQPIVSNPCGTNNGGCSHLCLIKPGGKGFTCECPDDFRTLQLSGSTYCMPMCSSTQFLCANNEKCIPIWWKCDGQKDCSDGSDELALCPQRFCRLGQFQCSDGNCTSPQTLCNAHQNCPDGSDEDRLLCENHHCDSNEWQCANKRCIPESWQCDTFNDCEDNSDEDSSHCASRTCRPGQFRCANGRCIPQAWKCDVDNDCGDHSDEPIEECMSSAHLCDNFTEFSCKTNYRCIPKWAVCNGVDDCRDNSDEQGCEERTCHPVGDFRCKNHHCIPLRWQCDGQNDCGDNSDEENCAPRECTESEFRCVNQQCIPSRWICDHYNDCGDNSDERDCEMRTCHPEYFQCTSGHCVHSELKCDGSADCLDASDEADCPTRFPDGAYCQATMFECKNHVCIPPYWKCDGDDDCGDGSDEELHLCLDVPCNSPNRFRCDNNRCIYSHEVCNGVDDCGDGTDETEEHCRKPTPKPCTEYEYKCGNGHCIPHDNVCDDADDCGDWSDELGCNKGKERTCAENICEQNCTQLNEGGFICSCTAGFETNVFDRTSCLDINECEQFGTCPQHCRNTKGSYECVCADGFTSMSDRPGKRCAAEGSSPLLLLPDNVRIRKYNLSSERFSEYLQDEEYIQAVDYDWDPKDIGLSVVYYTVRGEGSRFGAIKRAYIPNFESGRNNLVQEVDLKLKYVMQPDGIAVDWVGRHIYWSDVKNKRIEVAKLDGRYRKWLISTDLDQPAAIAVNPKLGLMFWTDWGKEPKIESAWMNGEDRNILVFEDLGWPTGLSIDYLNNDRIYWSDFKEDVIETIKYDGTDRRVIAKEAMNPYSLDIFEDQLYWISKEKGEVWKQNKFGQGKKEKTLVVNPWLTQVRIFHQLRYNKSVPNLCKQICSHLCLLRPGGYSCACPQGSSFIEGSTTECDAAIELPINLPPPCRCMHGGNCYFDETDLPKCKCPSGYTGKYCEMAFSKGISPGTTAVAVLLTILLIVVIGALAIAGFFHYRRTGSLLPALPKLPSLSSLVKPSENGNGVTFRSGADLNMDIGVSGFGPETAIDRSMAMSEDFVMEMGKQPIIFENPMYSARDSAVKVVQPIQVTVSENVDNKNYGSPINPSEIVPETNPTSPAADGTQVTKWNLFKRKSKQTTNFENPIYAQMENEQKESVAATPPPSPSLPAKPKPPSRRDPTPTYSATEDTFKDTANLVKEDSEV

SEQ ID NO: 8017 - protein, 1225 aa, Homo Sapiens
MDRGPAAVACTLLLALVACLAPASGQECDSAHFRCGSGHCIPADWRCDGTKDCSDDADEIGCAVVTCQQGYFKCQSEGQCIPNSWVCDQDQDCDDGSDERQDCSQSTCSSHQITCSNGQCIPSEYRCDHVRDCPDGADENDCQYPTCEQLTCDNGACYNTSQKCDWKVDCRDSSDEINCTEICLHNEFSCGNGECIPRAYVCDHDNDCQDGSDEHACNYPTCGGYQFTCPSGRCIYQNWVCDGEDDCKDNGDEDGCESGPHDVHKCSPREWSCPESGRCISIYKVCDGILDCPGREDENNTSTGKYCSMTLCSALNCQYQCHETPYGGACFCPPGYIINHNDSRTCVEFDDCQIWGICDQKCESRPGRHLCHCEEGYILERGQYCKANDSFGEASIIFSNGRDLLIGDIHGRSFRILVESQNRGVAVGVAFHYHLQRVFWTDTVQNKVFSVDINGLNIQEVLNVSVETPENLAVDWVNNKIYLVETKVNRIDMVNLDGSYRVTLITENLGHPRGIAVDPTVGKTVVHGGSLIPHPFGVSLFEGQVFFTDWTKMAVLKANKFTETNPQVYYQASLRPYGVTVYHSLRQPYATNPCKDNNGGCEQVCVLSHRTDNDGLGFRCKCTFGFQLDTDERHCIGREILAANRVENVESLAFDWISKNLYWTDSHYKSISVMRLADKTRRTVVQYLNNPRSVVVHPFAGYLFFTDWFRPAKIMRAWSDGSHLLPVINTTLGWPNGLAIDWAASRLYWVDAYFDKIEHSTFDGLDRRRLGHIEQMTHPFGLAIFGEHLFFTDWRLGAIIRVRKADGGEMTVIRSGIAYILHLKSYDVNIQTGSNACNQPTHPNGDCSHFCFPVPNFQRVCGCPYGMRLASNHLTCEGDPTNEPPTEQCGLFSFPCKNGRCVPNYYLCDGVDDCHDNSDEQLCGTLNNTCSSSAFTCGHGECIPAHWRCDKRNDCVDGSDEHNCPTHAPASCLDTQYTCDNHQCISKNWVCDTDNDCGDGSDEKNCNSTETCQPSQFNCPNHRCIDLSFVCDGDKDCVDGSDEVGCVLNCTASQFKCASGDKCIGVTNRCDGVFDCSDNSDEAGCPTRPPGMCHSDEFQCQEDGICIPNFWECDGHPDCLYGSDEHNACVPKTCPSSYFHCDNGNCIHRAWLCDRDNDCGDMSDEKDCPTQPFRCPSWQWQCLGHNICVNLSVVCDGIFDCPNGTDESPLCSKFPDHSLLAINSF

SEQ ID NO: 8018 - protein, 1905 aa, Homo Sapiens
MRRQWGALLLGALLCAHGLASSPECACGRSHFTCAVSALGECTCIPAQWQCDGDNDCGDHSDEDGCILPTCSPLDFHCDNGKCIRRSWVCDGDNDCEDDSDEQDCPPRECEEDEFPCQNGYCIRSLWHCDGDNDCGDNSDEQCDMRKCSDKEFRCSDGSCIAEHWYCDGDTDCKDGSDEENCPSAVPAPPCNLEEFQCAYGRCILDIYHCDGDDDCGDWSDESDCSSHQPCRSGEFMCDSGLCINAGWRCDGDADCDDQSDERNCTTSMCTAEQFRCHSGRCVRLSWRCDGEDDCADNSDEENCENTGSPQCALDQFLCWNGRCIGQRKLCNGVNDCGDNSDESPQQNCRPRTGEENCNVNNGGCAQKCQMVRGAVQCTCHTGYRLTEDGHTCQDVNECAEEGYCSQGCTNSEGAFQCWCETGYELRPDRRSCKALGPEPVLLFANRIDIRQVLPHRSEYTLLLNNLENAIALDFHHRRELVFWSDVTLDRILRANLNGSNVEEVVSTGLESPGGLAVDWVHDKLYWTDSGTSRIEVANLDGAHRKVLLWQNLEKPRAIALHPMEGTIYWTDWGNTPRIEASSMDGSGRRIIADTHLFWPNGLTIDYAGRRMYWVDAKHHVIERANLDGSHRKAVISQGLPHPFAITVFEDSLYWTDWHTKSINSANKFTGKNQEIIRNKLHFPMDIHTLHPQRQPAGKNRCGDNNGGCTHLCLPSGQNYTCACPTGFRKISSHACAQSLDKFLLFARRMDIRRISFDTEDLSDDVIPLADVRSAVALDWDSRDDHVYWTDVSTDTISRAKWDGTGQEVVVDTSLESPAGLAIDWVTNKLYWTDAGTDRIEVANTDGSMRTVLIWENLDRPRDIVVEPMGGYMYWTDWGASPKIERAGMDASGRQVIISSNLTWPNGLAIDYGSQRLYWADAGMKTIEFAGLDGSKRKVLIGSQLPHPFGLTLYGERIYWTDWQTKSIQSADRLTGLDRETLQENLENLMDIHVFHRRRPPVSTPCAMENGGCSHLCLRSPNPSGFSCTCPTGINLLSDGKTCSPGMNSFLIFARRIDIRMVSLDIPYFADVVVPINITMKNTIAIGVDPQEGKVYWSDSTLHRISRANLDGSQHEDIITTGLQTTDGLAVDAIGRKVYWTDTGTNRIEVGNLDGSMRKVLVWQNLDSPRAIVLYHEMGFMYWTDWGENAKLERSGMDGSDRAVLINNNLGWPNGLTVDKASSQLLWADAHTERIEAADLNGANRHTLVSPVQHPYGLTLLDSYIYWTDWQTRSIHRADKGTGSNVILVRSNLPGLMDMQAVDRAQPLGFNKCGSRNGGCSHLCLPRPSGFSCACPTGIQLKGDGKTCDPSPETYLLFSSRGSIRRISLDTSDHTDVHVPVPELNNVISLDYDSVDGKVYYTDVFLDVIRRADLNGSNMETVIGRGLKTTDGLAVDWVARNLYWTDTGRNTIEASRLDGSCRKVLINNSLDEPRAIAVFPRKGYLFWTDWGHIAKIERANLDGSERKVLINTDLGWPNGLTLDYDTRRIYWVDAHLDRIESADLNGKLRQVLVSHVSHPFALTQQDRWIYWTDWQTKSIQRVDKYSGRNKETVLANVEGLMDIIVVSPQRQTGTNACGVNNGGCTHLCFARASDFVCACPDEPDSRPCSLVPGLVPPAPRATGMSEKSPVLPNTPPTTLYSSTTRTRTSLEEVEGRCSERDARLGLCARSNDAVPAAPGEGLHISYAIGGLLSILLILVVIAALMLYRHKKSKFTDPGMGNLTYSNPSYRTSTQEVKIEAIPKPAMYNQLCYKKEGGPDHNYTKEKIKIVEGICLLSGDDAEWDDLKQLRSSRGGLLRDHVCMKTDTVSIQASSGSLDDTETEQLLQEEQSECSSVHTAATPERRGSLPDTGWKHERKLSSESQV

SEQ ID NO: 8019 - protein, 133 aa, Homo Sapiens
MRRQWGALLLGALLCAHVLPTCSPLDFHCDNGKCIRRSWVCDGDNDCEDDSDEQDCPPRECEEDEFPCQNGYCIRSLWHCDGDNDCGDNSDEQCDMRKCSDKEFRCSDGSCIAEHWYCDGDTDCKDGSDEENC

SEQ ID NO: 8020 - protein, 357 aa, Homo Sapiens
MAPRRVRSFLRGLPALLLLLLFLGPWPAASHGGKYSREKNQPKPSPKRESGEEFRMEKLNQLWEKAQRLHLPPVRLAELHADLKIQERDELAWKKLKLDGLDEDGEKEARLIRNLNVILAKYGLDGKKDARQVTSNSLSGTQEDGLDDPRLEKLWHKAKTSGKFSGEELDKLWREFLHHKEKVHEYNVLLETLSRTEEIHENVISPSDLSDIKGSVLHSRHTELKEKLRSINQGLDRLRRVSHQGYSTEAEFEEPRVIDLWDLAQSANLTDKELEAFREELKHFEAKIEKHNHYQKQLEIAHEKLRHAESVGDGERVSRSREKHALLEGRTKELGYTVKKHLQDLSGRISRARHNEL

SEQ ID NO: 8021 - protein, 105 aa, Homo Sapiens
MAPRRVRSFLRGLPALLLLLLFLGPWPAASHGGKYSREKNQPKPSPKRESGEEFRMEKLNQLWEKAQRNLPVASLLRGQFLAVSWSVLLVAHRLLPFVRSCIFLP

SEQ ID NO: 8022 - protein, 104 aa, Homo Sapiens
MRVVTIVILLCFCKAAELRKASPGSVRSRVNHGRAGGGRRGSNPVKRYAPGLPCDVYTYLHEKYLDCQERKLVYVLPGWPQDLLHMLLARNKIRTLKNNMFSKF

SEQ ID NO: 8023 - protein, 313 aa, Homo Sapiens
MRVVTIVILLCFCKAAELRKASPGSVRSRVNHGRAGGGRRGSNPVKRYAPGLPCDVYTYLHEKYLDCQERKLVYVLPGWPQDLLHMLLARNKIRTLKNNMFSKFKKLKSLDLQQNEISKIESEAFFGLNKLTTLLLQHNQIKVLTEEVFIYTPLLSYLRLYDNPWHCTCEIETLISMLQIPRNRNLGNYAKCESPQEQKNKKLRQIKSEQLCNEEEKEQLDPKPQVSGRPPVIKPEVDSTFCHNYVFPIQTLDCKRKELKKVPNNIPPDIVKLDLSYNKINQLRPKEFEDVHELKKLNLSSNGIEFIDPGSLR

SEQ ID NO: 8024 - protein, 441 aa, Homo Sapiens
MRVVTIVILLCFCKAAELRKASPGSVRSRVNHGRAGGGRRGSNPVKRYAPGLPCDVYTYLHEKYLDCQERKLVYVLPGWPQDLLHMLLARNKIRTLKNNMFSKFKKLKSLDLQQNEISKIESEAFFGLNKLTTLLLQHNQIKVLTEEVFIYTPLLSYLRLYDNPWHCTCEIETLISMLQIPRNRNLGNYAKCESPQEQKNKKLRQIKSEQLCNEEEKEQLDPKPQVSGRPPVIKPEVDSTFCHNYVFPIQTLDCKRKELKKVPNNIPPDIVKLDLSYNKINQLRPKEFEDVHELKKLNLSSNGIEFIDPAAFLGLTHLEELDLSNNSLQNFDYGVLEDLYFLKLLWLRDNPWRCDYNIHYLYYWLKHHYNVHFNGLECKTPEEYKGWSVGKYIRSYYEECPKDKLPAYPESFDQDTEDDEWEKKHRDHTAKKQSVIITIVG

SEQ ID NO: 8025 - protein, 186 aa, Homo Sapiens
MRPQILLLLALLTLGLAAQHQDKVPCKMVDKKVSCQVLGLLQVPSVLPPDTETLDLSGNQLRSILASPLGFYTALRHLDLSTNEISFLQPGAFQALTHLEHLSLAHNRLAMATALSAGGLGPLPRVTSLDLSGNSLYSGLLERLLGEAPSLHTLSLAENSLTRLTRHTFRDMPALEQLDLHSNVLM

SEQ ID NO: 8026 - protein, 662 aa, Homo Sapiens
MRPQILLLLALLTLGLAAQHQDKVPCKMVDKKVSCQVLGLLQVPSVLPPDTETLDLSGNQLRSILASPLGFYTALRHLDLSTNEISFLQPGAFQALTHLEHLSLAHNRLAMATALSAGGLGPLPRVTSLDLSGNSLYSGLLERLLGEAPSLHTLSLAENSLTRLTRHTFRDMPALEQLDLHSNVLMDIEDGAFEGLPRLTHLNLSRNSLTCISDFSLQQLRVLDLSCNSIEAFQTASQPQAEFQLTWLDLRENKLLHFPDLAALPRLIYLNLSNNLIRLPTGPPQDSKGIHAPSEGWSALPLSAPSGNASGRPLSQLLNLDLSYNEIELIPDSFLEHLTSLCFLNLSRNCLRTFEARRLGSLPCLMLLDLSHNALETLELGARALGSLRTLLLQGNALRDLPPYTFANLASLQRLNLQGNRVSPCGGPDEPGPSGCVAFSGITSLRSLSLVDNEIELLRAGAFLHTPLTELDLSSNPGLEVATGALGGLEASLEVLALQGNGLMVLQVDLPCFICLKRLNLAENRLSHLPAWTQAVSLEVLDLRNNSFSLLPGSAMGGLETSLRRLYLQGNPLSCCGNGWLAAQLHQGRVDVDATQDLICRFSSQEEVSLSHVRPEDCEKGGLKNINLIIILTFILVSAILLTTLAACCCVRRQKFNQQYKA

SEQ ID NO: 8027 - protein, 662 aa, Homo Sapiens; identical to SEQ ID NO: 8026

SEQ ID NO: 8028 - protein, 662 aa, Homo Sapiens; identical to SEQ ID NO: 8026

SEQ ID NO: 8029 - protein, 55 aa, Homo Sapiens
MNLVDLWLTRSLSMCLLLQSFVLMILCFHSASMCPKGCLCSSSGGLNVTCSNANL

SEQ ID NO: 8030 - protein, 163 aa, Homo Sapiens
MNLVDLWLTRSLSMCLLLQSFVLMILCFHSASMCPKGCLCSSSGGLNVTCSNANLKEIPRDLPPETVLLYLDSNQITSIPNEIFKDLHQLRVLNLSKNGIEFIDEHAFKGVAETLQTLDLSDNRIQSVHKNAFNNLKARARIANNPWHCDCTLQQVLRSMASN

SEQ ID NO: 8031 - protein, 259 aa, Homo Sapiens
MNLVDLWLTRSLSMCLLLQSFVLMILCFHSASMCPKGCLCSSSGGLNVTCSNANLKEIPRDLPPETVLLYLDSNQITSIPNEIFKDLHQLRVLNLSKNGIEFIDEHAFKGVAETLQTLDLSDNRIQSVHKNAFNNLKARARIANNPWHCDCTLQQVLRSMASNHETAHNVICKTSVLDEHAGRPFLNAANDADLCNLPKKTTDYAMLVTMFGWFTMVISYVVYYVRQNQEDARRHLEYLKSLPSRQKKADEPDDISTVV

SEQ ID NO: 8032 - protein, 259 aa, Homo Sapiens; identical to SEQ ID NO: 8031

SEQ ID NO: 8033 - protein, 259 aa, Homo Sapiens; identical to SEQ ID NO: 8031

SEQ ID NO: 8034 - protein, 238 aa, Homo Sapiens
MARARGSPCPPLPPGRMSWPHGALLFLWLFSPPLGAGGGGVAVTSAAGGGSPPATSCPVACSCSNQASRVICTRRDLAEVPASIPVNTRYLNLQENGIQVIRTDTFKHLRHLEILQLSKNLVRKIEVGAFNGLPSLNTLELFDNRLTTVPTQAFEYLSKLRELWLRNNPIESIPSYAFNRVPSLRRLDLGELKRLEYISEAAFEGLVNLRYLNLGMCNLKDIPNLTALVRLEELELSG

SEQ ID NO: 8035 - protein, 713 aa, Homo Sapiens
MARARGSPCPPLPPGRMSWPHGALLFLWLFSPPLGAGGGGVAVTSAAGGGSPPATSCPVACSCSNQASRVICTRRDLAEVPASIPVNTRYLNLQENGIQVIRTDTFKHLRHLEILQLSKNLVRKIEVGAFNGLPSLNTLELFDNRLTTVPTQAFEYLSKLRELWLRNNPIESIPSYAFNRVPSLRRLDLGELKRLEYISEAAFEGLVNLRYLNLGMCNLKDIPNLTALVRLEELELSGNRLDLIRPGSFQGLTSLRKLWLMHAQVATIERNAFDDLKSLEELNLSHNNLMSLPHDLFTPLHRLERVHLNHNPWHCNCDVLWLSWWLKETVPSNTTCCARCHAPAGLKGRYIGELDQSHFTCYAPVIVEPPTDLNVTEGMAAELKCRTGTSMTSVNWLTPNGTLMTHGSYRVRISVLHDGTLNFTNVTVQDTGQYTCMVTNSAGNTTASATLNVSAVDPVAAGGTGSGGGGPGGSGGVGGGSGGYTYFTTVTVETLETQPGEEALQPRGTEKEPPGPTTDGVWGGGRPGDAAGPASSSTTAPAPRSSRPTEKAFTVPITDVTENALKDLDDVMKTTKIIIGCFVAITFMAAVMLVAFYKLRKQHQLHKHHGPTRTVEIINVEDELPAASAVSVAAAAAVASGGGVGGDSHLALPALERDHLNHHHYVAAAFKAHYSSNPSGGGCGGKGPPGLNSIHEPLLFKSGSKENVQETQI

SEQ ID NO: 8036 - protein, 713 aa, Homo Sapiens; identical to SEQ ID NO: 8035

SEQ ID NO: 8037 - protein, 71 aa, Homo Sapiens
MCGLQFSLPCLRLFLVVTCYLLLLLHKEILGCSSVCQLCTGRQINCRNLGLSSIPKNFPESTVFLLASKGP

SEQ ID NO: 8038 - protein, 622 aa, Homo Sapiens
MCGLQFSLPCLRLFLVVTCYLLLLLHKEILGCSSVCQLCTGRQINCRNLGLSSIPKNFPESTVFLYLTGNNISYINESELTGLHSLVALYLDNSNILYVYPKAFVQLRHLYFLFLNNNFIKRLDPGIFKGLLNLRNLYLQYNQVSFVPRGVFNDLVSVQYLNLQRNRLTVLGSGTFVGMVALRILDLSNNNILRISESGFQHLENLACLYLGSNNLTKVPSNAFEVLKSLRRLSLSHNPIEAIQPFAFKGLANLEYLLLKNSRIRNVTRDGFSGINNLKHLILSHNDLENLNSDTFSLLKNLIYLKLDRNRIISIDNDTFENMGASLKILNLSFNNLTALHPRVLKPLSSLIHLQANSNPWECNCKLLGLRDWLASSAITLNIYCQNPPSMRGRALRYINITNCVTSSINVSRAWAVVKSPHIHHKTTALMMAWHKVTTNGSPLENTETENITFWERIPTSPAGRFFQENAFGNPLETTAVLPVQIQLTTSVTLNLEKNSALPNDAASMSGKTSLICTQEVEKLNEAFDILLAFFILACVLIIFLIYKVVQFKQKLKASENSRENRLEYYSFYQSARYNVTASICNTSPNSLESPGLEQIRLHKQIVPENEAQVILFEHSAL

SEQ ID NO: 8039 - protein, 708 aa, Homo Sapiens
MKDMPLRIHVLLGLAITTLVQAVDKKVDCPRLCTCEIRPWFTPRSIYMEASTVDCNDLGLLTFPARLPANTQILLLQTNNIAKIEYSTDFPVNLTGLDLSQNNLSSVTNINVKKMPQLLSVYLEENKLTELPEKCLSELSNLQELYINHNLLSTISPGAFIGLHNLLRLHLNSNRLQMINSKWFDALPNLEILMIGENPIIRIKDMNFKPLINLRSLVIAGINLTEIPDNALVGLENLESISFYDNRLIKVPHVALQKVVNLKFLDLNKNPINRIRRGDFSNMLHLKELGINNMPELISIDSLAVDNLPDLRKIEATNNPRLSYIHPNAFFRLPKLESLMLNSNALSALYHGTIESLPNLKEISIHSNPIRCDCVIRWMNMNKTNIRFMEPDSLFCVDPPEFQGQNVRQVHFRDMMEICLPLIAPESFPSNLNVEAGSYVSFHCRATAEPQPEIYWITPSGQKLLPNTLTDKFYVHSEGTLDINGVTPKEGGLYTCIATNLVGADLKSVMIKVDGSFPQDNNGSLNIKIRDIQANSVLVSWKASSKILKSSVKWTAFVKTENSHAAQSARIPSDVKVYNLTHLNPSTEYKICIDIPTIYQKNRKKCVNVTTKGLHPDQKEYEKNNTTTLMACLGGLLGIIGVICLISCLSPEMNCDGGHSYVRNYLQKPTFALGELYPPLINLWEAGKEKSTSLKVKATVIGLPTNMS

SEQ ID NO: 8040 - protein, 708 aa, Homo Sapiens; identical to SEQ ID NO: 8039

SEQ ID NO: 8041 - protein, 273 aa, Homo Sapiens
MKDMPLRIHVLLGLAITTLVQAVDKKVDCPRLCTCEIRPWFTPRSIYMEASTVDCNDLGLLTFPARLPANTQILLLQTNNIAKIEYSTDFPVNLTGLDLSQNNLSSVTNINVKKMPQLLSVYLEENKLTELPEKCLSELSNLQELYINHNLLSTISPGAFIGLHNLLRLHLNSNRLQMINSKWFDALPNLEILMIGENPIIRIKDMNFKPLINLRSLVIAGINLTEIPDNALVGLENLESISFYDNRLIKVPHVALQKVVNLKFLDLNKNPIN

SEQ ID NO: 8042 - protein, 708 aa, Homo Sapiens; identical to SEQ ID NO: 8039

SEQ ID NO: 8043 - protein, 109 aa, Homo Sapiens
MDFLLLGLCLYWLLRRPSGVVLCLLGACFQMLPAAPSGCPQLCRCEGRLLYCEALNLTEAPHNLSGLLGLSLRYNSLSELRAGQFTGLMQLTWLYLDHNHICSVQGDAF

SEQ ID NO: 8044 - protein, 183 aa, Homo Sapiens
MDFLLLGLCLYWLLRRPSGVVLCLLGACFQMLPAAPSGCPQLCRCEGRLLYCEALNLTEAPHNLSGLLGLSLRYNSLSELRAGQFTGLMQLTWLYLDHNHICSVQGDAFQKLRRVKELTLSSNQITQLPNTTFRPMPNLRSVDLSYNKLQALAPDLFHGLRKLTTLHMRANAIQFVPVRIFQD

SEQ ID NO: 8045 - protein, 223 aa, Homo Sapiens
MDFLLLGLCLYWLLRRPSGVVLCLLGACFQMLPAAPSGCPQLCRCEGRLLYCEALNLTEAPHNLSGLLGLSLRYNSLSELRAGQFTGLMQLTWLYLDHNHICSVQGDAFQKLRRVKELTLSSNQITQLPNTTFRPMPNLRSVDLSYNKLQALAPDLFHGLRKLTTLHMRANAIQFVPVRIFQDCRSLKFLDIGYNQLKSLARNSFAGLFKLTELHLEHNDLVK

SEQ ID NO: 8046 - protein, 522 aa, Homo Sapiens
MDFLLLGLCLYWLLRRPSGVVLCLLGACFQMLPAAPSGCPQLCRCEGRLLYCEALNLTEAPHNLSGLLGLSLRYNSLSELRAGQFTGLMQLTWLYLDHNHICSVQGDAFQKLRRVKELTLSSNQITQLPNTTFRPMPNLRSVDLSYNKLQALAPDLFHGLRKLTTLHMRANAIQFVPVRIFQDCRSLKFLDIGYNQLKSLARNSFAGLFKLTELHLEHNDLVKVNFAHFPRLISLHSLCLRRNKVAIVVSSLDWVWNLEKMDLSGNEIEYMEPHVFETVPHLQSLQLDSNRLTYIEPRILNSWKSLTSITLAGNLWDCGRNVCALASWLNNFQGRYDGNLQCASPEYAQGEDVLDAVYAFHLCEDGAEPTSGHLLSAVTNRSDLGPPASSATTLADGGEGQHDGTFEPATVALPGGEHAENAVQIHKVVTGTMALIFSFLIVVLVLYVSWKCFPASLRQLRQCFVTQRRKQKQKQTMHQMAAMSAQEYYVDYKPNHIEGALVIINEYGSCTCHQQPARECEV

SEQ ID NO: 8047 - protein, 522 aa, Homo Sapiens; identical to SEQ ID NO: 8046

SEQ ID NO: 8048 - protein, 522 aa, Homo Sapiens; identical to SEQ ID NO: 8046

SEQ ID NO: 8049 - protein, 522 aa, Homo Sapiens; identical to SEQ ID NO: 8046

SEQ ID NO: 8050 - protein, 38 aa, Homo Sapiens
MAVISAPRALLWPSEAADLAFTFQLPADYPSTPVLGLS

SEQ ID NO: 8051 - protein, 516 aa, Homo Sapiens
MGLHFKWPLGAPMLAAIYAMSMVLKMLPALGMACPPKCRCEKLLFYCDSQGFHSVPNATDKGSLGLSLRHNHITELERDQFASFSQLTWLHLDHNQISTVKEDAFQGLYKLKELILSSNKIFYLPNTTFTQLINLQNLDLSFNQLSSLHPELFYGLRKLQTLHLRSNSLRTIPVRLFWDCRSLEFLDLSTNRLRSLARNGFAGLIKLRELHLEHNQLTKINFAHFLRLSSLHTLFLQWNKISNLTCGMEWTWGTLEKLDLTGNEIKAIDLTVFETMPNLKILLMDNNKLNSLDSKILNSLRSLTTVGLSGNLWECSARICALASWLGSFQGRWEHSILCHSPDHTQGEDILDAVHGFQLCWNLSTTVTVMATTYRDPTTEYTKRISSSSYHVGDKEIPTTAGIAVTTEEHFPEPDNAIFTQRVITGTMALLFSFFFIIFIVFISRKCCPPTLRRIRQCSMVQNHRQLRSQTRLHMSNMSDQGPYNEYEPTHEGPFIIINGYGQCKCQQLPYKECEV

SEQ ID NO: 8052 - protein, 77 aa, Homo Sapiens
MVFISRKCCPPTLRRIRQCSMVQNHRQLRSQTRLHMSNMSDQGPYNEYEPTHEGPFIIINGYGQCKCQQLPYKECEV

SEQ ID NO: 8053 - protein, 590 aa, Homo Sapiens
MGFHLITQLKGMSVVLVLLPTLLLVMLTGAQRACPKNCRCDGKIVYCESHAFADIPENISGGSQGLSLRFNSIQKLKSNQFAGLNQLIWLYLDHNYISSVDEDAFQGIRRLKELILSSNKITYLHNKTFHPVPNLRNLDLSYNKLQTLQSEQFKGLRKLIILHLRSNSLKTVPIRVFQDCRNLDFLDLGYNRLRSLSRNAFAGLLKLKELHLEHNQFSKINFAHFPRLFNLRSIYLQWNRIRSISQGLTWTWSSLHNLDLSGNDIQGIEPGTFKCLPNLQKLNLDSNKLTNISQETVNAWISLISITLSGNMWECSRSICPLFYWLKNFKGNKESTMICAGPKHIQGEKVSDAVETYNICSEVQVVNTERSHLVPQTPQKPLIIPRPTIFKPDVTQSTFETPSPSPGFQIPGAEQEYEHVSFHKIIAGSVALFLSVAMILLVIYVSWKRYPASMKQLQQHSLMKRRRKKARESERQMNSPLQEYYVDYKPTNSETMDISVNGSGPCTYTISGSRECEMPHHMKPLPYYSYDQPVIGYCQAHQPLHVTKGYETVSPEQDESPGLELGRDHSFIATIARSAAPAIYLERIAN

SEQ ID NO: 8054 - protein, 518 aa, Homo Sapiens
MGFHLITQLKGMSVVLVLLPTLLLVMLTGAQRACPKNCRCDGKIVYCESHAFADIPENISGGSQGLSLRFNSIQKLKSNQFAGLNQLIWLYLDHNYISSVDEDAFQGIRRLKELILSSNKITYLHNKTFHPVPNLRNLDLSYNKLQTLQSEQFKGLRKLIILHLRSNSLKTVPIRVFQDCRNLDFLDLGYNRLRSLSRNAFAGLLKLKELHLEHNQFSKINFAHFPRLFNLRSIYLQWNRIRSISQGLTWTWSSLHNLDLSGNDIQGIEPGTFKCLPNLQKLNLDSNKLTNISQETVNAWISLISITLSGNMWECSRSICPLFYWLKNFKGNKESTMICAGPKHIQGEKVSDAVETYNICSEVQVVNTERSHLVPQTPQKPLIIPRPTIFKPDVTQSTFETPSPSPGFQIPGAEQEYEHVSFHKIIAGSVALFLSVAMILLVIYVSWKRYPASMKQLQQHSLMKRRRKKARESERQMNSPLQEYYVDYKPTNSETMDISVNGSGPCTYTISGSRECEV

SEQ ID NO: 8055 - protein, 590 aa, Homo Sapiens; identical to SEQ ID NO: 8053

SEQ ID NO: 8056 - protein, 591 aa, Homo Sapiens
MPGFHLITQLKGMSVVLVLLPTLLLVMLTGAQRACPKNCRCDGKIVYCESHAFADIPENISGGSQGLSLRFNSIQKLKSNQFAGLNQLIWLYLDHNYISSVDEDAFQGIRRLKELILSSNKITYLHNKTFHPVPNLRNLDLSYNKLQTLQSEQFKGLRKLIILHLRSNSLKTVPIRVFQDCRNLDFLDLGYNRLRSLSRNAFAGLLKLKELHLEHNQFSKINFAHFPRLFNLRSIYLQWNRIRSISQGLTWTWSSLHNLDLSGNDIQGIEPGTFKCLPNLQKLNLDSNKLTNISQETVNAWISLISITLSGNMWECSRSICPLFYWLKNFKGNKESTMICAGPKHIQGEKVSDAVETYNICSEVQVVNTERSHLVPQTPQKPLIIPRPTIFKPDVTQSTFETPSPSPGFQIPGAEQEYEHVSFHKIIAGSVALFLSVAMILLVIYVSWKRYPASMKQLQQHSLMKRRRKKARESERQMNSPLQEYYVDYKPTNSETMDISVNGSGPCTYTISGSRECEMPHHMKPLPYYSYDQPVIGYCQAHQPLHVTKGYETVSPEQDESPGLELGRDHSFIATIARSAAPAIYLERIAN

SEQ ID NO: 8057 - protein, 519 aa, Homo Sapiens
MPGFHLITQLKGMSVVLVLLPTLLLVMLTGAQRACPKNCRCDGKIVYCESHAFADIPENISGGSQGLSLRFNSIQKLKSNQFAGLNQLIWLYLDHNYISSVDEDAFQGIRRLKELILSSNKITYLHNKTFHPVPNLRNLDLSYNKLQTLQSEQFKGLRKLIILHLRSNSLKTVPIRVFQDCRNLDFLDLGYNRLRSLSRNAFAGLLKLKELHLEHNQFSKINFAHFPRLFNLRSIYLQWNRIRSISQGLTWTWSSLHNLDLSGNDIQGIEPGTFKCLPNLQKLNLDSNKLTNISQETVNAWISLISITLSGNMWECSRSICPLFYWLKNFKGNKESTMICAGPKHIQGEKVSDAVETYNICSEVQVVNTERSHLVPQTPQKPLIIPRPTIFKPDVTQSTFETPSPSPGFQIPGAEQEYEHVSFHKIIAGSVALFLSVAMILLVIYVSWKRYPASMKQLQQHSLMKRRRKKARESERQMNSPLQEYYVDYKPTNSETMDISVNGSGPCTYTISGSRECEV

SEQ ID NO: 8058 - protein, 24 aa, Homo Sapiens
MSVVLVLLPTLLLVMLTGAQRACP

SEQ ID NO: 8059 - protein, 93 aa, Homo Sapiens
MLAPGSSPGQRGRLALQWRQVSWITCWIALYAVEALPTCPFSCKCDSRSLEVDCSGLGLTTVPPDVPAATRTLLLLNNKLSALPSWAFANLSS

SEQ ID NO: 8060 - protein, 96 aa, Homo Sapiens
MLAPGSSPGQRGRLALQWRQVSWITCWIALYAVEALPTCPFSCKCDSRSLEVDCSGLGLTTVPPDVPAATRTLLLLNNKLSALPSWAFANLSSLQR

SEQ ID NO: 8061 - protein, 370 aa, Homo Sapiens
MLAPGSSPGQRGRLALQWRQVSWITCWIALYAVEALPTCPFSCKCDSRSLEVDCSGLGLTTVPPDVPAATRTLLLLNNKLSALPSWAFANLSSLQRLDLSNNFLDRLPRSIFGDLTNLTELQLRNNSIRTLDRDLLRHSPLLRHLDLSINGLAQLPPGLFDGLLALRSLSLRSNRLQNLDRLTFEPLANLQLLQVGDNPWECDCNLREFKHWMEWFSYRGGRLDQLACTLPKELRGKDMRMVPMEMFNYCSQLEDENSSAGLDIPGPPCTKASPEPAKPKPGAEPEPEPSTACPQKQRHRPASVRRAMGTVIIAGVVCGVVCIMMVVAAAYGCIYASLMAKYHRELKKRQPLMGDPEGEHEDQKQISSVA

SEQ ID NO: 8062 - protein, 370 aa, Homo Sapiens; identical to SEQ ID NO: 8061

SEQ ID NO: 8063 - protein, 370 aa, Homo Sapiens; identical to SEQ ID NO: 8061

SEQ ID NO: 8064 - protein, 114 aa, Homo Sapiens
DSVRTVRVVATKQGNAVTLGDYYQGRRITITGNADLTFDQTAWGDSGVYYCSVVSAQDLQGNNEAYAELIVLGRTSGVAELLPGFQAGPIEVYAAGKAATSGVPSIYAPSTYAH

SEQ ID NO: 8065 - protein, 493 aa, Homo Sapiens
MALLAGGLSRGLGSHPAAAGRDAVVFVWLLLSTWCTAPARAIQVTVSNPYHVVILFQPVTLPCTYQMTSTPTQPIVIWKYKSFCRDRIADAFSPASVDNQLNAQLAAGNPGYNPYVECQDSVRTVRVVATKQGNAVTLGDYYQGRRITITGMYAAGKAATSGVPSIYAPSTYAHLSPAKTPPPPAMIPMGPAYNGYPGGYPGDVDRSSSAGGQGSYVPLLRDTDSSVASEVRSGYRIQASQQDDSMRVLYYMEKELANFDPSRPGPPSGRVERAMSEVTSLHEDDWRSRPSRGPALTPIRDEEWGGHSPRSPRGWDQEPAREQAGGGWRARRPRARSVDALDDLTPPSTAESGSRSPTSNGGRSRAYMPPRSRSRDDLYDQDDSRDFPRSRDPHYDDFRSRERPPADPRSHHHRTRDPRDNGSRSGDLPYDGRLLEEAVRKKGSEERRRPHKEEEEEAYYPPAPPPYSETDSQASRERRLKKNLALSRESLVV

SEQ ID NO: 8066 - protein, 601 aa, Homo Sapiens
MALLAGGLSRGLGSHPAAAGRDAVVFVWLLLSTWCTAPARAIQVTVSNPYHVVILFQPVTLPCTYQMTSTPTQPIVIWKYKSFCRDRIADAFSPASVDNQLNAQLAAGNPGYNPYVECQDSVRTVRVVATKQGNAVTLGDYYQGRRITITGNADLTFDQTAWGDSGVYYCSVVSAQDLQGNNEAYAELIVLGRTSGVAELLPGFQAGPIEDWLFVVVVCLAAFLIFLLLGICWCQCCPHTCCCYVRCPCCPDKCCCPEALYAAGKAATSGVPSIYAPSTYAHLSPAKTPPPPAMIPMGPAYNGYPGGYPGDVDRSSSAGGQGSYVPLLRDTDSSVASEVRSGYRIQASQQDDSMRVLYYMEKELANFDPSRPGPPSGRVERAMSEVTSLHEDDWRSRPSRGPALTPIRDEEWGGHSPRSPRGWDQEPAREQAGGGWRARRPRARSVDALDDLTPPSTAESGSRSPTSNGGRSRAYMPPRSRSRDDLYDQDDSRDFPRSRDPHYDDFRSRERPPADPRSHHHRTRDPRDNGSRSGDLPYDGRLLEEAVRKKGSEERRRPHKEEEEEAYYPPAPPPYSETDSQASRERRLKKNLALSRESLVV

SEQ ID NO: 8067 - protein, 591 aa, Homo Sapiens
MQQDGLGVGTRNGSGKGRSVHPSWPWCAPRPLRYFGRDARARRAQTAAMALAIQVTVSNPYHVVILFQPVTLPCTYQMTSTPTQPIVIWKYKSFCRDRIADAFSPASVDNQLNAQLAAGNPGYNPYVECQDSVRTVRVVATKQGNAVTLGDYYQGRRITITGNADLTFDQTAWGDSGVYYCSVVSAQDLQGNNEAYAELIVLGRTSGVAELLPGFQAGPIEDWLFVVVVCLAAFLIFLLLGICWCQCCPHTCCCYVRCPCCPDKCCCPEALYAAGKAATSGVPSIYAPSTYAHLSPAKTPPPPAMIPMGPAYNGYPGGYPGDVDRSSSVRSGYRIQASQQDDSMRVLYYMEKELANFDPSRPGPPSGRVERAMSEVTSLHEDDWRSRPSRGPALTPIRDEEWGGHSPRSPRGWDQEPAREQAGGGWRARRPRARSVDALDDLTPPSTAESGSRSPTSNGGRSRAYMPPRSRSRDDLYDQDDSRDFPRSRDPHYDDFRSRERPPADPRSHHHRTRDPRDNGSRSGDLPYDGRLLEEAVRKKGSEERRRPHKEEEEEAYYPPAPPPYSETDSQASRERRLKKNLALSRESLVV

SEQ ID NO: 8068 - protein, 630 aa, Homo Sapiens
MQQDGLGVGTRNGSGKGRSVHPSWPWCAPRPLRYFGRDARARRAQTAAMALLAGGLSRGLGSHPAAAGRDAVVFVWLLLSTWCTAPARAIQVTVSNPYHVVILFQPVTLPCTYQMTSTPTQPIVIWKYKSFCRDRIADAFSPASVDNQLNAQLAAGNPGYNPYVECQDSVRTVRVVATKQGNAVTLGDYYQGRRITITGNADLTFDQTAWGDSGVYYCSVVSAQDLQGNNEAYAELIVLDWLFVVVVCLAAFLIFLLLGICWCQCCPHTCCCYVRCPCCPDKCCCPEALYAAGKAATSGVPSIYAPSTYAHLSPAKTPPPPAMIPMGPAYNGYPGGYPGDVDRSSSAGGQGSYVPLLRDTDSSVASEVRSGYRIQASQQDDSMRVLYYMEKELANFDPSRPGPPSGRVERAMSEVTSLHEDDWRSRPSRGPALTPIRDEEWGGHSPRSPRGWDQEPAREQAGGGWRARRPRARSVDALDDLTPPSTAESGSRSPTSNGGRSRAYMPPRSRSRDDLYDQDDSRDFPRSRDPHYDDFRSRERPPADPRSHHHRTRDPRDNGSRSGDLPYDGRLLEEAVRKKGSEERRRPHKEEEEEAYYPPAPPPYSETDSQASRERRLKKNLALSRESLVV

SEQ ID NO: 8069 - protein, 629 aa, Homo Sapiens
MQQDGLGVGTRNGSGKGRSVHPSWPWCAPRPLRYFGRDARARRAQTAAMALLAGGLSRGLGSHPAAAGRDAVVFVWLLLSTWCTAPARAIQVTVSNPYHVVILFQPVTLPCTYQMTSTPTQPIVIWKYKSFCRDRIADAFSPASVDNQLNAQLAAGNPGYNPYVECQDSVRTVRVVATKQGNAVTLGDYYQGRRITITGNADLTFDQTAWGDSGVYYCSVVSAQDLQGNNEAYAELIVLDWLFVVVVCLAAFLIFLLLGICWCQCCPHTCCCYVRCPCCPDKCCCPEALYAAGKAATSGVPSIYAPSTYAHLSPAKTPPPPAMIPMGPAYNGYPGGYPGDVDRSSSAGGQGSYVPLLRDTDSSVASVRSGYRIQASQQDDSMRVLYYMEKELANFDPSRPGPPSGRVERAMSEVTSLHEDDWRSRPSRGPALTPIRDEEWGGHSPRSPRGWDQEPAREQAGGGWRARRPRARSVDALDDLTPPSTAESGSRSPTSNGGRSRAYMPPRSRSRDDLYDQDDSRDFPRSRDPHYDDFRSRERPPADPRSHHHRTRDPRDNGSRSGDLPYDGRLLEEAVRKKGSEERRRPHKEEEEEAYYPPAPPPYSETDSQASRERRLKKNLALSRESLVV

SEQ ID NO: 8070 - protein, 649 aa, Homo Sapiens
MQQDGLGVGTRNGSGKGRSVHPSWPWCAPRPLRYFGRDARARRAQTAAMALLAGGLSRGLGSHPAAAGRDAVVFVWLLLSTWCTAPARAIQVTVSNPYHVVILFQPVTLPCTYQMTSTPTQPIVIWKYKSFCRDRIADAFSPASVDNQLNAQLAAGNPGYNPYVECQDSVRTVRVVATKQGNAVTLGDYYQGRRITITGNADLTFDQTAWGDSGVYYCSVVSAQDLQGNNEAYAELIVLGRTSGVAELLPGFQAGPIEDWLFVVVVCLAAFLIFLLLGICWCQCCPHTCCCYVRCPCCPDKCCCPEALYAAGKAATSGVPSIYAPSTYAHLSPAKTPPPPAMIPMGPAYNGYPGGYPGDVDRSSSAGGQGSYVPLLRDTDSSVASEVRSGYRIQASQQDDSMRVLYYMEKELANFDPSRPGPPSGRVERAMSEVTSLHEDDWRSRPSRGPALTPIRDEEWGGHSPRSPRGWDQEPAREQAGGGWRARRPRARSVDALDDLTPPSTAESGSRSPTSNGGRSRAYMPPRSRSRDDLYDQDDSRDFPRSRDPHYDDFRSRERPPADPRSHHHRTRDPRDNGSRSGDLPYDGRLLEEAVRKKGSEERRRPHKEEEEEAYYPPAPPPYSETDSQASRERRLKKNLALSRESLVV

SEQ ID NO: 8071 - protein, 649 aa, Homo Sapiens; identical to SEQ ID NO: 8070

SEQ ID NO: 8072 - protein, 581 aa, Homo Sapiens
MQQDGLGVGTRNGSGKGRSVHPSWPWCAPRPLRYFGRDARARRAQTAAMALLAGGLSRGLGSHPAAAGRDAVVFVWLLLSTWCTAPARAIQVTVSNPYHVVILFQPVTLPCTYQMTSTPTQPIVIWKYKSFCRDRIADAFSPASVDNQLNAQLAAGNPGYNPYVECQDSVRTVRVVATKQGNAVTLGDYYQGRRITITGNADLTFDQTAWGDSGVYYCSVVSAQDLQGNNEAYAELIVLVYAAGKAATSGVPSIYAPSTYAHLSPAKTPPPPAMIPMGPAYNGYPGGYPGDVDRSSSAGGQGSYVPLLRDTDSSVASEVRSGYRIQASQQDDSMRVLYYMEKELANFDPSRPGPPSGRVERAMSEVTSLHEDDWRSRPSRGPALTPIRDEEWGGHSPRSPRGWDQEPAREQAGGGWRARRPRARSVDALDDLTPPSTAESGSRSPTSNGGRSRAYMPPRSRSRDDLYDQDDSRDFPRSRDPHYDDFRSRERPPADPRSHHHRTRDPRDNGSRSGDLPYDGRLLEEAVRKKGSEERRRPHKEEEEEAYYPPAPPPYSETDSQASRERRLKKNLALSRESLVV

SEQ ID NO: 8073 - protein, 51 aa, Homo Sapiens
MQQDGLGVGTRNGSGKGRSVHPSWPWCAPRPLSSCQGHPGDRVQPLPRGDP

SEQ ID NO: 8074 - protein, 139 aa, Homo Sapiens
MTSTPTQPIVIWKYKSFCRDRIADAFSPASVDNQLNAQLAAGNPGYNPYVECQDSVRTVRVVATKQGNAVTLGDYYQGRRITITGNADLTFDQTAWGDSGVYYCSVVSAQDLQGNNEAYAELIVLDWLFVVVVCLAAFL

SEQ ID NO: 8075 - protein, 35 aa, Homo Sapiens
MLSRNDAPSVLVPGPGLLRAGTPLCISAEAASAQQ

SEQ ID NO: 8076 - protein, 36 aa, Homo Sapiens
MLSRNDDICIYGGLGLGGLLLLAVVLLSACLCWLHR

SEQ ID NO: 8077 - protein, 66 aa, Homo Sapiens
MLSRNDDICIYGGLGLGGLLLLAVVLLSACLCWLHRRAPSVLVPGPGLLRAGTPLCISAEAASAQQ

SEQ ID NO: 8078 - protein, 44 aa, Homo Sapiens
MLSRNDDICIYGGLGLGGLLLLAVVLLSACLCWLHRREAASAQQ

SEQ ID NO: 8079 - protein, 59 aa, Homo Sapiens
MLSRNDDICIYGGLGLGGLLLLAVVLLSACLCWLHRRGPGLLRAGTPLCISAEAASAQQ

SEQ ID NO: 8080 - protein, 97 aa, Homo Sapiens
MLSRNDDICIYGGLGLGGLLLLAVVLLSACLCWLHRRVKRLERSWAQGSSEQELHYASLQRLPVPSSEGPDLRGRDKRGTKEDPRADYACIAENKPT

SEQ ID NO: 8081 - protein, 104 aa, Homo Sapiens
MLSRNDDICIYGGLGLGGLLLLAVVLLSACLCWLHRRVKRLERSWHLLSWSQAQGSSEQELHYASLQRLPVPSSEGPDLRGRDKRGTKEDPRADYACIAENKPT

SEQ ID NO: 8082 - protein, 66 aa, Homo Sapiens
MLSRNDDICIYGGLGLGGLLLLAVVLLSACLCWLHRRVKRLERSWRLPVPSSEGPDLRGRDKRGTK

SEQ ID NO: 8083 - protein, 13 aa, Homo Sapiens
MLSRNDEAASAQQ

SEQ ID NO: 8084 - protein, 28 aa, Homo Sapiens
MLSRNDGPGLLRAGTPLCISAEAASAQQ

SEQ ID NO: 8085 - protein, 28 aa, Homo Sapiens
MLSRNDGPGLLRAGTPLCISAEAASAQQ

SEQ ID NO: 8086 - protein, 28 aa, Homo Sapiens
MLSRNDGPGLLRAGTPLCISAEAASAQQ

SEQ ID NO: 8087 - protein, 66 aa, Homo Sapiens
MLSRNDVKRLERSWAQGSSEQELHYASLQRLPVPSSEGPDLRGRDKRGTKEDPRADYACIAENKPT

SEQ ID NO: 8088 - protein, 66 aa, Homo Sapiens; identical to SEQ ID NO: 8087

SEQ ID NO: 8089 - protein, 73 aa, Homo Sapiens
MLSRNDVKRLERSWHLLSWSQAQGSSEQELHYASLQRLPVPSSEGPDLRGRDKRGTKEDPRADYACIAENKPT

SEQ ID NO: 8090 - protein, 51 aa, Homo Sapiens
MLSRNDVKRLERSWRLPVPSSEGPDLRGRDKRGTKEDPRADYACIAENKPT

SEQ ID NO: 8091 - protein, 60 aa, Homo Sapiens
  misc_feature (1)..(1): Xaa can be any naturally occurring amino acid
XDICIYGGLGLGGLLLLAVVLLSACLCWLHRREAGEELGPGLLRAGTPLCISAEAASAQQ

SEQ ID NO: 8092 - protein, 35 aa, Homo Sapiens
  misc_feature (1)..(1): Xaa can be any naturally occurring amino acid
XGGLLLLAVVLLSACLCWLHRREAGEELEAASAQQ

SEQ ID NO: 8093 - protein, 205 aa, Homo Sapiens
MTPPERLFLPRVCGTTLHLLLLGLLLVLLPGAQGLPGVGLTPSAAQTARQHPKMHLAHSTLKPAAHLIGDPSKQNSLLWRANTDRAFLQDGFSLSNNSLLVPTSGIYFVYSQVVFSGKAYSPKATSSPLYLAHEVQLFSSQYPFHVPLLSSQKMVYPGLQEPWLHSMYHGAAFQLTQGDQLSTHTDGIPHLVLSPSTVFFGAFAL

SEQ ID NO: 8094 - protein, 205 aa, Homo Sapiens; identical to SEQ ID NO: 8093

SEQ ID NO: 8095 - protein, 270 aa, Homo Sapiens
ECQHRHLCAHGQCRNTEGSFQCVCDQGYRASGLGDHCEDINECLEDKSVCQRGDCINTAGSYDCTCPDGFQLDDNKTCQDINECEHPGLCGPQGECLNTEGSFHCVCQQGFSISADGRTCEDVNECELLSGVCGEAFCENVEGSFLCVCADENQEYSPMTGQCRSRTSTDLDVDVDQPKEEKKECYYNLNDASLCDNVLAPNVTKQECCCTSGVGWGDNCEIFPCPVLGTAEFTEMCPKGKGFVPAGESSSEAGGENYKDADECLLFGQE

SEQ ID NO: 8096 - protein, 1721 aa, Homo Sapiens
MAGAWLRWGLLLWAGLLASSAHGRLRRITYVVHPGPGLAAGALPLSGPPRSRTFNVALNARYSRSSAAAGAPSRASPGVPSERTRRTSKPGGAALQGLRPPPPPPPEPARPAVPGGQLHPNPGGHPAAAPFTKQGRQVVRSKVPQETQSGGGSRLQVHQKQQLQGVNVCGGRCCHGWSKAPGSQRCTKPSCVPPCQNGGMCLRPQLCVCKPGTKGKACETIAAQDTSSPVFGGQSPGAASSWGPPEQAAKHTSSKKADTLPRVSPVAQMTLTLKPKPSVGLPQQIHSQVTPLSSQSVVIHHGQTQEYVLKPKYFPAQKGISGEQSTEGSFPLRYVQDQVAAPFQLSNHTGRIKVVFTPSICKVTCTKGSCQNSCEKGNTTTLISENGHAADTLTATNFRVVICHLPCMNGGQCSSRDKCQCPPNFTGKLCQIPVHGASVPKLYQHSQQPGKALGTHVIHSTHTLPLTVTSQQGVKVKFPPNIVNIHVKHPPEASVQIHQVSRIDGPTGQKTKEAQPGQSQVSYQGLPVQKTQTIHSTYSHQQVIPHVYPVAAKTQLGRCFQETIGSQCGKALPGLSKQEDCCGTVGTSWGFNKCQKCPKKPSYHGYNQMMECLPGYKRVNNTFCQDINECQLQGVCPNGECLNTMGSYRCTCKIGFGPDPTFSSCVPDPPVISEEKGPCYRLVSSGRQCMHPLSVHLTKQLCCCSVGKAWGPHCEKCPLPGTAAFKEICPGGMGYTVSGVHRRRPIHHHVGKGPVFVKPKNTQPVAKSTHPPPLPAKEEPVEALTFSREHGPGVAEPEVATAPPEKEIPSLDQEKTKLEPGQPQLSPGISTIHLHPQFPVVIEKTSPPVPVEVAPEASTSSASQVIAPTQVTEINECTVNPDICGAGHCINLPVRYTCICYEGYRFSEQQRKCVDIDECTQVQHLCSQGRCENTEGSFLCICPAGFMASEEGTNCIDVDECLRPDVCGEGHCVNTVGAFRCEYCDSGYRMTQRGRCEDIDECLNPSTCPDEQCVNSPGSYQCVPCTEGFRGWNGQCLDVDECLEPNVCANGDCSNLEGSYMCSCHKGYTRTPDHKHCRDIDECQQGNLCVNGQCKNTEGSFRCTCGQGYQLSAAKDQCEDIDECQHRHLCAHGQCRNTEGSFQCVCDQGYRASGLGDHCEDINECLEDKSVCQRGDCINTAGSYDCTCPDGFQLDDNKTCQDINECEHPGLCGPQGECLNTEGSFHCVCQQGFSISADGRTCEDIDECVNNTVCDSHGFCDNTAGSFRCLCYQGFQAPQDGQGCVDVNECELLSGVCGEAFCENVEGSFLCVCADENQEYSPMTGQCRSRTSTDLDVDVDQPKEEKKECYYNLNDASLCDNVLAPNVTKQECCCTSGVGWGDNCEIFPCPVLGTAEFTEMCPKGKGFVPAGESSSEAGGENYKDADECLLFGQEICKNGFCLNTRPGYECYCKQGTYYDPVKLQCFDMDECQDPSSCIDGQCVNTEGSYNCFCTHPMVLDASEKRCIRPAESNEQIEETDVYQDLCWEHLSDEYVCSRPLVGKQTTYTECCCLYGEAWGMQCALCPLKDSDDYAQLCNIPVTGRRQPYGRDALVDFSEQYTPEADPYFIQDRFLNSFEELQAEECGILNGCENGRCVRVQEGYTCDCFDGYHLDTAKMTCVDVNECDELNNRMSLCKNAKCINTDGSYKCLCLPGYVPSDKPNYCTPLNTALNLEKDSDLE

SEQ ID NO: 8097 - protein, 1395 aa, Homo Sapiens
MDTKLMCLLFFFSLPPLLVSNHTGRIKVVFTPSICKVTCTKGSCQNSCEKGNTTTLISENGHAADTLTATNFRVVICHLPCMNGGQCSSRDKCQCPPNFTGKLCQIPVHGASVPKLYQHSQQPGKALGTHVIHSTHTLPLTVTSQQGVKVKFPPNIVNIHVKHPPEASVQIHQVSRIDGPTGQKTKEAQPGQSQVSYQGLPVQKTQTIHSTYSHQQVIPHVYPVAAKTQLGRCFQETIGSQCGKALPGLSKQEDCCGTVGTSWGFNKCQKCPKKPSYHGYNQMMECLPGYKRVNNTFCQDINECQLQGVCPNGECLNTMGSYRCTCKIGFGPDPTFSSCVPDPPVISEEKGPCYRLVSSGRQCMHPLSVHLTKQLCCCSVGKAWGPHCEKCPLPGTAAFKEICPGGMGYTVSGVHRRRPIHHHVGKGPVFVKPKNTQPVAKSTHPPPLPAKEEPVEALTFSREHGPGVAEPEVATAPPEKEIPSLDQEKTKLEPGQPQLSPGISTIHLHPQFPVVIEKTSPPVPVEVAPEASTSSASQVIAPTQVTEINECTVNPDICGAGHCINLPVRYTCICYEGYRFSEQQRKCVDIDECTQVQHLCSQGRCENTEGSFLCICPAGFMASEEGTNCIDVDECLRPDVCGEGHCVNTVGAFRCEYCDSGYRMTQRGRCEDIDECLNPSTCPDEQCVNSPGSYQCVPCTEGFRGWNGQCLDVDECLEPNVCANGDCSNLEGSYMCSCHKGYTRTPDHKHCRDIDECQQGNLCVNGQCKNTEGSFRCTCGQGYQLSAAKDQCEDIDECQHRHLCAHGQCRNTEGSFQCVCDQGYRASGLGDHCEDINECLEDKSVCQRGDCINTAGSYDCTCPDGFQLDDNKTCQDINECEHPGLCGPQGECLNTEGSFHCVCQQGFSISADGRTCEDIDECVNNTVCDSHGFCDNTAGSFRCLCYQGFQAPQDGQGCVDVNECELLSGVCGEAFCENVEGSFLCVCADENQEYSPMTGQCRSRTSTDLDVDVDQPKEEKKECYYNLNDASLCDNVLAPNVTKQECCCTSGVGWGDNCEIFPCPVLGTAEFTEMCPKGKGFVPAGESSSEAGGENYKDADECLLFGQEICKNGFCLNTRPGYECYCKQGTYYDPVKLQCFDMDECQDPSSCIDGQCVNTEGSYNCFCTHPMVLDASEKRCIRPAESNEQIEETDVYQDLCWEHLSDEYVCSRPLVGKQTTYTECCCLYGEAWGMQCALCPLKDSDDYAQLCNIPVTGRRQPYGRDALVDFSEQYTPEADPYFIQDRFLNSFEELQAEECGILNGCENGRCVRVQEGYTCDCFDGYHLDTAKMTCVDVNECDELNNRMSLCKNAKCINTDGSYKCLCLPGYVPSDKPNYCTPLNTALNLEKDSDLE

SEQ ID NO: 8098 - protein, 1353 aa, Homo Sapiens
MDTKLMCLLFFFSLPPLLVSNHTGRIKVVFTPSICKVTCTKGSCQNSCEKGNTTTLISENGHAADTLTATNFRVVICHLPCMNGGQCSSRDKCQCPPNFTGKLCQIPVHGASVPKLYQHSQQPGKALGTHVIHSTHTLPLTVTSQQGVKVKFPPNIVNIHVKHPPEASVQIHQVSRIDGPTGQKTKEAQPGQSQVSYQGLPVQKTQTIHSTYSHQQVIPHVYPVAAKTQLGRCFQETIGSQCGKALPGLSKQEDCCGTVGTSWGFNKCQKCPKKPSYHGYNQMMECLPGYKRVNNTFCQDINECQLQGVCPNGECLNTMGSYRCTCKIGFGPDPTFSSCVPDPPVISEEKGPCYRLVSSGRQCMHPLSVHLTKQLCCCSVGKAWGPHCEKCPLPGTAAFKEICPGGMGYTVSGVHRRRPIHHHVGKGPVFVKPKNTQPVAKSTHPPPLPAKEEPVEALTFSREHGPGVAEPEVATAPPEKEIPSLDQEKTKLEPGQPQLSPGISTIHLHPQFPVVIEKTSPPVPVEVAPEASTSSASQVIAPTQVTEINECTVNPDICGAGHCINLPVRYTCICYEGYRFSEQQRKCVDIDECTQVQHLCSQGRCENTEGSFLCICPAGFMASEEGTNCIDVDECLRPDVCGEGHCVNTVGAFRCEYCDSGYRMTQRGRCEDIDECLNPSTCPDEQCVNSPGSYQCVPCTEGFRGWNGQCLDVDECLEPNVCANGDCSNLEGSYMCSCHKGYTRTPDHKHCRDIDECQQGNLCVNGQCKNTEGSFRCTCGQGYQLSAAKDQCEDIDECQHRHLCAHGQCRNTEGSFQCVCDQGYRASGLGDHCEDINECLEDKSVCQRGDCINTAGSYDCTCPDGFQLDDNKTCQDINECEHPGLCGPQGECLNTEGSFHCVCQQGFSISADGRTCEDVNECELLSGVCGEAFCENVEGSFLCVCADENQEYSPMTGQCRSRTSTDLDVDVDQPKEEKKECYYNLNDASLCDNVLAPNVTKQECCCTSGVGWGDNCEIFPCPVLGTAEFTEMCPKGKGFVPAGESSSEAGGENYKDADECLLFGQEICKNGFCLNTRPGYECYCKQGTYYDPVKLQCFDMDECQDPSSCIDGQCVNTEGSYNCFCTHPMVLDASEKRCIRPAESNEQIEETDVYQDLCWEHLSDEYVCSRPLVGKQTTYTECCCLYGEAWGMQCALCPLKDSDDYAQLCNIPVTGRRQPYGRDALVDFSEQYTPEADPYFIQDRFLNSFEELQAEECGILNGCENGRCVRVQEGYTCDCFDGYHLDTAKMTCVDVNECDELNNRMSLCKNAKCINTDGSYKCLCLPGYVPSDKPNYCTPLNTALNLEKDSDLE

SEQ ID NO: 8099 - protein, 1342 aa, Homo Sapiens
MDTKLMCLLFFFSLPPLLVSNHTGRIKVVFTPSICKVTCTKGSCQNSCEKGNTTTLISENGHAADTLTATNFRVVICHLPCMNGGQCSSRDKCQCPPNFTGKLCQIPVHGASVPKLYQHSQQPGKALGTHVIHSTHTLPLTVTSQQGVKVKFPPNIVNIHVKHPPEASVQIHQVSRIDGPTGQKTKEAQPGQSQVSYQGLPVQKTQTIHSTYSHQQVIPHVYPVAAKTQLGRCFQETIGSQCGKALPGLSKQEDCCGTVGTSWGFNKCQKCPKKPSYHGYNQMMECLPGYKRVNNTFCQDINECQLQGVCPNGECLNTMGSYRCTCKIGFGPDPTFSSCVPDPPVISEEKGPCYRLVSSGRQCMHPLSVHLTKQLCCCSVGKAWGPHCEKCPLPGTAKEEPVEALTFSREHGPGVAEPEVATAPPEKEIPSLDQEKTKLEPGQPQLSPGISTIHLHPQFPVVIEKTSPPVPVEVAPEASTSSASQVIAPTQVTEINECTVNPDICGAGHCINLPVRYTCICYEGYRFSEQQRKCVDIDECTQVQHLCSQGRCENTEGSFLCICPAGFMASEEGTNCIDVDECLRPDVCGEGHCVNTVGAFRCEYCDSGYRMTQRGRCEDIDECLNPSTCPDEQCVNSPGSYQCVPCTEGFRGWNGQCLDVDECLEPNVCANGDCSNLEGSYMCSCHKGYTRTPDHKHCRDIDECQQGNLCVNGQCKNTEGSFRCTCGQGYQLSAAKDQCEDIDECQHRHLCAHGQCRNTEGSFQCVCDQGYRASGLGDHCEDINECLEDKSVCQRGDCINTAGSYDCTCPDGFQLDDNKTCQDINECEHPGLCGPQGECLNTEGSFHCVCQQGFSISADGRTCEDIDECVNNTVCDSHGFCDNTAGSFRCLCYQGFQAPQDGQGCVDVNECELLSGVCGEAFCENVEGSFLCVCADENQEYSPMTGQCRSRTSTDLDVDVDQPKEEKKECYYNLNDASLCDNVLAPNVTKQECCCTSGVGWGDNCEIFPCPVLGTAEFTEMCPKGKGFVPAGESSSEAGGENYKDADECLLFGQEICKNGFCLNTRPGYECYCKQGTYYDPVKLQCFDMDECQDPSSCIDGQCVNTEGSYNCFCTHPMVLDASEKRCIRPAESNEQIEETDVYQDLCWEHLSDEYVCSRPLVGKQTTYTECCCLYGEAWGMQCALCPLKDSDDYAQLCNIPVTGRRQPYGRDALVDFSEQYTPEADPYFIQDRFLNSFEELQAEECGILNGCENGRCVRVQEGYTCDCFDGYHLDTAKMTCVDVNECDELNNRMSLCKNAKCINTDGSYKCLCLPGYVPSDKPNYCTPLNTALNLEKDSDLE

SEQ ID NO: 8100 - protein, 1340 aa, Homo Sapiens
MDTKLMCLLFFFSLPPLLVSNHTGRIKVVFTPSICKVTCTKGSCQNSCEKGNTTTLISENGHAADTLTATNFRVVICHLPCMNGGQCSSRDKCQCPPNFTGKLCQIPVHGASVPKLYQHSQQPGKALGTHVIHSTHTLPLTVTSQQGVKVKFPPNIVNIHVKHPPEASVQIHQVSRIDGPTGQKTKEAQPGQSQVSYQGLPVQKTQTIHSTYSHQQVIPHVYPVAAKTQLGRCFQETIGSQCGKALPGLSKQEDCCGTVGTSWGFNKCQKCPKKPSYHGYNQMMECLPGYKRVNNTFCQDINECQLQGVCPNGECLNTMGSYRCTCKIGFGPDPTFSSCVPDPPVISEEKGPCYRLVSSGRQCMHPLSVHLTKQLCCCSVGKAWGPHCEKCPLPGTAKEEPVEALTFSREHGPGVAEPEVATAPPEKEIPSLDQEKTKLEPGQPQLSPGISTIHLHPQFPVVIEKTSPPVPVEVAPEASTSSASQVIAPTQVTEINECTVNPDICGAGHCINLPVRYTCICYEGYRFSEQQRKCVDIDECTQVQHLCSQGRCENTEGSFLCICPAGFMASEEGTNCIDVDECLRPDVCGEGHCVNTVGAFRCEYCDSGYRMTQRGRCEDIDECLNPSTCPDEQCVNSPGSYQCVPCTEGFRGWNGQCLDVDECLEPNVCANGDCSNLEGSYMCSCHKGYTRTPDHKHCRDIDECQQGNLCVNGQCKNTEGSFRCTCGQGYQLSAAKDQCEDIDECQHRHLCAHGQCRNTEGSFQCVCDQGYRASGLGDHCEDINECLEDKSVCQRGDCINTAGSYDCTCPDGFQLDDNKTCQDINECEHPGLCGPQGECLNTEGSFHCVCQQGFSISADGRTCEDIDECVNNTVCDSHGFCDNTAGSFRCLCYQGFQAPQDGQGCVDVNECELLSGVCGEAFCENVEGSFLCVCADENQEYSPMTGQCRSRTSTDVDVDQPKEEKKECYYNLNDASLCDNVLAPNVTKQECCCTSGVGWGDNCEIFPCPVLGTAEFTEMCPKGKGFVPAGESSSEAGGENYKDADECLLFGQEICKNGFCLNTRPGYECYCKQGTYYDPVKLQCFDMDECQDPSSCIDGQCVNTEGSYNCFCTHPMVLDASEKRCIRPAESNEQIEETDVYQDLCWEHLSDEYVCSRPLVGKQTTYTECCCLYGEAWGMQCALCPLKDSDDYAQLCNIPVTGRRQPYGRDALVDFSEQYTPEADPYFIQDRFLNSFEELQAEECGILNGCENGRCVRVQEGYTCDCFDGYHLDTAKMTCVDVNECDELNNRMSLCKNAKCINTDGSYKCLCLPGYVPSDKPNYCTPLNTALNLEKDSDLE

SEQ ID NO: 8101 - protein, 219 aa, Homo Sapiens
MGSYRCTCKIGFGPDPTFSSCVPDPPVISEEKGPCYRLVSSGRQCMHPLSVHLTKQLCCCSVGKAWGPHCEKCPLPGTGKGPVFVKPKNTQPVAKSTHPPPLPAKEEPVEALTFSREHGPGVAEPEVATAPPEKEIPSLDQEKTKLEPGQPQLSPGISTIHLHPQFPVVIEKTSPPVPVEVAPEASTSSASQVIAPTQVTEINECTVNPDICGAGHCIN

SEQ ID NO: 8102 - protein, 101 aa, Homo Sapiens
MNGGQCSSRDKCQCPPNFTGKLCQIPVHGASVPKLYQHSQQPGKALGTHVIHSTHTLPLTVTSQQGVKVKFPPNIVNIHVKHPPEASVQIHQVSRIDGPTG

SEQ ID NO: 8103 - protein, 221 aa, Homo Sapiens
SSGRQCMHPLSVHLTKQLCCCSVGKAWGPHCEKCPLPGTAAFKEICPGGMGYTVSGVHRRRPIHHHVGKGPVFVKPKNTQPVAKSTHPPPLPAKEEPVEALTFSREHGPGVAEPEVATAPPEKEIPSLDQEKTKLEPGQPQLSPGISTIHLHPQFPGIVIEKTSPPVPVEVAPEASTSSASQVIAPTQVTEINECTVNPDICGAGHCINLPVRYTCICYEG

SEQ ID NO: 8104 - protein, 267 aa, Homo Sapiens
  misc_feature (1)..(1): Xaa can be any naturally occurring amino acid
XGRCEDIDECLNPSTCPDEQCVNSPGSYQCVPCTEGFRGWNGQCLDIDECQQGNLCVNGQCKNTEGSFRCTCGQGYQLSAAKDQCEDIDECQHRHLCAHGQCRNTEGSFQCVCDQGYRASGLGDHCEDINECLEDKSVCQRGDCINTAGSYDCTCPDGFQLDDNKTCQDINECEHPGLCGPQGECLNTEGSFHCVCQQGFSISADGRTCEDIDECVNNTVCDSHGFCDNTAGSFRCLCYQGFQAPQDGQGCVDVNECELLSGVCGEA

SEQ ID NO: 8105 - protein, 1821 aa, Homo Sapiens
MRPRTKARSPGRALRNPWRGFLPLTLALFVGAGHAQRDPVGRYEPAGGDANRLRRPGGSYPAAAAAKVYSLFREQDAPVAGLQPVERAQPGWGSPRRPTEAEARRPSRAQQSRRVQPPAQTRRSTPLGQQQPAPRTRAAPALPRLGTPQRSGAAPPTPPRGRLTGRNVCGGQCCPGWTTANSTNHCIKPVCEPPCQNRGSCSRPQLCVCRSGFRGARCEEVIPDEEFDPQNSRLAPRRWAERSPNLRRSSAAGEGTLARAQPPAPQSPPAPQSPPAGTLSGLSQTHPSQQHVGLSRTVRLHPTATASSQLSSNALPPGPGLEQRDGTQQAVPLEHPSSPWGLNLTEKIKKIKIVFTPTICKQTCARGHCANSCERGDTTTLYSQGGHGHDPKSGFRIYFCQIPCLNGGRCIGRDECWCPANSTGKFCHLPIPQPDREPPGRGSRPRALLEAPLKQSTFTLPLSNQLASVNPSLVKVHIHHPPEASVQIHQVAQVRGGVEEALVENSVETRPPPWLPASPGHSLWDSNNIPARSGEPPRPLPPAAPRPRGLLGRCYLNTVNGQCANPLLELTTQEDCCGSVGAFWGVTLCAPCPPRPASPVIENGQLECPQGYKRLNLTHCQDINECLTLGLCKDAECVNTRGSYLCTCRPGLMLDPSRSRCVSDKAISMLQGLCYRSLGPGTCTLPLAQRITKQICCCSRVGKAWGSECEKCPLPGTEAFREICPAGHGYTYASSDIRLSMRKAEEEELARPPREQGQRSSGALPGPAERQPLRVVTDTWLEAGTIPDKGDSQAGQVTTSVTHAPAWVTGNATTPPMPEQGIAEIQEEQVTPSTDVLVTLSTPGIDRCAAGATNVCGPGTCVNLPDGYRCVCSPGYQLHPSQAYCTDDNECLRDPCKGKGRCINRVGSYSCFCYPGYTLATSGATQECQDINECEQPGVCSGGQCTNTEGSYHCECDQGYIMVRKGHCQDINECRHPGTCPDGRCVNSPGSYTCLACEEGYRGQSGSCVDVNECLTPGVCAHGKCTNLEGSFRCSCEQGYEVTSDEKGCQDVDECASRASCPTGLCLNTEGSFACSACENGYWVNEDGTACEDLDECAFPGVCPSGVCTNTAGSFSCKDCDGGYRPSPLGDSCEDVDECEDPQSSCLGGECKNTVGSYQCLCPQGFQLANGTVCEDVNECMGEEHCAPHGECLNSHGSFFCLCAPGFVSAEGGTSCQDVDECATTDPCVGGHCVNTEGSFNCLCETGFQPSPESGECVDIDECEDYGDPVCGTWKCENSPGSYRCVLGCQPGFHMAPNGDCIDIDECANDTMCGSHGFCDNTDGSFRCLCDQGFEISPSGWDCVDVNECELMLAVCGAALCENVEGSFLCLCASDLEEYDAQEGHCRPRGAGGQSMSEAPTGDHAPAPTRMDCYSGQKGHAPCSSVLGRNTTQAECCCTQGASWGDACDLCPSEDSAEFSEICPSGKGYIPVEGAWTFGQTMYTDADECVIFGPGLCPNGRCLNTVPGYVCLCNPGFHYDASHKKCEDHDECQDLACENGECVNTEGSFHCFCSPPLTLDLSQQRCMNSTSSTEDLPDHDIHMDICWKKVTNDVCSEPLRGHRTTYTECCCQDGEAWSQQCALCPPRSSEVYAQLCNVARIEAEREAGVHFRPGYEYGPGPDDLHYSIYGPDGAPFYNYLGPEDTVPEPAFPNTAGHSADRTPILESPLQPSELQPHYVASHPEPPAGFEGLQAEECGILNGCENGRCVRVREGYTCDCFEGFQLDAAHMACVDVNECDDLNGPAVLCVHGYCENTEGSYRCHCSPGYVAEAGPPHCTAKE

SEQ ID NO: 8106 - protein, 1769 aa, Homo Sapiens
MRPRTKARSPGRALRNPWRGFLPLTLALFVGAGHAQRDPVGRYEPAGGDANRLRRPGGSYPAAAAAKVYSLFREQDAPVAGLQPVERAQPGWGSPRRPTEAEARRPSRAQQSRRVQPPAQTRRSTPLGQQQPAPRTRAAPALPRLGTPQRSGAAPPTPPRGRLTGRNVCGGQCCPGWTTANSTNHCIKPVCEPPCQNRGSCSRPQLCVCRSGFRGARCEEVIPDEEFDPQNSRLAPRRWAERSPNLRRSSAAGEGTLARAQPPAPQSPPAPQSPPAGTLSGLSQTHPSQQHVGLSRTVRLHPTATASSQLSSNALPPGPGLEQRDGTQQAVPLEHPSSPWGLNLTEKIKKIKIVFTPTICKQTCARGHCANSCERGDTTTLYSQGGHGHDPKSGFRIYFCQIPCLNGGRCIGRDECWCPANSTGKFCHLPIPQPDREPPGRGSRPRALLEAPLKQSTFTLPLSNQLASVNPSLVKVHIHHPPEASVQIHQVAQVRGGVEEALVENSVETRPPPWLPASPGHSLWDSNNIPARSGEPPRPLPPAAPRPRGLLGRCYLNTVNGQCANPLLELTTQEDCCGSVGAFWGVTLCAPCPPRPASPVIENGQLECPQGYKRLNLTHCQDINECLTLGLCKDAECVNTRGSYLCTCRPGLMLDPSRSRCVSDKAISMLQGLCYRSLGPGTCTLPLAQRITKQICCCSRVGKAWGSECEKCPLPGTEAFREICPAGHGYTYASSDIRLSMRKAEEEELARPPREQGQRSSGALPGPAERQPLRVVTDTWLEAGTIPDKGDSQAGQVTTSVTHAPAWVTGNATTPPMPEQGIAEIQEEQVTPSTDVLVTLSTPGIDRCAAGATNVCGPGTCVNLPDGYRCVCSPGYQLHPSQAYCTDDNECLRDPCKGKGRCINRVGSYSCFCYPGYTLATSGATQECQDINECEQPGVCSGGQCTNTEGSYHCECDQGYIMVRKGHCQDINECRHPGTCPDGRCVNSPGSYTCLACEEGYRGQSGSCVDVNECLTPGVCAHGKCTNLEGSFRCSCEQGYEVTSDEKGCQDVDECASRASCPTGLCLNTEGSFACSACENGYWVNEDGTACEDLDECAFPGVCPSGVCTNTAGSFSCKDCDGGYRPSPLGDSCEDVDECEDPQSSCLGGECKNTVGSYQCLCPQGFQLANGTVCEDVNECMGEEHCAPHGECLNSHGSFFCLCAPGFVSAEGGTSCQDVDECATTDPCVGGHCVNTEGSFNCLCETGFQPSPESGECVDIDECEDYGDPVCGTWKCENSPGSYRCVLGCQPGFHMAPNGDCIDIDECANDTMCGSHGFCDNTDGSFRCLCDQGFEISPSGWDCVDVNECELMLAVCGAALCENVEGSFLCLCASDLEEYDAQEGHCRPRGAGGQSMSEAPTGDHAPAPTRMDCYSGQKGHAPCSSVLGRNTTQAECCCTQGASWGDACDLCPSEDSAEFSEICPSGKGYIPVEGAWTFGQTMYTDADECVIFGPGLCPNGRCLNTVPGYVCLCNPGFHYDASHKKCEDHDECQDLACENGECVNTEGSFHCFCSPPLTLDLSQQRCMNSTSSTEDLPDHDIHMDICWKKVTNDVCSEPLRGHRTTYTECCCQDGEAWSQQCALCPPRSSEVYAQLCNVARIEAEREAGVHFRPGYEYGPGPDDLHYSIYGPDGAPFYNYLGPEDTVPEPAFPNTAGHSADRTPILESPLQPSELQPHYVASHPGLCCCKTGEEVGTKAVSLPSPPPASHIASRSPQPASKGFRRRSAAS

SEQ ID NO: 8107 - protein, 1777 aa, Homo Sapiens
MRPRTKARSPGRALRNPWRGFLPLTLALFVGAGHAQRDPVGRYEPAGGDANRLRRPGGSYPAAAAAKVYSLFREQDAPVAGLQPVERAQPGWGSPRRPTEAEARRPSRAQQSRRVQPPAQTRRSTPLGQQQPAPRTRAAPALPRLGTPQRSGAAPPTPPRGRLTGRNVCGGQCCPGWTTANSTNHCIKPVCEPPCQNRGSCSRPQLCVCRSGFRGARCEEVIPDEEFDPQNSRLAPRRWAERSPNLRRSSAAGEGTLARAQPPAPQSPPAPQSPPAGTLSGLSQTHPSQQHVGLSRTVRLHPTATASSQLSSNALPPGPGLEQRDGTQQAVPLEHPSSPWGLNLTEKIKKIKIVFTPTICKQTCARGHCANSCERGDTTTLYSQGGHGHDPKSGFRIYFCQIPCLNGGRCIGRDECWCPANSTGKFCHLPIPQPDREPPGRGSRPRALLEAPLKQSTFTLPLSNQLASVNPSLVKVHIHHPPEASVQIHQVAQVRGGVEEALVENSVETRPPPWLPASPGHSLWDSNNIPARSGEPPRPLPPAAPRPRGLLGRCYLNTVNGQCANPLLELTTQEDCCGSVGAFWGVTLCAPCPPRPASPVIENGQLECPQGYKRLNLTHCQDINECLTLGLCKDAECVNTRGSYLCTCRPGLMLDPSRSRCVSDKAISMLQGLCYRSLGPGTCTLPLAQRITKQICCCSRVGKAWGSECEKCPLPGTEAFREICPAGHGYTYASSDIRLSMRKAEEEELARPPREQGQRSSGALPGPAERQPLRVVTDTWLEAGTIPDKGDSQAGQVTTSVTHAPAWVTGNATTPPMPEQGIAEIQEEQVTPSTDVLVTLSTPGIDRCAAGATNVCGPGTCVNLPDGYRCVCSPGYQLHPSQAYCTDDNECLRDPCKGKGRCINRVGSYSCFCYPGYTLATSGATQECQDINECEQPGVCSGGQCTNTEGSYHCECDQGYIMVRKGHCQDINECRHPGTCPDGRCVNSPGSYTCLACEEGYRGQSGSCVDVNECLTPGVCAHGKCTNLEGSFRCSCEQGYEVTSDEKGCQDVDECASRASCPTGLCLNTEGSFACSACENGYWVNEDGTACEDLDECAFPGVCPSGVCTNTAGSFSCKDCDGGYRPSPLGDSCEDVDECEDPQSSCLGGECKNTVGSYQCLCPQGFQLANGTVCEDVNECMGEEHCAPHGECLNSHGSFFCLCAPGFVSAEGGTSCQDVDECATTDPCVGGHCVNTEGSFNCLCETGFQPSPESGECVDIDECANDTMCGSHGFCDNTDGSFRCLCDQGFEISPSGWDCVDVNECELMLAVCGAALCENVEGSFLCLCASDLEEYDAQEGHCRPRGAGGQSMSEAPTGDHAPAPTRMDCYSGQKGHAPCSSVLGRNTTQAECCCTQGASWGDACDLCPSEDSAEFSEICPSGKGYIPVEGAWTFGQTMYTDADECVIFGPGLCPNGRCLNTVPGYVCLCNPGFHYDASHKKCEDHDECQDLACENGECVNTEGSFHCFCSPPLTLDLSQQRCMNSTSSTEDLPDHDIHMDICWKKVTNDVCSEPLRGHRTTYTECCCQDGEAWSQQCALCPPRSSEVYAQLCNVARIEAEREAGVHFRPGYEYGPGPDDLHYSIYGPDGAPFYNYLGPEDTVPEPAFPNTAGHSADRTPILESPLQPSELQPHYVASHPEPPAGFEGLQAEECGILNGCENGRCVRVREGYTCDCFEGFQLDAAHMACVDVNECDDLNGPAVLCVHGYCENTEGSYRCHCSPGYVAEAGPPHCTAKE

SEQ ID NO: 8108 - protein, 233 aa, Homo Sapiens
  misc_feature (1)..(1): Xaa can be any naturally occurring amino acid
XTEGSFACSACENGYWVNEDGTACEDLDECAFPGVCPSGVCTNTAGSFSCKDCDGGYRPSPLGDSCEDVDECEDPQSSCLGGECKNTVGSYQCLCPQGFQLANGTVCEDVNECMGEEHCAPHGECLNSHGSFFCLCAPGFVSAEGGTSCQDIDECEDYGDPVCGTWKCENSPGSYRCVLGCQPGFHMAPNGDCIDIDECANDTMCGSHGFCDNTDGSFRCLCDQGFEISPSGW

SEQ ID NO: 8109 - protein, 144 aa, Homo Sapiens
FQDTLPKQPCGSNPLPGLTKQEDCCGSIGTAWGQSKCHKCPQLQYTGVQKPGPVRGEVGADCPQGYKRLNSTHCQADKPEEKSLCFRLVSPEHQCQHPLTTRLTRQLCCCSVGKAWGARCQRCPTDGTAAFKEICPAGKGYHIL

SEQ ID NO: 8110 - protein, 140 aa, Homo Sapiens
LNECAKPHLCGDGGFCINFPGHYKCNCYPGYRLKASRPPVCEDIDECRDPSSCPDGKCENKPGSFKCIACQPGYRSQGGGACRDVNECAEGSPCSPGWCENLPGSFRCTCAQGYAPAPDGRSCLGERQHPRPGPPPPPTR

SEQ ID NO: 8111 - protein, 124 aa, Homo Sapiens
MERAPERRDVCWSQRGEDGMCAGPLAGPALTFDDCCCRQGRGWGAQCRPCPPRGAGSHCPTSQSESNSFWDTSPLLLGKPPRDEDSSEEDSDECRCVSGRCVPRPGGAVCECPGGFQLDASRAR

SEQ ID NO: 8112 - protein, 306 aa, Homo Sapiens
MLFGSEICKEGKCVNTQPGYECYCKQGFYYDGNLLECVDVDECLDESNCRNGVCENTRGGYRCACTPPAEYSPAQRQCLSPEEMDVDECQDPAACRPGRCVNLPGSYRCECRPPWVPGPSGRDCQLPESPAERAPERRDVCWSQRGEDGMCAGPLAGPALTFDDCCCRQGRGWGAQCRPCPPRGAGSHCPTSQSESNSFWDTSPLLLGKPPRDEDSSEEDSDECRCVSGRCVPRPGGAVCECPGGFQLDASRARCVDIDECRELNQRGLLCKSERCVNTSGSFRCVCKAGFARSRPHGACVPQRRR

SEQ ID NO: 8113 - protein, 222 aa, Homo Sapiens
MLFGSEICKEGKCVNTQPGYECYCKQGFYYDGNLLECVDVDECLDESNCRNGVCENTRGGYRCACTPPAEYSPAQRQCLSPEEMERAPERRDVCWSQRGEDGMCAGPLAGPALTFDDCCCRQGRGWGAQCRPCPPRGAGSHCPTSQSESNSFWDTSPLLLGKPPRDEDSSEEDSDECRCVSGRCVPRPGGAVCECPGGFQLDASRARCVDIDECRELNQRGL

SEQ ID NO: 8114 - protein, 259 aa, Homo Sapiens
MLFGSEICKEGKCVNTQPGYECYCKQGFYYDGNLLECVDVDECLDESNCRNGVCENTRGGYRCACTPPAEYSPAQRQCLSPEEMERAPERRDVCWSQRGEDGMCAGPLAGPALTFDDCCCRQGRGWGAQCRPCPPRGAGSHCPTSQSESNSFWDTSPLLLGKPPRDEDSSEEDSDECRCVSGRCVPRPGGAVCECPGGFQLDASRARCVDIDECRELNQRGLLCKSERCVNTSGSFRCVCKAGFARSRPHGACVPQRRR

SEQ ID NO: 8115 - protein, 733 aa, Homo Sapiens
MPAETDECRLNQNICGHGECVPGPPDYSCHCNPGYRSHPQHRYCVDVNECEAEPCGPGRGICMNTGGSYNCHCNRGYRLHVGAGGRSCVDLNECAKPHLCGDGGFCINFPGHYKCNCYPGYRLKASRPPVCEDIDECRDPSSCPDGKCENKPGSFKCIACQPGYRSQGGGACRDVNECAEGSPCSPGWCENLPGSFRCTCAQGYAPAPDGRSCLDVDECEAGDVCDNGICSNTPGSFQCQCLSGYHLSRDRSHCEDIDECDFPAACIGGDCINTNGSYRCLCPQGHRLVGGRKCQDIDECSQDPSLCLPHGACKNLQGSYVCVCDEGFTPTQDQHGCEEVEQPHHKKECYLNFDDTVFCDSVLATNVTQQECCCSLGAGWGDHCEIYPCPVYSSAEFHSLCPDGKGYTQDNNIVNYGIPAHRDIDECMLFGSEICKEGKCVNTQPGYECYCKQGFYYDGNLLECVDVDECLDESNCRNGVCENTRGGYRCACTPPAEYSPAQRQCLSPEEMDVDECQDPAACRPGRCVNLPGSYRCECRPPWVPGPSGRDCQLPESPAERAPERRDVCWSQRGEDGMCAGPLAGPALTFDDCCCRQGRGWGAQCRPCPPRGAGSHCPTSQSESNSFWDTSPLLLGKPPRDEDSSEEDSDECRCVSGRCVPRPGGAVCECPGGFQLDASRARCVDIDECRELNQRGLLCKSERCVNTSGSFRCVCKAGFARSRPHGACVPQRRR

SEQ ID NO: 8116 - protein, 1256 aa, Homo Sapiens
MPGPRGAAGGLAPEMRGAGAAGLLALLLLLLLLLLGLGGRVEGGPAGERGAGGGGALARERFKVVFAPVICKRTCLKGQCRDSCQQGSNMTLIGENGHSTDTLTGSGFRVVVCPLPCMNGGQCSSRNQCLCPPDFTGRFCQVPAGGAGGGTGGSGPGLSRTGALSTGALPPLAPEGDSVASKHAIYAVQVIADPPGPGEGPPAQHAAFLVPLGPGQISAEVQAPPPVVNVRVHHPPEASVQVHRIESSNAESAAPSQHLLPHPKPSHPRPPTQKPLGRCFQDTLPKQPCGSNPLPGLTKQEDCCGSIGTAWGQSKCHKCPQLQYTGVQKPGPVRGEVGADCPQGYKRLNSTHCQDINECAMPGVCRHGDCLNNPGSYRCVCPPGHSLGPSRTQCIADKPEEKSLCFRLVSPEHQCQHPLTTRLTRQLCCCSVGKAWGARCQRCPTDGTAAFKEICPAGKGYHILTSHQTLTIQGESDFSLFLHPDGPPKPQQLPESPSQAPPPEDTEEERGVTTDSPVSEERSVQQSHPTATTTPARPYPELISRPSPPTMRWFLPDLPPSRSAVEIAPTQVTETDECRLNQNICGHGECVPGPPDYSCHCNPGYRSHPQHRYCVDVNECEAEPCGPGRGICMNTGGSYNCHCNRGYRLHVGAGGRSCVDLNECAKPHLCGDGGFCINFPGHYKCNCYPGYRLKASRPPVCEDIDECRDPSSCPDGKCENKPGSFKCIACQPGYRSQGGGACRDVNECAEGSPCSPGWCENLPGSFRCTCAQGYAPAPDGRSCLDVDECEAGDVCDNGICSNTPGSFQCQCLSGYHLSRDRSHCEDIDECDFPAACIGGDCINTNGSYRCLCPQGHRLVGGRKCQDIDECSQDPSLCLPHGACKNLQGSYVCVCDEGFTPTQDQHGCEEVEQPHHKKECYLNFDDTVFCDSVLATNVTQQECCCSLGAGWGDHCEIYPCPVYSSAEFHSLCPDGKGYTQDNNIVNYGIPAHRDIDECMLFGSEICKEGKCVNTQPGYECYCKQGFYYDGNLLECVDVDECLDESNCRNGVCENTRGGYRCACTPPAEYSPAQRQCLSPEEMERAPERRDVCWSQRGEDGMCAGPLAGPALTFDDCCCRQGRGWGAQCRPCPPRGAGSHCPTSQSESNSFWDTSPLLLGKPPRDEDSSEEDSDECRCVSGRCVPRPGGAVCECPGGFQLDASRARCVDIDECRELNQRGLLCKSERCVNTSGSFRCVCKAGFARSRPHGACVPQRRR

SEQ ID NO: 8117 - protein, 1303 aa, Homo Sapiens
MPGPRGAAGGLAPEMRGAGAAGLLALLLLLLLLLLGLGGRVEGGPAGERGAGGGGALARERFKVVFAPVICKRTCLKGQCRDSCQQGSNMTLIGENGHSTDTLTGSGFRVVVCPLPCMNGGQCSSRNQCLCPPDFTGRFCQVPAGGAGGGTGGSGPGLSRTGALSTGALPPLAPEGDSVASKHAIYAVQVIADPPGPGEGPPAQHAAFLVPLGPGQISAEVQAPPPVVNVRVHHPPEASVQVHRIESSNAESAAPSQHLLPHPKPSHPRPPTQKPLGRCFQDTLPKQPCGSNPLPGLTKQEDCCGSIGTAWGQSKCHKCPQLQYTGVQKPGPVRGEVGADCPQGYKRLNSTHCQDINECAMPGVCRHGDCLNNPGSYRCVCPPGHSLGPSRTQCIADKPEEKSLCFRLVSPEHQCQHPLTTRLTRQLCCCSVGKAWGARCQRCPTDGTAAFKEICPAGKGYHILTSHQTLTIQGESDFSLFLHPDGPPKPQQLPESPSQAPPPEDTEEERGVTTDSPVSEERSVQQSHPTATTTPARPYPELISRPSPPTMRWFLPDLPPSRSAVEIAPTQVTETDECRLNQNICGHGECVPGPPDYSCHCNPGYRSHPQHRYCVDVNECEAEPCGPGRGICMNTGGSYNCHCNRGYRLHVGAGGRSCVDLNECAKPHLCGDGGFCINFPGHYKCNCYPGYRLKASRPPVCEDIDECRDPSSCPDGKCENKPGSFKCIACQPGYRSQGGGACRDVNECAEGSPCSPGWCENLPGSFRCTCAQGYAPAPDGRSCLDVDECEAGDVCDNGICSNTPGSFQCQCLSGYHLSRDRSHCEDIDECDFPAACIGGDCINTNGSYRCLCPQGHRLVGGRKCQDIDECSQDPSLCLPHGACKNLQGSYVCVCDEGFTPTQDQHGCEEVEQPHHKKECYLNFDDTVFCDSVLATNVTQQECCCSLGAGWGDHCEIYPCPVYSSAEFHSLCPDGKGYTQDNNIVNYGIPAHRDIDECMLFGSEICKEGKCVNTQPGYECYCKQGFYYDGNLLECVDVDECLDESNCRNGVCENTRGGYRCACTPPAEYSPAQRQCLSPEEMDVDECQDPAACRPGRCVNLPGSYRCECRPPWVPGPSGRDCQLPESPAERAPERRDVCWSQRGEDGMCAGPLAGPALTFDDCCCRQGRGWGAQCRPCPPRGAGSHCPTSQSESNSFWDTSPLLLGKPPRDEDSSEEDSDECRCVSGRCVPRPGGAVCECPGGFQLDASRARCVDIDECRELNQRGLLCKSERCVNTSGSFRCVCKAGFARSRPHGACVPQRRR

SEQ ID NO: 8118 - protein, 116 aa, Homo Sapiens
MPGPRGAAGGLAPEMRGAGAAGLLALLLLLLLLLLGLGGRVEGGPAGERGAGGGGALARERFKVVFAPVICKRTCLKGQCRDSCQQGSNMTLIGENGHSTDTLTGSGFRWCALSPA

SEQ ID NO: 8119 - protein, 1137 aa, Homo Sapiens
MTLIGENGHSTDTLTGSGFRVVVCPLPCMNGGQCSSRNQCLCPPDFTGRFCQVPAGGAGGGTGGSGPGLSRTGALSTGALPPLAPEGDSVASKHAIYAVQVIADPPGPGEGPPAQHAAFLVPLGPGQISAEVQAPPPVVNVRVHHPPEASVQVHRIESSNAESAAPSQHLLPHPKPSHPRPPTQKPLGRCFQDTLPKQPCGSNPLPGLTKQEDCCGSIGTAWGQSKCHKCPQLQYTGVQKPGPVRGEVGADCPQGYKRLNSTHCQDINECAMPGVCRHGDCLNNPGSYRCVCPPGHSLGPSRTQCIADKPEEKSLCFRLVSPEHQCQHPLTTRLTRQLCCCSVGKAWGARCQRCPTDGTAAFKEICPAGKGYHILTSHQTLTIQGESDFSLFLHPDGPPKPQQLPESPSQAPPPEDTEEERGVTTDSPVSEERSVQQSHPTATTTPARPYPELISRPSPPTMRWFLPDLPPSRSAVEIAPTQVTETDECRLNQNICGHGECVPGPPDYSCHCNPGYRSHPQHRYCVDVNECEAEPCGPGRGICMNTGGSYNCHCNRGYRLHVGAGGRSCVDLNECAKPHLCGDGGFCINFPGHYKCNCYPGYRLKASRPPVCEDIDECRDPSSCPDGKCENKPGSFKCIACQPGYRSQGGGACRDVNECAEGSPCSPGWCENLPGSFRCTCAQGYAPAPDGRSCLDVDECEAGDVCDNGICSNTPGSFQCQCLSGYHLSRDRSHCEDIDECDFPAACIGGDCINTNGSYRCLCPQGHRLVGGRKCQDIDECSQDPSLCLPHGACKNLQGSYVCVCDEGFTPTQDQHGCEEVEQPHHKKECYLNFDDTVFCDSVLATNVTQQECCCSLGAGWGDHCEIYPCPVYSSAEFHSLCPDGKGYTQDNNIVNYGIPAHRDIDECMLFGSEICKEGKCVNTQPGYECYCKQGFYYDGNLLECVDVDECLDESNCRNGVCENTRGGYRCACTPPAEYSPAQRQCLSPEEMDVDECQDPAACRPGRCVNLPGSYRCECRPPWVPGPSGRDCQLPESPAERAPERRDVCWSQRGEDGMCAGPLAGPALTFDDCCCRQGRGWGAQCRPCPPRGAGSHCPTSQSESNSFWDTSPLLLGKPPRDEDSSEEDSDECRCVSG

SEQ ID NO: 8120 - protein, 907 aa, Homo Sapiens
  misc_feature (1)..(1): Xaa can be any naturally occurring amino acid
XFAPVICKRTCLKGQCRDSCQQGSNMTLIGENGHSTDTLTGSGFRVADKPEEKSLCFRLVSPEHQCQHPLTTRLTRQLCCCSVGKAWGARCQRCPTDGTAAFKEICPAGKGYHILTSHQTLTIQGESDFSLFLHPDGPPKPQQLPESPSQAPPPEDTEEERGVTTDSPVSEERSVQQSHPTATTTPARPYPELISRPSPPTMRWFLPDLPPSRSAVEIAPTQVTETDECRLNQNICGHGECVPGPPDYSCHCNPGYRSHPQHRYCVDVNECEAEPCGPGRGICMNTGGSYNCHCNRGYRLHVGAGGRSCVDLNECAKPHLCGDGGFCINFPGHYKCNCYPGYRLKASRPPVCEDIDECRDPSSCPDGKCENKPGSFKCIACQPGYRSQGGGACRDVNECAEGSPCSPGWCENLPGSFRCTCAQGYAPAPDGRSCLDVDECEAGDVCDNGICSNTPGSFQCQCLSGYHLSRDRSHCEDIDECDFPAACIGGDCINTNGSYRCLCPQGHRLVGGRKCQDIDECSQDPSLCLPHGACKNLQGSYVCVCDEGFTPTQDQHGCEEVEQPHHKKECYLNFDDTVFCDSVLATNVTQQECCCSLGAGWGDHCEIYPCPVYSSAEFHSLCPDGKGYTQDNNIVNYGIPAHRDIDECMLFGSEICKEGKCVNTQPGYECYCKQGFYYDGNLLECVDVDECLDESNCRNGVCENTRGGYRCACTPPAEYSPAQRQCLSPEEMERAPERRDVCWSQRGEDGMCAGPLAGPALTFDDCCCRQGRGWGAQCRPCPPRGAGSHCPTSQSESNSFWDTSPLLLGKPPRDEDSSEEDSDECRCVSGRCVPRPGGAVCECPGGFQLDASRARCVDIDECRELNQRGLLCKSERCVNTSGSFRCVCKAGFARSRPHGACVPQRRR

SEQ ID NO: 8121 - protein, 69 aa, Homo Sapiens
  misc_feature (1)..(1): Xaa can be any naturally occurring amino acid
XFAPVICKRTCLKGQCRDSCQQGSNMTLIGENGHSTDTLTGSGFRVGPAPRGECARPSPARGLSPGAPH

SEQ ID NO: 8122 - protein, 303 aa, Homo Sapiens
ECLNTDGSFACTCAPGYRPGPRGASCLDVDECSEEDLCQSGICTNTDGSFECICPPGHRAGPDLASCLDVDECRERGPALCGSQRCENSPGSYRCVRDCDPGYHAGPEGTCDDVNECETLQGVCGAALCENVEGSFLCVCPNSPEEFDPMTGRCVPPRTSADVDECQLFRDQVCKSGVCVNTAPGYSCYCSNGYYYHTQRLECIDNDECADEEPACEGGRCVNTVGSYHCTCEPPLVLDGSQRRCVSNESQSLDDNLGVCWQEVGADLVCSHPRLDRQATYTECCCLYGEAWGMDCALCPAQD

SEQ ID NO: 8123 - protein, 1557 aa, Homo Sapiens
MAGGVRLLWVSLLVLLAQLGPQPGLGRLGERLRVRFTPVVCGLRCVHGPTGSRCTPTCAPRNATSVDSGAPGGAAPGGPGFRAFLCPLICHNGGVCVKPDRCLCPPDFAGKFCQLHSSGARPPAPAVPGLTRSVYTMPLANHRDDEHGVASMVSVHVEHPQEASVVVHQVERVSGPWEEADAEAVARAEAAARAEAAAPYTVLAQSAPREDGYSDASGFGYCFRELRGGECASPLPGLRTQEVCCRGAGLAWGVHDCQLCSERLGNSERVSAPDGPCPTGFERVNGSCEDVDECATGGRCQHGECANTRGGYTCVCPDGFLLDSSRSSCISQHVISEAKGPCFRVLRDGGCSLPILRNITKQICCCSRVGKAWGRGCQLCPPFGSEGFREICPAGPGYHYSASDLRYNTRPLGQEPPRVSLSQPRTLPATSRPSAGFLPTHRLEPRPEPRPDPRPGPELPLPSIPAWTGPEIPESGPSSGMCQRNPQVCGPGRCISRPSGYTCACDSGFRLSPQGTRCIDVDECRRVPPPCAPGRCENSPGSFRCVCGPGFRAGPRAAECLDVDECHRVPPPCDLGRCENTPGSFLCVCPAGYQAAPHGASCQDVDECTQSPGLCGRGACKNLPGSFRCVCPAGFRGSACEEDVDECAQEPPPCGPGRCDNTAGSFHCACPAGFRSRGPGAPCQDVDECARSPPPCTYGRCENTEGSFQCVCPMGFQPNTAGSECEDVDECENHLACPGQECVNSPGSFQCRTCPSGHHLHRGRCTDVDECSSGAPPCGPHGHCTNTEGSFRCSCAPGYRAPSGRPGPCADVNECLEGDFCFPHGECLNTDGSFACTCAPGYRPGPRGASCLDVDECSEEDLCQSGICTNTDGSFECICPPGHRAGPDLASCLDVDECRERGPALCGSQRCENSPGSYRCVRDCDPGYHAGPEGTCDDVDECQEYGPEICGAQRCENTPGSYRCTPACDPGYQPTPGGGCQDVDECRNRSFCGAHAVCQNLPGSFQCLCDQGYEGARDGRHCVDVNECETLQGVCGAALCENVEGSFLCVCPNSPEEFDPMTGRCVPPRTSAGTFPGSQPQAPASPVLPARPPPPPLPRRPSTPRQGPVGSGRRECYFDTAAPDACDNILARNVTWQECCCTVGEGWGSGCRIQQCPGTETAEYQSLCPHGRGYLAPSGDLSLRRDVDECQLFRDQVCKSGVCVNTAPGYSCYCSNGYYYHTQRLECIDNDECADEEPACEGGRCVNTVGSYHCTCEPPLVLDGSQRRCVSNESQSLDDNLGVCWQEVGADLVCSHPRLDRQATYTECCCLYGEAWGMDCALCPAQDSDDFEALCNVLRPPAYSPPRPGGFGLPYEYGPDLGPPYQGLPYGPELYPPPALPYDPYPPPPGPFARREAPYGAPRFDMPDFEDDGGPYGESEAPAPPGPGTRWPYRSRDTRRSFPEPEEPPEGGSYAGSLAEPYEELEAEECGILDGCTNGRCVRVPEGFTCRCFDGYRLDMTRMACVDINECDEAEAASPLCVNARCLNTDGSFRCICRPGFAPTHQPHHCAPARPRA

SEQ ID NO: 8124 - protein, 44 aa, Homo Sapiens
MGDVKALLFVAAARARRLGGAAASEPSAGSEAASPKSVQAPSGA

SEQ ID NO: 8125 - protein, 1587 aa, Homo Sapiens
MGDVKALLFVAAARARRLGGAAASESLAVSEAFCRVRSCQPKKCAGPQRCLNPVPAVPSPSPSVRKRQVSLNWQPLTLQEARALLKRRRPRGPGGRGLLRRRPPQRAPAGKAPVLCPLICHNGGVCVKPDRCLCPPDFAGKFCQLHSSGARPPAPAVPGLTRSVYTMPLANHRDDEHGVASMVSVHVEHPQEASVVVHQVERVSGPWEEADAEAVARAEAAARAEAAAPYTVLAQSAPREDGYSDASGFGYCFRELRGGECASPLPGLRTQEVCCRGAGLAWGVHDCQLCSERLGNSERVSAPDGPCPTGFERVNGSCEDVDECATGGRCQHGECANTRGGYTCVCPDGFLLDSSRSSCISQHVISEAKGPCFRVLRDGGCSLPILRNITKQICCCSRVGKAWGRGCQLCPPFGSEGFREICPAGPGYHYSASDLRYNTRPLGQEPPRVSLSQPRTLPATSRPSAGFLPTHRLEPRPEPRPDPRPGPELPLPSIPAWTGPEIPESGPSSGMCQRNPQVCGPGRCISRPSGYTCACDSGFRLSPQGTRCIDVDECRRVPPPCAPGRCENSPGSFRCVCGPGFRAGPRAAECLDVDECHRVPPPCDLGRCENTPGSFLCVCPAGYQAAPHGASCQDVDECTQSPGLCGRGACKNLPGSFRCVCPAGFRGSACEEDVDECAQEPPPCGPGRCDNTAGSFHCACPAGFRSRGPGAPCQDVDECARSPPPCTYGRCENTEGSFQCVCPMGFQPNTAGSECEDVDECENHLACPGQECVNSPGSFQCRTCPSGHHLHRGRCTDVDECSSGAPPCGPHGHCTNTEGSFRCSCAPGYRAPSGRPGPCADVNECLEGDFCFPHGECLNTDGSFACTCAPGYRPGPRGASCLDVDECSEEDLCQSGICTNTDGSFECICPPGHRAGPDLASCLDVDECRERGPALCGSQRCENSPGSYRCVRDCDPGYHAGPEGTCDDVDECQEYGPEICGAQRCENTPGSYRCTPACDPGYQPTPGGGCQDVDECRNRSFCGAHAVCQNLPGSFQCLCDQGYEGARDGRHCVDVNECETLQGVCGAALCENVEGSFLCVCPNSPEEFDPMTGRCVPPRTSAGTFPGSQPQAPASPVLPARPPPPPLPRRPSTPRQGPVGSGRRECYFDTAAPDACDNILARNVTWQECCCTVGEGWGSGCRIQQCPGTETAEYQSLCPHGRGYLAPSGDLSLRRDVDECQLFRDQVCKSGVCVNTAPGYSCYCSNGYYYHTQRLECIDNDECADEEPACEGGRCVNTVGSYHCTCEPPLVLDGSQRRCVSNESQSLDDNLGVCWQEVGADLVCSHPRLDRQATYTECCCLYGEAWGMDCALCPAQDSDDFEALCNVLRPPAYSPPRPGGFGLPYEYGPDLGPPYQGLPYGPELYPPPALPYDPYPPPPGPFARREAPYGAPRFDMPDFEDDGGPYGESEAPAPPGPGTRWPYRSRDTRRSFPEPEEPPEGGSYAGSLAEPYEELEAEECGILDGCTNGRCVRVPEGFTCRCFDGYRLDMTRMACVDINECDEAEAASPLCVNARCLNTDGSFRCICRPGFAPTHQPHHCAPARPRA

SEQ ID NO: 8126 - protein, 44 aa, Homo Sapiens
MLQPQALLFVAAARARRLGGAAASEPSAGSEAASPKSVQAPSGA

SEQ ID NO: 8127 - protein, 1624 aa, Homo Sapiens
MPRPGTSGRRPLLLVLLLPLFAAATSAASPSPSPSQVVEVPGVPSRPASVAVCRCCPGQTSRRSRCIRAFCRVRSCQPKKCAGPQRCLNPVPAVPSPSPSVRKRQVSLNWQPLTLQEARALLKRRRPRGPGGRGLLRRRPPQRAPAGKAPVLCPLICHNGGVCVKPDRCLCPPDFAGKFCQLHSSGARPPAPAVPGLTRSVYTMPLANHRDDEHGVASMVSVHVEHPQEASVVVHQVERVSGPWEEADAEAVARAEAAARAEAAAPYTVLAQSAPREDGYSDASGFGYCFRELRGGECASPLPGLRTQEVCCRGAGLAWGVHDCQLCSERLGNSERVSAPDGPCPTGFERVNGSCEDVDECATGGRCQHGECANTRGGYTCVCPDGFLLDSSRSSCISQHVISEAKGPCFRVLRDGGCSLPILRNITKQICCCSRVGKAWGRGCQLCPPFGSEGFREICPAGPGYHYSASDLRYNTRPLGQEPPRVSLSQPRTLPATSRPSAGFLPTHRLEPRPEPRPDPRPGPELPLPSIPAWTGPEIPESGPSSGMCQRNPQVCGPGRCISRPSGYTCACDSGFRLSPQGTRCIDVDECRRVPPPCAPGRCENSPGSFRCVCGPGFRAGPRAAECLDVDECHRVPPPCDLGRCENTPGSFLCVCPAGYQAAPHGASCQDVDECTQSPGLCGRGACKNLPGSFRCVCPAGFRGSACEEDVDECAQEPPPCGPGRCDNTAGSFHCACPAGFRSRGPGAPCQDVDECARSPPPCTYGRCENTEGSFQCVCPMGFQPNTAGSECEDVDECENHLACPGQECVNSPGSFQCRTCPSGHHLHRGRCTDVDECSSGAPPCGPHGHCTNTEGSFRCSCAPGYRAPSGRPGPCADVNECLEGDFCFPHGECLNTDGSFACTCAPGYRPGPRGASCLDVDECSEEDLCQSGICTNTDGSFECICPPGHRAGPDLASCLDVDECRERGPALCGSQRCENSPGSYRCVRDCDPGYHAGPEGTCDDVDECQEYGPEICGAQRCENTPGSYRCTPACDPGYQPTPGGGCQDVDECRNRSFCGAHAVCQNLPGSFQCLCDQGYEGARDGRHCVDVNECETLQGVCGAALCENVEGSFLCVCPNSPEEFDPMTGRCVPPRTSAGTFPGSQPQAPASPVLPARPPPPPLPRRPSTPRQGPVGSGRRECYFDTAAPDACDNILARNVTWQECCCTVGEGWGSGCRIQQCPGTETAEYQSLCPHGRGYLAPSGDLSLRRDVDECQLFRDQVCKSGVCVNTAPGYSCYCSNGYYYHTQRLECIDNDECADEEPACEGGRCVNTVGSYHCTCEPPLVLDGSQRRCVSNESQSLDDNLGVCWQEVGADLVCSHPRLDRQATYTECCCLYGEAWGMDCALCPAQDSDDFEALCNVLRPPAYSPPRPGGFGLPYEYGPDLGPPYQGLPYGPELYPPPALPYDPYPPPPGPFARREAPYGAPRFDMPDFEDDGGPYGESEAPAPPGPGTRWPYRSRDTRRSFPEPEEPPEGGSYAGSLAEPYEELEAEECGILDGCTNGRCVRVPEGFTCRCFDGYRLDMTRMACVDINECDEAEAASPLCVNARCLNTDGSFRCICRPGFAPTHQPHHCAPARPRA

SEQ ID NO: 8128 - protein, 70 aa, Homo Sapiens
MSARTAPFSWSGGKLRPKDQETLASGHTSWKALLFVAAARARRLGGAAASEPSAGSEAASPKSVQAPSGA

SEQ ID NO: 8129 - protein, 145 aa, Homo Sapiens
PPGPGTRWPYRSRDTRRSFPEPEEPPEGGSYAGSLAEPYEELEAEECGILDGCTNGRCVRVPEGFTCRCFDGYRLDMTRMACVAFSSDRCLPSADINECDEAEAASPLCVNARCLNTDGSFRCICRPGFAPTHQPHHCAPARPRA

SEQ ID NO: 8130 - protein, 252 aa, Homo Sapiens
  misc_feature (1)..(1): Xaa can be any naturally occurring amino acid
XFRCSCAPGYRAPSGRPGPCADVNECLEGDFCFPHGECLNTDGSFACTCAPGYRPGPRGASCLDVDECSEEDLCQSGICTNTDGSFECICPPGHRAGPDLASCLDVDECRERGPALCGSQRCENSPGSYRCVRDCDPGYHAGPEGTCDDVDECRNRSFCGAHAVCQNLPGSFQCLCDQGYEGARDGRHCVDVNECETLQGVCGAALCENVEGSFLCVCPNSPEEFDPMTGRCVPPRTSAGTFPGSQPQAPAS

SEQ ID NO: 8131 - protein, 182 aa, Homo Sapiens
  misc_feature (1)..(1): Xaa can be any naturally occurring amino acid
XGPEICGAQRCENTPGSYRCTPACDPGYQPTPGGGCQDVDECRNRSFCGAHAVCQNLPGSFQCLCDQGYEGARDGRHCVDVNECETLQGVCGAALCENVEGSFLCVCPNSPEEFDPMTGRCVPPRTSADVDECQLFRDQVCKSGVCVNTAPGYSCYCSNGYYYHTQRLECIDNDECADEEPA

SEQ ID NO: 8132 - protein, 224 aa, Homo Sapiens
  misc_feature (1)..(1): Xaa can be any naturally occurring amino acid
XNTDGSFACTCAPGYRPGPRGASCLDVDECSEEDLCQSGICTNTDGSFECICPPGHRAGPDLASCLDVDECRERGPALCGSQRCENSPGSYRCVRDCDPGYHAGPEGTCDDVDECQEYGPEICGAQRCENTPGSYRCTPACDPGYQPTPGGGCQDVNECETLQGVCGAALCENVEGSFLCVCPNSPEEFDPMTGRCVPPRTSAGTFPGSQPQAPASPVLPARPP

SEQ ID NO: 8133 - protein, 674 aa, Homo Sapiens
  misc_feature (1)..(1): Xaa can be any naturally occurring amino acid
XNTEGSFQCVCPMGFQPNTAGSECEDVDECENHLACPGQECVNSPGSFQCRTCPSGHHLHRGRCTDVDECSSGAPPCGPHGHCTNTEGSFRCSCAPGYRAPSGRPGPCADVNECLEGDFCFPHGECLNTDGSFACTCAPGYRPGPRGASCLDVDECSEEDLCQSGICTNTDGSFECICPPGHRAGPDLASCLDVDECRERGPALCGSQRCENSPGSYRCVRDCDPGYHAGPEGTCDDVNECETLQGVCGAALCENVEGSFLCVCPNSPEEFDPMTGRCVPPRTSAGTFPGSQPQAPASPVLPARPPPPPLPRRPSTPRQGPVGSGRRECYFDTAAPDACDNILARNVTWQECCCTVGEGWGSGCRIQQCPGTETAEYQSLCPHGRGYLAPSGDLSLRRDVDECQLFRDQVCKSGVCVNTAPGYSCYCSNGYYYHTQRLECIDNDECADEEPACEGGRCVNTVGSYHCTCEPPLVLDGSQRRCVSNESQSLDDNLGVCWQEVGADLVCSHPRLDRQATYTECCCLYGEAWGMDCALCPAQDSDDFEALCNVLRPPAYSPPRPGGFGLPYEYGPDLGPPYQGLPYGPELYPPPALPYDPYPPPPGPFARREAPYGAPRFDMPDFEDDGGPYGESEAPAPPGPGTRWPYRSRDTRRSFPEPEEPPEGGSYAGSLAEP

SEQ ID NO: 8134 - protein, 94 aa, Homo Sapiens
  misc_feature (1)..(1): Xaa can be any naturally occurring amino acid
XRFDMPDFEDDGGPYGESEAEECGILDGCTNGRCVRVPEGFTCRCFDGYRLDMTRMACVDINECDEAEAASPLCVNARCLNTDGSFRCICRPGF

SEQ ID NO: 8135 - protein, 957 aa, Homo Sapiens
  misc_feature (1)..(1): Xaa can be any naturally occurring amino acid
XVDECRRVPPPCAPGRCENSPGSFRCVCGPGFRAGPRAAECLDVDECHRVPPPCDLGRCENTPGSFLCVCPAGYQAAPHGASCQDVDECARSPPPCTYGRCENTEGSFQCVCPMGFQPNTAGSECEDVDECENHLACPGQECVNSPGSFQCRTCPSGHHLHRGRCTDVDECSSGAPPCGPHGHCTNTEGSFRCSCAPGYRAPSGRPGPCADVNECLEGDFCFPHGECLNTDGSFACTCAPGYRPGPRGASCLDVDECSEEDLCQSGICTNTDGSFECICPPGHRAGPDLASCLDVDECRERGPALCGSQRCENSPGSYRCVRDCDPGYHAGPEGTCDDVDECQEYGPEICGAQRCENTPGSYRCTPACDPGYQPTPGGGCQDVDECRNRSFCGAHAVCQNLPGSFQCLCDQGYEGARDGRHCVDVNECETLQGVCGAALCENVEGSFLCVCPNSPEEFDPMTGRCVPPRTSAGTFPGSQPQAPASPVLPARPPPPPLPRRPSTPRQGPVGSGRRECYFDTAAPDACDNILARNVTWQECCCTVGEGWGSGCRIQQCPGTETAEYQSLCPHGRGYLAPSGDLSLRRDVDECQLFRDQVCKSGVCVNTAPGYSCYCSNGYYYHTQRLECIDNDECADEEPACEGGRCVNTVGSYHCTCEPPLVLDGSQRRCVSNESQSLDDNLGVCWQEVGADLVCSHPRLDRQATYTECCCLYGEAWGMDCALCPAQDSDDFEALCNVLRPPAYSPPRPGGFGLPYEYGPDLGPPYQGLPYGPELYPPPALPYDPYPPPPGPFARREAPYGAPRFDMPDFEDDGGPYGESEAPAPPGPGTRWPYRSRDTRRSFPEPEEPPEGGSYAGSLAEPYEELEAEECGILDGCTNGRCVRVPEGFTCRCFDGYRLDMTRMACVDINECDEAEAASPLCVNARCLNTDGSFRCICRPGFAPTHQPHHCAPARPRA

SEQ ID NO: 8136 - protein, 191 aa, Homo Sapiens
  misc_feature (1)..(1): Xaa can be any naturally occurring amino acid
XVDECSEEDLCQSGICTNTDGSFECICPPGHRAGPDLASCLDVDECRERGPALCGSQRCENSPGSYRCVRDCDPGYHAGPEGTCDDVDECQEYGPEICGAQRCENTPGSYRCTPACDPGYQPTPGGGCQDVNECETLQGVCGAALCENVEGSFLCVCPNSPEEFDPMTGRCVPPRTSADVDECQLFRDQVC

SEQ ID NO: 8137 - protein, 189 aa, Homo Sapiens
  misc_feature (1)..(1): Xaa can be any naturally occurring amino acid
XVDECSEEDLCQSGICTNTDGSFECICPPGHRAGPDLASCLDVDECRERGPALCGSQRCENSPGSYRCVRDCDPGYHAGPEGTCDDVDECRNRSFCGAHAVCQNLPGSFQCLCDQGYEGARDGRHCVDVNECETLQGVCGAALCENVEGSFLCVCPNSPEEFDPMTGRCVPPRTSAGTFPGSQPQAPAS

SEQ ID NO: 8138 - protein, 416 aa, Homo Sapiens
MEATGISLASQLKVPPYASENQTCRDQEKEYYEPQHRICCSRCPPGTYVSAKCSRIRDTVCATCAENSYNEHWNYLTICQLCRPCDPVMGLEEIAPCTSKRKTQCRCQPGMFCAAWALECTHCELLSDCPPGTEAELKDEVGKGNNHCVPCKAGHFQNTSSPSARCQPHTRCENQGLVEAAPGTAQSDTTCKNPLEPLPPEMSGTMLMLAVLLPLAFFLLLATVFSCIWKSHPSLCRKLGSLLKRRPQGEGPNPVAGSWEPPKAHPYFPDLVQPLLPISGDVSPVSTGLPAAPVLEAGVPQQQSPLDLTREPQLEPGEQSQVAHGTNGIHVTGGSMTITGNIYIYNGPVLGGPPGPGDLPATPEPPYPIPEEGDPGPPGLSTPHQEDGKAWHLAETEHCGATPSNRGPRNQFITHD

SEQ ID NO: 8139 - protein, 148 aa, Homo Sapiens
MGLEEIAPCTSKRKTQCRCQPGMFCAAWALECTHCELLSDCPPGTEAELKDEVGKGNNHCVPCKAGHFQNTSSPSARCQPHTRCENQGLVEAAPGTAQSDTTCKNPLEPLPPEMSEPALSKGVENLQALLYQAATGSSEASFPTLSPL

SEQ ID NO: 8140 - protein, 292 aa, Homo Sapiens
MGLEEIAPCTSKRKTQCRCQPGMFCAAWALECTHCELLSDCPPGTEAELKDEVGKGNNHCVPCKAGHFQNTSSPSARCQPHTRCENQGLVEAAPGTAQSDTTCKNPLEPLPPEMSGSLLKRRPQGEGPNPVAGSWEPPKAHPYFPDLVQPLLPISGDVSPVSTGLPAAPVLEAGVPQQQSPLDLTREPQLEPGEQSQVAHGTNGIHVTGGSMTITGNIYIYNGPVLGGPPGPGDLPATPEPPYPIPEEGDPGPPGLSTPHQEDGKAWHLAETEHCGATPSNRGPRNQFITHD

SEQ ID NO: 8141 - protein, 74 aa, Homo Sapiens
MGLEEIAPCTSKRKTQCRCQPGMFCAAWALECTHCELLSDCPPGTEAELKGVRTKVWWRQLQALPSPTQPAKIH

SEQ ID NO: 8142 - protein, 218 aa, Homo Sapiens
MLLPWATSAPGLAWGPLVLGLFGLLAASQPQAVPPYASENQTCRDQEKEYYEPQHRICCSRCPPAKCSRIRDTVCATCAENSYNEHWNYLTICQLCRPCDPVMGLEEIAPCTSKRKTQCRCQPGMFCAAWALECTHCELLSDCPPGTEAELKDEVGKGNNHCVPCKAGHFQNTSSPSARCQPHTRCENQGLVEAAPGTAQSDTTCKNPLEPLPPEMSG

SEQ ID NO: 8143 - protein, 435 aa, Homo Sapiens
MLLPWATSAPGLAWGPLVLGLFGLLAASQPQAVPPYASENQTCRDQEKEYYEPQHRICCSRCPPGTYVSAKCSRIRDTVCATCAENSYNEHWNYLTICQLCRPCDPVMGLEEIAPCTSKRKTQCRCQPGMFCAAWALECTHCELLSDCPPGTEAELKDEVGKGNNHCVPCKAGHFQNTSSPSARCQPHTRCENQGLVEAAPGTAQSDTTCKNPLEPLPPEMSGTMLMLAVLLPLAFFLLLATVFSCIWKSHPSLCRKLGSLLKRRPQGEGPNPVAGSWEPPKAHPYFPDLVQPLLPISGDVSPVSTGLPAAPVLEAGVPQQQSPLDLTREPQLEPGEQSQVAHGTNGIHVTGGSMTITGNIYIYNGPVLGGPPGPGDLPATPEPPYPIPEEGDPGPPGLSTPHQEDGKAWHLAETEHCGATPSNRGPRNQFITHD

SEQ ID NO: 8144 - protein, 696 aa, Homo Sapiens
MGLCLAGRRRSVQWCAVSQPEATKCFQWQRNMRKVRGPPVSCIKRDSPIQCIQAIAENRADAVTLDGGFIYEAGLAPYKLRPVAAEVYGTERQPRTHYYAVAVVKKGGSFQLNELQGLKSCHTGLRRTAGWNVPIGTLRPFLNWTGPPEPIEAAVARFFSASCVPGADKGQFPNLCRLCAGTGENKCAFSSQEPYFSYSGAFKCLRDGAGDVAFIRESTVFEDLSDEAERDEYELLCPDNTRKPVDKFKDCHLARVPSHAVVARSVNGKEDAIWNLLRQAQEKFGKDKSPKFQLFGSPSGQKDLLFKDSAIGFSRVPPRIDSGLYLGSGYFTAIQNLRKSEEEVAARRARVVWCAVGEQELRKCNQWSGLSEGSVTCSSASTTEDCIALVLKGEADAMSLDGGYVYTAGKCGLVPVLAENYKSQQSSDPDPNCVDRPVEGYLAVAVVRRSDTSLTWNSVKGKKSCHTAVDRTAGWNIPMGLLFNQTGSCKFDEYFSQSCAPGSDPRSNLCALCIGDEQGENKCVPNSNERYYGYTGAFRCLAENAGDVAFVKDVTVLQNTDGNNNEAWAKDLKLADFALLCLDGKRKPVTEARSCHLAMAPNHAVVSRMDKVERLKQVLLHQQAKFGRNGSDCPDKFCLFQSETKNLLFNDNTECLARLHGKTTYEKYLGPQYVAGITNLKKCSTSPLLEACEFLR

SEQ ID NO: 8145 - protein, 182 aa, Homo Sapiens
MKLVFLVLLFLGALGFLWMPFIRQPGLCLAGRRRSVQWCAVSQPEATKCFQWQRNMRKVRGPPVSCIKRDSPIQCIQAIAENRADAVTLDGGFIYEAGLAPYKLRPVAAEVYGTERQPRTHYYAVAVVKKGGSFQLNELQGLKSCHTGLRRTAGWNVPIGTLRPFLNWTGPPEPIEAAVARF

SEQ ID NO: 8146 - protein, 710 aa, Homo Sapiens
MKLVFLVLLFLGALGLCLAGRRRSVQWCAVSQPEATKCFQWQRNMRKVRGPPVSCIKRDSPIQCIQAIAENRADAVTLDGGFIYEAGLAPYKLRPVAAEVYGTERQPRTHYYAVAVVKKGGSFQLNELQGLKSCHTGLRRTAGWNVPIGTLRPFLNWTGPPEPIEAAVARFFSASCVPGADKGQFPNLCRLCAGTGENKCAFSSQEPYFSYSGAFKCLRDGAGDVAFIRESTVFEDLSDEAERDEYELLCPDNTRKPVDKFKDCHLARVPSHAVVARSVNGKEDAIWNLLRQAQEKFGKDKSPKFQLFGSPSGQKDLLFKDSAIGFSRVPPRIDSGLYLGSGYFTAIQNLRKSEEEVAARRARVVWCAVGEQELRKCNQWSGLSEGSVTCSSASTTEDCIALVLKGEADAMSLDGGYVYTAGKCGLVPVLAENYKSQQSSDPDPNCVDRPVEGYLAVAVVRRSDTSLTWNSVKGKKSCHTAVDRTAGWNIPMGLLFNQTGSCKFDEYFSQSCAPGSDPRSNLCALCIGDEQGENKCVPNSNERYYGYTGAFRCLAENAGDVAFVKDVTVLQNTDGNNNEAWAKDLKLADFALLCLDGKRKPVTEARSCHLAMAPNHAVVSRMDKVERLKQVLLHQQAKFGRNGSDCPDKFCLFQSETKNLLFNDNTECLARLHGKTTYEKYLGPQYVAGITNLKKCSTSPLLEACEFLRK

SEQ ID NO: 8147 - protein, 708 aa, Homo Sapiens
MKLVFLVLLFLGALGLCLAGRRRSVQWCAVSQPEATKCFQWQRNMRKVRGPPVSCIKRDSPIQCIQAIAENRADAVTLDGGFIYEAGLAPYKLRPVAAEVYGTERQPRTHYYAVAVVKKGGSFQLNELQGLKSCHTGLRRTAGWNVPIGTLRPFLNWTGPPEPIEAAVARFFSASCVPGADKGQFPNLCRLCAGTGENKCAFSSQEPYFSYSGAFKCLRDGAGDVAFIRESTVFEDLSDEAERDEYELLCPDNTRKPVDKFKDCHLARVPSHAVVARSVNGKEDAIWNLLRQAQEKFGKDKSPKFQLFGSPSGQKDLLFKDSAIGFSRVPPRIDSGLYLGSGYFTAIQNLRKSEEEVAARRARVVWCAVGEQELRKCNQWSGLSEGSVTCSSASTTEDCIALKGEADAMSLDGGYVYTAGKCGLVPVLAENYKSQQSSDPDPNCVDRPVEGYLAVAVVRRSDTSLTWNSVKGKKSCHTAVDRTAGWNIPMGLLFNQTGSCKFDEYFSQSCAPGSDPRSNLCALCIGDEQGENKCVPNSNERYYGYTGAFRCLAENAGDVAFVKDVTVLQNTDGNNNEAWAKDLKLADFALLCLDGKRKPVTEARSCHLAMAPNHAVVSRMDKVERLKQVLLHQQAKFGRNGSDCPDKFCLFQSETKNLLFNDNTECLARLHGKTTYEKYLGPQYVAGITNLKKCSTSPLLEACEFLRK

SEQ ID NO: 8148 - protein, 666 aa, Homo Sapiens
MRKVRGPPVSCIKRDSPIQCIQAIAENRADAVTLDGGFIYEAGLAPYKLRPVAAEVYGTERQPRTHYYAVAVVKKGGSFQLNELQGLKSCHTGLRRTAGWNVPIGTLRPFLNWTGPPEPIEAAVARFFSASCVPGADKGQFPNLCRLCAGTGENKCAFSSQEPYFSYSGAFKCLRDGAGDVAFIRESTVFEDLSDEAERDEYELLCPDNTRKPVDKFKDCHLARVPSHAVVARSVNGKEDAIWNLLRQAQEKFGKDKSPKFQLFGSPSGQKDLLFKDSAIGFSRVPPRIDSGLYLGSGYFTAIQNLRKSEEEVAARRARVVWCAVGEQELRKCNQWSGLSEGSVTCSSASTTEDCIALVLKGEADAMSLDGGYVYTAGKCGLVPVLAENYKSQQSSDPDPNCVDRPVEGYLAVAVVRRSDTSLTWNSVKGKKSCHTAVDRTAGWNIPMGLLFNQTGSCKFDEYFSQSCAPGSDPRSNLCALCIGDEQGENKCVPNSNERYYGYTGAFRCLAENAGDVAFVKDVTVLQNTDGNNNEAWAKDLKLADFALLCLDGKRKPVTEARSCHLAMAPNHAVVSRMDKVERLKQVLLHQQAKFGRNGSDCPDKFCLFQSETKNLLFNDNTECLARLHGKTTYEKYLGPQYVAGITNLKKCSTSPLLEACEFLRK

SEQ ID NO: 8149 - protein, 864 aa, Homo Sapiens
MGCWGQLLVWFGAAGAILCSSPGSQETFLRSSPLPLASPSPRDPKVSAPPSILEPASPLNSPGTEGSWLFSTCGASGRHGPTQTQCDGAYAGTSVVVTVGAAGQLRGVQLWRVPGPGQYLISAYGAAGGKGAKNHLSRAHGVFVSAIFSLGLGESLYILVGQQGEDACPGGSPESQLVCLGESRAVEEHAAMDGSEGVPGSRRWAGGGGGGGGATYVFRVRAGELEPLLVAAGGGGRAYLRPRDRGRTQASPEKLENRSEAPGSGGRGGAAGGGGGWTSRAPSPQAGRSLQEGAEGGQGCSEAWATLGWAAAGGFGGGGGACTAGGGGGGYRGGDASETDNLWADGEDGVSFIHPSSELFLQPLAVTENHGEVEIRRHLNCSHCPLRDCQWQAELQLAECLCPEGMELAVDNVTCMDLHKPPGPLVLMVAVVATSTLSLLMVCGVLILVKQKKWQGLQEMRLPSPELELSKLRTSAIRTAPNPYYCQVGLGPAQSWPLPPGVTEVSPANVTLLRALGHGAFGEVYEGLVIGLPGDSSPLQVAIKTLPELCSPQDELDFLMEALIISKFRHQNIVRCVGLSLRATPRLILLELMSGGDMKSFLRHSRPHLGQPSPLVMRDLLQLAQDIAQGCHYLEENHFIHRDIAARNCLLSCAGPSRVAKIGDFGMARDIYRASYYRRGDRALLPVKWMPPEAFLEGIFTSKTDSWSFGVLLWEIFSLGYMPYPGRTNQEVLDFVVGGGRMDPPRGCPGPVYRIMTQCWQHEPELRPSFASILERLQYCTQDPDVLNSLLPMELGPTPEEEGTSGLGNRSLECLRPPQPQELSPEKLKSWGGSPLGPWLSSGLKPLKSRGLQPQNLWNPTYRS

SEQ ID NO: 8150 - protein, 803 aa, Homo Sapiens
MGCWGQLLVWFGAAGAILCSSPGSQETFLRSSPLPLASPSPRDPKVSAPPSILEPASPLNSPGTEGSWLFSTCGASGRHGPTQTQCDGAYAGTSVVVTVGAAGQLRGVQLWRVPGPGQYLISAYGAAGGKGAKNHLSRAHGVFVSAIFSLGLGESLYILVGQQGEDACPGGSPESQLVCLGESRAVEEHAAMDGSEGVPGSRRWAGGGGGGGGATYVFRVRAGELEPLLVAAGGGGRAYLRPRDRGRTQASPEKLENRSEAPGSGGRGGAAGGDASETDNLWADGEDGVSFIHPSSELFLQPLAVTENHGEVEIRRHLNCSHCPLRDCQWQAELQLAECLCPEGMELAVDNVTCMDLHKPPGPLVLMVAVVATSTLSLLMVCGVLILVKQKKWQGLQEMRLPSPELELSKLRTSAIRTAPNPYYCQVGLGPAQSWPLPPGVTEVSPANVTLLRALGHGAFGEVYEGLVIGLPGDSSPLQVAIKTLPELCSPQDELDFLMEALIISKFRHQNIVRCVGLSLRATPRLILLELMSGGDMKSFLRHSRPHLGQPSPLVMRDLLQLAQDIAQGCHYLEENHFIHRDIAARNCLLSCAGPSRVAKIGDFGMARDIYRASYYRRGDRALLPVKWMPPEAFLEGIFTSKTDSWSFGVLLWEIFSLGYMPYPGRTNQEVLDFVVGGGRMDPPRGCPGPVYRIMTQCWQHEPELRPSFASILERLQYCTQDPDVLNSLLPMELGPTPEEEGTSGLGNRSLECLRPPQPQELSPEKLKSWGGSPLGPWLSSGLKPLKSRGLQPQNLWNPTYRS

SEQ ID NO: 8151 - protein, 734 aa, Homo Sapiens
MGCWGQLLVWFGAAGAILCSSPGSQETFLRSSPLPLASPSPRDPKVSAPPSILEPASPLNSPGTEGSWLFSTCGASGRHGPTQTQCDGAYAGTSVVVTVGAAGQLRGVQLWRVPGPGQYLISAYGAAGGKGAKNHLSRAHGVFVSAIFSLGLGESLYILVGQQGEDACPGGSPESQLVCLGESRAVEEHAAMDGSEGVPGSRRWAGGGGGGGGATYVFRVRAGELEPLLVAAGGGGRAYLRPRDRGRTQASPEKLENRSEAPGSGGRGGAAGGDASETDNLWADGEDGVSFIHPSSELFLQPLAVTENHGEVEIRRHLNCSHCPLRDCQWQAELQLAECLCPEGMELAVDNVTCMDLHKPPGPLVLMVAVVATSTLSLLMVCGVLILGGAWPGPVLASATRCHRGFPSQCYSAQTLPELCSPQDELDFLMEALIISKFRHQNIVRCVGLSLRATPRLILLELMSGGDMKSFLRHSRPHLGQPSPLVMRDLLQLAQDIAQGCHYLEENHFIHRDIAARNCLLSCAGPSRVAKIGDFGMARDIYRASYYRRGDRALLPVKWMPPEAFLEGIFTSKTDSWSFGVLLWEIFSLGYMPYPGRTNQEVLDFVVGGGRMDPPRGCPGPVYRIMTQCWQHEPELRPSFASILERLQYCTQDPDVLNSLLPMELGPTPEEEGTSGLGNRSLECLRPPQPQELSPEKLKSWGGSPLGPWLSSGLKPLKSRGLQPQNLWNPTYRS

SEQ ID NO: 8152 - protein, 562 aa, Homo Sapiens
MGCWGQLLVWFGAAGGDASETDNLWADGEDGVSFIHPSSELFLQPLAVTENHGEVEIRRHLNCSHCPLRDCQWQAELQLAECLCPEGMELAVDNVTCMDLHKPPGPLVLMVAVVATSTLSLLMVCGVLILGTKRLAGTVDSRLLLSMKQKKWQGLQEMRLPSPELELSKLRTSAIRTAPNPYYCQVGLGPAQSWPLPPGVTEVSPANVTLLRALGHGAFGEVYEGLVIGLPGDSSPLQVAIKTLPELCSPQDELDFLMEALIISKFRHQNIVRCVGLSLRATPRLILLELMSGGDMKSFLRHSRPHLGQPSPLVMRDLLQLAQDIAQGCHYLEENHFIHRDIAARNCLLSCAGPSRVAKIGDFGMARDIYRASYYRRGDRALLPVKWMPPEAFLEGIFTSKTDSWSFGVLLWEIFSLGYMPYPGRTNQEVLDFVVGGGRMDPPRGCPGPVYRIMTQCWQHEPELRPSFASILERLQYCTQDPDVLNSLLPMELGPTPEEEGTSGLGNRSLECLRPPQPQELSPEKLKSWGGSPLGPWLSSGLKPLKSRGLQPQNLWNPTYRS

SEQ ID NO: 8153 - protein, 338 aa, Homo Sapiens
MSLSAFTLFLALIGGTSGQYYDYDFPLSIYGQSSPNCAPECNCPESYPSAMYCDELKLKSVPMVPPGIKYLYLRNNQIDHIDEKAFENVTDLQWLILDHNLLENSKIKGRVFSKLKQLKKLHINHNNLTESVGPLPKSLEDLQLTHNKITKLGSFEGLVNLTFIHLQHNRLKEDAVSAAFKGLKSLEYLDLSFNQIARLPSGLPVSLLTLYLDNNKISNIPDEYFKRFNALQYLRLSHNELADSGIPGNSFNVSSLVELDLSYNKLKNIPTVNENLENYYLEVNQLEKFDIKSFCKILGPLSYSKIKHLRLDGNRISETSLPPDMYECLRVANEVTLN

SEQ ID NO: 8154 - protein, 176 aa, Homo Sapiens
MKFSPAHYLLPLLPALVLSTRQDYEELEKQLKEVFKERSTILRQLTKTSRELDGIKVNLQSLKNDEQSAKTDVQKLLELGQKQREEMKSLQEALQNQLKETSEKAEKHQATINFLKTEVERKSKMIRDLQNEAQQLTDLEQKLAVAKNELEKAALDRESQMKAMKETVQLCLTSVF

SEQ ID NO: 8155 - protein, 346 aa, Homo Sapiens
MKFSPAHYLLPLLPALVLSTRQDYEELEKQLKEVFKERSTILRQLTKTSRELDGIKVNLQSLKNDEQSAKTDVQKLLELGQKQREEMKSLQEALQNQLKETSEKAEKHQATINFLKTEVERKSKMIRDLQNENKSLKNKLLSGNKLCGIHAEESKKIQAQLKELRYGKKDLLFKAQQLTDLEQKLAVAKNELEKAALDRESQMKAMKETVQLCLTSVFRDQPPPPLSLITSNPTRMLLPPRNIASKLPDAAAKSKPQQSASGNNESSQVESTKEGNPSTTACDSQDEGRPCSMKHKESPPSNATAETEPIPQKLQMPPCSECEVKKAPEKPLTSFEGMAAREEKIL

SEQ ID NO: 8156 - protein, 260 aa, Homo Sapiens
MKSLQEALQNQLKETSEKAEKHQATINFLKTEVERKSKMIRDLQNENKSLKNKLLSGNKLCGIHAEESKKIQAQLKELRYGKKDLLFKAQQLTDLEQKLAVAKNELEKAALDRESQMKAMKETVQLCLTSVFRDQPPPPLSLITSNPTRMLLPPRNIASKLPDAAAKSKPQQSASGNNESSQVESTKEGNPSTTACDSQDEGRPCSMKHKESPPSNATAETEPIPQKLQMPPCSECEVKKAPEKPLTSFEGMAAREEKIL

SEQ ID NO: 8157 - protein, 260 aa, Homo Sapiens; identical to SEQ ID NO: 8156

SEQ ID NO: 8158 - protein, 978 aa, Homo Sapiens
MGPPSSSGFYVSRAVALLLAGLVAALLLALAVLAALYGHCERVPPSELPGLRDLEAESSPPLRQKPTPTPKPSSARELAVTTTPSNWRPPGPWDQLRLPPWLVPLHYDLELWPQLRPDELPAGSLPFTGRVNITVRCTVATSRLLLHSLFQDCERAEVRGPLSPDDVWFALDTEYMVLELSEPLKPGSSYELQLSFSGLVKEDLREGLFLNVYTDQGERRALLASQLEPTFARYVFPCFDEPALKATFNITMIHHPSYVALSNMPKLGQSEKEDVNGSKWTVTTFSTTPHMPTYLVAFVICDYDHVNRTERGKEIRIWARKDAIANGSADFALNITGPIFSFLEDLFNISYSLPKTDIIALPSFDNHAMENWGLMIFDESGLLLEPKDQLTEKKTLISYVVSHEIGHQWFGNLVTMNWWNNIWLNEGFASYFEFEVINYFNPKLPRNEIFFSNILHNILREDHALVTRAVAMKVENFKTSEIQELFDIFTYSKGASMARMLSCFLNEHLFVSALKSYLKTFSYSNAEQDDLWRHFQMAIDDQSTVILPATIKNIMDSWTHQSGFPVITLNVSTGVMKQEPFYLENIKNRTLLTSNDTWIVPILWIKNGTTQPLVWLDQSSKVFPEMQVSDSDHDWVILNLNMTGYYRVNYDKLGWKKLNQQLEKDPKAIPVIHRLQLIDDAFSLSKNNYIEIETALELTKYLAEEDEIIVWHTVLVNLVTRDLVSEVNIYDIYSLLKRYLLKRLNLIWNIYSTIIRENVLALQDDYLALISLEKLFVTACWLGLEDCLQLSKELFAKWVDHPENEIPYPIKDVVLCYGIALGSDKEWDILLNTYTNTTNKEEKIQLAYAMSCSKDPWILNRYMEYAISTSPFTSNETNIIEVVASSEVGRYVAKDFLVNNWQAVSKRYGTQSLINLIYTIGRTVTTDLQIVELQQFFSNMLEEHQRIRVHANLQTIKNENLKNKKLSARIAAWLRRNT

SEQ ID NO: 8159 - protein, 990 aa, Homo Sapiens
MGPPSSSGFYVSRAVALLLAGLVAALLLALAVLAALYGHCERVPPSELPGLRDLEAESSPPLRQKPTPTPKPSSARELAVTTTPSNWRPPGPWDQLRLPPWLVPLHYDLELWPQLRPDELPAGSLPFTGRVNITVRCTVATSRLLLHSLFQDCERAEVRGPLSPGTGNATVGRVPVDDVWFALDTEYMVLELSEPLKPGSSYELQLSFSGLVKEDLREGLFLNVYTDQGERRALLASQLEPTFARYVFPCFDEPALKATFNITMIHHPSYVALSNMPKLGQSEKEDVNGSKWTVTTFSTTPHMPTYLVAFVICDYDHVNRTERGKEIRIWARKDAIANGSADFALNITGPIFSFLEDLFNISYSLPKTDIIALPSFDNHAMENWGLMIFDESGLLLEPKDQLTEKKTLISYVVSHEIGHQWFGNLVTMNWWNNIWLNEGFASYFEFEVINYFNPKLPRNEIFFSNILHNILREDHALVTRAVAMKVENFKTSEIQELFDIFTYSKGASMARMLSCFLNEHLFVSALKSYLKTFSYSNAEQDDLWRHFQMAIDDQSTVILPATIKNIMDSWTHQSGFPVITLNVSTGVMKQEPFYLENIKNRTLLTSNDTWIVPILWIKNGTTQPLVWLDQSSKVFPEMQVSDSDHDWVILNLNMTGYYRVNYDKLGWKKLNQQLEKDPKAIPVIHRLQLIDDAFSLSKNNYIEIETALELTKYLAEEDEIIVWHTVLVNLVTRDLVSEVNIYDIYSLLKRYLLKRLNLIWNIYSTIIRENVLALQDDYLALISLEKLFVTACWLGLEDCLQLSKELFAKWVDHPENEIPYPIKDVVLCYGIALGSDKEWDILLNTYTNTTNKEEKIQLAYAMSCSKDPWILNRYMEYAISTSPFTSNETNIIEVVASSEVGRYVAKDFLVNNWQAVSKRYGTQSLINLIYTIGRTVTTDLQIVELQQFFSNMLEEHQRIRVHANLQTIKNENLKNKKLSARIAAWLRRNT

SEQ ID NO: 8160 - protein, 701 aa, Homo Sapiens
MGPPSSSGFYVSRAVALLLAGLVAALLLALAVLAALYGHCERVPPSELPGLRDLEAESSPPLRQKPTPTPKPSSARELAVTTTPSNWRPPGPWDQLRLPPWLVPLHYDLELWPQLRPDELPAGSLPFTGRVNITVRCTVATSRLLLHSLFQDCERAEVRGPLSPGTGNATVGRVPVDDVWFALDTEYMVLELSEPLKPGSSYELQLSFSGLVKEDLREGLFLNVYTDQGERRALLASQLEPTFARYVFPCFDEPALKATFNITMIHHPSYVALSNMPKLGQSEKEDVNGSKWTVTTFSTTPHMPTYLVAFVICDYDHVNRTERGKEIRIWARKDAIANGSADFALNITGPIFSFLEDLFNISYSLPKTDIIALPSFDNHAMENWGLMIFDESGLLLEPKDQLTEKKTLISYVVSHEIGHQWFGNLVTMNWWNNIWLNEGFASYFEFEVINYFNPKLPRNEIFFSNILHNILREDHALVTRAVAMKVENFKTSEIQELFDIFTYSKGASMARMLSCFLNEHLFVSALKSYLKTFSYSNAEQDDLWRHFQMAIDDQSTVILPATIKNIMDSWTHQSGFPVITLNVSTGVMKQEPFYLENIKNRTLLTSNDTWIVPILWIKNGTTQPLVWLDQSSKVFPEMQVSDSDHDWVILNLNMTGYYRVNYDKLGWKKLNQQLEKDPKAIPVIHRLQLIDDAFSLSKGTY

SEQ ID NO: 8161 - protein, 226 aa, Homo Sapiens
MKVENFKTSEIQELFDIFTYSKGASMARMLSCFLNEHLFVSALKSYLKTFSYSNAEQDDLWRHFQMAIDDQSTVILPATIKNIMDSWTHQSGFPVITLNVSTGVMKQEPFYLENIKNRTLLTSNDTWIVPILWIKNGTTQPLVWLDQSSKVFPEMQVSDSDHDWVILNLNMTGYYRVNYDKLGWKKLNQQLEKDPKAIPVIHRLQLIDDAFSLSNLQDFGHLKVPN

SEQ ID NO: 8162 - protein, 198 aa, Homo Sapiens
MKVENFKTSEIQELFDIFTYSKGASMARMLSCFLNEHLFVSALKSYLKTFSYSNAEQDDLWRHFQMAIDDQSTVILPATIKNIMDSWTHQSGFPVITLNVSTGVMKQEPFYLENIKNRTLLTSNDTWIVPILWIKNGTTQPLVWLDQSSKVFPEMQVSDSDHDWVILNLNMTGYYRVNYDKLGWKKLNQQLEKDPKMR

SEQ ID NO: 8163 - protein, 198 aa, Homo Sapiens; identical to SEQ ID NO: 8162

SEQ ID NO: 8164 - protein, 66 aa, Homo Sapiens
MKIFLPVLLAALLGVERASSLMCFSCLNQKSNLYCLKPTICSDQDNYCVTVSASAGIASFPMQGIS

SEQ ID NO: 8165 - protein, 66 aa, Homo Sapiens; identical to SEQ ID NO: 8164

SEQ ID NO: 8166 - protein, 73 aa, Homo Sapiens
MKIFLPVLLAALLGVERASSLMCFSCLNQKSNLYCLKPTICSDQDNYCVTVSASAGIGECQASDRAFLPWPSP

SEQ ID NO: 8167 - protein, 66 aa, Homo Sapiens
MKIFLPVLLAALLGVERASSLMCFSCLNQKSNLYCLKPTICSDQDNYCVTVSASAGIGGFAGGTDS

SEQ ID NO: 8168 - protein, 131 aa, Homo Sapiens
MKIFLPVLLAALLGVERASSLMCFSCLNQKSNLYCLKPTICSDQDNYCVTVSASAGIGNLVTFGHSLSKTCSPACPIPEGVNVGVASMGISCCQSFLCNFSAADGGLRASVTLLGAGLLLSLLPALLRFGP

SEQ ID NO: 8169 - protein, 131 aa, Homo Sapiens; identical to SEQ ID NO: 8168

SEQ ID NO: 8170 - protein, 131 aa, Homo Sapiens; identical to SEQ ID NO: 8168

SEQ ID NO: 8171 - protein, 131 aa, Homo Sapiens; identical to SEQ ID NO: 8168

SEQ ID NO: 8172 - protein, 131 aa, Homo Sapiens; identical to SEQ ID NO: 8168

SEQ ID NO: 8173 - protein, 131 aa, Homo Sapiens; identical to SEQ ID NO: 8168

SEQ ID NO: 8174 - protein, 131 aa, Homo Sapiens; identical to SEQ ID NO: 8168

SEQ ID NO: 8175 - protein, 41 aa, Homo Sapiens
MKIFLPVLLAALLGVEREEQSVLPEADHLLRPGQLLRDCVC

SEQ ID NO: 8176 - protein, 41 aa, Homo Sapiens; identical to SEQ ID NO: 8175

SEQ ID NO: 8177 - protein, 147 aa, Homo Sapiens
MTSGIPGCGGACVLPSRAPLRRRDPQHCSPTLSEAPLLRAHTQTRLLTRGLPTPNTTRTVQVSVTVTPTWSPVRPRQDRLLWFVTSRQDGHPLQNEDLLASAAGCPSGCGASQLADVLLLLEPEEQSVLPEADHLLRPGQLLRDCVC

SEQ ID NO: 8178 - protein, 201 aa, Homo Sapiens
MKVHMLVGVLVMVGFTVGKVPVPDIRTCHFCLVEDPSVGCISGSEKCTISSSSLCMVITIYYDVKVRFIVRGCGQYISYRCQEKRNTYFAEYWYQAQCCQYDYCNSWSSPQLQSSLPEPHDRPLALPLSDSQIQWFYQALNLSLPLPNFHAGTEPDGLDPMVTLSLNLGLSFAELRRMYLFLNSSGLLVLPQAGLLTPHPS

SEQ ID NO: 8179 - protein, 146 aa, Homo Sapiens
MVITIYYDVKVRFIVRGCGQYISYRCQEKRNTYFAEYWYQAQCCQYDYCNSWSSPQLQSSLPEPHDRPLALPLSDSQIQWFYQALNLSLPLPNFHAGTEPDGLDPMVTLSLNLGLSFAELRRMYLFLNSSGLLVLPQAGLLTPHPS

SEQ ID NO: 8180 - protein, 133 aa, Homo Sapiens
MKPQFVGILLSSLLGAALGNRMRCYNCGGSPSSSCKEAVTTCGEGRPQPGLEQIKLPGNPPVTLIHQHPACVAAHHCNQVETESVGDVTYPAHRDCYLGDLCNSAVASHVAPAGILAAAATALTCLLPGLWSG

SEQ ID NO: 8181 - protein, 174 aa, Homo Sapiens
MKPQFVGILLSSLLGAALGNRMRCYNCGGSPSSSCKEAVTTCGEGRPQPGLEQIKLPGNRRCFLRGLKIPLGSLKSHLLCPRRQVLKPGVQHPSFILSLSPSDLDSPTSSLRRSPSLQSSGDRVGGRRDLSSPQGLLPGRPVQQRRGKPCGPCRHFGCSSYRPDLSLARTVERI

SEQ ID NO: 8182 - protein, 66 aa, Homo Sapiens
MGTSSIFLCVLFLCGALGLTMSPARGRLRCYICGFTKPCHPVPTECRDDEACGISIGTSDQSEITE

SEQ ID NO: 8183 - protein, 125 aa, Homo Sapiens
MGTSSIFLCVLFLCGALGLTMSPARGRLRCYICGFTKPCHPVPTECRDDEACGISIGTSGKSCLSRAQCPLPGYATYWLHSYTLWHHCCEQDLCNIAASPQQLTSLLASLPLFVASFAGRGHLLH

SEQ ID NO: 8184 - protein, 100 aa, Homo Sapiens
MGTSSIFLCVLFLCGALGLTMSPARGRLRCYICGFTKPCHPVPTECRDDEACGISIGTSGRTLVQWPFSRRLPTSIHPAFPVAPASACLFHPTDQSEITE

SEQ ID NO: 8185 - protein, 88 aa, Homo Sapiens
MLQLYKSRDLGVQITSPRFLSLCLAMGTSSIFLCVLFLCGALGLTMSPARGRLRCYICGFTKPCHPVPTECRDDEACGISIGTSDAHC

SEQ ID NO: 8186 - protein, 161 aa, Homo Sapiens
MLAPQRTRAPSPRAAPRPTRSMLPAAMKGLGLALLAVLLCSAPAHGLWCQDCTLTTNSSHCTPKQCQPSDTVCASVRITDPSSSRKDHSVNKMCASSCDFVKRHFFSDYLMGFINSGILKVDVDCCEKDLCNGAAGAGHSPWALAGGLLLSLGPALLWAGP

SEQ ID NO: 8187 - protein, 161 aa, Homo Sapiens; identical to SEQ ID NO: 8186

SEQ ID NO: 8188 - protein, 140 aa, Homo Sapiens
MLPAAMKGLGLALLAVLLCSAPAHGLWCQDCTLTTNSSHCTPKQCQPSDTVCASVRITDPSSSRKDHSVNKMCASSCDFVKRHFFSDYLMGFINSGILKVDVDCCEKDLCNGAAGAGHSPWALAGGLLLSLGPALLWAGP

SEQ ID NO: 8189 - protein, 140 aa, Homo Sapiens; identical to SEQ ID NO: 8188

SEQ ID NO: 8190 - protein, 165 aa, Homo Sapiens
MALLALLLVVALPRVWTDANLTARQRDPEDSQRTDEGDNRVWCHVCERENTFECQNPRRCKWTEPYCVIAAVKIFPRFFMVAKQCSAGCAAMERPKPEEKRFLLEEPMPFFYLKCCKIRYCNLEGPPINSSVFKEYAGSMGESCGGLWLAILLLLASIAAGLSLS

SEQ ID NO: 8191 - protein, 100 aa, Homo Sapiens
MALLALLLVVALPRVWTDANLTARQRDPEDSQRTDEGDNRVWCHVCERENTFECQNPRRCKWTEPYCVIAAVRRSSGLVNSDSAQQSLSSPSVSTKLVGC

SEQ ID NO: 8192 - protein, 85 aa, Homo Sapiens
MALLALLLVVALPRVWTDANLTARQRDPEDSQRTDEGDNRVWCHVCERENTFECQNPRRCKWTEPYCVIAAVSEYLRSCWGPKGR

SEQ ID NO: 8193 - protein, 105 aa, Homo Sapiens
MALLALLLVVALPRVWTDANLTARQRDPEDSQRTDEGDNRVWCHVCERENTFECQNPRRCKWTEPYCVIAAVTVLRWLCSDGETQARGEAVSPGRAHALLLPQVL

SEQ ID NO: 8194 - protein, 138 aa, Homo Sapiens
MERLVLTLCTLPLAVASAGCATTPARNLSCYQCFKVSSWTECPPTWCSPLDQVCISNEVVVSFKWSVRVLLSKRCAPRCPNDNMKFEWSPAPMVQGVITRRCCSWALCNRALTPQEGRWALRGGLLLQVGLSLLRALL

SEQ ID NO: 8195 - protein, 162 aa, Homo Sapiens
MKGFTATLFLWTLIFPSCSGGGGGKAWPTHVVCSDSGLEVLYQSCDPLQDFGFSVEKCSKQLKSNINIRFGIILREDIKELFLDLALMSQGSSVLNFSYPICEAALPKFSFCGRRKGEQIYYAGPVNNPEFTIPQGEYQVLLELYTEKRSTVACANATIMCS

SEQ ID NO: 8196 - protein, 162 aa, Homo Sapiens; identical to SEQ ID NO: 8195

SEQ ID NO: 8197 - protein, 160 aa, Homo Sapiens [sequence omitted]

SEQ ID NO: 8198 - protein, 130 aa, Homo Sapiens
MLPFLFFSTLFSSIFTEAQKQYWVCNSSDASISYTYCGRDLKQLYFNLYITVNTMNLPKRKEVICRGSDDDYSFCRALKGETVNTTISFSFKGIKFSKGKYKCVVEAISGSPEEMLFCLEFVILHQPNSN

SEQ ID NO: 8199 - protein, 194 aa, Homo Sapiens
MSALWLLLGLLALMDLSESSNWGCYGNIQSLDTPGASCGIGRRHGLNYCGVRASERLAEIDMPYLLKYQPMMQTIGQKYCMDPAVIAGVLSRKSPGDKILVNMGDRTSMVQDPGSQAPTSWISESQVSQTTEVLTTRIKEIQRRFPTWTPDQYLRGGLCAYSGGAGYVRSSQDLSCDFCNDVLARAKYLKRHGF

SEQ ID NO: 8200 - protein, 194 aa, Homo Sapiens; identical to SEQ ID NO: 8199

SEQ ID NO: 8201 - protein, 169 aa, Homo Sapiens
MLSSVVFWGLIALIGTSRGSYPFSHSMKPHLHPRLYHGCYGDIMTMKTSGATCDANSVMNCGIRGSEMFAEMDLRAIKPYQTLIKEVGQRHCVDPAVIAAIISRESHGGSVLQDGWDHRGLKFGLMQLDKQTYHPVGAWDSKEHLSQATGILTERIKAIQKKFPTWSVA

SEQ ID NO: 8202 - protein, 178 aa, Homo Sapiens
MLSSVVFWGLIALIGTSRGSYPFSHSMKPHLHPRLYHGCYGDIMTMKTSGATCDANSVMNCGIRGSEMFAEMDLRAIKPYQTLIKEVGQRHCVDPAVIAAIISRESHGGSVLQDGWDHRGLKFGLMQLDKQTYHPVGAWDSKEHLSQATGILTERIKAIQKKFPTWSVAQHLKGFFLL

SEQ ID NO: 8203 - protein, 178 aa, Homo Sapiens; identical to SEQ ID NO: 8202

SEQ ID NO: 8204 - protein, 212 aa, Homo Sapiens
MLSSVVFWGLIALIGTSRGSYPFSHSMKPHLHPRLYHGCYGDIMTMKTSGATCDANSVMNCGIRGSEMFAEMDLRAIKPYQTLIKEVGQRHCVDPAVIAAIISRESHGGSVLQDGWDHRGLKFGLMQLDKQTYHPVGAWDSKEHLSQATGILTERIKAIQKKFPTWSVAQHLKGGLSAFKSGIEAIATPSDIDNDFVNDIIARAKFYKRQSF

SEQ ID NO: 8205 - protein, 212 aa, Homo Sapiens; identical to SEQ ID NO: 8204

SEQ ID NO: 8206 - protein, 182 aa, Homo Sapiens
MLSSVVFWGLIALIGTSRGSYPFSHSMKPHLHPRLYHGCYGDIMTMKTSGATCDANSVMNCGIRGSEMFAEMDLRAIKPYQTLIKEVGQRHCVDPAVIAAIISRESHGGSVLQDGWDHRGLKFGLMQLDKQTYHPVGAWDSKEHLSQATGILTERIKAIQKKFPTWSVAQHLKGRLYSEYFV

SEQ ID NO: 8207 - protein, 82 aa, Homo Sapiens
MTPLLTLILVVLMGLPLAQALDCHVCAYNGDNCFNPMRCPAMVAYCMTTRTYYTPTRMKVSKSCVPRCFETVYDGYSKHAST

SEQ ID NO: 8208 - protein, 84 aa, Homo Sapiens
MTPLLTLILVVLMGLPLAQALDCHVCAYNGDNCFNPMRCPAMVAYCMTTRTYYTPTRMKVSKSCVPRCFETVYDGYSKHASTTS

SEQ ID NO: 8209 - protein, 116 aa, Homo Sapiens
MTPLLTLILVVLMGLPLAQALDCHVCAYNGDNCFNPMRCPAMVAYCMTTRTYYTPTRMKVSKSCVPRCFETVYDGYSKHASTTSCCQYDLCNGTGLATPATLALAPILLATLWGLL

SEQ ID NO: 8210 - protein, 116 aa, Homo Sapiens; identical to SEQ ID NO: 8209

SEQ ID NO: 8211 - protein, 116 aa, Homo Sapiens; identical to SEQ ID NO: 8209

SEQ ID NO: 8212 - protein, 89 aa, Homo Sapiens
MCQKEVMEQSAGIMYRKSCASSAACLIASAGYQSFCSPGKLNSVCISCCNTPLCNGPRPKKRGSSASALRPGLRTTILFLKLALFSAHC

SEQ ID NO: 8213 - protein, 39 aa, Homo Sapiens
MWVLGIAATFCGLFLLPGENTQRPAAEARLCAANPVLPV

SEQ ID NO: 8214 - protein, 141 aa, Homo Sapiens
MWVLGIAATFCGLFLLPGFALQIQCYQCEEFQLNNDCSSPEFIVNCTVNVQDMCQKEVMEQSAGIMYRKSCASSAACLIASAGYQSFCSPGKLNSVCISCCNTPLCNGPRPKKRGSSASALRPGLRTTILFLKLALFSAHC

SEQ ID NO: 8215 - protein, 125 aa, Homo Sapiens
MRGTRLALLALVLAACGELAPALRCYVCPEPTGVSDCVTIATCTTNETMCKTTLYSREIVYPFQGDSTVTKSCASKCKPSDVDGIGQTLPVSCCNTELCNVDGAPALNSLHCGALTLLPLLSLRL

SEQ ID NO: 8216 - protein, 246 aa, Homo Sapiens
MGPQHLRLVQLFCLLGAISTLPRAGALLCYEATASRFRAVAFHNWKWLLMRNMVCKLQEGCEETLVFIETGTARGVVGFKGCSSSSSYPAQISYLVSPPGVSIASYSRVCRSYLCNNLTNLEPFVKLKASTPKSITSASCSCPTCVGEHMKDCLPNFVTTNSCPLAASTCYSSTLKFQAGFLNTTFLLMGCAREHNQLLADFHHIGSIKVTEVLNILEKSQIVGAASSRQDPAWGVVLGLLFAFRD

SEQ ID NO: 8217 - protein, 211 aa, Homo Sapiens
MGPQHLRLVQLFCLLGAISTLPRMSCGAGCYKTQKGTARGVVGFKGCSSSSSYPAQISYLVSPPGVSIASYSRVCRSYLCNNLTNLEPFVKLKASTPKSITSASCSCPTCVGEHMKDCLPNFVTTNSCPLAASTCYSSTLKFQAGFLNTTFLLMGCAREHNQLLADFHHIGSIKVTEVLNILEKSQIVGAASSRQDPAWGVVLGLLFAFRD

SEQ ID NO: 8218 - protein, 211 aa, Homo Sapiens; identical to SEQ ID NO: 8217

SEQ ID NO: 8219 - protein, 53 aa, Homo Sapiens
MEPGPALAWLLLLSLLADCLKAAQSRDFTVKDIIYLHPSTTPYPGGFKCFTCE

SEQ ID NO: 8220 - protein, 171 aa, Homo Sapiens
MEPGPALAWLLLLSLLADCLKAAQSRDFTVKDIIYLHPSTTPYPGGFKCFTCEKAADNYECNRWAPDIYCPRETRYCYTQHTMEVTGNSISVTKRCVPLEECLSTGCRDSEHEGHKVCTSCCEGNICNLPLPRNETDATFATTSPINQTNGHPRCMSVIVSCLWLWLGLML

SEQ ID NO: 8221 - protein, 171 aa, Homo Sapiens; identical to SEQ ID NO: 8220

SEQ ID NO: 8222 - protein, 76 aa, Homo Sapiens
MEPGPALAWLLLLSLLADCLKAAQSRDFTVKDIIYLHPSTTPYPGGFKCFTCEKAADNYECNRWAPDIYCPRGTMI

SEQ ID NO: 8223 - protein, 76 aa, Homo Sapiens; identical to SEQ ID NO: 8222

SEQ ID NO: 8224 - protein, 50 aa, Homo Sapiens
MLCERHCTEEDENHSKPNKGNAEEIFSAEYWKVRFPASRISGNVNEQHEA

SEQ ID NO: 8225 - protein, 74 aa, Homo Sapiens
MLLITLSANLFTVPERSLTTTFSFSRCERHCTEEDENHSKPNKGNAEEIFSAEYWKVRFPASRISGNVNEQHEA

SEQ ID NO: 8226 - protein, 207 aa, Homo Sapiens
MLLITLSANLFTVPERSLTTTFSFSRYKSSDRPAHKVSMLLLCHALAIAVVQIVIFSESWAFAKNINFYNVRPPLDPTPFPNSFKCFTCENAGDNYNCNRWAEDKWCPQNTQYCLTVHHFTSHGRSTSITKKCASRSECHFVGCHHSRDSEHTECRSCCEGMICNVELPTNHTNAVFAVMHAQRTSGSSAPTLYLPVLAWVFVLPLL

SEQ ID NO: 8227 - protein, 54 aa, Homo Sapiens
MLYKSSDRPAHKVSMLLLCHALAIAVVQIVIFSESWAFAKNINFYNVRPPLDHK

SEQ ID NO: 8228 - protein, 183 aa, Homo Sapiens
MLYKSSDRPAHKVSMLLLCHALAIAVVQIVIFSESWAFAKNINFYNVRPPLDPTPFPNSFKCFTCENAGDNYNCNRWAEDKWCPQNTQYCLTVHHFTSHGRSTSITKKCASRSECHFVGCHHSRDSEHTECRSCCEGMICNVELPTNHTNAVFAVMHAQRTSGSSAPTLYLPVLAWVFVLPLL

SEQ ID NO: 8229 - protein, 183 aa, Homo Sapiens; identical to SEQ ID NO: 8228

SEQ ID NO: 8230 - protein, 183 aa, Homo Sapiens
MRYKSSDRPAHKVSMLLLCHALAIAVVQIVIFSESWAFAKNINFYNVRPPLDPTPFPNSFKCFTCENAGDNYNCNRWAEDKWCPQNTQYCLTVHHFTSHGRSTSITKKCASRSECHFVGCHHSRDSEHTECRSCCEGMICNVELPTNHTNAVFAVMHAQRTSGSSAPTLYLPVLAWVFVLPLL

SEQ ID NO: 8231 - protein, 237 aa, Homo Sapiens
MKGILVAGITAVLVAAVESLSCVQCNSWEKSCVNSIASECPSHANTSCISSSASSSLETPVRLYQNMFCSAENCSEETHITAFTVHVSAEEHFHFVSQCCQGKECSNTSDALDPPLKNVSSNAECPACYESNGTSCHGKPWKCYEEEQCVFLVAELKNDIESKSLVLKGCSNVSNATCQFLSGENKTLGGVIFRKFECANVNSLTPTSAPTTSHNVGSKASLYLLALASLLLRGLLP

SEQ ID NO: 8232 - protein, 54 aa, Homo Sapiens
  misc_feature (1)..(1): Xaa can be any naturally occurring amino acid
XPPLKNVSSNAECPACYESNGTSCHGKPWKCYEEEQCVFLVAELKNGTPGDGAD

SEQ ID NO: 8233 - protein, 148 aa, Homo Sapiens
MKALIVLGLVLLSVTVQGKVFERCELARTLKRLGMDGYRGISLANWMCLAKWESGYNTRATNYNAGDRSTDYGIFQINSRYWCNDGKTPGAVNACHLSCSALLQDNIADAVACAKRVVRDPQGIRAWVAWRNRCQNRDVRQYVQGCGV

SEQ ID NO: 8234 - protein, 104 aa, Homo Sapiens
MKALIVLGLVLLSVTVQGKVFERCELARTLKRLGMDGYRGISLANWMCLAKWESGYNTRATNYNAGDRSTDYGIFQINSRYWCNDGKTPGAVNACHLSCSGKTS

SEQ ID NO: 8235 - protein, 137 aa, Homo Sapiens
MKALIVLGLVLLSVTVQGKVFERCELARTLKRLGMDGYRGISLANWMCLAKWESGYNTRATNYNAGDRSTDYGIFQINSRYWCNDGKTPGAVNACHLSCSGWHGEIVVKTEMSVSMFKVVECNSRIFLLQLILSLSH

SEQ ID NO: 8236 - protein, 146 aa, Homo Sapiens
MKASVVLSLLGYLVVPSGAYILGRCTVAKKLHDGGLDYFEGYSLENWVCLAYFESKFNPMAIYENTREGYTGFGLFQMRGSDWCGDHGRNRCHMSCSALLNPNLEKTIKCAKTIVKGKEGMGAWPTWSRYCQYSDTLARWLDGCKL

SEQ ID NO: 8237 - protein, 146 aa, Homo Sapiens; identical to SEQ ID NO: 8236

SEQ ID NO: 8238 - protein, 148 aa, Homo Sapiens
MTKALLIYLVSSFLALNQASLISRCDLAQVLQLEDLDGFEGYSLSDWLCLAFVESKFNISKINENADGSFDYGLFQINSHYWCNDYKSYSENLCHVDCQDLLNPNLLAGIHCAKRIVSGARGMNNWVEWRLHCSGRPLFYWLTGCRLR

SEQ ID NO: 8239 - protein, 148 aa, Homo Sapiens; identical to SEQ ID NO: 8238

SEQ ID NO: 8240 - protein, 86 aa, Homo Sapiens
  misc_feature (1)..(1): Xaa can be any naturally occurring amino acid
XLEDLDGFEGYSLSDWLCLAFVESKFNISKINENADGSFDYGLFQINSHYWCNDYKSYSENLCHVDCQGIHCAKRIVSGARGMNNW

SEQ ID NO: 8241 - protein, 148 aa, Homo Sapiens
LLLLLAVAVRESWQTEEKTCDLDNFNPVSEERGKVQDCFYLFEMDSSLACSPEISHLSVGSILLVTFASLVAVYVVGGFLYQRLVVGAKGMEQFPHLAFWQDLGNLVADGCDFVCRSKPRNVPAAYRGVGDDQLGEESEERDDHLLPM

SEQ ID NO: 8242 - protein, 92 aa, Homo Sapiens
MFPFYSCWRTGLLLLLLAVAVRESWQTEEKTCDLVGEKGKESEKELALVKRLKPLFNKSFESTVGQGSDTYIYIFRVCREAGNHTSGAGLVQ

SEQ ID NO: 8243 - protein, 109 aa, Homo Sapiens
MFPFYSCWRTGLLLLLLAVAVRESWQTEEKTCDLVGEKGKESEKELALVKRLKPLFNKSFESTVGQGSDTYIYIFRVCREAGNHTSGAGLVQINKSNGKETVVGRLNET

SEQ ID NO: 8244 - protein, 133 aa, Homo Sapiens
MFPFYSCWRTGLLLLLLAVAVRESWQTEEKTCDLVGEKGKESEKELALVKRLKPLFNKSFESTVGQGSDTYIYIFRVCREAGNHTSGAGLVQINKSNGKETVVGRLNETHIFNGSLHHWLLFMLLGGSYTSDW

SEQ ID NO: 8245 - protein, 191 aa, Homo Sapiens
MFPFYSCWRTGLLLLLLAVAVRESWQTEEKTCDLVGEKGKESEKELALVKRLKPLFNKSFESTVGQGSDTYIYIFRVCREAGNHTSGAGLVQINKSNGKETVVGRLNETHIFNGSNWIMLIYKGGDEYDNHCGKEQRRAVVMISCNRHTLADGCDFVCRSKPRNVPAAYRGVGDDQLGEESEERDDHLLPM

SEQ ID NO: 8246 - protein, 277 aa, Homo Sapiens
MFPFYSCWRTGLLLLLLAVAVRESWQTEEKTCDLVGEKGKESEKELALVKRLKPLFNKSFESTVGQGSDTYIYIFRVCREAGNHTSGAGLVQINKSNGKETVVGRLNETHIFNGSNWIMLIYKGGDEYDNHCGKEQRRAVVMISCNRHTLADNFNPVSEERGKVQDCFYLFEMDSSLACSPEISHLSVGSILLVTFASLVAVYVVGGFLYQRLVVGAKGMEQFPHLAFWQDLGNLVADGCDFVCRSKPRNVPAAYRGVGDDQLGEESEERDDHLLPM

SEQ ID NO: 8247 - protein, 25 aa, Homo Sapiens
MLIYKGGDEYDNHCGKEQRRAVVMI

SEQ ID NO: 8248 - protein, 85 aa, Homo Sapiens
VVGGFLYQRLVVGAKGMEQFPHLAFWQDLGNLVAACGFDLFFNLLERERKQKWDIEGSAVLCAGCGMLLHLSLLLAQGSVFLPTF

SEQ ID NO: 8249 - protein, 104 aa, Homo Sapiens
  misc_feature (1)..(1): Xaa can be any naturally occurring amino acid
XFNKSFESTVGQGSDTYIYIFRVCREAGNHTSGAGLVQINKSNGKETVVGRLNETHIFNGSNWIMLIYKGGDEYDNHCGKEQRRAVVMISCNRHTLAESKHLTT

SEQ ID NO: 8250 - protein, 122 aa, Homo Sapiens
  misc_feature (1)..(1): Xaa can be any naturally occurring amino acid
XGGDEYDNHCGKEQRRAVVMISCNRHTLADNFNPVSEERGKVQDCFYLFEMDSSLACSPEISHLSVGSILLVTFASLVAVYVVGGFLYQRLVVGAKGMEQFPHLAFWQDLGNLVAVSNRAAG

SEQ ID NO: 8251 - protein, 96 aa, Homo Sapiens
  misc_feature (1)..(1): Xaa can be any naturally occurring amino acid
XILLVTFASLVAVYVVGGFLYQRLVVGAKGMEQFPHLAFWQDLGNLVAKGNGSRSGTSRALLSSALGVECCCTCPFCWLREVSSCPHFCGERFLIL

SEQ ID NO: 8252 - protein, 157 aa, Homo Sapiens
MEDLGENTMVLSTLRSLNNFISQRVEGGSGLDISTSAPGSLQMQYQQSMQLEERAEQIRSKSHLIQVEREKMQMELSHKRARVELERAASTSARNYEREVDRNQELLTRIRQLQEREAGAEEKMQEQLERNRQCQQNLDAASKRLREKEDSLAQAGE

SEQ ID NO: 8253 - protein, 718 aa, Homo Sapiens
MEDLGENTMVLSTLRSLNNFISQRVEGGSGLDISTSAPGSLQMQYQQSMQLEERAEQIRSKSHLIQVEREKMQMELSHKRARVELERAASTSARNYEREVDRNQELLTRIRQLQEREAGAEEKMQEQLERNRQCQQNLDAASKRLREKEDSLAQAGETINALKGRISELQWSVMDQEMRVKRLESEKQELQEQLDLQHKKCQEANQKIQELQASQEARADHEQQIKDLEQKLSLQEQDAAIVKNMKSELVRLPRLERELKQLREESAHLREMRETNGLLQEELEGLQRKLGRQEKMQETLVGLELENERLLAKLQSWERLDQTMGLSIRTPEDLSRFVVELQQRELALKDKNSAVTSSARGLEKARQQLQEELRQVSGQLLEERKKRETHEALARRLQKRVLLLTKERDGMRAILGSYDSELTPAEYSPQLTRRMREAEDMVQKVHSHSAEMEAQLSQALEELGGQKQRADMLEMELKMLKSQSSSAEQSFLFSREEADTLRLKVEELEGERSRLEEEKRMLEAQLERRALQGDYDQSRTKVLHMSLNPTSVARQRLREDHSQLQAECERLRGLLRAMERGGTVPADLEAAAASLPSSKEVAELKKQVESAELKNQRLKEVFQTKIQEFRKACYTLTGYQIDITTENQYRLTSLYAEHPGDCLIFKATSPSGSKMQLLETEFSHTVGELIEVHLRRQDSIPAFLSSLTLELFSRQTVA

SEQ ID NO: 8254 - protein, 718 aa, Homo Sapiens; identical to SEQ ID NO: 8253

SEQ ID NO: 8255 - protein, 718 aa, Homo Sapiens; identical to SEQ ID NO: 8253

SEQ ID NO: 8256 - protein, 144 aa, Homo Sapiens
MEDLGENTMVLSTLRSLNNFISQRVEGGSGLDISTSAPGSLQMQYQQSMQREVDRNQELLTRIRQLQEREAGAEEKMQEQLERNRQCQQNLDAASKRLREKEDSLAQAGETINALKGRISELQWSVMDQEMRVKRLESEKQELQ

SEQ ID NO: 8257 - protein, 626 aa, Homo Sapiens
MLPARGCVRKRTVWPRLARVLIVTLLTLELSYAPLPCQLSGVPYNTGDPVGRWARPCIWPCPWHTTINALKGRISELQWSVMDQEMRVKRLESEKQELQEQLDLQHKKCQEANQKIQELQASQEARADHEQQIKDLEQKLSLQEQDAAIVKNMKSELVRLPRLERELKQLREESAHLREMRETNGLLQEELEGLQRKLGRQEKMQETLVGLELENERLLAKLQSWERLDQTMGLSIRTPEDLSRFVVELQQRELALKDKNSAVTSSARGLEKARQQLQEELRQVSGQLLEERKKRETHEALARRLQKRVLLLTKERDGMRAILGSYDSELTPAEYSPQLTRRMREAEDMVQKVHSHSAEMEAQLSQALEELGGQKQRADMLEMELKMLKSQSSSAEQSFLFSREEADTLRLKVEELEGERSRLEEEKRMLEAQLERRALQGDYDQSRTKVLHMSLNPTSVARQRLREDHSQLQAECERLRGLLRAMERGGTVPADLEAAAASLPSSKEVAELKKQVESAELKNQRLKEVFQTKIQEFRKACYTLTGYQIDITTENQYRLTSLYAEHPGDCLIFKATSPSGSKMQLLETEFSHTVGELIEVHLRRQDSIPAFLSSLTLELFSRQTVA

SEQ ID NO: 8258 - protein, 205 aa, Homo Sapiens
MQEQLERNRQCQQNLDAASKRLREKEDSLAQAGETINALKGRISELQWSVMDQEMRVKRLESEKQELQEQLDLQHKKCQEANQKIQELQASQEARADHEQQIKDLEQKLSLQEQDAAIVKNMKSELVRLPRLERELKQLREESAHLREMRETNGLLQEELEGLQRKLGRQEKMQETLVGLELENERLLAKLQSWERLDQTMGLSI

SEQ ID NO: 8259 - protein, 213 aa, Homo Sapiens
MQMELSHKRARVELERAASTSARNYEREVDRNQELLTRIRQLQEREAGAEEKMQEQLERNRQCQQNLDAASKRLREKEDSLAQAGETINALKGRISELQWSVMDQEMRVKRLESEKQELQEQLDLQHKKCQEANQKIQELQASQEARADHEQQIKDLEQKLSLQEQDAAIVKNMKSELVRLPRLERELKQLREESAHLREMRETNGLLQEELE

SEQ ID NO: 8260 - protein, 41 aa, Homo Sapiens
MRAILGSYDSELTPAEYSPQLTRRMREAEDMVQKVHSHSAE

SEQ ID NO: 8261 - protein, 80 aa, Homo Sapiens
MRAILGSYDSELTPAEYSPQLTRRMREAEDMVQKVHSHSAEMEAQLSQALEELGGQKQRADMLEMELKMLKSQSSSAEQS

SEQ ID NO: 8262 - protein, 266 aa, Homo Sapiens
MRELEFAKLECCLAWQLQASRRELEMELKMLKSQSSSAEQSFLFSREEADTLRLKVEELEGERSRLEEEKRMLEAQLERRALQGDYDQSRTKVLHMSLNPTSVARQRLREDHSQLQAECERLRGLLRAMERGGTVPADLEAAAASLPSSKEVAELKKQVESAELKNQRLKEVFQTKIQEFRKACYTLTGYQIDITTENQYRLTSLYAEHPGDCLIFKATSPSGSKMQLLETEFSHTVGELIEVHLRRQDSIPAFLSSLTLELFSRQ

SEQ ID NO: 8263 - protein, 122 aa, Homo Sapiens
MSLNPTSVARQRLREDHSQLQAECERLRGLLRAMERGGTVPADLEAAAASLPSSKEVAELKKQVESAELKNQRLKEVFQTKIQEFRKACYTLTGYQIDITTENQYRLTSLYAEHPGDCLIFK

SEQ ID NO: 8264 - protein, 199 aa, Homo Sapiens
MVSLRPCLPGLPTQHLEEPCPGDYSARGLEKARQQLQEELRQVSGQLLEERKKRETHEALARRLQKRVLLLTKERDGMRAILGSYDSELTPAEYSPQLTRRMREAEDMVQKVHSHSAEMEAQLSQALEELGGQKQRADMLEMELKMLKSQSSSAEQSFLFSREEADTLRLKVEELEGERSRLEEEKRMLEAQLERRALQ

SEQ ID NO: 8265 - protein, 58 aa, Homo Sapiens
MIFLTALPLFWIMISASRGGHWGAWMPSSISAFEGTCVSIPCRFDFPDELRPAVVHGV

SEQ ID NO: 8266 - protein, 158 aa, Homo Sapiens
MIFLTALPLFWIMISASRGGHWGAWMPSSISAFEGTCVSIPCRFDFPDELRPAVVHGVWYFNSPYPKNYPPVVFKSRTQVVHESFQGRSRLLGDLGLRNCTLLLSNVSPELGGKYYFRGDLGGYNQYTFSEHSVLDIVNTPNIVVPPEVVAGTEVEVS

SEQ ID NO: 8267 - protein, 582 aa, Homo Sapiens
MIFLTALPLFWIMISASRGGHWGAWMPSSISAFEGTCVSIPCRFDFPDELRPAVVHGVWYFNSPYPKNYPPVVFKSRTQVVHESFQGRSRLLGDLGLRNCTLLLSNVSPELGGKYYFRGDLGGYNQYTFSEHSVLDIVNTPNIVVPPEVVAGTEVEVSCMVPDNCPELRPELSWLGHEGLGEPAVLGRLREDEGTWVQVSLLHFVPTREANGHRLGCQASFPNTTLQFEGYASMDVKYPPVIVEMNSSVEAIEGSHVSLLCGADSNPPPLLTWMRDGTVLREAVAESLLLELEEVTPAEDGVYACLAENAYGQDNRTVGLSVMYAPWKPTVNGTMVAVEGETVSILCSTQSNPDPILTIFKEKQILSTVIYESELQLELPAVSPEDDGEYWCVAENQYGQRATAFNLSVEFAPVLLLESHCAAARDTVQCLCVVKSNPEPSVAFELPSRNVTVNESEREFVYSERSGLVLTSILTLRGQAQAPPRVICTARNLYGAKSLELPFQGAHRLMWAKIGPVGAVVAFAILIAIVCYITQTRRKKNVTESPSFSAGDNPPVLFSSDFRISGAPEKYESKEVSTLESH

SEQ ID NO: 8268 - protein, 626 aa, Homo Sapiens
MIFLTALPLFWIMISASRGGHWGAWMPSSISAFEGTCVSIPCRFDFPDELRPAVVHGVWYFNSPYPKNYPPVVFKSRTQVVHESFQGRSRLLGDLGLRNCTLLLSNVSPELGGKYYFRGDLGGYNQYTFSEHSVLDIVNTPNIVVPPEVVAGTEVEVSCMVPDNCPELRPELSWLGHEGLGEPAVLGRLREDEGTWVQVSLLHFVPTREANGHRLGCQASFPNTTLQFEGYASMDVKYPPVIVEMNSSVEAIEGSHVSLLCGADSNPPPLLTWMRDGTVLREAVAESLLLELEEVTPAEDGVYACLAENAYGQDNRTVGLSVMYAPWKPTVNGTMVAVEGETVSILCSTQSNPDPILTIFKEKQILSTVIYESELQLELPAVSPEDDGEYWCVAENQYGQRATAFNLSVEFAPVLLLESHCAAARDTVQCLCVVKSNPEPSVAFELPSRNVTVNESEREFVYSERSGLVLTSILTLRGQAQAPPRVICTARNLYGAKSLELPFQGAHRLMWAKIGPVGAVVAFAILIAIVCYITQTRRKKNVTESPSFSAGDNPPVLFSSDFRISGAPEKYESERRLGSERRLLGLRGEPPELDLSYSHSDLGKRPTKDSYTLTEELAEYAEIRVK

SEQ ID NO: 8269 - protein, 131 aa, Homo Sapiens
MPSSISAFEGTCVSIPCRFDFPDELRPAVVHGVWYFNSPYPKNYPPVVFKSRTQVVHESFQGRSRLLGDLGLRNCTLLLSNVSPELGGKYYFRGDLGGYNQYTFSEHSVLDIVNTPNIVVPPEVVAGTEVE

SEQ ID NO: 8270 - protein, 601 aa, Homo Sapiens
MPSSISAFEGTCVSIPCRFDFPDELRPAVVHGVWYFNSPYPKNYPPVVFKSRTQVVHESFQGRSRLLGDLGLRNCTLLLSNVSPELGGKYYFRGDLGGYNQYTFSEHSVLDIVNTPNIVVPPEVVAGTEVEVSCMVPDNCPELRPELSWLGHEGLGEPAVLGRLREDEGTWVQVSLLHFVPTREANGHRLGCQASFPNTTLQFEGYASMDVKYPPVIVEMNSSVEAIEGSHVSLLCGADSNPPPLLTWMRDGTVLREAVAESLLLELEEVTPAEDGVYACLAENAYGQDNRTVGLSVMYAPWKPTVNGTMVAVEGETVSILCSTQSNPDPILTIFKEKQILSTVIYESELQLELPAVSPEDDGEYWCVAENQYGQRATAFNLSVEFAPVLLLESHCAAARDTVQCLCVVKSNPEPSVAFELPSRNVTVNESEREFVYSERSGLVLTSILTLRGQAQAPPRVICTARNLYGAKSLELPFQGAHRLMWAKIGPVGAVVAFAILIAIVCYITQTRRKKNVTESPSFSAGDNPPVLFSSDFRISGAPEKYESERRLGSERRLLGLRGEPPELDLSYSHSDLGKRPTKDSYTLTEELAEYAEIRVK

SEQ ID NO: 8271 - protein, 134 aa, Homo Sapiens
MAARWRFWCVSVTMVVALLIVCDVPSASAQRKKEMVLSEKVSQLMEWTNKRPVIRMNGDKFRRLVKAPPRNYSVIVMFTALQLHRQCVVCKQADEEFQILANSWRYSSAFTNRIFFAMVDFDEGSDVFQMFQVF

SEQ ID NO: 8272 - protein, 335 aa, Homo Sapiens
MAARWRFWCVSVTMVVALLIVCDVPSASAQRKKEMVLSEKVSQLMEWTNKRPVIRMNGDKFRRLVKAPPRNYSVIVMFTALQLHRQCVVCKQADEEFQILANSWRYSSAFTNRIFFAMVDFDEGSDVFQMLNMNSAPTFINFPAKGKPKRGDTYELQVRGFSAEQIARWIADRTDVNIRVIRPPNYAGPLMLGLLLAVIGGLVYLRRSNMEFLFNKTGWAFAALCFVLAMTSGQMWNHIRGPPYAHKNPHTGHVNYIHGSSQAQFVAETHIVLLFNGGVTLGMVLLCEAATSDMDIGKRKIMCVAGIGLVVLFFSWMLSIFRSKYHGYPYSFLMS

SEQ ID NO: 8273 - protein, 367 aa, Homo Sapiens
MRKGKGPICLFSRPTLRPSRSKVSLIEGRGANMAARWRFWCVSVTMVVALLIVCDVPSASAQRKKEMVLSEKVSQLMEWTNKRPVIRMNGDKFRRLVKAPPRNYSVIVMFTALQLHRQCVVCKQADEEFQILANSWRYSSAFTNRIFFAMVDFDEGSDVFQMLNMNSAPTFINFPAKGKPKRGDTYELQVRGFSAEQIARWIADRTDVNIRVIRPPNYAGPLMLGLLLAVIGGLVYLRRSNMEFLFNKTGWAFAALCFVLAMTSGQMWNHIRGPPYAHKNPHTGHVNYIHGSSQAQFVAETHIVLLFNGGVTLGMVLLCEAATSDMDIGKRKIMCVAGIGLVVLFFSWMLSIFRSKYHGYPYSFLMS

SEQ ID NO: 8274 - protein, 367 aa, Homo Sapiens; identical to SEQ ID NO: 8273

SEQ ID NO: 8275 - protein, 234 aa, Homo Sapiens
MGPGGRVARLLAPLMWRRAVSSVAGSAVGAEPGLRLLAVQRLPVGAAFCRACQTPNFVRGLHSEPGLEERAEGTVNEGRPESDAADHTGPKFDIDMMVSLLRQENARDICVIQVPPEMRYTDYFVIVSGTSTRHLHAMAFYVVKMYKHLKCKRDPHVKIEGKDTDDWLCVDFGSMVIHLMLPETREIYELEKLWTLRSYDDQLAQIAPETVPEDFILGIEDDTSSVTPVELKCE

SEQ ID NO: 8276 - protein, 686 aa, Homo Sapiens
MLLRGVLLALQALQLAGALDLPAGSCAFEESTCGFDSVLASLPWILNEEGHYIYVDTSFGKQGEKAVLLSPDLQAEEWSCLRLVYQITTSSESLSDPSQLNLYMRFEDESFDRLLWSAKEPSDSWLIASLDLQNSSKKFKILIEGVLGQGNTASIALFEIKMTTGYCIECDFEENHLCGFVNRWNPNVNWFVGGGSIRNVHSILPQDHTFKSELGHYMYVDSVYVKHFQEVAQLISPLTTAPMAGCLSFYYQIQQGNDNVFSLYTRDVAGLYEEIWKADRPGNAAWNLAEVEFSAPYPMEVIFEVAFNGPKGGYVALDDISFSPVHCQNQTELLFSAVEASCNFEQDLCNFYQDKEGPGWTRVKVKPNMYRAGDHTTGLGYYLLANTKFTSQPGYIGRLYGPSLPGNLQYCLRFHYAIYGFLKMSDTLAVYIFEENHVVQEKIWSVLESPRGVWMQAEITFKKPMPTKVVFMSLCKSFWDCGLVALDDITIQLGSCSSSEKLPPPPGECTFEQDECTFTQEKRNRSSWHRRRGETPTSYTGPKGDHTTGVGYYMYIEASHMVYGQKARLLSRPLRGVSGKHCLTFFYHMYGGGTGLLSVYLKKEEDSEESLLWRRRGEQSISWLRALIEYSCERQHQIIFEAIRGVSIRSDIAIDDVKFQAGPCGEMEDTTQQSSGYSEDLNEIEY

SEQ ID NO: 8277 - protein, 165 aa, Homo Sapiens [sequence omitted]

SEQ ID NO: 8278 - protein, 1010 aa, Homo Sapiens
MGAYARASGVCARGCLDSAGPWTMSRALRPPLPPLCFFLLLLAAAGARAGGYETCPTVQPNMLNVHLLPHTHDDVGWLKTVDQYFYGIKNDIQHAGVQYILDSVISALLADPTRRFIYVEIAFFSRWWHQQTNATQEVVRDLVRQGRLEFANGGWVMNDEAATHYGAIVDQMTLGLRFLEDTFGNDGRPRVAWHIDPFGHSREQASLFAQMGFDGFFFGRLDYQDKWVRMQKLEMEQVWRASTSLKPPTADLFTGVLPNGYNPPRNLCWDVLCVDQPLVEDPRSPEYNAKELVDYFLNVATAQGRYYRTNHTVMTMGSDFQYENANMWFKNLDKLIRLVNAQAKGSSVHVLYSTPACYLWELNKANLTWSVKHDDFFPYADGPHQFWTGYFSSRPALKRYERLSYNFLQVCNQLEALVGLAANVGPYGSGDSAPLNEAMAVLQHHDAVSGTSRQHVANDYARQLAAGWGPCEVLLSNALARLRGFKDHFTFCQQLNISICPLSQTAARFQVIVYNPLGRKVNWMVRLPVSEGVFVVKDPNGRTVPSDVVIFPSSDSQAHPPELLFSASLPALGFSTYSVAQVPRWKPQARAPQPIPRRSWSPALTIENEHIRATFDPDTGLLMEIMNMNQQLLLPVRQTFFWYNASIGDNESDQASGAYIFRPNQQKPLPVSRWAQIHLVKTPLVQEVHQNFSAWCSQVVRLYPGQRHLELEWSVGPIPVGDTWGKEVISRFDTPLETKGRFYTDSNGREILERRRDYRPTWKLNQTEPVAGNYYPVNTRIYITDGNMQLTVLTDRSQGGSSLRDGSLELMVHRRLLKDDGRGVSEPLMENGSGAWVRGRHLVLLDTAQAAAAGHRLLAEQEVLAPQVVLAPGGGAAYNLGAPPRTQFSGLRRDLPPSVHLLTLASWGPEMVLLRLEHQFAVGEDSGRNLSAPVTLNLRDLFSTFTITRLQETTLVANQLREAASRLKWTTNTGPTPHQTPYQLDPANITLEPMEIRTFLASVQWKEVDG

SEQ ID NO: 8279 - protein, 1011 aa, Homo Sapiens
MGAYARASGVCARGCLDSAGPWTMSRALRPPLPPLCFFLLLLAAAGARAGGYETCPTVQPNMLNVHLLPHTHDDVGWLKTVDQYFYGIKNDIQHAGVQYILDSVISALLADPTRRFIYVEIAFFSRWWHQQTNATQEVVRDLVRQGRLEFANGGWVMNDEAATHYGAIVDQMTLGLRFLEDTFGNDGRPRVAWHIDPFGHSREQASLFAQMGFDGFFFGRLDYQDKWVRMQKLEMEQVWRASTSLKPPTADLFTGVLPNGYNPPRNLCWDVLCVDQPLVEDPRSPEYNAKELVDYFLNVATAQGRYYRTNHTVMTMGSDFQYENANMWFKNLDKLIRLVNAQQAKGSSVHVLYSTPACYLWELNKANLTWSVKHDDFFPYADGPHQFWTGYFSSRPALKRYERLSYNFLQVCNQLEALVGLAANVGPYGSGDSAPLNEAMAVLQHHDAVSGTSRQHVANDYARQLAAGWGPCEVLLSNALARLRGFKDHFTFCQQLNISICPLSQTAARFQVIVYNPLGRKVNWMVRLPVSEGVFVVKDPNGRTVPSDVVIFPSSDSQAHPPELLFSASLPALGFSTYSVAQVPRWKPQARAPQPIPRRSWSPALTIENEHIRATFDPDTGLLMEIMNMNQQLLLPVRQTFFWYNASIGDNESDQASGAYIFRPNQQKPLPVSRWAQIHLVKTPLVQEVHQNFSAWCSQVVRLYPGQRHLELEWSVGPIPVGDTWGKEVISRFDTPLETKGRFYTDSNGREILERRRDYRPTWKLNQTEPVAGNYYPVNTRIYITDGNMQLTVLTDRSQGGSSLRDGSLELMVHRRLLKDDGRGVSEPLMENGSGAWVRGRHLVLLDTAQAAAAGHRLLAEQEVLAPQVVLAPGGGAAYNLGAPPRTQFSGLRRDLPPSVHLLTLASWGPEMVLLRLEHQFAVGEDSGRNLSAPVTLNLRDLFSTFTITRLQETTLVANQLREAASRLKWTTNTGPTPHQTPYQLDPANITLEPMEIRTFLASVQWKEVDG

SEQ ID NO: 8280 - protein, 172 aa, Homo Sapiens
MGAYARASGVCARGCLDSAGPWTMSRALRPPLPPLCFFLLLLAAAGARAGGYEVCVFGVPVQTCPTVQPNMLNVHLLPHTHDDVGWLKTVDQYFYGIKNDIQHAGVQYILDSVISALLADPTRRFIYVEIAFFSRWWHQQTNATQEVVRDLVRQGRLEFANGGWVMNDEAAT

SEQ ID NO: 8281 - protein, 140 aa, Homo Sapiens
  misc_feature (1)..(1): Xaa can be any naturally occurring amino acid
XLAAGWGPCEVLLSNALARLRGFKDHFTFCQQLNISICPLSQTAARFQVIVYNPLGRKVNWMVRLPVSEGVFVVKDPNGRTVPSDLRQPGAPSGAAVLSLTARPGLQHLFSSPGASLEAPGPRTTAHPQKILVPCFNHRK

SEQ ID NO: 8282 - protein, 67 aa, Homo Sapiens
  misc_feature (1)..(1): Xaa can be any naturally occurring amino acid
XSDVVIFPSSDSQAHPPELLFSASLPALGFSTYSVAQVPRWKPQARAPQPIPRRSWSPALTIENEGC

SEQ ID NO: 8283 - protein, 1009 aa, Homo Sapiens
MGQLCWLPLLAPLLLLRPPGVQSAGPIRAFVVPHSHMDVGWVYTVQESMRAYAANVYTSVVEELARGQQRRFIAVEQEFFRLWWDGVASDQQKYQVRQLLEEGRLEFVIGGQVMHDEAVTHLDDQILQLTEGHGFLYETFGIRPQFSWHVDPFGASATTPTLFALAGFNAHLGSRIDYDLKAAMQEARGLQFVWRGSPSLSERQEIFTHIMDQYSYCTPSHIPFSNRSGFYWNGVAVFPKPPQDGVYPNMSEPVTPANINLYAEALVANVKQRAAWFRTPHVLWPWGCDKQFFNASVQFANMDPLLDHINSHAAELGVSVQYATLGDYFRALHALNVTWRVRDHHDFLPYSTEPFQAWTGFYTSRSSLKGLARRASALLYAGESMFTRYLWPAPRGHLDPTWALQQLQQLRWAVSEVQHHDAITGTESPKVRDMYATHLASGMLGMRKLMASIVLDELQPQAPMAASSDAGPAGHFASVYNPLAWTVTTIVTLTVGFPGVRVTDEAGHPVPSQIQNSTETPSAYDLLILTTIPGLSYRHYNIRPTAGAQEGTQEPAATVASTLQFGRRLRRRTSHAGRYLVPVANDCYIVLLDQDTNLMHSIWERQSNRTVRVTQEFLEYHVNGDVKQGPISDNYLFTPGKAAVPAWEAVEMEIVAGQLVTEIRQYFYRNMTAQNYTYAIRSRLTHVPQGHDGELLCHRIEQEYQAGPLELNREAVLRTSTNLNSQQVIYSDNNGYQMQRRPYVSYVNNSIARNYYPMVQSAFMEDGKSRLVLLSERAHGISSQGNGQVEVMLHRRLWNNFDWDLGYNLTLNDTSVVHPVLWLLLGSWSLTTALRQRSALALQHRPVVLFGDLAGTAPKLPGPQQQEAVTLPPNLHLQILSIPGWRYSSNHTEHSQNLRKGHRGEAQADLRRVLLRLYHLYEVGEDPVLSQPVTVNLEAVLQALGSVVAVEERSLTGTWDLSMLHRWSWRTGPGRHRGDTTSPSRPPGGPIITVHPKEIRTFFIHFQQQ

SEQ ID NO: 8284 - protein, 958 aa, Homo Sapiens
MGQLCWLPLLAPLLLLRPPGVQSAGPIRAFVVPHSHMDVGWVYTVQESMRAYAANVYTSVVEELARGQQRRFIAVEQEFFRLWWDGVASDQQKYQVRQLLEEGRLEFVIGGQVMHDEAVTHLDDQILQLTEGHGFLYETFGIRPQFSWHVDPFGASATTPTLFALAGFNAHLGSRIDYDLKAAMQEARGLQFVWRGSPSLSERQEIFTHIMDQYSYCTPSHIPFSNRSGFYWNGVAVFPKPPQDGVYPNMSEPVTPANINLYAELGVSVQYATLGDYFRALHALNVTWRVRDHHDFLPYSTEPFQAWTGFYTSRSSLKGLARRASALLYAGESMFTRYLWPAPRGHLDPTWALQQLQQLRWAVSEVQHHDAITGTESPKVRDMYATHLASGMLGMRKLMASIVLDELQPQAPMAASSDAGPAGHFASVYNPLAWTVTTIVTLTVGFPGVRVTDEAGHPVPSQIQNSTETPSAYDLLILTTIPGLSYRHYNIRPTAGAQEGTQEPAATVASTLQFGRRLRRRTSHAGRYLVPVANDCYIVLLDQDTNLMHSIWERQSNRTVRVTQEFLEYHVNGDVKQGPISDNYLFTPGKAAVPAWEAVEMEIVAGQLVTEIRQYFYRNMTAQNYTYAIRSRLTHVPQGHDGELLCHRIEQEYQAGPLELNREAVLRTSTNLNSQQVIYSDNNGYQMQRRPYVSYVNNSIARNYYPMVQSAFMEDGKSRLVLLSERAHGISSQGNGQVEVMLHRRLWNNFDWDLGYNLTLNDTSVVHPVLWLLLGSWSLTTALRQRSALALQHRPVVLFGDLAGTAPKLPGPQQQEAVTLPPNLHLQILSIPGWRYSSNHTEHSQNLRKGHRGEAQADLRRVLLRLYHLYEVGEDPVLSQPVTVNLEAVLQALGSVVAVEERSLTGTWDLSMLHRWSWRTGPGRHRGDTTSPSRPPGGPIITVHPKEIRTFFIHFQQQ

SEQ ID NO: 8285 - protein, 953 aa, Homo Sapiens
  misc_feature (1)..(1): Xaa can be any naturally occurring amino acid
XQLCWLPLLAPLLLLRPPGVQSAGPIRAFVVPHSHMDVGWVYTVQESMRAYAANVYTSVVEELARGQQRRFIAVEQEFFRLWWDGVASDQQKYQVRQLLEEGRLEFVIGGQVMHDEAVTHLDDQILQLTEGHGFLYETFGIRPQFSWHVDPFGASATTPTLFALAGFNAHLGSRIDYDLKAAMQEARGLQFVWRGSPSLSERQEIFTHIMDQYSYCTPSHIPFSNRSGFYWNGVAVFPKPPQDGVYPNMSEPVTPANINLYAEALVANVKQRAAWFRTPHVLWPWGCDKQFFNASVQFANMDPLLDHINSHAAELGVSVQYATLGDYFRALHALNVTWRVRDHHDFLPYSTEPFQAWTGFYTSRSSLKGLARRASALLYAGESMFTRYLWPAPRGHLDPTWALQQLQQLRWAVSEVQHHDAITGTESPKVRDMYATHLASGMLGMRKLMASIVLDELQPQAPMAASSDAGPAGHFASVYNPLAWTVTTIVTLTVGFPGVRVTDEAGHPVPSQIQNSTETPSAYDLLILTTIPGLSYRHYNIRPTAGAQEGTQEPAATVASTLQFGRRLRRRTSHAGRYLVPVANDCYIVLLDQDTNLMHSIWERQSNRTVRVTQEFLEYHVNGDVKQGPISDNYLFTPGKAAVPAWEAVEMEIVAGQLVTEIRQYFYRNMTAQNYTYAIRSRLTHVPQGHDGELLCHRIEQEYQAGPLELNREAVLRTSTNLNSQQVIYSDNNGYQMQRRPYVSYVNNSIARNYYPMVQSAFMEDGKSRLVLLSERAHGISSQGNGQVEVMLHRRLWNNFDWDLGYNLTLNDTSVVHPVLWLLLGSWSLTTALRQRSALALQHRPVVLFGDLAGTAPKLPGPQQQEAVTLPPNLHLQILSIPGWRYSSNHTEHSQNLRKGHRGEAQADLRRVLLRLYHLYEVGEDPVLSQPVTVNLEVNFPTPIQTISQGSKP

SEQ ID NO: 8286 - protein, 822 aa, Homo Sapiens
MRLHLLLLLALCGAGTTAAELSYSLRGNWSICNGNGSLELPGAVPGCVHSALFQQGLIQDSYYRFNDLNYRWVSLDNWTYSKEFKIPFEISKWQKVNLILEGVDTVSKILFNEVTIGETDNMFNRYEQCSFSWDWGPSFPTQGIWKDVRIEAYNICHLNYFTFSPIYDKSAQEWNLEIESTFDVVSSKPVGGQVIVAIPKLQTQQTYSIELQPGKRIVELFVNISKNITVETWWPHGHGNQTGYNMTVLFELDGGLNIEKSAKVYFRTVELIEEPIKGSPGLSFYFKINGFPIFLKGSNWIPADSFQDRVTSELLRLLLQSVVDANMNTLRVWGGGIYEQDEFYELCDELGIMVWQDFMFACALYPTDQGFLDSVTAEVAYQIKRLKSHPSIIIWSGNNENEEALMMNWYHISFTDRPIYIKDYVTLYVKNIRELVLAGDKSRPFITSSPTNGAETVAEAWVSQNPNSNYFGDVHFYDYISDCWNWKVFPKARFASEYGYQSWPSFSTLEKVSSTEDWSFNSKFSLHRQHHEGGNKQMLYQAGLHFKLPQSTDPLRTFKDTIYLTQVMQAQCVKTETEFYRRSRSEIVDQQGHTMGALYWQLNDIWQAPSWASLEYGGKWKMLHYFAQNFFAPLLPVGFENENTFYIYGVSDLHSDYSMTLSVRVHTWSSLEPVCSRVTERFVMKGGEAVCLYEEPVSELLRRCGNCTRESCVVSFYLSADHELLSPTNYHFLSSPKEAVGLCKAQITAIISQQGDIFVFDLETSAVAPFVWLDVGSIPGRFSDNGFLMTEKTRTILFYPWEPTSKNELEQSFHVTSLTDIY

SEQ ID NO: 8287 - protein, 879 aa, Homo Sapiens
MRLHLLLLLALCGAGTTAAELSYSLRGNWSICNGNGSLELPGAVPGCVHSALFQQGLIQDSYYRFNDLNYRWVSLDNWTYSKEFKIPFEISKWQKVNLILEGVDTVSKILFNEVTIGETDNMFNRYSFDITNVVRDVNSIELRFQSAVLYAAQQSKAHTRYQVPPDCPPLVQKGECHVNFVRKEQCSFSWDWGPSFPTQGIWKDVRIEAYNICHLNYFTFSPIYDKSAQEWNLEIESTFDVVSSKPVGGQVIVAIPKLQTQQTYSIELQPGKRIVELFVNISKNITVETWWPHGHGNQTGYNMTVLFELDGGLNIEKSAKVYFRTVELIEEPIKGSPGLSFYFKINGFPIFLKGSNWIPADSFQDRVTSELLRLLLQSVVDANMNTLRVWGGGIYEQDEFYELCDELGIMVWQDFMFACALYPTDQGFLDSVTAEVAYQIKRLKSHPSIIIWSGNNENEEALMMNWYHISFTDRPIYIKDYVTLYVKNIRELVLAGDKSRPFITSSPTNGAETVAEAWVSQNPNSNYFGDVHFYDYISDCWNWKVFPKARFASEYGYQSWPSFSTLEKVSSTEDWSFNSKFSLHRQHHEGGNKQMLYQAGLHFKLPQSTDPLRTFKDTIYLTQVMQAQCVKTETEFYRRSRSEIVDQQGHTMGALYWQLNDIWQAPSWASLEYGGKWKMLHYFAQNFFAPLLPVGFENENTFYIYGVSDLHSDYSMTLSVRVHTWSSLEPVCSRVTERFVMKGGEAVCLYEEPVSELLRRCGNCTRESCVVSFYLSADHELLSPTNYHFLSSPKEAVGLCKAQITAIISQQGDIFVFDLETSAVAPFVWLDVGSIPGRFSDNGFLMTEKTRTILFYPWEPTSKNELEQSFHVTSLTDIY

SEQ ID NO: 8288 - protein, 509 aa, Homo Sapiens
MRLHLLLLLALCGAGTTAAELSYSLRGNWSICNGNGSLELPGAVPGCVHSALFQQGLIQDSYYRFNDLNYRWVSLDNWTYSKEFKIPFEISKWQKVNLILEGVDTVSKILFNEVTIGETDNMFNRYSFDITNVVRDVNSIELRFQSAVLYAAQQSKAHTRYQVPPDCPPLVQKGECHVNFVRKEQCSFSWDWGPSFPTQGIWKDVRIEAYNICHLNYFTFSPIYDKSAQEWNLEIESTFDVVSSKPVGGQVIVAIPKLQTQQTYSIELQPGKRIVELFVNISKNITVETWWPHGHGNQTGYNMTVLFELDGGLNIEKSAKVYFRTVELIEEPIKGSPGLSFYFKINGFPIFLKGSNWIPADSFQDRVTSELLRLLLQSVVDANMNTLRVWGGGIYEQDEFYELCDELGIMVWQDFMFACALYPTDQGFLDSVTAEVAYQIKRLKSHPSIIIWSGNNENEEALMMNWYHISFTDRPIYIKDYVTLYVKNIRELVLACGKMPDTIDLTNTC

SEQ ID NO: 8289 - protein, 886 aa, Homo Sapiens
MRLHLLLLLALCGAGTTAAELSYSLRGNWSICNGNGSLELPGAVPGCVHSALFQQGLIQDSYYRFNDLNYRWVSLDNWTYSKEFKIPFEISKWQKVNLILEGVDTVSKILFNEVTIGETDNMFNRYSFDITNVVRDVNSIELRFQSAVLYAAQQSKAHTRYQVPPDCPPLVQKGECHVNFVRKEQCSFSWDWGPSFPTQGIWKDVRIEAYNICHLNYFTFSPIYDKSAQEWNLEIESTFDVVSSKPVGGQVIVAIPKLQTQQTYSIELQPGKRIVELFVNISKNITVETWWPHGHGNQTGYNMTVLFELDGGLNIEKSAKVYFRTVELIEEPIKGSPGLSFYFKINGFPIFLKGSNWIPADSFQDRVTSELLRLLLQSVVDANMNTLRVWGGGIYEQDEFYELCDELGIMVWQDFMFACALYPTDQGFLDSVTAEVAYQIKRLKSHPSIIIWSGNNENEEALMMNWYHISFTDRPIYIKDYVTLYVKNIRELVLAGDKSRPFITSSPTNGAETVAEAWVSQNPNSNYFGDVHFYDYISDCWNWKVFPKARFASEYGYQSWPSFSTLEKVSSTEDWSFNSKFSLHRQHHEGGNKQMLYQAGLHFKLPQSTDPLRTFKDTIYLTQVMQAQCVKTETEFYRRSRSEIVDQQGHTMGALYWQLNDIWQAPSWASLEYGGKWKMLHYFAQNFFAPLLPVGFENENTFYIYGVSDLHSDYSMTLSVRVHTWSSLEPVCSRVTERFVMKGGEAVCLYEEPVSELLRRCGNCTRESCVVSFYLSADHELLSPTNYHFLSSPKEAVGLCKAQITGASLNPRLCSQTYREEISNPTKITSISMTPASLSALVLEQQKLMLPWQLPGQAGMSRMNLVPVAALGPSLEQLGGHHLSAR

SEQ ID NO: 8290 - protein, 397 aa, Homo Sapiens
MRLHLLLLLALCGAGTTAAELSYSLRGNWSICNGNGSLELPGAVPGCVHSALFQQGLIQDSYYRFNDLNYRWVSLDNWTYSKEFKIPFEISKWQKVNLILEGVDTVSKILFNEVTIGETDNMFNRYSFDITNVVRDVNSIELRFQSAVLYAAQQSKAHTRYQVPPDCPPLVQKGECHVNFVRKEQCSFSWDWGPSFPTQGIWKDVRIEAYNICHLNYFTFSPIYDKSAQEWNLEIESTFDVVSSKPVGGQVIVAIPKLQTQQTYSIELQPGKRIVELFVNISKNITVETWWPHGHGNQTGYNMTVLFELDGGLNIEKSAKVYFRTVELIEEPIKGSPGLSFYFKINGFPIFLKGSNWIPADSFQDRVTSEFWGWVGCGPSAQLGQLVTAPFTVCCGC

SEQ ID NO: 8291 - protein, 413 aa, Homo Sapiens
MRLHLLLLLALCGAGTTAAELSYSLRGNWSICNGNGSLELPGAVPGCVHSALFQQGLIQDSYYRFNDLNYRWVSLDNWTYSKEFKIPFEISKWQKVNLILEGVDTVSKILFNEVTIGETDNMFNRYSFDITNVVRDVNSIELRFQSAVLYAAQQSKAHTRYQVPPDCPPLVQKGECHVNFVRKEQCSFSWDWGPSFPTQGIWKDVRIEAYNICHLNYFTFSPIYDKSAQEWNLEIESTFDVVSSKPVGGQVIVAIPKLQTQQTYSIELQPGKRIVELFVNISKNITVETWWPHGHGNQTGYNMTVLFELDGGLNIEKSAKVYFRTVELIEEPIKGSPGLSFYFKINGFPIFLKGSNWIPADSFQDRVTSELLRLLLQSVVDANMNTLRVWGGGIYEQDEFYELCDELGIMVCI

SEQ ID NO: 8292 - protein, 879 aa, Homo Sapiens; identical to SEQ ID NO: 8287

SEQ ID NO: 8293 - protein, 365 aa, Homo Sapiens
MRLHLLLLLALCGAGTTAAELSYSLRGNWSICNGNGSLELPGAVPGCVHSALFQQGLIQDSYYRFNDLNYRWVSLDNWTYSKEFKIPFEISKWQKVNLILEGVDTVSKILFNEVTIGETDNMFNRYSFDITNVVRDVNSIELRFQSAVLYAAQQSKAHTRYQVPPDCPPLVQKGECHVNFVRKEQCSFSWDWGPSFPTQGIWKDVRIEAYNICHLNYFTFSPIYDKSAQEWNLEIESTFDVVSSKPVGGQVIVAIPKLQTQQTYSIELQPGKRIVELFVNISKNITVETWWPHGHGNQTGYNMTVLFELDGGLNIEKSAKSWRLESKIKVSAELCSFRRLWERILPCPFQFLIIAGNPWLVDASL

SEQ ID NO: 8294 - protein, 925 aa, Homo Sapiens
MRLHLLLLLALCGAGTTAAELSYSLRGNWSICNGNGSLELPGAVPGCVHSALFQQGLIQDSYYRFNDLNYRWVSLDNWTYSKEFKIPFEISKWQKVNLILEGVDTVSKILFNEVTIGETDNMFNRYSFDITNVVRDVNSIELRFQSAVLYAAQQSKAHTRYQVPPDCPPLVQKGECHVNFVRKEQCSFSWDWGPSFPTQGIWKDVRIEAYNICHLNYFTFSPIYDKSAQEWNLEIESTFDVVSSKPVGGQVIVAIPKLQTQQTYSIELQPGKRIVELFVNISKNITVETWWPHGHGNQTGYNMTVLFELDGGLNIEKSAKVYFRTVELIEEPIKGSPGLSFYFKINGFPIFLKGSNWIPADSFQDRVTSELFHKKMKFFSRHSHGIIGSIFFLFKCSSPLPAGAGLAVVLQPNWANWLRLLLQSVVDANMNTLRVWGGGIYEQDEFYELCDELGIMVWQDFMFACALYPTDQGFLDSVTAEVAYQIKRLKSHPSIIIWSGNNENEEALMMNWYHISFTDRPIYIKDYVTLYVKNIRELVLAGDKSRPFITSSPTNGAETVAEAWVSQNPNSNYFGDVHFYDYISDCWNWKVFPKARFASEYGYQSWPSFSTLEKVSSTEDWSFNSKFSLHRQHHEGGNKQMLYQAGLHFKLPQSTDPLRTFKDTIYLTQVMQAQCVKTETEFYRRSRSEIVDQQGHTMGALYWQLNDIWQAPSWASLEYGGKWKMLHYFAQNFFAPLLPVGFENENTFYIYGVSDLHSDYSMTLSVRVHTWSSLEPVCSRVTERFVMKGGEAVCLYEEPVSELLRRCGNCTRESCVVSFYLSADHELLSPTNYHFLSSPKEAVGLCKAQITAIISQQGDIFVFDLETSAVAPFVWLDVGSIPGRFSDNGFLMTEKTRTILFYPWEPTSKNELEQSFHVTSLTDIY

SEQ ID NO: 8295 - protein, 62 aa, Homo Sapiens
MRLHLLLLLALCGAGTTAAELSYSLRGNWSICNGNGSLELPGAVPGCVHSALFQQGLIQKEQ

SEQ ID NO: 8296 - protein, 68 aa, Homo Sapiens
MRLHLLLLLALCGAGTTAAELSYSLRGNWSICNGNGSLELPGAVPGCVHSALFQQGLIQSLTLSPRLE

SEQ ID NO: 8297 - protein, 199 aa, Homo Sapiens
MSKAEWDTDQWKTENYINESTEAQSKQKEQKSSEDSYYRFNDLNYRWVSLDNWTYSKEFKIPFEISKWQKVNLILEGVDTVSKILFNEVTIGETDNMFNRYSFDITNVVRDVNSIELRFQSAVLYAAQQSKAHTRYQVPPDCPPLVQKGECHVNFVRKEQCSFSWDWGPSFPTQGIWKDVRIEAYNICHLNYFTFSPIY

SEQ ID NO: 8298 - protein, 215 aa, Homo Sapiens
SKILFNEVTIGETDNMFNRYSFDITNVVRDVNSIELRFQSAVLYAAQQSKAHTRYQVPPDCPPLVQKGECHVNFVRKEQCSFSWDWGPSFPTQGIWKDVRIEAYNICHLNYFTFSPIYDKSAQEWNLEIESTFDVVSSKPVGGQVIVAIPKLQTQQTYSIELQPGKRIVELFVNISKNITVETWWPHGHGNQTGYNMTVLFELDGGLNIEKSAKL

SEQ ID NO: 8299 - protein, 230 aa, Homo Sapiens
  misc_feature (1)..(1): Xaa can be any naturally occurring amino acid
XDCPPLVQKGECHVNFVRKEQCSFSWDWGPSFPTQGIWKDVRIEAYNICHLNYFTFSPIYDKSAQEWNLEIESTFDVVSSKPVGGQVIVAIPKLQTQQTYSIELQPGKRIVELFVNISKNITVETWWPHGHGNQTGYNMTVLFELDGGLNIEKSAKVYFRTVELIEEPIKGSPGLSFYFKINGFPIFLKGSNWIPADSFQDRVTSEFWGWVGCGPSAQLGQLVSLPWCLC

SEQ ID NO: 8300 - protein, 263 aa, Homo Sapiens
MADDNGEPSDDLVPAILDTAHQYSIQVAFHIQPYKGRDDITVHDNIKYIIDTYGSHGAFYRYKNSMGKSLPLFYIYDSYLTSPEAWAHLLTPNGPHSIRNTPYDGVFIALLVEEGHTHDILAAGFDGMYTYFASNGFSFGSSHQNWKAVKNFCDANNLMFIPSVGPGYIDTSIRPWNNHNTRNRVNGKYYETALQAALTVRPEIVSITSFNEWHEGTQIEKAIPKKTPTRLYLDYLPHQPSLYLELTRRWAEHFIKEKEQWLM

SEQ ID NO: 8301 - protein, 250 aa, Homo Sapiens
MARRRRRACIALFLVLLFAFGTLMGLRTLKAPDGLPALGPGLELAPFERRPEGAPAPAARAPAAPAAPPPPPPPPRTADPGGSPGPAPAEAEPAPVQSLRVYSDLHAFYYSWYGSPRREGHYIHWDHVMVPHWDPKISASYPRGRHSPPDDLGSSFYPELGPYSSRDPEVLREHMTQLKEAAIGVLVLSWYPPGMADDNGEPSDDLVPAILDTAHQYSIQVAFHIQPYKGRDDITVHDNIKYIIDTTGKL

SEQ ID NO: 8302 - protein, 457 aa, Homo Sapiens
MARRRRRACIALFLVLLFAFGTLMGLRTLKAPDGLPALGPGLELAPFERRPEGAPAPAARAPAAPAAPPPPPPPPRTADPGGSPGPAPAEAEPAPVQSLRVYSDLHAFYYSWYGSPRREGHYIHWDHVMVPHWDPKISASYPRGRHSPPDDLGSSFYPELGPYSSRDPEVLREHMTQLKEAAIGVLVLSWYPPGMADDNGEPSDDLVPAILDTAHQYSIQVAFHIQPYKGRDDITVHDNIKYIIDTYGSHGAFYRYKNSMGKSLPLFYIYDSYLTSPEAWAHLLTPNGPHSIRNTPYDGVFIALLVEEGHTHDILAAGFDGMYTYFASNGFSFGSSHQNWKAVKNFCDANNLMFIPSVGPGYIDTSIRPWNNHNTRNRVNGKYYETALQAALTVRPEIVSITSFNEWHEGTQIEKAIPKKTPTRLYLDYLPHQPSLYLELTRRWAEHFIKEKEQWLM

SEQ ID NO: 8303 - protein, 235 aa, Homo Sapiens
MITGSPQMTWCPPFWTPPISTASRYGSHGAFYRYKNSMGKSLPLFYIYDSYLTSPEAWAHLLTPNGPHSIRNTPYDGVFIALLVEEGHTHDILAAGFDGMYTYFASNGFSFGSSHQNWKAVKNFCDANNLMFIPSVGPGYIDTSIRPWNNHNTRNRVNGKYYETALQAALTVRPEIVSITSFNEWHEGTQIEKAIPKKTPTRLYLDYLPHQPSLYLELTRRWAEHFIKEKEQWLM

SEQ ID NO: 8304 - protein, 130 aa, Homo Sapiens
VYSDLHAFYYSWYGSPRREGHYIHWDHVMVPHWDPKISASYPRGRHSPPDDLGSSFYPELGPYSSRDPEVLREHMTQLKEAAIGVLVLSWYPPGMADDNGEPSDDLVPAILDTAHQYSIQVWLPWCILPL

SEQ ID NO: 8305 - protein, 185 aa, Homo Sapiens
MRRMRRMWATQGLAVALALSVLPGSRALRPGDCEVCISYLGRFYQDLKDRDVTFSPATIENELIKFCREARGKENRLCYYIGATDDAATKIINEVSKPLAHHIPVEKICEKLKKKDSQICELKYDKQIDLSTVDLKKLRVKELKKILDDWGETCKGCAEKSDYIRKINELMPKYAPKAASARTDL

SEQ ID NO: 8306 - protein, 71 aa, Homo Sapiens
  misc_feature (1)..(1): Xaa can be any naturally occurring amino acid
XATQGLAVALALSVLPGSRALRPGDCEVCISYLGRFYQDLKDRDVTFSPATIENELIKFCREARGKENRLV

SEQ ID NO: 8307 - protein, 397 aa, Homo Sapiens
MFFGGEGSLTYTLGIRGNEPVYTSTQEDCINSCCSTKNISGDKACNLMIFDTRKTARQPNCYLFFCPNEEACPLKPAKGLMSYRIITDFPSLTRNLPSQELPQEDSLLHGQFSQAVTPLAHHHTDYSKPTDISWRDTLSQKFGSSDHLEKLFKMDEASAQLLAYKEKGHSQSSQFSSDQEIAHLLPENVSALPATVAVASPHTTSATPKPATLLPTNASVTPSGTSQPQLATTAPPVTTVTSQPPTTLISTVFTRAAATLQAMATTAVLTTTFQAPTDSKGSLETIPFTEISNLTLNTGNVYNPTALSMSNVESSTMNKTASWEGREASPGSSSQGSVPENQYGLPFEKWLLIGSLLFGVLFLVIGLVLLGRILSESLRRKRYSRLDYLINGIYVDI

SEQ ID NO: 8308 - protein, 57 aa, Homo Sapiens
MFFGGEGSLTYTLVIICFLTLRLSASQNCLKKSLEDVVIDIQSSLSKGIRGNEPVYT

SEQ ID NO: 8309 - protein, 431 aa, Homo Sapiens
MFFGGEGSLTYTLVIICFLTLRLSASQNCLKKSLEDVVIDIQSSLSKGIRGNEPVYTSTQEDCINSCCSTKNISGDKACNLMIFDTRKTARQPNCYLFFCPNEEACPLKPAKGLMSYRIITDFPSLTRNLPSQELPQEDSLLHGQFSQAVTPLAHHHTDYSKPTDISWRDTLSQKFGSSDHLEKLFKMDEASAQLLAYKEKGHSQSSQFSSDQEIAHLLPENVSALPATVAVASPHTTSATPKPATLLPTNASVTPSGTSQPQLATTAPPVTTVTSQPPTTLISTVFTRAAATLQAMATTAVLTTTFQAPTDSKGSLETIPFTEISNLTLNTGNVYNPTALSMSNVESSTMNKTASWEGREASPGSSSQGSVPENQYGLPFEKWLLIGSLLFGVLFLVIGLVLLGRILSESLRRKRYSRLDYLINGIYVDI

SEQ ID NO: 8310 - protein, 350 aa, Homo Sapiens
MIFDTRKTARQPNCYLFFCPNEEACPLKPAKGLMSYRIITDFPSLTRNLPSQELPQEDSLLHGQFSQAVTPLAHHHTDYSKPTDISWRDTLSQKFGSSDHLEKLFKMDEASAQLLAYKEKGHSQSSQFSSDQEIAHLLPENVSALPATVAVASPHTTSATPKPATLLPTNASVTPSGTSQPQLATTAPPVTTVTSQPPTTLISTVFTRAAATLQAMATTAVLTTTFQAPTDSKGSLETIPFTEISNLTLNTGNVYNPTALSMSNVESSTMNKTASWEGREASPGSSSQGSVPENQYGLPFEKWLLIGSLLFGVLFLVIGLVLLGRILSESLRRKRYSRLDYLINGIYVDI

SEQ ID NO: 8311 - protein, 832 aa, Homo Sapiens
MELTGLEVALVLILQKVENGDLSNKILKITDFGLAREWHRTTKMSAAGTYAWMAPEVIRASMFSKGSDVWSYGVLLWELLTGEVPFRGIDGLAVAYGVAMNKLALPIPSTCPEPFAKLMEDCWNPDPHSRPSFTNILDQLTTIEESGFFEMPKDSFHCLQDNWKHEIQEMFDQLRAKEKELRTWEEELTRAALQQKNQEELLRRREQELAEREIDILERELNIIIHQLCQEKPRVKKRKGKFRKSRLKLKDGNRISLPSDFQHKFTVQASPTMDKRKSLINSRSSPPASPTIIPRLRAIQLTPGESSKTWGRSSVVPKEEGEEEEKRAPKKKGRTWGPGTLGQKELASGDEGLKSLVDGYKQWSSSAPNLVKGPRSSPALPGFTSLMEMALLAASWVVPIDIEEDEDSEGPGSGESRLQHSPSQSYLCIPFPRGEDGDGPSSDGIHEEPTPVNSATSTPQLTPTNSLKRGGAHHRRCEVALLGCGAVLAATGLGFDLLEAGKCQLLPLEEPEPPAREEKKRREGLFQRSSRPRRSTSPPSRKLFKKEEPMLLLGDPSASLTLLSLSSISECNSTRSLLRSDSDEIVVYEMPVSPVEAPPLSPCTHNPLVNVRVERFKRDPNQSLTPTHVTLTTPSQPSSHRRTPSDGALKPETLLASRSPSSNGLSPSPGAGMLKTPSPSRDPGEFPRLPDPNVVFPPTPRRWNTQQDSTLERPKTLEFLPRPRPSANRQRLDPWWFVSPSHARSTSPANSSSTETPSNLDSCFASSSSTVEERPGLPALLPFQAGPLPPTERTLLDLDAEGQSQDSTVPLCRAELNTHRPAPYEIQQEFWS

SEQ ID NO: 8312 - protein, 880 aa, Homo Sapiens
MELTGLEVALVLILQKVENGDLSNKILKITDFGLAREWHRTTKMSAAGTYAWMAPEVIRASMFSKGSDVWSYGVLLWELLTGEVPFRGIDGLAVAYGVAMNKLALPIPSTCPEPFAKLMEDCWNPDPHSRPSFTNILDQLTTIEESGFFEMPKDSFHCLQDNWKHEIQEMFDQLRAKEKELRTWEEELTRAALQQKNQEELLRRREQELAEREIDILERELNIIIHQLCQEKPRVKKRKGKFRKSRLKLKDGNRISLPSDFQHKFTVQASPTMDKRKSLINSRSSPPASPTIIPRLRAIQCETVSQISWGQNTQGHLSPALSSHRLVQACSIHNFCHLSSTMCIYMHILTPGESSKTWGRSSVVPKEEGEEEEKRAPKKKGRTWGPGTLGQKELASGDEGLKSLVDGYKQWSSSAPNLVKGPRSSPALPGFTSLMEMALLAASWVVPIDIEEDEDSEGPGSGESRLQHSPSQSYLCIPFPRGEDGDGPSSDGIHEEPTPVNSATSTPQLTPTNSLKRGGAHHRRCEVALLGCGAVLAATGLGFDLLEAGKCQLLPLEEPEPPAREEKKRREGLFQRSSRPRRSTSPPSRKLFKKEEPMLLLGDPSASLTLLSLSSISECNSTRSLLRSDSDEIVVYEMPVSPVEAPPLSPCTHNPLVNVRVERFKRDPNQSLTPTHVTLTTPSQPSSHRRTPSDGALKPETLLASRSPSSNGLSPSPGAGMLKTPSPSRDPGEFPRLPDPNVVFPPTPRRWNTQQDSTLERPKTLEFLPRPRPSANRQRLDPWWFVSPSHARSTSPANSSSTETPSNLDSCFASSSSTVEERPGLPALLPFQAGPLPPTERTLLDLDAEGQSQDSTVPLCRAELNTHRPAPYEIQQEFWS

SEQ ID NO: 8313 - protein, 1081 aa, Homo Sapiens
MEPSRALLGCLASAAAAAPPGEDGAGAGAEEEEEEEEEAAAAVGPGELGCDAPLPYWTAVFEYEAAGEDELTLRLGDVVEVLSKDSQVSGDEGWWTGQLNQRVGIFPSNYVTPRSAFSSRCQPGGEDPSCYPPIQLLEIDFAELTLEEIIGIGGFGKVYRAFWIGDEVAVKAARHDPDEDISQTIENVRQEAKLFAMLKHPNIIALRGVCLKEPNLCLVMEFARGGPLNRVLSGKRIPPDILVNWAVQIARGMNYLHDEAIVPIIHRDLKSSNILILQKVENGDLSNKILKITDFGLAREWHRTTKMSAAGTYAWMAPEVIRASMFSKGSDVWSYGVLLWELLTGEVPFRGIDGLAVAYGVAMNKLALPIPSTCPEPFAKLMEDCWNPDPHSRPSFTNILDQLTTIEESGFFEMPKDSFHCLQDNWKHEIQEMFDQLRAKEKELRTWEEELTRAALQQKNQEELLRRREQELAEREIDILERELNIIIHQLCQEKPRVKKRKGKFRKSRLKLKDGNRISLPSDFQHKFTVQASPTMDKRKSLINSRSSPPASPTIIPRLRAIQLTPGESSKTWGRSSVVPKEEGEEEEKRAPKKKGRTWGPGTLGQKELASGDEGLKSLVDGYKQWSSSAPNLVKGPRSSPALPGFTSLMEMEDEDSEGPGSGESRLQHSPSQSYLCIPFPRGEDGDGPSSDGIHEEPTPVNSATSTPQLTPTNSLKRGGAHHRRCEVALLGCGAVLAATGLGFDLLEAGKCQLLPLEEPEPPAREEKKRREGLFQRSSRPRRSTSPPSRKLFKKEEPMLLLGDPSASLTLLSLSSISECNSTRSLLRSDSDEIVVYEMPVSPVEAPPLSPCTHNPLVNVRVERFKRDPNQSLTPTHVTLTTPSQPSSHRRTPSDGALKPETLLASRSPSSNGLSPSPGAGMLKTPSPSRDPGEFPRLPDPNVVFPPTPRRWNTQQDSTLERPKTLEFLPRPRPSANRQRLDPWWFVSPSHARSTSPANSSSTETPSNLDSCFASSSSTVEERPGLPALLPFQAGPLPPTERTLLDLDAEGQSQDSTVPLCRAELNTHRPAPYEIQQEFWS

SEQ ID NO: 8314 - protein, 1118 aa, Homo Sapiens
MEPSRALLGCLASAAAAAPPGEDGAGAGAEEEEEEEEEAAAAVGPGELGCDAPLPYWTAVFEYEAAGEDELTLRLGDVVEVLSKDSQVSGDEGWWTGQLNQRVGIFPSNYVTPRSAFSSRCQPGGEDPSCYPPIQLLEIDFAELTLEEIIGIGGFGKVYRAFWIGDEVAVKAARHDPDEDISQTIENVRQEAKLFAMLKHPNIIALRGVCLKEPNLCLVMEFARGGPLNRVLSGKRIPPDILVNWAVQIARGMNYLHDEAIVPIIHRDLKSSNILILQKVENGDLSNKILKITDFGLAREWHRTTKMSAAGTYAWMAPEVIRASMFSKGSDVWSYGVLLWELLTGEVPFRGIDGLAVAYGVAMNKLALPIPSTCPEPFAKLMEDCWNPDPHSRPSFTNILDQLTTIEESGFFEMPKDSFHCLQDNWKHEIQEMFDQLRAKEKELRTWEEELTRAALQQKNQEELLRRREQELAEREIDILERELNIIIHQLCQEKPRVKKRKGKFRKSRLKLKDGNRISLPSDFQHKFTVQASPTMDKRKSLINSRSSPPASPTIIPRLRAIQLTPGESSKTWGRSSVVPKEEGEEEEKRAPKKKGRTWGPGTLGQKELASGDEGSPQRREKANGLSTPSESPHFHLGLKSLVDGYKQWSSSAPNLVKGPRSSPALPGFTSLMEMALLAASWVVPIDIEEDEDSEGPGSGESRLQHSPSQSYLCIPFPRGEDGDGPSSDGIHEEPTPVNSATSTPQLTPTNSLKRGGAHHRRCEVALLGCGAVLAATGLGFDLLEAGKCQLLPLEEPEPPAREEKKRREGLFQRSSRPRRSTSPPSRKLFKKEEPMLLLGDPSASLTLLSLSSISECNSTRSLLRSDSDEIVVYEMPVSPVEAPPLSPCTHNPLVNVRVERFKRDPNQSLTPTHVTLTTPSQPSSHRRTPSDGALKPETLLASRSPSSNGLSPSPGAGMLKTPSPSRDPGEFPRLPDPNVVFPPTPRRWNTQQDSTLERPKTLEFLPRPRPSANRQRLDPWWFVSPSHARSTSPANSSSTETPSNLDSCFASSSSTVEERPGLPALLPFQAGPLPPTERTLLDLDAEGQSQDSTVPLCRAELNTHRPAPYEIQQEFWS

SEQ ID NO: 8315 - protein, 1104 aa, Homo Sapiens
MEPSRALLGCLASAAAAAPPGEDGAGAGAEEEEEEEEEAAAAVGPGELGCDAPLPYWTAVFEYEAAGEDELTLRLGDVVEVLSKDSQVSGDEGWWTGQLNQRVGIFPSNYVTPRSAFSSRCQPGGEDPSCYPPIQLLEIDFAELTLEEIIGIGGFGKVYRAFWIGDEVAVKAARHDPDEDISQTIENVRQEAKLFAMLKHPNIIALRGVCLKEPNLCLVMEFARGGPLNRVLSGKRIPPDILVNWAVQIARGMNYLHDEAIVPIIHRDLKSSNILILQKVENGDLSNKILKITDFGLAREWHRTTKMSAAGTYAWMAPEVIRASMFSKGSDVWSYGVLLWELLTGEVPFRGIDGLAVAYGVAMNKLALPIPSTCPEPFAKLMEDCWNPDPHSRPSFTNILDQLTTIEESGFFEMPKDSFHCLQDNWKHEIQEMFDQLRAKEKELRTWEEELTRAALQQKNQEELLRRREQELAEREIDILERELNIIIHQLCQEKPRVKKRKGKFRKSRLKLKDGNRISLPSDFQHKFTVQASPTMDKRKSLINSRSSPPASPTIIPRLRAIQLTPGESSKTWGRSSVVPKEEGEEEEKRAPKKKGRTWGPGTLGQKELASGDEGSPQRREKANGLSTPSESPHFHLGLKSLVDGYKQWSSSAPNLVKGPRSSPALPGFTSLMEMEDEDSEGPGSGESRLQHSPSQSYLCIPFPRGEDGDGPSSDGIHEEPTPVNSATSTPQLTPTNSLKRGGAHHRRCEVALLGCGAVLAATGLGFDLLEAGKCQLLPLEEPEPPAREEKKRREGLFQRSSRPRRSTSPPSRKLFKKEEPMLLLGDPSASLTLLSLSSISECNSTRSLLRSDSDEIVVYEMPVSPVEAPPLSPCTHNPLVNVRVERFKRDPNQSLTPTHVTLTTPSQPSSHRRTPSDGALKPETLLASRSPSSNGLSPSPGAGMLKTPSPSRDPGEFPRLPDPNVVFPPTPRRWNTQQDSTLERPKTLEFLPRPRPSANRQRLDPWWFVSPSHARSTSPANSSSTETPSNLDSCFASSSSTVEERPGLPALLPFQAGPLPPTERTLLDLDAEGQSQDSTVPLCRAELNTHRPAPYEIQQEFWS

SEQ ID NO: 8316 - protein, 837 aa, Homo Sapiens
MSAAGTYAWMAPEVIRASMFSKGSDVWSYGVLLWELLTGEVPFRGIDGLAVAYGVAMNKLALPIPSTCPEPFAKLMEDCWNPDPHSRPSFTNILDQLTTIEESGFFEMPKDSFHCLQDNWKHEIQEMFDQLRAKEKELRTWEEELTRAALQQKNQEELLRRREQELAEREIDILERELNIIIHQLCQEKPRVKKRKGKFRKSRLKLKDGNRISLPSDFQHKFTVQASPTMDKRKSLINSRSSPPASPTIIPRLRAIQCETVSQISWGQNTQGHLSPALSSHRLVQACSIHNFCHLSSTMCIYMHILTPGESSKTWGRSSVVPKEEGEEEEKRAPKKKGRTWGPGTLGQKELASGDEGLKSLVDGYKQWSSSAPNLVKGPRSSPALPGFTSLMEMALLAASWVVPIDIEEDEDSEGPGSGESRLQHSPSQSYLCIPFPRGEDGDGPSSDGIHEEPTPVNSATSTPQLTPTNSLKRGGAHHRRCEVALLGCGAVLAATGLGFDLLEAGKCQLLPLEEPEPPAREEKKRREGLFQRSSRPRRSTSPPSRKLFKKEEPMLLLGDPSASLTLLSLSSISECNSTRSLLRSDSDEIVVYEMPVSPVEAPPLSPCTHNPLVNVRVERFKRDPNQSLTPTHVTLTTPSQPSSHRRTPSDGALKPETLLASRSPSSNGLSPSPGAGMLKTPSPSRDPGEFPRLPDPNVVFPPTPRRWNTQQDSTLERPKTLEFLPRPRPSANRQRLDPWWFVSPSHARSTSPANSSSTETPSNLDSCFASSSSTVEERPGLPALLPFQAGPLPPTERTLLDLDAEGQSQDSTVPLCRAELNTHRPAPYEIQQEFWS

SEQ ID NO: 8317 - protein, 55 aa, Homo Sapiens
MFGQIQSPGYPDSYPSDSEVTWNITVPDGFRIKLYFMHFNLESSYLCEYDYVKVE

SEQ ID NO: 8318 - protein, 354 aa, Homo Sapiens
MFGQIQSPGYPDSYPSDSEVTWNITVPDGFRIKLYFMHFNLESSYLCEYDYVKVETEDQVLATFCGRETTDTEQTPGQEVVLSPGSFMSITFRSDFSNEERFTGFDAHYMAVDVDECKEREDEELSCDHYCHNYIGGYYCSCRFGYILHTDNRTCRVECSDNLFTQRTGVITSPDFPNPYPKSSECLYTIELEEGFMVNLQFEDIFDIEDHPEVPCPYDYIKIKVGPKVLGPFCGEKAPEPISTQSHSVLILFHSDNSGENRGWRLSYRAAGNECPELQPPVHGKIEPSQAKYFFKDQVLVSCDTGYKVLKDNVEMDTFQIECLKDGTWSNKIPTCKKNEIDLESELKSEQVTE

SEQ ID NO: 8319 - protein, 118 aa, Homo Sapiens
MPANSRDTQGPQNKDKASRTPHRARAHRWLLLYYALCFSLSKASAHTVELNNMFGQIQSPGYPDSYPSDSEVTWNITVPDGFRIKLYFMHFNLESSYLCEYDYVKVETEDQVLATFCG

SEQ ID NO: 8320 - protein, 205 aa, Homo Sapiens [sequence omitted]

SEQ ID NO: 8321 - protein, 380 aa, Homo Sapiens
MRWLLLYYALCFSLSKASAHTVELNNMFGQIQSPGYPDSYPSDSEVTWNITVPDGFRIKLYFMHFNLESSYLCEYDYVKVETEDQVLATFCGRETTDTEQTPGQEVVLSPGSFMSITFRSDFSNEERFTGFDAHYMAVDVDECKEREDEELSCDHYCHNYIGGYYCSCRFGYILHTDNRTCRVECSDNLFTQRTGVITSPDFPNPYPKSSECLYTIELEEGFMVNLQFEDIFDIEDHPEVPCPYDYIKIKVGPKVLGPFCGEKAPEPISTQSHSVLILFHSDNSGENRGWRLSYRAAGNECPELQPPVHGKIEPSQAKYFFKDQVLVSCDTGYKVLKDNVEMDTFQIECLKDGTWSNKIPTCKKNEIDLESELKSEQVTE

SEQ ID NO: 8322 - protein, 728 aa, Homo Sapiens
MRWLLLYYALCFSLSKASAHTVELNNMFGQIQSPGYPDSYPSDSEVTWNITVPDGFRIKLYFMHFNLESSYLCEYDYVKVETEDQVLATFCGRETTDTEQTPGQEVVLSPGSFMSITFRSDFSNEERFTGFDAHYMAVDVDECKEREDEELSCDHYCHNYIGGYYCSCRFGYILHTDNRTCRVECSDNLFTQRTGVITSPDFPNPYPKSSECLYTIELEEGFMVNLQFEDIFDIEDHPEVPCPYDYIKIKVGPKVLGPFCGEKAPEPISTQSHSVLILFHSDNSGENRGWRLSYRAAGNECPELQPPVHGKIEPSQAKYFFKDQVLVSCDTGYKVLKDNVEMDTFQIECLKDGTWSNKIPTCKIVDCRAPGELEHGLITFSTRNNLTTYKSEIKYSCQEPYYKMLNNNTGIYTCSAQGVWMNKVLGRSLPTCLPECGQPSRSLPSLVKRIIGGRNAEPGLFPWQALIVVEDTSRVPNDKWFGSGALLSASWILTAAHVLRSQRRDTTVIPVSKEHVTVYLGLHDVRDKSGAVNSSAARVVLHPDFNIQNYNHDIALVQLQEPVPLGPHVMPVCLPRLEPEGPAPHMLGLVAGWGISNPNVTVDEIISSGTRTLSDVLQYVKLPVVPHAECKTSYESRSGNYSVTENMFCAGYYEGGKDTCLGDSGGAFVIFDDLSQRWVVQGLVSWGGPEECGSKQVYGVYTKVSNYVDWVWEQMGLPQSVVEPQVER

SEQ ID NO: 8323 - protein, 699 aa, Homo Sapiens
MRWLLLYYALCFSLSKASAHTVELNNMFGQIQSPGYPDSYPSDSEVTWNITVPDGFRIKLYFMHFNLESSYLCEYDYVKVETEDQVLATFCGRETTDTEQTPGQEVVLSPGSFMSITFRSDFSNEERFTGFDAHYMAVDVDECKEREDEELSCDHYCHNYIGGYYCSCRFGYILHTDNRTCRVECSDNLFTQRTGVITSPDFPNPYPKSSECLYTIELEEGFMVNLQFEDIFDIEDHPEVPCPYDYIKIKVGPKVLGPFCGEKAPEPISTQSHSVLILFHSDNSGENRGWRLSYRAAGNECPELQPPVHGKIEPSQAKYFFKDQVLVSCDTGYKVLKDNVEMDTFQIECLKDGTWSNKIPTCKIVDCRAPGELEHGLITFSTRNNLTTYKSEIKYSCQEPYYKMLNNNTGIYTCSAQGVWMNKVLGRSLPTCLPVCGLPKFSRKLMARIFNGRPAQKGTTPWIAMLSHLNGQPFCGGSLLGSSWIVTAAHCLHQSLDPEDPTLRDSDLLSPSDFKIILGKHWRLRSDENEQHLGVKHTTLHPQYDPNTFENDVALVELLESPVLNAFVMPICLPEGPQQEGAMVIVSGWGKQFLQRFPETLMEIEIPIVDHSTCQKAYAPLKKKVTRDMICAGEKEGGKDACAGDSGGPMVTLNRERGQWYLVGTVSWGDDCGKKDRYGVYSYIHHNKDWIQRVTGVRN

SEQ ID NO: 8324 - protein, 615 aa, Homo Sapiens
MSITFRSDFSNEERFTGFDAHYMAVDVDECKEREDEELSCDHYCHNYIGGYYCSCRFGYILHTDNRTCRVECSDNLFTQRTGVITSPDFPNPYPKSSECLYTIELEEGFMVNLQFEDIFDIEDHPEVPCPYDYIKIKVGPKVLGPFCGEKAPEPISTQSHSVLILFHSDNSGENRGWRLSYRAAGNECPELQPPVHGKIEPSQAKYFFKDQVLVSCDTGYKVLKDNVEMDTFQIECLKDGTWSNKIPTCKIVDCRAPGELEHGLITFSTRNNLTTYKSEIKYSCQEPYYKMLNNNTGIYTCSAQGVWMNKVLGRSLPTCLPECGQPSRSLPSLVKRIIGGRNAEPGLFPWQALIVVEDTSRVPNDKWFGSGALLSASWILTAAHVLRSQRRDTTVIPVSKEHVTVYLGLHDVRDKSGAVNSSAARVVLHPDFNIQNYNHDIALVQLQEPVPLGPHVMPVCLPRLEPEGPAPHMLGLVAGWGISNPNVTVDEIISSGTRTLSDVLQYVKLPVVPHAECKTSYESRSGNYSVTENMFCAGYYEGGKDTCLGDSGGAFVIFDDLSQRWVVQGLVSWGGPEECGSKQVYGVYTKVSNYVDWVWEQMGLPQSVVEPQVER

SEQ ID NO: 8325 - protein, 686 aa, Homo Sapiens
MRLLTLLGLLCGSVATPLGPKWPEPVFGRLASPGFPGEYANDQERRWTLTAPPGYRLRLYFTHFDLELSHLCEYDFVKLSSGAKVLATLCGQESTDTERAPGKDTFYSLGSSLDITFRSDYSNEKPFTGFEAFYAAEDIDECQVAPGEAPTCDHHCHNHLGGFYCSCRAGYVLHRNKRTCSALCSGQVFTQRSGELSSPEYPRPYPKLSSCTYSISLEEGFSVILDFVESFDVETHPETLCPYDFLKIQTDREEHGPFCGKTLPHRIETKSNTVTITFVTDESGDHTGWKIHYTSTAQPCPYPMAPPNGHVSPVQAKYILKDSFSIFCETGYELLQGHLPLKSFTAVCQKDGSWDRPMPACSIVDCGPPDDLPSGRVEYITGPGVTTYKAVIQYSCEETFYTMKVNDGKYVCEADGFWTSSKGEKSLPVCEPVCGLSARTTGGRIYGGQKAKPGDFPWQVLILGGTTAAGALLYDNWVLTAAHAVYEQKHDASALDIRMGTLKRLSPHYTQAWSEAVFIHEGYTHDAGFDNDIALIKLNNKVVINSNITPICLPRKEAESFMRTDDIGTASGWGLTQRGFLARNLMYVDIPIVDHQKCTAAYEKPPYPRGSVTANMLCAGLESGGKDSCRGDSGGALVFLDSETERWFVGGIVSWGSMNCGEAGQYGVYTKVINYIPWIENIISDF

SEQ ID NO: 8326 - protein, 185 aa, Homo Sapiens
MRLLTLLGLLCGSVATPLGPKWPEPVFGRLASPGFPGEYANDQERRWTLTAPPGYRLRLYFTHFDLELSHLCEYDFVKLSSGAKVLATLCGQESTDTERAPGKDTFYSLGSSLDITFRSDYSNEKPFTGFEAFYAAEDIDECQVAPGEAPTCDHHCHNHLGGFYCSCRAGYVLHRNKRTCSEQSL

SEQ ID NO: 8327 - protein, 496 aa, Homo Sapiens
MRVLSGTSLMLCSLLLLLQALCSPGLAPQSRGHLCRTRPTDLVFVVDSSRSVRPVEFEKVKVFLSQVIESLDVGPNATRVGMVNYASTVKQEFSLRAHVSKAALLQAVRRIQPLSTGTMTGLAIQFAITKAFGDAEGGRSRSPDISKVVIVVTDGRPQDSVQDVSARARASGVELFAIGVGSVDKATLRQIASEPQDEHVDYVESYSVIEKLSRKFQEAFCVVSDLCATGDHDCEQVCISSPGSYTCACHEGFTLNSDGKTCNVCSGGGGSSATDLVFLIDGSKSVRPENFELVKKFISQIVDTLDVSDKLAQVGLVQYSSSVRQEFPLGRFHTKKDIKAAVRNMSYMEKGTMTGAALKYLIDNSFTVSSGARPGAQKVGIVFTDGRSQDYINDAAKKAKDLGFKMFAVGVGNAVEDELREIASEPVAEHYFYTADFKTINQIGKKLQKKICVEEDPCACESLVKFQAKVEGLLQALTRKLEAVSKRLAILENTVV

SEQ ID NO: 8328 - protein, 115 aa, Homo Sapiens
MEDHNCEQLCVNVPGSFVCQCYSGYALAEDGKRCVAVDYCASENHGCEHECVNADGSYLCQCHEGFALNPDKKTCTKIDYCASSNHGCQHECVNTDDSYSCHCLKGFTLNPDKKT

SEQ ID NO: 8329 - protein, 672 aa, Homo Sapiens
MEDHNCEQLCVNVPGSFVCQCYSGYALAEDGKRCVAVDYCASENHGCEHECVNADGSYLCQCHEGFALNPDKKTCTKIDYCASSNHGCQHECVNTDDSYSCHCLKGFTLNPDKKTCRRINYCALNKPGCEHECVNMEESYYCRCHRGYTLDPNGKTCSRVDHCAQQDHGCEQLCLNTEDSFVCQCSEGFLINEDLKTCSRVDYCLLSDHGCEYSCVNMDRSFACQCPEGHVLRSDGKTCAKLDSCALGDHGCEHSCVSSEDSFVCQCFEGYILREDGKTCRRKDVCQAIDHGCEHICVNSDDSYTCECLEGFRLAEDGKRCRRKDVCKSTHHGCEHICVNNGNSYICKCSEGFVLAEDGRRCKKCTEGPIDLVFVIDGSKSLGEENFEVVKQFVTGIIDSLTISPKAARVGLLQYSTQVHTEFTLRNFNSAKDMKKAVAHMKYMGKGSMTGLALKHMFERSFTQGEGARPLSTRVPRAAIVFTDGRAQDDVSEWASKAKANGITMYAVGVGKAIEEELQEIASEPTNKHLFYAEDFSTMDEISEKLKKGICEALEDSDGRQDSPAGELPKTVQQPTESEPVTINIQDLLSCSNFAVQHRYLFEEDNLLRSTQKLSHSTKPSGSPLEEKHDQCKCENLIMFQNLANEEVRKLTQRLEEMTQRMEALENRLRYR

SEQ ID NO: 8330 - protein, 956 aa, Homo Sapiens
MEKMLAGCFLLILGQIVLLPAEARERSRGRSISRGRHARTHPQTALLESSCENKRADLVFIIDSSRSVNTHDYAKVKEFIVDILQFLDIGPDVTRVGLLQYGSTVKNEFSLKTFKRKSEVERAVKRMRHLSTGTMTGLAIQYALNIAFSEAEGARPLRENVPRVIMIVTDGRPQDSVAEVAAKARDTGILIFAIGVGQVDFNTLKSIGSEPHEDHVFLVANFSQIETLTSVFQKKLCTAHMCSTLEHNCAHFCINIPGSYVCRCKQGYILNSDQTTCRIQDLCAMEDHNCEQLCVNVPGSFVCQCYSGYALAEDGKRCVAVDYCASENHGCEHECVNADGSYLCQCHEGFALNPDKKTCTKIDYCASSNHGCQHECVNTDDSYSCHCLKGFTLNPDKKTCRRINYCALNKPGCEHECVNMEESYYCRCHRGYTLDPNGKTCSRVDHCAQQDHGCEQLCLNTEDSFVCQCSEGFLINEDLKTCSRVDYCLLSDHGCEYSCVNMDRSFACQCPEGHVLRSDGKTCAKLDSCALGDHGCEHSCVSSEDSFVCQCFEGYILREDGKTCRRKDVCQAIDHGCEHICVNSDDSYTCECLEGFRLAEDGKRCRRKDVCKSTHHGCEHICVNNGNSYICKCSEGFVLAEDGRRCKKCTEGPIDLVFVIDGSKSLGEENFEVVKQFVTGIIDSLTISPKAARVGLLQYSTQVHTEFTLRNFNSAKDMKKAVAHMKYMGKGSMTGLALKHMFERSFTQGEGARPLSTRVPRAAIVFTDGRAQDDVSEWASKAKANGITMYAVGVGKAIEEELQEIASEPTNKHLFYAEDFSTMDEISEKLKKGICEALEDSDGRQDSPAGELPKTVQQPTESEPVTINIQDLLSCSNFAVQHRYLFEEDNLLRSTQKLSHSTKPSGSPLEEKHDQCKCENLIMFQNLANEEVRKLTQRLEEMTQRMEALENRLRYR

SEQ ID NO: 8331 - protein, 915 aa, Homo Sapiens
MEKMLAGCFLLILGQIVLLPAEARERSRGRSISRGRHARTHPQTALLESSCENKRADLVFIIDSSRSVNTHDYAKVKEFIVDILQFLDIGPDVTRVGLLQYGSTVKNEFSLKTFKRKSEVERAVKRMRHLSTGTMTGLAIQYALNIAFSEAEGARPLRENVPRVIMIVTDGRPQDSVAEVAAKARDTGILIFAIGVGQVDFNTLKSIGSEPHEDHVFLVANFSQIETLTSVFQKKLCTAHMCSTLEHNCAHFCINIPGSYVCRCKQGYILNSDQTTCRIQDLCAMEDHNCEQLCVNVPGSFVCQCYSGYALAEDGKRCVAVDYCASENHGCEHECVNADGSYLCQCHEGFALNPDKKTCTRINYCALNKPGCEHECVNMEESYYCRCHRGYTLDPNGKTCSRVDHCAQQDHGCEQLCLNTEDSFVCQCSEGFLINEDLKTCSRVDYCLLSDHGCEYSCVNMDRSFACQCPEGHVLRSDGKTCAKLDSCALGDHGCEHSCVSSEDSFVCQCFEGYILREDGKTCRRKDVCQAIDHGCEHICVNSDDSYTCECLEGFRLAEDGKRCRRKDVCKSTHHGCEHICVNNGNSYICKCSEGFVLAEDGRRCKKCTEGPIDLVFVIDGSKSLGEENFEVVKQFVTGIIDSLTISPKAARVGLLQYSTQVHTEFTLRNFNSAKDMKKAVAHMKYMGKGSMTGLALKHMFERSFTQGEGARPLSTRVPRAAIVFTDGRAQDDVSEWASKAKANGITMYAVGVGKAIEEELQEIASEPTNKHLFYAEDFSTMDEISEKLKKGICEALEDSDGRQDSPAGELPKTVQQPTESEPVTINIQDLLSCSNFAVQHRYLFEEDNLLRSTQKLSHSTKPSGSPLEEKHDQCKCENLIMFQNLANEEVRKLTQRLEEMTQRMEALENRLRYR

SEQ ID NO: 8332 - protein, 956 aa, Homo Sapiens; identical to SEQ ID NO: 8330

SEQ ID NO: 8333 - protein, 937 aa, Homo Sapiens
MEKMLAGCFLLILGQIVLLPAEARERSRGRSISRGRHARTHPQTALLESSCENKRADLVFIIDSSRSVNTHDYAKVKEFIVDILQFLDIGPDVTRVGLLQYGSTVKNEFSLKTFKRKSEVERAVKRMRHLSTGTMTGLAIQYALNIAFSEAEGARPLRENVPRVIMIVTDGRPQDSVAEVAAKARDTGILIFAIGVGQVDFNTLKSIGSEPHEDHVFLVANFSQIETLTSVFQKKLCTAHMCSTLEHNCAHFCINIPGSYVCRCKQGYILNSDQTTCRIQDLCAMEDHNCEQLCVNVPGSFVCQCYSGYALAEDGKRCVAVDYCASENHGCEHECVNADGSYLCQCHEGFALNPDKKTCTKIDYCASSNHGCQHECVNTDDSYSCHCLKGFTLNPDKKTCRRINYCALNKPGCEHECVNMEESYYCRCHRGYTLDPNGKTCSRVDHCAQQDHGCEQLCLNTEDSFVCQCSEGFLINEDLKTCSRVDYCLLSDHGCEYSCVNMDRSFACQCPEGHVLRSDGKTCAKLDSCALGDHGCEHSCVSSEDSFVCQCFEGYILREDGKTCRRKDVCQAIDHGCEHICVNSDDSYTCECLEGFRLAEDGKRCRRKDVCKSTHHGCEHICVNNGNSYICKCSEGFVLAEDGRRCKKCTEGPIDLVFVIDGSKSLGEENFEVVKQFVTGIIDSLTISPKAARVGLLQYSTQVHTEFTLRNFNSAKDMKKAVAHMKYMGKGSMTGLALKHMFERSFTQGEGARPLSTRVPRAAIVFTDGRAQDDVSEWASKAKANGITMYAVGVGKAIEEELQEIASEPTNKHLFYAEDFSTMDEISEKLKKGICEALEDSDGRQDSPAGELPKTVQQPTVQHRYLFEEDNLLRSTQKLSHSTKPSGSPLEEKHDQCKCENLIMFQNLANEEVRKLTQRLEEMTQRMEALENRLRYR

SEQ ID NO: 8334 - protein, 195 aa, Homo Sapiens
QCYSGYALAEDGKRCVAVDYCASENHGCEHECVNADGSYLCQCHEGFALNPDKKTCTKIDYCASSNHGCQHECVNTDDSYSCHCLKGFTLNPDKKTCRSLPFFPSGINYCALNKPGCEHECVNMEESYYCRCHRGYTLDPNGKTCSRVDHCAQQDHGCEQLCLNTEDSFVCQCSEGFLINEDLKTCSRVDYCLLS

SEQ ID NO: 8335 - protein, 720 aa, Homo Sapiens
  misc_feature (1)..(1): Xaa can be any naturally occurring amino acid
XAEVAAKARDTGILIFAIGVGQVDFNTLKSIGSEPHEDHVFLVANFSQIETLTSVFQKKLCTAHMCSTLEHNCAHFCINIPGSYVCRCKQGYILNSDQTTCRTVDYCASENHGCEHECVNADGSYLCQCHEGFALNPDKKTCTKIDYCASSNHGCQHECVNTDDSYSCHCLKGFTLNPDKKTCRRINYCALNKPGCEHECVNMEESYYCRCHRGYTLDPNGKTCSRVDHCAQQDHGCEQLCLNTEDSFVCQCSEGFLINEDLKTCSRVDYCLLSDHGCEYSCVNMDRSFACQCPEGHVLRSDGKTCAKLDSCALGDHGCEHSCVSSEDSFVCQCFEGYILREDGKTCRRKDVCQAIDHGCEHICVNSDDSYTCECLEGFRLAEDGKRCRRKDVCKSTHHGCEHICVNNGNSYICKCSEGFVLAEDGRRCKKCTEGPIDLVFVIDGSKSLGEENFEVVKQFVTGIIDSLTISPKAARVGLLQYSTQVHTEFTLRNFNSAKDMKKAVAHMKYMGKGSMTGLALKHMFERSFTQGEGARPLSTRVPRAAIVFTDGRAQDDVSEWASKAKANGITMYAVGVGKAIEEELQEIASEPTNKHLFYAEDFSTMDEISEKLKKGICEALEDSDGRQDSPAGELPKTVQQPTVQHRYLFEEDNLLRSTQKLSHSTKPSGSPLEEKHDQCKCENLIMFQNLANEEVRKLTQRLEEMTQRMEALENRLRYR

SEQ ID NO: 8336 - protein, 183 aa, Homo Sapiens
  misc_feature (1)..(1): Xaa can be any naturally occurring amino acid
XDSCALGDHGCEHSCVSSEDSFVCQCFEGYILREDGKTCRRKDVCQAIDHGCEHICVNSDDSYTCECLEGFRLAEDGKRCRKCTEGPIDLVFVIDGSKSLGEENFEVVKQFVTGIIDSLTISPKAARVGLLQYSTQVHTEFTLRNFNSAKDMKKAVAHMKYMGKGSMTGLALKHMFERSFTQG

SEQ ID NO: 8337 - protein, 131 aa, Homo Sapiens
  misc_feature (1)..(1): Xaa can be any naturally occurring amino acid
XEDSDGRQDSPAGELPKTVQQPTESEPVTINIQDLLSCSNFAVQHRYLFEEDNLLRSTQKLSHSTKPSGSPLEEKHDQCKCENLIMFQNLANEEVRKLTQRYILFLHYASVWNAKNIIKTSHTLCRFYQLK

SEQ ID NO: 8338 - protein, 176 aa, Homo Sapiens
  misc_feature (1)..(1): Xaa can be any naturally occurring amino acid
XFTQGEGARPLSTRVPRAAIVFTDGRAQDDVSEWASKAKANGITMYAVGVGKAIEEELQEIASEPTNKHLFYAEDFSTMDEISEKLKKGICEALEDSDGRQDSPAGELPKTVQQPTVQHRYLFEEDNLLRSTQKLSHSTKPSGSPLEEKHDQCKCENLIMFQNLANEEQRSSLSAL

SEQ ID NO: 8339 - protein, 181 aa, Homo Sapiens
  misc_feature (1)..(1): Xaa can be any naturally occurring amino acid
XSIGSEPHEDHVFLVANFSQIETLTSVFQKKLCIQDLCAMEDHNCEQLCVNVPGSFVCQCYSGYALAEDGKRCVAVDYCASENHGCEHECVNADGSYLCQCHEGFALNPDKKTCTKIDYCASSNHGCQHECVNTDDSYSCHCLKGFTLNPDKKTCRRINYCALNKPGCEHECVNMEESYYC

SEQ ID NO: 8340 - protein, 155 aa, Homo Sapiens
  misc_feature (1)..(1): Xaa can be any naturally occurring amino acid
XVDYCLLSDHGCEYSCVNMDRSFACQCPEGHVLRSDGKTCAKLDSCALGDHGCEHSCVSSEDSFVCQCFEGYILREDGKTCRRKDVCQAIDHGCEHICVNSDDSYTCECLEGFRLAEDGKRCRSKMSANQPTMAANTFVLIMGIPTSANAQRDLF

SEQ ID NO: 8341 - protein, 444 aa, Homo Sapiens
MPRPAPARRLPGLLLLLWPLLLLPSAAPDPVARPGFRRLETRGPGGSPGRRPSPAAPDGAPASGTSEPGRARGAGVCKSRPLDLVFIIDSSRSVRPLEFTKVKTFVSRIIDTLDIGPADTRVAVVNYASTVKIEFQLQAYTDKQSLKQAVGRITPLSTGTMSGLAIQTAMDEAFTVEAGAREPSSNIPKVAIIVTDGRPQDQVNEVAARAQASGIELYAVGVDRADMASLKMMASEPLEEHVFYVETYGVIEKLSSRFQETFCALDRCALNTHGCEHICVNDRSGSYHCECYEGYTLNEDRKTCSAQDKCALGTHGCQHICVNDRTGSHHCECYEGYTLNADKKTCSVRDKCALGSHGCQHICVSDGAASYHCDCYPGYTLNEDKKTCSATEEARRLVSTEDACGCEATLAFQDKVSSYLQRLNTKLDDILEKLKINEYGQIHR

SEQ ID NO: 8342 - protein, 486 aa, Homo Sapiens
MPRPAPARRLPGLLLLLWPLLLLPSAAPDPVARPGFRRLETRGPGGSPGRRPSPAAPDGAPASGTSEPGRARGAGVCKSRPLDLVFIIDSSRSVRPLEFTKVKTFVSRIIDTLDIGPADTRVAVVNYASTVKIEFQLQAYTDKQSLKQAVGRITPLSTGTMSGLAIQTAMDEAFTVEAGAREPSSNIPKVAIIVTDGRPQDQVNEVAARAQASGIELYAVGVDRADMASLKMMASEPLEEHVFYVETYGVIEKLSSRFQETFCALDPCVLGTHQCQHVCISDGEGKHHCECSQGYTLNADKKTCSALDRCALNTHGCEHICVNDRSGSYHCECYEGYTLNEDRKTCSAQDKCALGTHGCQHICVNDRTGSHHCECYEGYTLNADKKTCSVRDKCALGSHGCQHICVSDGAASYHCDCYPGYTLNEDKKTCSATEEARRLVSTEDACGCEATLAFQDKVSSYLQRLNTKLDDILEKLKINEYGQIHR

SEQ ID NO: 8343 - protein, 581 aa, Homo Sapiens
MRGLLCWPVLLLLLQPWETQLQLTGPRCHTGPLDLVFVIDSSRSVRPFEFETMRQFLMGLLRGLNVGPNATRVGVIQYSSQVQSVFPLRAFSRREDMERAIRDLVPLAQGTMTGLAIQYAMNVAFSVAEGARPPEERVPRVAVIVTDGRPQDRVAEVAAQARARGIEIYAVGVQRADVGSLRAMASPPLDEHVFLVESFDLIQEFGLQFQSRLCAIDLCAEGTHGCEHHCVNSPGSYFCHCQVGFVLQQDQRSCRAIDYCSFGNHSCQHECVSTPGGPRCHCREGHDLQPDGRSCQVRDLCNGVDHGCEFQCVSEGLSYRCLCPEGRQLQADGKSCNRCREGHVDLVLLVDGSKSVRPQNFELVKRFVNQIVDFLDVSPEGTRVGLVQFSSRVRTEFPLGRYGTAAEVKQAVLAVEYMERGTMTGLALRHMVEHSFSEAQGARPRALNVPRVGLVFTDGRSQDDISVWAARAKEEGIVMYAVGVGKAVEAELREIASEPAELHVSYAPDFGTMTHLLENLRGSICPEEGISAGTELRSPCECESLVEFQGRTLGALESLTLNLAQLTARLEDLENQLANQK

SEQ ID NO: 8344 - protein, 581 aa, Homo Sapiens; identical to SEQ ID NO: 8343

SEQ ID NO: 8345 - protein, 540 aa, Homo Sapiens
MRGLLCWPVLLLLLQPWETQLQLTGPRCHTGPLDLVFVIDSSRSVRPFEFETMRQFLMGLLRGLNVGPNATRVGVIQYSSQVQSVFPLRAFSRREDMERAIRDLVPLAQGTMTGLAIQYAMNVAFSVAEGARPPEERVPRVAVIVTDGRPQDRVAEVAAQARARGIEIYAVGVQRADVGSLRAMASPPLDEHVFLVESFDLIQEFGLQFQSRLCAIDYCSFGNHSCQHECVSTPGGPRCHCREGHDLQPDGRSCQVRDLCNGVDHGCEFQCVSEGLSYRCLCPEGRQLQADGKSCNRCREGHVDLVLLVDGSKSVRPQNFELVKRFVNQIVDFLDVSPEGTRVGLVQFSSRVRTEFPLGRYGTAAEVKQAVLAVEYMERGTMTGLALRHMVEHSFSEAQGARPRALNVPRVGLVFTDGRSQDDISVWAARAKEEGIVMYAVGVGKAVEAELREIASEPAELHVSYAPDFGTMTHLLENLRGSICPEEGISAGTELRSPCECESLVEFQGRTLGALESLTLNLAQLTARLEDLENQLANQK

SEQ ID NO: 8346 - protein, 622 aa, Homo Sapiens
MRGLLCWPVLLLLLQPWETQLQLTGPRCHTGPLDLVFVIDSSRSVRPFEFETMRQFLMGLLRGLNVGPNATRVGVIQYSSQVQSVFPLRAFSRREDMERAIRDLVPLAQGTMTGLAIQYAMNVAFSVAEGARPPEERVPRVAVIVTDGRPQDRVAEVAAQARARGIEIYAVGVQRADVGSLRAMASPPLDEHVFLVESFDLIQEFGLQFQSRLCGKDQCAEGGHGCQHQCVNAWAMFHCTCNPGYKLAADNKSCLAIDLCAEGTHGCEHHCVNSPGSYFCHCQVGFVLQQDQRSCRAIDYCSFGNHSCQHECVSTPGGPRCHCREGHDLQPDGRSCQVRDLCNGVDHGCEFQCVSEGLSYRCLCPEGRQLQADGKSCNRCREGHVDLVLLVDGSKSVRPQNFELVKRFVNQIVDFLDVSPEGTRVGLVQFSSRVRTEFPLGRYGTAAEVKQAVLAVEYMERGTMTGLALRHMVEHSFSEAQGARPRALNVPRVGLVFTDGRSQDDISVWAARAKEEGIVMYAVGVGKAVEAELREIASEPAELHVSYAPDFGTMTHLLENLRGSICPEEGISAGTELRSPCECESLVEFQGRTLGALESLTLNLAQLTARLEDLENQLANQK

SEQ ID NO: 8347 - protein, 499 aa, Homo Sapiens
MRGLLCWPVLLLLLQPWETQLQLTGPRCHTGPLDLVFVIDSSRSVRPFEFETMRQFLMGLLRGLNVGPNATRVGVIQYSSQVQSVFPLRAFSRREDMERAIRDLVPLAQGTMTGLAIQYAMNVAFSVAEGARPPEERVPRVAVIVTDGRPQDRVAEVAAQARARGIEIYAVGVQRADVGSLRAMASPPLDEHVFLVESFDLIQEFGLQFQSRLCVRDLCNGVDHGCEFQCVSEGLSYRCLCPEGRQLQADGKSCNRCREGHVDLVLLVDGSKSVRPQNFELVKRFVNQIVDFLDVSPEGTRVGLVQFSSRVRTEFPLGRYGTAAEVKQAVLAVEYMERGTMTGLALRHMVEHSFSEAQGARPRALNVPRVGLVFTDGRSQDDISVWAARAKEEGIVMYAVGVGKAVEAELREIASEPAELHVSYAPDFGTMTHLLENLRGSICPEEGISAGTELRSPCECESLVEFQGRTLGALESLTLNLAQLTARLEDLENQLANQK

SEQ ID NO: 8348 - protein, 121 aa, Homo Sapiens
MDFQRGKNLRYQLLQLVEPFGVISNHLILNKINEAFIEMATTEDAQAAVDYYTTTPALVFGKPVRVHLSQKYKRIKKPEGKPDQKFDQKQELGRVIHLSNLPHSGYSDSAVLKLAEPYGKI

SEQ ID NO: 8349 - protein, 6 aa, Homo Sapiens
MGDPFM

SEQ ID NO: 8350 - protein, 25 aa, Homo Sapiens
MGDPFMLQQSTNPAPGILGPPPPSF

SEQ ID NO: 8351 - protein, 81 aa, Homo Sapiens
MGDPFMLQQSTNPAPGILGPPPPSFHLGGPAVGPRGNLGAGNGNLQGPRHMQKGRVETSRVVHIMDFQRGKNLRYQLLQLV

SEQ ID NO: 8352 - protein, 86 aa, Homo Sapiens
MGDPFMLQQSTNPAPGILGPPPPSFHLGGPAVGPRGNLGAGNGNLQGPRHMQKGRVETSRVVHIMDFQRGKNLRYQLLQLVEPFGV

SEQ ID NO: 8353 - protein, 109 aa, Homo Sapiens
MGDPFMLQQSTNPAPGILGPPPPSFHLGGPAVGPRGNLGAGNGNLQGPRHMQKGRVETSRVVHIMDFQRGKNLRYQLLQLVEPFGVISNHLILNKINEAFIEMATTEDA

SEQ ID NO: 8354 - protein, 125 aa, Homo Sapiens
MGDPFMLQQSTNPAPGILGPPPPSFHLGGPAVGPRGNLGAGNGNLQGPRHMQKGRVETSRVVHIMDFQRGKNLRYQLLQLVEPFGVISNHLILNKINEAFIEMATTEDAQAAVDYYTTTPALVFG

SEQ ID NO: 8355 - protein, 509 aa, Homo Sapiens
MGDPFMLQQSTNPAPGILGPPPPSFHLGGPAVGPRGNLGAGNGNLQGPRHMQKGRVETSRVVHIMDFQRGKNLRYQLLQLVEPFGVISNHLILNKINEAFIEMATTEDAQAAVDYYTTTPALVFGKPVRVHLSQKYKRIKKPEGKPDQKFDQKQELGRVIHLSNLPHSGYSDSAVLKLAEPYGKIKNYILMRMKSQAFIEMETREDAMAMVDHCLKKALWFQGRCVKVDLSEKYKKLVLRIPNRGIDLLKKDKSRKRSYSPDGKESPSDKKSKTDGSQKTESSTEGKEQEEKSGEDGEKDTKDDQTEQEPNMLLESEDELLVDEEEAAALLESGSSVGDETDLANLGDVASDGKKEPSDKAVKKDGSASAAAKKKLKKVDKIEELDQENEAALENGIKNEENTEPGAESSENADDPNKDTSENADGQSDENKDDYTIPDEYRIGPYQPNVPVGIDYVIPKTGFYCKLCSLFYTNEEVAKNTHCSSLPHYQKLKKFLNKLAEERRQKKET

SEQ ID NO: 8356 - protein, 509 aa, Homo Sapiens; identical to SEQ ID NO: 8355

SEQ ID NO: 8357 - protein, 559 aa, Homo Sapiens
MLGAQWRRNQPSRAAEEWSQHINGASHSRRCQLLLEIYPEWNPDNDTGHTMGDPFMLQQSTNPAPGILGPPPPSFHLGGPAVGPRGNLGAGNGNLQGPRHMQKGRVETSRVVHIMDFQRGKNLRYQLLQLVEPFGVISNHLILNKINEAFIEMATTEDAQAAVDYYTTTPALVFGKPVRVHLSQKYKRIKKPEGKPDQKFDQKQELGRVIHLSNLPHSGYSDSAVLKLAEPYGKIKNYILMRMKSQAFIEMETREDAMAMVDHCLKKALWFQGRCVKVDLSEKYKKLVLRIPNRGIDLLKKDKSRKRSYSPDGKESPSDKKSKTDGSQKTESSTEGKEQEEKSGEDGEKDTKDDQTEQEPNMLLESEDELLVDEEEAAALLESGSSVGDETDLANLGDVASDGKKEPSDKAVKKDGSASAAAKKKLKKVDKIEELDQENEAALENGIKNEENTEPGAESSENADDPNKDTSENADGQSDENKDDYTIPDEYRIGPYQPNVPVGIDYVIPKTGFYCKLCSLFYTNEEVAKNTHCSSLPHYQKLKKFLNKLAEERRQKKET

SEQ ID NO: 8358 - protein, 172 aa, Homo Sapiens
MLGAQWRRNQPSRAAEVSGPGGKHAAGQGPRVRREILGEEEWSQHINGASHSRRCQLLLEIYPEWNPDNDTGHTMGDPFMLQQSTNPAPGILGPPPPSFHLGGPAVGPRGNLGAGNGNLQGPRHMQKGRVETSRVVHIMDFQRGKNLRYQLLQLVEPFGVISNHLILNKINE

SEQ ID NO: 8359 - protein, 283 aa, Homo Sapiens
MSKSFQQSSLSRDSQGHGRDLSAAGIGLLAAATQSLSMLLESEDELLVDEEEAAALLESGSSVGDETDLANLGDVASDGKKEPSDKAVKKDGSASAAAKKKLKKRRFPGSMEGFVTLDEVGDEEDSELQKLRKSGMAFKSGDKNDDGLVEIKVDKIEELDQENEAALENGIKNEENTEPGAESSENADDPNKDTSENADGQSDENKDDYTIPDEYRIGPYQPNVPVGIDYVIPKTGFYCKLCSLFYTNEEVAKNTHCSSLPHYQKLKKFLNKLAEERRQKKET

SEQ ID NO: 8360 - protein, 47 aa, Homo Sapiens
MSKSFQQSSLSRDSQGHGRDLSAAGIGLLAAATQSLSMPASLGRMNQ

SEQ ID NO: 8361 - protein, 78 aa, Homo Sapiens
MSKSFQQSSLSRDSQGHGRDLSAAGIGLLAAATQSLSMPASLGRMNQGTARLASLMNLGMSSSLNQQGAHSALSSAST

SEQ ID NO: 8362 - protein, 78 aa, Homo Sapiens; identical to SEQ ID NO: 8361

SEQ ID NO: 8363 - protein, 87 aa, Homo Sapiens
MSKSFQQSSLSRDSQGHGRDLSAAGIGLLAAATQSLSMPASLGRMNQGTARLASLMNLGMSSSLNQQGAHSALSSASTSSHNLQSIF

SEQ ID NO: 8364 - protein, 99 aa, Homo Sapiens
MSKSFQQSSLSRDSQGHGRDLSAAGIGLLAAATQSLSMPASLGRMNQGTARLASLMNLGMSSSLNQQGAHSALSSASTSSHNLQSIFNIGSRGPLPLSS

SEQ ID NO: 8365 - protein, 100 aa, Homo Sapiens
MSKSFQQSSLSRDSQGHGRDLSAAGIGLLAAATQSLSMPASLGRMNQGTARLASLMNLGMSSSLNQQGAHSALSSASTSSHNLQSIFNIGSRGPLPLSSQ

SEQ ID NO: 8366 - protein, 107 aa, Homo Sapiens
MSKSFQQSSLSRDSQGHGRDLSAAGIGLLAAATQSLSMPASLGRMNQGTARLASLMNLGMSSSLNQQGAHSALSSASTSSHNLQSIFNIGSRGPLPLSSQHRGDADQ

SEQ ID NO: 8367 - protein, 847 aa, Homo Sapiens
MSKSFQQSSLSRDSQGHGRDLSAAGIGLLAAATQSLSMPASLGRMNQGTARLASLMNLGMSSSLNQQGAHSALSSASTSSHNLQSIFNIGSRGPLPLSSQHRGDADQASNILASFGLSARDLDELSRYPEDKITPENLPQILLQLKRRRTEEGPTLSYGRDGRSATREPPYRVPRDDWEEKRHFRRDSFDDRGPSLNPVLDYDHGSRSQESGYYDRMDYEDDRLRDGERCRDDSFFGETSHNYHKFDSEYERMGRGPGPLQERSLFEKKRGAPPSSNIEDFHGLLPKGYPHLCSICDLPVHSNKEWSQHINGASHSRRCQLLLEIYPEWNPDNDTGHTMGDPFMLQQSTNPAPGILGPPPPSFHLGGPAVGPRGNLGAGNGNLQGPRHMQKGRVETSRVVHIMDFQRGKNLRYQLLQLVEPFGVISNHLILNKINEAFIEMATTEDAQAAVDYYTTTPALVFGKPVRVHLSQKYKRIKKPEGKPDQKFDQKQELGRVIHLSNLPHSGYSDSAVLKLAEPYGKIKNYILMRMKSQAFIEMETREDAMAMVDHCLKKALWFQGRCVKVDLSEKYKKLVLRIPNRGIDLLKKDKSRKRSYSPDGKESPSDKKSKTDGSQKTESSTEGKEQEEKSGEDGEKDTKDDQTEQEPNMLLESEDELLVDEEEAAALLESGSSVGDETDLANLGDVASDGKKEPSDKAVKKDGSASAAAKKKLKKVDKIEELDQENEAALENGIKNEENTEPGAESSENADDPNKDTSENADGQSDENKDDYTIPDEYRIGPYQPNVPVGIDYVIPKTGFYCKLCSLFYTNEEVAKNTHCSSLPHYQKLKKFLNKLAEERRQKKET

SEQ ID NO: 8368 - protein, 895 aa, Homo Sapiens
MSKSFQQSSLSRDSQGHGRDLSAAGIGLLAAATQSLSMPASLGRMNQGTARLASLMNLGMSSSLNQQGAHSALSSASTSSHNLQSIFNIGSRGPLPLSSQHRGDADQASNILASFGLSARDLDELSRYPEDKITPENLPQILLQLKRRRTEEGPTLSYGRDGRSATREPPYRVPRDDWEEKRHFRRDSFDDRGPSLNPVLDYDHGSRSQESGYYDRMDYEDDRLRDGERCRDDSFFGETSHNYHKFDSEYERMGRGPGPLQERSLFEKKRGAPPSSNIEDFHGLLPKGYPHLCSICDLPVHSNKEWSQHINGASHSRRCQLLLEIYPEWNPDNDTGHTMGDPFMLQQSTNPAPGILGPPPPSFHLGGPAVGPRGNLGAGNGNLQGPRHMQKGRVETSRVVHIMDFQRGKNLRYQLLQLVEPFGVISNHLILNKINEAFIEMATTEDAQAAVDYYTTTPALVFGKPVRVHLSQKYKRIKKPEGKPDQKFDQKQELGRVIHLSNLPHSGYSDSAVLKLAEPYGKIKNYILMRMKSQAFIEMETREDAMAMVDHCLKKALWFQGRCVKVDLSEKYKKLVLRIPNRGIDLLKKDKSRKRSYSPDGKESPSDKKSKTDGSQKTESSTEGKEQEEKSGEDGEKDTKDDQTEQEPNMLLESEDELLVDEEEAAALLESGSSVGDETDLANLGDVASDGKKEPSDKAVKKDGSASAAAKKKLKKRRFPGSMEGFVTLDEVGDEEDSELQKLRKSGMAFKSGDKNDDGLVEIKVDKIEELDQENEAALENGIKNEENTEPGAESSENADDPNKDTSENADGQSDENKDDYTIPDEYRIGPYQPNVPVGIDYVIPKTGFYCKLCSLFYTNEEVAKNTHCSSLPHYQKLKKFLNKLAEERRQKKET

SEQ ID NO: 8369 - protein, 847 aa, Homo Sapiens; identical to SEQ ID NO: 8367

SEQ ID NO: 8370 - protein, 895 aa, Homo Sapiens; identical to SEQ ID NO: 8368

SEQ ID NO: 8371 - protein, 847 aa, Homo Sapiens; identical to SEQ ID NO: 8367

SEQ ID NO: 8372 - protein, 794 aa, Homo Sapiens
MSKSFQQSSLSRDSQGHGRDLSAAGIGLLAAATQSLSMPASLGRMNQGTARLASLMNLGMSSSLNQQGAHSALSSASTSSHNLQSIFNIGSRGPLPLSSQHRGDADQASNILASFGLSARDLDELSRYPEDKITPENLPQILLQLKRRRTEEGPTLSYGRDGRSATREPPYRVPRDDWEEKRHFRRDSFDDRGPSLNPVLDYDHGSRSQESGYYDRMDYEDDRLRDGERCRDDSFFGETSHNYHKFDSEYERMGRGPGPLQERSLFEKKRGAPPSSNIEDFHGLLPKGYPHLCSICDLPVHSNKEWSQHINGASHSRRCQLLLEIYPEWNPDNDTGHTMGDPFMLQQSTNPAPGILGPPPPSFHLGGPAVGPRGNLGAGNGNLQGPRHMQKGRVETSRVVHIMDFQRGKNLRYQLLQLVEPFGVISNHLILNKINEAFIEMATTEDAQAAVDYYTTTPALVFGKPVRVHLSQKYKRIKKPEGKPDQKFDQKQELGRVIHLSNLPHSGYSDSAVLKLAEPYGKIKNYILMRMKSQAFIEMETREDAMAMVDHCLKKALWFQGRCVKVDLSEKYKKLVLRIPNRGIDLLKKDKSRKRSYSPDGKESPSDKKSKTDGSQKTESSTEGKEQEEKSGEDGEKDTKDDQTEQEPNMLLESEDELLVDEEEAAALLESGSSVGDETDLANLGDVASDGKKEPSDKAVKKDGSASAAAKKKLKKVDKIEELDQENEAALENGIKNEENTEPGAESSENADDPNKDTSENADGQSDENKDDYTIPDEYRIGPYQPNVPVEISE

SEQ ID NO: 8373 - protein, 433 aa, Homo Sapiens
MSKSFQQSSLSRDSQGHGRDLSAAGIGLLAAATQSLSMPASLGRMNQGTARLASLMNLGMSSSLNQQGAHSALSSASTSSHNLQSIFNIGSRGPLPLSSQHRGDADQASNILASFGLSARDLDELSRYPEDKITPENLPQILLQLKRRRTEEGPTLSYGRDGRSATREPPYRVPRDDWEEKRHFRRDSFDDRGPSLNPVLDYDHGSRSQESGYYDRMDYEDDRLRDGERCRDDSFFGETSHNYHKFDSEYERMGRGPGPLQERSLFEKKRGAPPSSNIEDFHGLLPKGYPHLCSICDLPVHSNKEWSQHINGASHSRRCQLLLEIYPEWNPDNDTGHTMGDPFMLQQSTNPAPGILGPPPPSFHLGGPAVGPRGNLGAGNGNLQGPRHMQKGRVETSRVVHIMDFQRGKNLRYQLLQLVEPFGVISNHLILNK

SEQ ID NO: 8374 - protein, 847 aa, Homo Sapiens; identical to SEQ ID NO: 8367

SEQ ID NO: 8375 - protein, 334 aa, Homo Sapiens
  misc_feature (1)..(1): Xaa can be any naturally occurring amino acid
XERCRDDSFFGETSHNYHKFDSEYERMGRGPGPLQERSLFEKKRGAPPSSNIEDFHGLLPKGYPHLCSICDLPVHSNKEWSQHINGASHSRRCQLLLEMGDPFMLQQSTNPAPGILGPPPPSFHLGGPAVGPRGNLGAGNGNLQGPRHMQKGRVETSRVVHIMDFQRGKNLRYQLLQLVEPFGVISNHLILNKINEAFIEMATTEDAQAAVDYYTTTPALVFGKPVRVHLSQKYKRIKKPEGKPDQKFDQKQELGRVIHLSNLPHSGYSDSAVLKLAEPYGKIKNYILMRMKSQAFIEMETREDAMAMVDHCLKKALWFQGRCVKVDLSEKYKK

SEQ ID NO: 8376 - protein, 235 aa, Homo Sapiens
AIQISQQTPYWHCRLLFQLAQLHTLEKDLVSACDLLGVGAEYARVVGSEYTRALFLLSKGMLLLMERKLQEVHPLLTLCGQIVENWQGNPIQKESLRVFFLVLQVTHYLDAGQVKSVKPCLKQLQQCIQTISTLHDDEILPSNPADLFHWLPKEHMCVLVYLVTVMHSMQAGYLEKAQKYTDKALMQLEKLKSKSVLDCSPILSSFQVILLEHIIMCRLVTGHKATALQEISQVC

SEQ ID NO: 8377 - protein, 183 aa, Homo Sapiens
KIRLCVHCLQAVFPFKPPQRIEARTHLQLGSVLYHHTKNSEQARSHLEKANSVDAAKPLLRKAIQISQQTPYWHCRLLFQLAQLHTLEKDLVSACDLLGVGAEYARVVGSEYTRALFLLSKGMLLLMERKLQEVHPLLTLCGQIVENWQGNPIQKESLRVFFLVLQVTHYLDAGQVKSVKPCL

SEQ ID NO: 8378 - protein, 613 aa, Homo Sapiens
MAAQAAAAAQAAAAQAAQAEAADSWYLALLGFAEHFRTSSPPKIRLCVHCLQAVFPFKPPQRIEARTHLQLGSVLYHHTKNSEQARSHLEKAWLISQQIPQFEDVKFEAASLLSELYCQENSVDAAKPLLRKAIQISQQTPYWHCRLLFQLAQLHTLEKDLVSACDLLGVGAEYARVVGSEYTRALFLLSKGMLLLMERKLQEVHPLLTLCGQIVENWQGNPIQKESLRVFFLVLQVTHYLDAGQVKSVKPCLKQLQQCIQTISTLHDDEILPSNPADLFHWLPKEHMCVLVYLVTVMHSMQAGYLEKAQKYTDKALMQLEKLKMLDCSPILSSFQVILLEHIIMCRLVTGHKATALQEISQVCQLCQQSPRLFSNHAAQLHTLLGLYCVSVNCMDNAEAQFTTALRLTNHQELWAFIVTNLASVYIREGNRHQEVLYSLLERINPDHSFPVSSHCLRAAAFYVRGLFSFFQGRYNEAKRFLRETLKMSNAEDLNRLTACSLVLLGHIFYVLGNHRESNNMVVPAMQLASKIPDMSVQLWSSALLRDLNKACGNAMDAHEAAQMHQNFSQQLLQDHIEACSLPEHNLITWTDGPPPVQFQAQNGPNTSLASLL

SEQ ID NO: 8379 - protein, 202 aa, Homo Sapiens
AGAGGGAAAVAAGGVVTTTASGKRIRKNHACEMCGKAFRDVYHLNRHKLSHSDEKPYQCPVCQQRFKRKDRMSYHVRSHDGAVHKPYNCSHCGKSFSRPDHLNSHVRQVHSTERPFKCEKCEAAFATKDRLRAHTVRHEEKVPCHVCGKMLSSAYISDHMKVHSQGPHHVCELCNKGTCRGLPGGPGAEGGRLARRLATDTG

SEQ ID NO: 8380 - protein, 454 aa, Homo Sapiens
MDPSNWSSFIFQGHAQNPLQVGAELQSRFFASQGCAQSPFQAAPAPPPTPQAPAAEPLQVDLLPVLAAAQESAAAAAAAAAAAAAVAAAPPAPAAASTVDTAALKQPPAPPPPPPPVSAPAAEAAPPASAATIAAAAATAVVAPTSTVAVAPVASALEKKTKSKGPYICALCAKEFKNGYNLRRHEAIHTGAKAGRVPSGAMKMPTMVPLSLLSVPQLSGAGGGGGEAGAGGGAAAVAAGGVVTTTASGKRIRKNHACEMCGKAFRDVYHLNRHKLSHSDEKPYQCPVCQQRFKRKDRMSYHVRSHDGAVHKPYNCSHCGKSFSRPDHLNSHVRQVHSTERPFKCEKCEAAFATKDRLRAHTVRHEEKVPCHVCGKMLSSAYISDHMKVHSQGPHHVCELCNKGTGEVCPMAAAAAAAAAAAAAAVAAPPTAVGSLSGAEGVPVSSQPLPSQPW

SEQ ID NO: 8381 - protein, 184 aa, Homo Sapiens
MFPVFPCTLLAPPFPVLGLDSRGVGGLMNSFPPPQGHAQNPLQVGAELQSRFFASQGCAQSPFQAAPAPPPTPQAPAAEPLQVDLLPVLAAAQDGGSGSSGSSSSPSHSCGLPLGGGGGACELSATSLPTLVSSKLVAGERGEWSRVPWYKLLSPLFSHQLLFPYQPRSLQKERRKKCFLRGIR

SEQ ID NO: 8382 - protein, 186 aa, Homo Sapiens
MFPVFPCTLLAPPFPVLGLDSRGVGGLMNSFPPPQGHAQNPLQVGAELQSRFFASQGCAQSPFQAAPAPPPTPQAPAAEPLQVDLLPVLAAAQDGSGGSGSSGSSSSPSHSCGLPLGGGGGACELSATSLPTLVSSKLVAGERGEWSRVPWYKLLSPLFSHQLLFPYQPRSLQKERRKKCFLRGIR

SEQ ID NO: 8383 - protein, 493 aa, Homo Sapiens
MFPVFPCTLLAPPFPVLGLDSRGVGGLMNSFPPPQGHAQNPLQVGAELQSRFFASQGCAQSPFQAAPAPPPTPQAPAAEPLQVDLLPVLAAAQESAAAAAAAAAAAAAVAAAPPAPAAASTVDTAALKQPPAPPPPPPPVSAPAAEAAPPASAATIAAAAATAVVAPTSTVAVAPVASALEKKTKSKGPYICALCAKEFKNGYNLRRHEAIHTGAKAGRVPSGAMKMPTMVPLSLLSVPQLSGAGGGGGEAGAGGGAAAVAAGGVVTTTASGKRIRKNHACEMCGKAFRDVYHLNRHKLSHSDEKPYQCPVCQQRFKRKDRMSYHVRSHDGAVHKPYNCSHCGKSFSRPDHLNSHVRQVHSTERPFKCEKCEAAFATKDRLRAHTVRHEEKVPCHVCGKMLSSAYISDHMKVHSQGPHHVCELCNKGFTTAAYLRIHAVKDHGLQAPRADRILCKLCSVHCKTPAQLAGHMQTHLGGAAPPVPGDAPQPQPTC

SEQ ID NO: 8384 - protein, 477 aa, Homo Sapiens
MFPVFPCTLLAPPFPVLGLDSRGVGGLMNSFPPPQGHAQNPLQVGAELQSRFFASQGCAQSPFQAAPAPPPTPQAPAAEPLQVDLLPVLAAAQESAAAAAAAAAAAAAVAAAPPAPAAASTVDTAALKQPPAPPPPPPPVSAPAAEAAPPASAATIAAAAATAVVAPTSTVAVAPVASALEKKTKSKGPYICALCAKEFKNGYNLRRHEAIHTGAKAGRVPSGAMKMPTMVPLSLLSVPQLSGAGGGGGEAGAGGGAAAVAAGGVVTTTASGKRIRKNHACEMCGKAFRDVYHLNRHKLSHSDEKPYQCPVCQQRFKRKDRMSYHVRSHDGAVHKPYNCSHCGKSFSRPDHLNSHVRQVHSTERPFKCEKCEAAFATKDRLRAHTVRHEEKVPCHVCGKMLSSAYISDHMKVHSQGPHHVCELCNKGTGEVCPMAAAAAAAAAAAAAAVAAPPTAVGSLSGAEGVPVSSQPLPSQPW

SEQ ID NO: 8385 - protein, 84 aa, Homo Sapiens
MFPVFPCTLLAPPFPVLGLDSRGVGGLMNSFPPPQGHAQNPLQVGAELQSRFFASQGCAQSPFQAGSPQQSRQTSALNRTALQM

SEQ ID NO: 8386 - protein, 172 aa, Homo Sapiens
MFPVFPCTLLAPPFPVLGLDSRGVGGLMNSFPPPQGHAQNPLQVGAELQSRFFASQGCAQSPFQKCEAAFATKDRLRAHTVRHEEKVPCHVCGKMLSSAYISDHMKVHSQGPHHVCELCNKGTGEVCPMAAAAAAAAAAAAAAVAAPPTAVGSLSGAEGVPVSSQPLPSQPW

SEQ ID NO: 8387 - protein, 252 aa, Homo Sapiens [sequence omitted]

SEQ ID NO: 8388 - protein, 79 aa, Homo Sapiens
MLSSAYISDHMKVHSQGPHHVCELCNKGFTTAAYLRIHAVKDHGLQAPRADRILCKLCSVHCKTPAQLAGHMQTHLGGA

SEQ ID NO: 8389 - protein, 94 aa, Homo Sapiens
MLSSAYISDHMKVHSQGPHHVCELCNKGFTTAAYLRIHAVKDHGLQAPRADRILCKLCSVHCKTPAQLAGHMQTHLGGAAPPVPGDAPQPQPTC

SEQ ID NO: 8390 - protein, 53 aa, Homo Sapiens
MLSSAYISDHMKVHSQGPHHVCELCNKGTCRGLPGGPGAEGGRLARRLATDTG

SEQ ID NO: 8391 - protein, 78 aa, Homo Sapiens
MLSSAYISDHMKVHSQGPHHVCELCNKGTGEVCPMAAAAAAAAAAAAAAVAAPPTAVGSLSGAEGVPVSSQPLPSQPW

SEQ ID NO: 8392 - protein, 152 aa, Homo Sapiens
SFSRCARGLGRPLGRGEGGTRRRPDHLNSHVRQVHSTERPFKCEKCEAAFATKDRLRAHTVRHEEKVPCHVCGKMLSSAYISDHMKVHSQGPHHVCELCNKGTGEVCPMAAAAAAAAAAAAAAVAAPPTAVGSLSGAEGVPVSSQPLPSQPW

SEQ ID NO: 8393 - protein, 196 aa, Homo Sapiens
  misc_feature (1)..(1): Xaa can be any naturally occurring amino acid
XGAVHKPYNCSHCGKSFSRPDHLNSHVRQVHSTERPFKCEKCEAAFATKDRLRAHTVRHEEKVPCHVCGKMLSSAYISDHMKVHSQGPHHVCELCNKGTGEVCPMAAAAAAAAAAAAAAVAAPPTAVGSLSGAEGVPVSSQPLPSQPCSSPGLVFSSLFPTTEEVVALAMSSCSCVPCMYPTLHPFLLRGPHYNKF

SEQ ID NO: 8394 - protein, 177 aa, Homo Sapiens [sequence omitted]

SEQ ID NO: 8395 - protein, 504 aa, Homo Sapiens
GMGAGPACPLPPLAGGEAFPFPSPEQGLALSGAGFPGMLGALPLPLSLGQPPPSPLLNHSLFGVLTGGGGQPPPEPLLPPPGGPGPPLAPGEPEGPSLLVASLLPPPPSDLLPPPSAPPSNLLASFLPLLALGPTAGDGEGSAEGAGGPSGEPFSGLGDLSPLLFPPLSAPPTLIALNSALLAATLDPPSGTPPQPCVLSAPQPGPPTSSVTTATTDPGASSLGKAPSNSGRPPQLLSPLLGASLLGDLSSLTSSPGALPSLLQPPGPLLSGQLGLQLLPGGGAPPPLSEASSPLACLLQSLQIPPEQPEAPCLPPESPASALEPEPARPPLSALAPPHGSPDPPVPELLTGRGSGKRGRRGGGGLRGINGEARPARGRKPGSRREPGRLALKWGTRGGFNGQMERSPRRTHHWQHNGELAEGGAEPKDPPPPGPHSEDLKVPPGVVRKSRRGRRRKYNPTRNSNSSRQDITLEPSPTARAAVPLPPRARPGRPAKNKRRKLAP

SEQ ID NO: 8396 - protein, 47 aa, Homo Sapiens
MNGGNESSGADRAGGPVATSVPIGWQRCVREGAVLYIRRICNLSTVL

SEQ ID NO: 8397 - protein, 45 aa, Homo Sapiens
MNGGNESSGADRAGGPVATSVPIGWQRCVREGAVLYISPSGTELS

SEQ ID NO: 8398 - protein, 53 aa, Homo Sapiens
MNGGNESSGADRAGGPVATSVPIGWQRCVREGAVLYISPSGTELSSLEQTRSY

SEQ ID NO: 8399 - protein, 53 aa, Homo Sapiens; identical to SEQ ID NO: 8398

SEQ ID NO: 8400 - protein, 73 aa, Homo Sapiens
MNGGNESSGADRAGGPVATSVPIGWQRCVREGAVLYISPSGTELSSLEQTRSYLLSDGTCKCGLECPLNVPKV

SEQ ID NO: 8401 - protein, 148 aa, Homo Sapiens
MNGGNESSGADRAGGPVATSVPIGWQRCVREGAVLYISPSGTELSSLEQTRSYLLSDGTCKCGLECPLNVPKVFNFDPLAPVTPGGAGVGPASEEDMTKLCNHRRKAVAMATLYRSMETTCSHSSPGEGASPQMFHTVSPGPPSARPP

SEQ ID NO: 8402 - protein, 1003 aa, Homo Sapiens
MNGGNESSGADRAGGPVATSVPIGWQRCVREGAVLYISPSGTELSSLEQTRSYLLSDGTCKCGLECPLNVPKVFNFDPLAPVTPGGAGVGPASEEDMTKLCNHRRKAVAMATLYRSMETTCSHSSPGEGASPQMFHTVSPGPPSARPPCRVPPTTPLNGGPGSLPPEPPSVSQAFPTLAGPGGLFPPRLADPVPSGGSSSPRFLPRGNAPSPAPPPPPAISLNAPSYNWGAALRSSLVPSDLGSPPAPHASSSPPSDPPLFHCSDALTPPPLPPSNNLPAHPGPASQPPVSSATMHLPLVLGPLGGAPTVEGPGAPPFLASSLLSAAAKAQHPPLPPPSTLQGRRPRAQAPSASHSSSLRPSQRRPRRPPTVFRLLEGRGPQTPRRSRPRAPAPVPQPFSLPEPSQPILPSVLSLLGLPTPGPSHSDGSFNLLGSDAHLPPPPTLSSGSPPQPRHPIQPSLPGTTSGSLSSVPGAPAPPAASKAPVVPSPVLQSPSEGLGMGAGPACPLPPLAGGEAFPFPSPEQGLALSGAGFPGMLGALPLPLSLGQPPPSPLLNHSLFGVLTGGGGQPPPEPLLPPPGGPGPPLAPGEPEGPSLLVASLLPPPPSDLLPPPSAPPSNLLASFLPLLALGPTAGDGEGSAEGAGGPSGEPFSGLGDLSPLLFPPLSAPPTLIALNSALLAATLDPPSGTPPQPCVLSAPQPGPPTSSVTTATTDPGASSLGKAPSNSGRPPQLLSPLLGASLLGDLSSLTSSPGALPSLLQPPGPLLSGQLGLQLLPGGGAPPPLSEASSPLACLLQSLQIPPEQPEAPCLPPESPASALEPEPARPPLSALAPPHGSPDPPVPELLTGRGSGKRGRRGGGGLRGINGEARPARGRKPGSRREPGRLALKWGTRGGFNGQMERSPRRTHHWQHNGELAEGGAEPKDPPPPGPHSEDLKVPPGVVRKSRRGRRRKYNPTRNSNSSRQDITLEPSPTARAAVPLPPRARPGRPAKNKRRKLAP

SEQ ID NO: 8403 - protein, 66 aa, Homo Sapiens
MTKLCNHRRKAVAMATLYRSMETTCSHSSPGEGASPQMFHTVSPGPPSARPPCRVPPTTPLNGGPG

SEQ ID NO: 8404 - protein, 27 aa, Homo Sapiens
  misc_feature (1)..(1): Xaa can be any naturally occurring amino acid
XARAAVPLPPRARPGRPAKNKRRKLAP

SEQ ID NO: 8405 - protein, 190 aa, Homo Sapiens
  misc_feature (1)..(1): Xaa can be any naturally occurring amino acid
XLLSGQLGLQLLPGGGAPPPLSEASSPLACLLQSLQQIPPEQPEAPCLPPESPASALEPEPARPPLSALAPPHGSPDPPVPELLTGRGSGKRGRRGGGGLRGINGEARPARGRKPGSRREPGRLALKWGTRGGFNGQMERSPRRTHHWQHNGELAEGGAEPKDPPPPGPHSEDLKVPPGVVRKSRRGRRR

SEQ ID NO: 8406 - protein, 248 aa, Homo Sapiens
MSLFPSLPLLLLSMVAASYSETVTCEDAQKTCPAVIACSSPGINGFPGKDGRDGTKGEKGEPGQGLRGLQGPPGKLGPPGNPGPSGSPGPKGQKGDPGKSPDGDSSLAASERKALQTEMARIKKWLTFSLGKQVGNKFFLTNGEIMTFEKVKALCVKFQASVATPRNAAENGAIQNLIKEEAFLGITDEKTEGQFVDLTGNRLTYTNWNEGEPNNAGSDEDCVLLLKNGQWNDVPCSTSHLAVCEFPI

SEQ ID NO: 8407 - protein, 90 aa, Homo Sapiens
MAMLAQQMQLANAMMPGAPLQPVPMFSVAPSLATNASAAAFNPYLGPVSPSLVPAEILPTAPMLVTGNPGVPVPAAAAAAAQKLMRTDRL

SEQ ID NO: 8408 - protein, 155 aa, Homo Sapiens
MAMLAQQMQLANAMMPGAPLQPVPMFSVAPSLATNASAAAFNPYLGPVSPSLVPAEILPTAPMLVTGNPGVPVPAAAAAAAQKLMRTDRLEVCREYQRGNCNRGENDCRFAHPADSTMIDTNDNTVTVCMDYIKGRCSREKCKYFHPPAHLQAKI

SEQ ID NO: 8409 - protein, 388 aa, Homo Sapiens
MAVSVTPIRDTKWLTLEVCREFQRGTCSRPDTECKFAHPSKSCQVENGRVIACFDSLKGRCSRENCKYLHPPPHLKTQLEINGRNNLIQQKNMAMLAQQMQLANAMMPGAPLQPVPMFSVAPSLATNASAAAFNPYLGPVSPSLVPAEILPTAPMLVTGNPGVPVPAAAAAAAQKLMRTDRLEVCREYQRGNCNRGENDCRFAHPADSTMIDTNDNTVTVCMDYIKGRCSREKCKYFHPPAHLQAKIKAAQYQVNQAAAAQAAATAAAMTQSAVKSLKRPLEATFDLGIPQAVLPPLPKRPALEKTNGATAVFNTGIFQYQQALANMQLQQHTAFLPPVPMVHGATPATVSAATTSATSVPFAATATANQIPIISAEHLTSHKYVTQM

SEQ ID NO: 8410 - protein, 400 aa, Homo Sapiens
MAVSVTPIRDTKWLTLEVCREFQRGTCSRPDTECKFAHPSKSCQVENGRVIACFDSLKGRCSRENCKYLHPPPHLKTQLEINGRNNLIQQKNMAMLAQQMQLANAMMPGAPLQPVPMFSVAPSLATNASAAAFNPYLGPVSPSLVPAEILPTAPMLVTGNPGVPVPAAAAAAAQKLMRTDRLEVCREYQRGNCNRGENDCRFAHPADSTMIDTNDNTVTVCMDYIKGRCSREKCKYFHPPAHLQAKIKAAQYQVNQAAAAQAAATAAAMTQSAVKSLKRPLEATFDLGIPQAVLPPLPKRPALEKTNGATAVFNTGIFQYQQALANMQLQQHTAFLPPGSILCMTPATSVVPMVHGATPATVSAATTSATSVPFAATATANQIPIISAEHLTSHKYVTQM

SEQ ID NO: 8411 - protein, 370 aa, Homo Sapiens
MAVSVTPIRDTKWLTLEVCREFQRGTCSRPDTECKFAHPSKSCQVENGRVIACFDSLKGRCSRENCKYLHPPPHLKTQLEINGRNNLIQQKNMAMLAQQMQLANAMMPGAPLQPVPMFSVAPSLATNASAAAFNPYLGPVSPSLVPAEILPTAPMLVTGNPGVPVPAAAAAAAQKLMRTDRLEVCREYQRGNCNRGENDCRFAHPADSTMIDTNDNTVTVCMDYIKGRCSREKCKYFHPPAHLQAKIKAAQYQVNQAAAAQAAATAAAMGIPQAVLPPLPKRPALEKTNGATAVFNTGIFQYQQALANMQLQQHTAFLPPVPMVHGATPATVSAATTSATSVPFAATATANQIPIISAEHLTSHKYVTQM

SEQ ID NO: 8412 - protein, 382 aa, Homo Sapiens
MAVSVTPIRDTKWLTLEVCREFQRGTCSRPDTECKFAHPSKSCQVENGRVIACFDSLKGRCSRENCKYLHPPPHLKTQLEINGRNNLIQQKNMAMLAQQMQLANAMMPGAPLQPVPMFSVAPSLATNASAAAFNPYLGPVSPSLVPAEILPTAPMLVTGNPGVPVPAAAAAAAQKLMRTDRLEVCREYQRGNCNRGENDCRFAHPADSTMIDTNDNTVTVCMDYIKGRCSREKCKYFHPPAHLQAKIKAAQYQVNQAAAAQAAATAAAMGIPQAVLPPLPKRPALEKTNGATAVFNTGIFQYQQALANMQLQQHTAFLPPGSILCMTPATSVVPMVHGATPATVSAATTSATSVPFAATATANQIPIISAEHLTSHKYVTQM

SEQ ID NO: 8413 - protein, 340 aa, Homo Sapiens
MAVSVTPIRDTKWLTLEVCREFQRGTCSRPDTECKFAHPSKSCQVENGRVIACFDSLKGRCSRENCKYLHPPPHLKTQLEINGRNNLIQQKNMAMLAQQMQLANAMMPGAPLQPVPMFSVAPSLATNASAAAFNPYLGPVSPSLVPAEILPTAPMLVTGNPGVPVPAAAAAAAQKLMRTDRLEVCREYQRGNCNRGENDCRFAHPADSTMIDTNDNTVTVCMDYIKGRCSREKCKYFHPPAHLQAKIKAAQYQVNQAAAAQAAATAAAMFPWCTVLRQPLCPQQQHLPQVFPSLQQPQPTSPILDASTLLGATSCPAAAGKMIPIISAEHLTSHKYVTQM

SEQ ID NO: 8414 - protein, 342 aa, Homo Sapiens
MAVSVTPIRDTKWLTLEVCREFQRGTCSRPDTECKFAHPSKSCQVENGRVIACFDSLKGRCSRENCKYLHPPPHLKTQLEINGRNNLIQQKNMAMLAQQMQLANAMMPGAPLQPVPMFSVAPSLATNASAAAFNPYLGPVSPSLVPAEILPTAPMLVTGNPGVPVPAAAAAAAQKLMRTDRLEVCREYQRGNCNRGENDCRFAHPADSTMIDTNDNTVTVCMDYIKGRCSREKCKYFHPPAHLQAKIKAAQYQVNQAAAAQAAATAAAMGIPQAVLPPLPKRPALEKTNGATAVFNTGIFQYQQALANMQLQQHTAFLPPGSILCMTPATSVDTHNICRTSD

SEQ ID NO: 8415 - protein, 340 aa, Homo Sapiens; identical to SEQ ID NO: 8413

SEQ ID NO: 8416 - protein, 342 aa, Homo Sapiens; identical to SEQ ID NO: 8414

SEQ ID NO: 8417 - protein, 388 aa, Homo Sapiens; identical to SEQ ID NO: 8409

SEQ ID NO: 8418 - protein, 348 aa, Homo Sapiens
MAVSVTPIRDTKWLTLEVCREFQRGTCSRPDTECKFAHPSKSCQVENGRVIACFDSLKGRCSRENCKYLHPPPHLKTQLEINGRNNLIQQKNMAMLAQQMQLANAMMPGAPLQPVPMFSVAPSLATNASAAAFNPYLGPVSPSLVPAEILPTAPMLVTGNPGVPVPAAAAAAAQKLMRTDRLEVCREYQRGNCNRGENDCRFAHPADSTMIDTNDNTVTVCMDYIKGRCSREKCKYFHPPAHLQAKIKAAQYQVNQAAAAQAAATAAAMTQSAVKSLKRPLEATFDLGIPQAVLPPLPKRPALEKTNGATAVFNTGIFQYQQALANMQLQQHTAFLPPDTHNICRTSD

SEQ ID NO: 8419 - protein, 314 aa, Homo Sapiens
MAVSVTPIRDTKWLTLEVCREFQRGTCSRPDTECKFAHPSKSCQVENGRVIACFDSLKGRCSRENCKYLHPPPHLKTQLEINGRNNLIQQKNMAMLAQQMQLANAMMPGAPLQPVVCREYQRGNCNRGENDCRFAHPADSTMIDTNDNTVTVCMDYIKGRCSREKCKYFHPPAHLQAKIKAAQYQVNQAAAAQAAATAAAMGIPQAVLPPLPKRPALEKTNGATAVFNTGIFQYQQALANMQLQQHTAFLPPGSILCMTPATSVVPMVHGATPATVSAATTSATSVPFAATATANQIPIISAEHLTSHKYVTQM

SEQ ID NO: 8420 - protein, 314 aa, Homo Sapiens; identical to SEQ ID NO: 8419

SEQ ID NO: 8421 - protein, 302 aa, Homo Sapiens
MAVSVTPIRDTKWLTLEVCREFQRGTCSRPDTECKFAHPSKSCQVENGRVIACFDSLKGRCSRENCKYLHPPPHLKTQLEINGRNNLIQQKNMAMLAQQMQLANAMMPGAPLQPVVCREYQRGNCNRGENDCRFAHPADSTMIDTNDNTVTVCMDYIKGRCSREKCKYFHPPAHLQAKIKAAQYQVNQAAAAQAAATAAAMGIPQAVLPPLPKRPALEKTNGATAVFNTGIFQYQQALANMQLQQHTAFLPPVPMVHGATPATVSAATTSATSVPFAATATANQIPIISAEHLTSHKYVTQM

SEQ ID NO: 8422 - protein, 343 aa, Homo Sapiens
MGRCSRENCKYLHPPPHLKTQLEINGRNNLIQQKNMAMLAQQMQLANAMMPGAPLQPVPMFSVAPSLATNASAAAFNPYLGPVSPSLVPAEILPTAPMLVTGNPGVPVPAAAAAAAQKLMRTDRLEVCREYQRGNCNRGENDCRFAHPADSTMIDTNDNTVTVCMDYIKGRCSREKCKYFHPPAHLQAKIKAAQYQVNQAAAAQAAATAAAMTQSAVKSLKRPLEATFDLGIPQAVLPPLPKRPALEKTNGATAVFNTGIFQYQQALANMQLQQHTAFLPPGSILCMTPATSVVPMVHGATPATVSAATTSATSVPFAATATANQIPIISAEHLTSHKYVTQM

SEQ ID NO: 8423 - protein, 58 aa, Homo Sapiens
MLGRCSRENCKYLHPPPHLKTQLEINGRNNLIQQKNMAMLAQQMQLANAMMPGAPLQP

SEQ ID NO: 8424 - protein, 210 aa, Homo Sapiens
QQMQLANAMMPGAPLQPVPMFSVAPSLATNASAAAFNPYLGPVSPSLVPAEILPTAPMLVTGNPGVPVPAAAAAAAQKLMRTDRLEVCREYQRGNCNRGENDCRFAHPADSTMIDTNDNTVTVCMDYIKGRCSREKCKYFHPPAHLQAKIKAAQYQVNQAAAAQAAATAAAMALANMQLQQHTAFLPPGSILCMTPATSVDTHNICRTSD

SEQ ID NO: 8425 - protein, 329 aa, Homo Sapiens
  misc_feature (1)..(1): Xaa can be any naturally occurring amino acid
XVSVTPIRDTKWLTLEVCREFQRGTCSRPDTECKFAHPSKSCQVENGRVIACFDSLKGRCSRENCKYLHPPPHLKTQLEINGRNNLIQQKNMAMLAQQMQLANAMMPGAPLQPVPMFSVAPSLATNASAAAFNPYLGPVSPSLVPAEILPTAPMLVTGNPGVPVPAAAAAAAQKLMRTDRLEVCREYQRGNCNRGENDCRFAHPADSTMIDTNDNTVTVCMDYIKGRCSREKCKYFHPPAHLQAKIKAAQYQVNQAAAAQAAATAAAMGIPQAVLPPLPKRPALEKTNGATAVFNTGIFQYQQALANMQLQQHTAFLPPDTHNICRTSD

SEQ ID NO: 8426 - protein, 56 aa, Homo Sapiens
MAAASAVSVLLVAAERNRWHRLPSLLLPPRLSIQDAVFSQKTWNLLNFVSKKELFL

SEQ ID NO: 8427 - protein, 598 aa, Homo Sapiens
MAAASAVSVLLVAAERNRWHRLPSLLLPPRTWVWRQRTMKYTTATDEAYSIGPAPSQQSYLSMEKIIQVAKTSAAQAIHPGCGFLSENMEFAELCKQEGIIFIGPPPSAIRDMGIKSTSKSIMAAAGVPVVEGYHGEDQSDQCLKEHARRIGYPVMIKAVRGGGGKGMRIVRSEQEFQEQLESARREAKKSFNDDAMLIEKFVDTPRHVEVQVFGDHHGNAVYLFERDCSVQRRHQKIIEEAPAPGIKSEVRKKLGEAAVRAAKAVNYVGAGTVEFIMDSKHNFCFMEMNTRLQVEHPVTEMITGTDLVEWQLRIAAGEKIPLSQEEITLQGHAFEARIYAEDPSNNFMPVAGPLVHLSTPRADPSTRIETGVRQGDEVSVHYDPMIAKLVVWAADRQAALTKLRYSLRQYNIVGLHTNIDFLLNLSGHPEFEAGNVHTDFIPQHHKQLLLSRKAAAKESLCQAALGLILKEKAMTDTFTLQAHDQFSPFSSSSGRRLNISYTRNMTLKDGKNNVAIAVTYNHDGSYSMQIEDKTFQVLGNLYSEGDCTYLKCSVNGVASKAKLIILENTIYLFSKEGSIEIDIPVPKYLSSVSSQET

SEQ ID NO: 8428 - protein, 47 aa, Homo Sapiens
MAAASAVSVLLVAAERNRWHRLPSLLLPPRTWVWRQRTMKYTTATGR

SEQ ID NO: 8429 - protein, 47 aa, Homo Sapiens; identical to SEQ ID NO: 8428

SEQ ID NO: 8430 - protein, 725 aa, Homo Sapiens
MAAASAVSVLLVAAERNRWHRLPSLLLPPRTWVWRQRTMKYTTATGRNITKVLIANRGEIACRVMRTAKKLGVQTVAVYSEADRNSMHVDMADEAYSIGPAPSQQSYLSMEKIIQVAKTSAAQAIHPGCGFLSENMEFAELCKQEGIIFIGPPPSAIRDMGIKSTSKSIMAAAGVPVVEGYHGEDQSDQCLKEHARRIGYPVMIKAVRGGGGKGMRIVRSEQEFQEQLESARREAKKSFNDDAMLIEKFVDTPRHVEVQVFGDHHGNAVYLFERDCSVQRRHQKIIEEAPAPGIKSEVRKKLGEAAVRAAKAVNYVGAGTVEFIMDSKHNFCFMEMNTRLQVEHPVTEMITGTDLVEWQLRIAAGEKIPLSQEEITLQGHAFEARIYAEDPSNNFMPVAGPLVHLSTPRADPSTRIETGVRQGDEVSVHYDPMIAKLVVWAADRQAALTKLRYSLRQYNIVGLHTNIDFLLNLSGHPEFEAGNVHTDFIPQHHKQLLLSRKAAAKESLCQAALGLILKEKAMTDTFTLQAHDQFSPFSSSSGRRLNISYTRNMTLKDGKNNVAIAVTYNHDGSYSMQIEDKTFQVLGNLYSEGDCTYLKCSVNGVASKAKLIILENTIYLFSKEGSIEIDIPVPKYLSSVSSQETQGGPLAPMTGTIEKVFVKAGDKVKAGDSLMVMIAMKMEHTIKSPKDGTVKKVFYREGAQANRHTPLVEFEEEESDKRESE

SEQ ID NO: 8431 - protein, 112 aa, Homo Sapiens
MAAASAVSVLLVAAERNRWHRLPSLLLPPRTWVWRQRTMKYTTATGRNITKVLIANRGEIACRVMRTAKKLGVQTVAVYSEADRNSMHVDMQDDLDFTEKIKLRFLPQNLLT

SEQ ID NO: 8432 - protein, 61 aa, Homo Sapiens
MAAASAVSVLLVAAERNRWHRLPSLLLPPRTWVWRQRTMKYTTATGYPSRMRFSLRKHGIC

SEQ ID NO: 8433 - protein, 61 aa, Homo Sapiens; identical to SEQ ID NO: 8432

SEQ ID NO: 8434 - protein, 616 aa, Homo Sapiens
MEKIIQVAKTSAAQAIHPGCGFLSENMEFAELCKQEGIIFIGPPPSAIRDMGIKSTSKSIMAAAGVPVVEGYHGEDQSDQCLKEHARRIGYPVMIKAVRGGGGKGMRIVRSEQEFQEQLESARREAKKSFNDDAMLIEKFVDTPRHVEVQVFGDHHGNAVYLFERDCSVQRRHQKIIEEAPAPGIKSEVRKKLGEAAVRAAKAVNYVGAGTVEFIMDSKHNFCFMEMNTRLQVEHPVTEMITGTDLVEWQLRIAAGEKIPLSQEEITLQGHAFEARIYAEDPSNNFMPVAGPLVHLSTPRADPSTRIETGVRQGDEVSVHYDPMIAKLVVWAADRQAALTKLRYSLRQYNIVGLHTNIDFLLNLSGHPEFEAGNVHTDFIPQHHKQLLLSRKAAAKESLCQAALGLILKEKAMTDTFTLQAHDQFSPFSSSSGRRLNISYTRNMTLKDGKNNVAIAVTYNHDGSYSMQIEDKTFQVLGNLYSEGDCTYLKCSVNGVASKAKLIILENTIYLFSKEGSIEIDIPVPKYLSSVSSQETQGGPLAPMTGTIEKVFVKAGDKVKAGDSLMVMIAMKMEHTIKSPKDGTVKKVFYREGAQANRHTPLVEFEEEESDKRESE

SEQ ID NO: 8435 - protein, 575 aa, Homo Sapiens
MEKIIQVAKTSAAQHIQSIMAAAGVPVVEGYHGEDQSDQCLKEHARRIGYPVMIKAVRGGGGKGMRIVRSEQEFQEQLESARREAKKSFNDDAMLIEKFVDTPRHVEVQVFGDHHGNAVYLFERDCSVQRRHQKIIEEAPAPGIKSEVRKKLGEAAVRAAKAVNYVGAGTVEFIMDSKHNFCFMEMNTRLQVEHPVTEMITGTDLVEWQLRIAAGEKIPLSQEEITLQGHAFEARIYAEDPSNNFMPVAGPLVHLSTPRADPSTRIETGVRQGDEVSVHYDPMIAKLVVWAADRQAALTKLRYSLRQYNIVGLHTNIDFLLNLSGHPEFEAGNVHTDFIPQHHKQLLLSRKAAAKESLCQAALGLILKEKAMTDTFTLQAHDQFSPFSSSSGRRLNISYTRNMTLKDGKNNVAIAVTYNHDGSYSMQIEDKTFQVLGNLYSEGDCTYLKCSVNGVASKAKLIILENTIYLFSKEGSIEIDIPVPKYLSSVSSQETQGGPLAPMTGTIEKVFVKAGDKVKAGDSLMVMIAMKMEHTIKSPKDGTVKKVFYREGAQANRHTPLVEFEEEESDKRESE

SEQ ID NO: 8436 - protein, 434 aa, Homo Sapiens
MKYTTATGRNITKVLIANRGEIACRVMRTAKKLGVQTVAVYSEADRNSMHVDMADEAYSIGPAPSQQSYLSMEKIIQVAKTSAAQAIHPGCGFLSENMEFAELCKQEGIIFIGPPPSAIRDMGIKSTSKSIMAAAGVPVVEGYHGEDQSDQCLKEHARRIGYPVMIKAVRGGGGKGMRIVRSEQEFQEQLESARREAKKSFNDDAMLIEKFVDTPRHVEVQVFGDHHGNAVYLFERDCSVQRRHQKIIEEAPAPGIKSEVRKKLGEAAVRAAKAVNYVGAGTVEFIMDSKHNFCFMEMNTRLQVEHPVTEMITGTDLVEWQLRIAAGEKIPLSQEEITLQGHAFEARIYAEDPSNNFMPVAGPLVHLSTPRADPSTRIETGVRQGDEVSVHYDPMIAKLVVWAADRQAALTKLRYSLRQYNINSLHFRLAVEED

SEQ ID NO: 8437 - protein, 434 aa, Homo Sapiens; identical to SEQ ID NO: 8436

SEQ ID NO: 8438 - protein, 119 aa, Homo Sapiens
MVLPLPWLSRYHFLRLLLPSWSLAPQGSHGCCSQNPKASMEEQTSSRGNGKMTSPPRGPGTHRTAELARAEELLEQQLELYQALLEGQEGAWEAQALVLKIQKLKEQMRRHQESLGGGA

SEQ ID NO: 8439 - protein, 78 aa, Homo Sapiens
LGRLNHVAIAVPDLEKAAAFYKNILGAQVDNINAAVMDLKKKKIRSLSEEVKIGAHGKPVIFLHPKDCGGVLVELEQA

SEQ ID NO: 8440 - protein, 176 aa, Homo Sapiens
MARVLKAAAANAVGLFSRLQAPIPTVRASSTSQPLDQVTGSVWNLGRLNHVAIAVPDLEKAAAFYKNILGAQVSEAVPLPEHGVSVVFVNLGNTKMELLHPLGRDSPIAGFLQKNKAGGMHHICIEVDNINAAVMDLKKKKIRSLSEEVKIGAHGKPVIFLHPKDCGGVLVELEQA

SEQ ID NO: 8441 - protein, 31 aa, Homo Sapiens
MELLHPLGRDSPIAGFLQKNKAGGMHHICIE

SEQ ID NO: 8442 - protein, 31 aa, Homo Sapiens; identical to SEQ ID NO: 8441

SEQ ID NO: 8443 - protein, 1067 aa, Homo Sapiens
MAEKGASRGTLRRLWSLPRRRRGTAGRSRPDEIMHQDIVPLCAADIQDQLKKRFAYLSGGRGQDGSPVITFPDYPAFSEIPDKEFQNVMTYLTSIPSLQDAGIGFILVIDRRRDKWTSVKASVLRIAASFPANLQLVLVLRPTGFFQRTLSDIAFKFNRDDFKMKVPVIMLSSVPDLHGYIDKSQLTEDLGGTLDYCHSRWLCQRTAIESFALMVKQTAQMLQSFGTELAETELPNDVQSTSSVLCAHTEKKDKAKEDLRLALKEGHSVLESLRELQAEGSEPSVNQDQLDNQATVQRLLAQLNETEAAFDEFWAKHQQKLEQCLQLRHFEQGFREVKAILDAASQKIATFTDIGNSLAHVEHLLRDLASFEEKSGVAVERARALSLDGEQLIGNKHYAVDSIRPKCQELRHLCDQFSAEIARRRGLLSKSLELHRRLETSMKWCDEGIYLLASQPVDKCQSQDGAEAALQEIEKFLETGAENKIQELNAIYKEYESILNQDLMEHVRKVFQKQASMEEVFHRRQASLKKLAARQTRPVQPVAPRPEALAKSPCPSPGIRRGSENSSSEGGALRRGPYRRAKSEMSESRQGRGSAGEEEESLAILRRHVMSELLDTERAYVEELLCVLEGYAAEMDNPLMAHLLSTGLHNKKDVLFGNMEEIYHFHNRIFLRELENYTDCPELVGRCFLERMEDFQIYEKYCQNKPRSESLWRQCSDCPFFQECQRKLDHKLSLDSYLLKPVQRITKYQLLLKEMLKYSRNCEGAEDLQEALSSILGILKAVNDSMHLIAITGYDGNLGDLGKLLMQGSFSVWTDHKRGHTKVKELARFKPMQRHLFLHEKAVLFCKKREENGEGYEKAPSYSYKQSLNMAAVGITENVKGDAKKFEIWYNAREEVYIVQAPTPEIKAAWVNEIRKVLTSQLQACREASQHRALEQSQSLPLPAPTSTSPSRGNSRNIKKLEERKTDPLSLEGYVSSAPLTKPPEKGKGWSKTSHSLEAPEDDGGWSSAEEQINSSDAEEDGGLGPKKLVPGKYTVVADHEKGGPDALRVRSGDVVELVQEGDEGLW

SEQ ID NO: 8444 - protein, 66 aa, Homo Sapiens
MFDCWRFILCKRPGSNSYSSPQRPNEAKKEETDHQIDVSDVIRLVQDTPEATAMATAPRRSQSPGL

SEQ ID NO: 8445 - protein, 1137 aa, Homo Sapiens
MFDCWRFILCKRPGSNSYSSPQRPNEAKKEETDHQIDVSDVIRLVQDTPEATAMATDEIMHQDIVPLCAADIQDQLKKRFAYLSGGRGQDGSPVITFPDYPAFSEIPDKEFQNVMTYLTSIPSLQDAGIGFILVIDRRRDKWTSVKASVLRIAASFPANLQLVLVLRPTGFFQRTLSDIAFKFNRDDFKMKVPVIMLSSVPDLHGYIDKSQLTEDLGGTLDYCHSRWLCQRTAIESFALMVKQTAQMLQSFGTELAETELPNDVQSTSSVLCAHTEKKDKAKEDLRLALKEGHSVLESLRELQAEGSEPSVNQDQLDNQATVQRLLAQLNETEAAFDEFWAKHQQKLEQCLQLRHFEQGFREVKAILDAASQKIATFTDIGNSLAHVEHLLRDLASFEEKSGVAVERARALSLDGEQLIGNKHYAVDSIRPKCQELRHLCDQFSAEIARRRGLLSKSLELHRRLETSMKWCDEGIYLLASQPVDKCQSQDGAEAALQEIEKFLETGAENKIQELNAIYKEYESILNQDLMEHVRKVFQKQASMEEVFHRRQASLKKLAARQTRPVQPVAPRPEALAKSPCPSPGIRRGSENSSSEGGALRRGPYRRAKSEMSESRQGRGSAGEEEESLAILRRHVMSELLDTERAYVEELLCVLEGYAAEMDNPLMAHLLSTGLHNKKDVLFGNMEEIYHFHNRIFLRELENYTDCPELVGRCFLERMEDFQIYEKYCQNKPRSESLWRQCSDCPFFQECQRKLDHKLSLDSYLLKPVQRITKYQLLLKEMLKYSRNCEGAEDLQEALSSILGILKAVNDSMHLIAITGYDGNLGDLGKLLMQGSFSVWTDHKRGHTKVKELARFKPMQRHLFLHEKAVLFCKKREENGEGYEKAPSYSYKQSLNMAAVGITENVKGDAKKFEIWYNAREEVYIVQAPTPEIKAAWVNEIRKVLTSQLQACREASQHRALEQSQSLPLPAPTSTSPSRGNSRNIKKLEERKTDPLSLEGYVSSAPLTKPPEKGKGWSKTSHSLEAPEDDGGWSSAEEQINSSDAEEDGGLGPKKLVPGKYTVVADHEKGGPDALRVRSGDVVELVQEGDEGLWYVRDPTTGKEGWVPASSLSVRLGPSGSAQCLSSSGKAHVPRAHP

SEQ ID NO: 8446 - protein, 64 aa, Homo Sapiens
MFDCWRFILCKRPGSNSYSSPQRPNEAKKEETDHQIDVSDVIRLVQDTPEATAMATEVSASRPQ

SEQ ID NO: 8447 - protein, 97 aa, Homo Sapiens
MGDGKAVRISVAEMKSYYLYSEWCSWLLSVAEDEIMHQDIVPLCAADIQDQLKKRFAYLSGGRGQDGSPVITFPDYPAFSEIPDKEFQNVMTYLTSI

SEQ ID NO: 8448 - protein, 136 aa, Homo Sapiens
MHQDIVPLCAADIQDQLKKRFAYLSGGRGQDGSPVITFPDYPAFSEIPDKEFQNVMTYLTSIPSLQDAGIGFILVIDRRRDKWTSVKASVLRIAASFPANLQLVLVLRPTGFFQRTLSDIAFKFNRDDFKMKVPVI

SEQ ID NO: 8449 - protein, 1096 aa, Homo Sapiens
MPLRGGAGPSPASHGPTHGPSDPRTCLPGRGAGGMRPHGRGALGCCGLCSFYTCHGAAGDEIMHQDIVPLCAADIQDQLKKRFAYLSGGRGQDGSPVITFPDYPAFSEIPDKEFQNVMTYLTSIPSLQDAGIGFILVIDRRRDKWTSVKASVLRIAASFPANLQLVLVLRPTGFFQRTLSDIAFKFNRDDFKMKVPVIMLSSVPDLHGYIDKSQLTEDLGGTLDYCHSRWLCQRTAIESFALMVKQTAQMLQSFGTELAETELPNDVQSTSSVLCAHTEKKDKAKEDLRLALKEGHSVLESLRELQAEGSEPSVNQDQLDNQATVQRLLAQLNETEAAFDEFWAKHQQKLEQCLQLRHFEQGFREVKAILDAASQKIATFTDIGNSLAHVEHLLRDLASFEEKSGVAVERARALSLDGEQLIGNKHYAVDSIRPKCQELRHLCDQFSAEIARRRGLLSKSLELHRRLETSMKWCDEGIYLLASQPVDKCQSQDGAEAALQEIEKFLETGAENKIQELNAIYKEYESILNQDLMEHVRKVFQKQASMEEVFHRRQASLKKLAARQTRPVQPVAPRPEALAKSPCPSPGIRRGSENSSSEGGALRRGPYRRAKSEMSESRQGRGSAGEEEESLAILRRHVMSELLDTERAYVEELLCVLEGYAAEMDNPLMAHLLSTGLHNKKDVLFGNMEEIYHFHNRIFLRELENYTDCPELVGRCFLERMEDFQIYEKYCQNKPRSESLWRQCSDCPFFQECQRKLDHKLSLDSYLLKPVQRITKYQLLLKEMLKYSRNCEGAEDLQEALSSILGILKAVNDSMHLIAITGYDGNLGDLGKLLMQGSFSVWTDHKRGHTKVKELARFKPMQRHLFLHEKAVLFCKKREENGEGYEKAPSYSYKQSLNMAAVGITENVKGDAKKFEIWYNAREEVYIVQAPTPEIKAAWVNEIRKVLTSQLQACREASQHRALEQSQSLPLPAPTSTSPSRGNSRNIKKLEERKTDPLSLEGYVSSAPLTKPPEKGKGWSKTSHSLEAPEDDGGWSSAEEQINSSDAEEDGGLGPKKLVPGKYTVVADHEKGGPDALRVRSGDVVELVQEGDEGLW

SEQ ID NO: 8450 - protein, 1125 aa, Homo Sapiens
MRFWLRTEEMALEEMVQRLNAVSKHTDEIMHQDIVPLCAADIQDQLKKRFAYLSGGRGQDGSPVITFPDYPAFSEIPDKEFQNVMTYLTSIPSLQDAGIGFILVIDRRRDKWTSVKASVLRIAASFPANLQLVLVLRPTGFFQRTLSDIAFKFNRDDFKMKVPVIMLSSVPDLHGYIDKSQLTEDLGGTLDYCHSRWLCQRTAIESFALMVKQTAQMLQSFGTELAETELPNDVQSTSSVLCAHTEKKDKAKEDLRLALKEGHSVLESLRELQAEGSEPSVNQDQLDNQATVQRLLAQLNETEAAFDEFWAKHQQKLEQCLQLRHFEQGFREVKAILDAASQKIATFTDIGNSLAHVEHLLRDLASFEEKSGVAVERARALSLDGEQLIGNKHYAVDSIRPKCQELRHLCDQFSAEIARRRGLLSKSLELHRRLETSMKWCDEGIYLLASQPVDKCQSQDGAEAALQEIEKFLETGAENKIQELNAIYKEYESILNQDLMEHVRKVFQKQASMEEVFHRRQASLKKLAARQTRPVQPVAPRPEALAKSPCPSPGIRRGSENSSSEGGALRRGPYRRAKSEMSESRQGRGSAGEEEESLAILRRHVMSELLDTERAYVEELLCVLEGYAAEMDNPLMAHLLSTGLHNKKDVLFGNMEEIYHFHNRIFLRELENYTDCPELVGRCFLERMEDFQIYEKYCQNKPRSESLWRQCSDCPFFQECQRKLDHKLSLDSYLLKPVQRITKYQLLLKEMLKYSRNCEGAEDLQEALSSILGILKAVNDSMHLIAITGYDGNLGDLGKLLMQGSFSVWTDHKRGHTKVKELARFKPMQRHLFLHEKAVLFCKKREENGEGYEKAPSYSYKQSLNMAAVGITENVKGDAKKFEIWYNAREEVYIVQAPTPEIKAAWVNEIRKVLTSQLQACREASQHRALEQSQSLPLPAPTSTSPSRGNSRNIKKLEERKTDPLSLEGYVSSAPLTKPPEKGKGWSKTSHSLEAPEDDGGWSSAEEQINSSDAEEDGGLGPKKLVPGKYTVVADHEKGGPDALRVRSGDVVELVQEGDEGLWYVRDPTTGKEGWVPASSLSVRLGPSGSAQCLSSSESSPGSAVLSNSSSCSEGGQAPFSDLQG

SEQ ID NO: 8451 - protein, 136 aa, Homo Sapiens
MTVRRLSLLCRDLWALWLLLKAGADEIMHQDIVPLCAADIQDQLKKRFAYLSGGRGQDGSPVITFPDYPAFSEIPDKEFQNVMTYLTSIPSGGQESSIRPVSCRLTWEGCRGGLSSDVLVPASRKMLRMSASHQTV

SEQ ID NO: 8452 - protein, 1123 aa, Homo Sapiens
MTVRRLSLLCRDLWALWLLLKAGADEIMHQDIVPLCAADIQDQLKKRFAYLSGGRGQDGSPVITFPDYPAFSEIPDKEFQNVMTYLTSIPSLQDAGIGFILVIDRRRDKWTSVKASVLRIAASFPANLQLVLVLRPTGFFQRTLSDIAFKFNRDDFKMKVPVIMLSSVPDLHGYIDKSQLTEDLGGTLDYCHSRWLCQRTAIESFALMVKQTAQMLQSFGTELAETELPNDVQSTSSVLCAHTEKKDKAKEDLRLALKEGHSVLESLRELQAEGSEPSVNQDQLDNQATVQRLLAQLNETEAAFDEFWAKHQQKLEQCLQLRHFEQGFREVKAILDAASQKIATFTDIGNSLAHVEHLLRDLASFEEKSGVAVERARALSLDGEQLIGNKHYAVDSIRPKCQELRHLCDQFSAEIARRRGLLSKSLELHRRLETSMKWCDEGIYLLASQPVDKCQSQDGAEAALQEIEKFLETGAENKIQELNAIYKEYESILNQDLMEHVRKVFQKQASMEEVFHRRQASLKKLAARQTRPVQPVAPRPEALAKSPCPSPGIRRGSENSSSEGGALRRGPYRRAKSEMSESRQGRGSAGEEEESLAILRRHVMSELLDTERAYVEELLCVLEGYAAEMDNPLMAHLLSTGLHNKKDVLFGNMEEIYHFHNRIFLRELENYTDCPELVGRCFLERMEDFQIYEKYCQNKPRSESLWRQCSDCPFFQECQRKLDHKLSLDSYLLKPVQRITKYQLLLKEMLKYSRNCEGAEDLQEALSSILGILKAVNDSMHLIAITGYDGNLGDLGKLLMQGSFSVWTDHKRGHTKVKELARFKPMQRHLFLHEKAVLFCKKREENGEGYEKAPSYSYKQSLNMAAVGITENVKGDAKKFEIWYNAREEVYIVQAPTPEIKAAWVNEIRKVLTSQLQACREASQHRALEQSQSLPLPAPTSTSPSRGNSRNIKKLEERKTDPLSLEGYVSSAPLTKPPEKGKGWSKTSHSLEAPEDDGGWSSAEEQINSSDAEEDGGLGPKKLVPGKYTVVADHEKGGPDALRVRSGDVVELVQEGDEGLWYVRDPTTGKEGWVPASSLSVRLGPSGSAQCLSSSESSPGSAVLSNSSSCSEGGQAPFSDLQG

SEQ ID NO: 8453 - protein, 984 aa, Homo Sapiens
MTVRRLSLLCRDLWALWLLLKAGADEIMHQDIVPLCAADIQDQLKKRFAYLSGGRGQDGSPVITFPDYPAFSEIPDKEFQNVMTYLTSIPSLQDAGIGFILVIDRRRDKWTSVKASVLRIAASFPANLQLVLVLRPTGFFQRTLSDIAFKFNRDDFKMKVPVIMLSSVPDLHGYIDKSQLTEDLGGTLDYCHSRWLCQRTAIESFALMVKQTAQMLQSFGTELAETELPNDVQSTSSVLCAHTEKKDKAKEDLRLALKEGHSVLESLRELQAEGSEPSVNQDQLDNQATVQRLLAQLNETEAAFDEFWAKHQQKLEQCLQLRHFEQGFREVKAILDAASQKIATFTDIGNSLAHVEHLLRDLASFEEKSGVAVERARALSLDGEQLIGNKHYAVDSIRPKCQELRHLCDQFSAEIARRRGLLSKSLELHRRLETSMKWCDEGIYLLASQPVDKCQSQDGAEAALQEIEKFLETGAENKIQELNAIYKEYESILNQDLMEHVRKVFQKQASMEEVFHRRQASLKKLAARQTRPVQPVAPRPEALAKSPCPSPGIRRGSENSSSEGGALRRGPYRRAKSEMSESRQGRGSAGEEEESLAILRRHVMSELLDTERAYVEELLCVLEGYAAEMDNPLMAHLLSTGLHNKKDVLFGNMEEIYHFHNRIFLRELENYTDCPELVGRCFLERMEDFQIYEKYCQNKPRSESLWRQCSDCPFFQECQRKLDHKLSLDSYLLKPVQRITKYQLLLKEMLKYSRNCEGAEDLQEALSSILGILKAVNDSMHLIAITGYDGNLGDLGKLLMQGSFSVWTDHKRGHTKVKELARFKPMQRHLFLHEKAVLFCKKREENGEGYEKAPSYSYKQSLNMAAVGITENVKGDAKKFEIWYNAREEVYIVQAPTPEIKAAWVNEIRKVLTSQLQACREASQHRALEQSQSLPLPAPTSTSPSRGNSRNIKKLEERKTDPLSLEGYVSSAPLTKPPEKGKEP

SEQ ID NO: 8454 - protein, 86 aa, Homo Sapiens
MWLSQRVLPPLPFPADAWEPSEVLGIFSQHRSHATTSESLTWTSTGTSDARTGVILQDAGIGFILVIDRRRDKWTSVKASVLRIAN

SEQ ID NO: 8455 - protein, 93 aa, Homo Sapiens
SPVITFPDYPAFSEIPDKEFQNVMTYLTSIPSILFMESAASEHWGQVAEALPFLPPGSARTAVTTSPRGPLPAPSQNVFPRSFSVTAVEFNSY

SEQ ID NO: 8456 - protein, 213 aa, Homo Sapiens
TSTGTSDARTGVILQDAGIGFILVIDRRRDKWTSVKASVLRIAASFPANLQLVLVLRPTGFFQRTLSDIAFKFNRDDFKMKVPVIMLSSVPDLHGYIDKSQLTEDLGGTLDYCHSRWLCQRTAIESFALMVKQTAQMLQSFGTELAETELPNDVQSTSSVLCAHTEKKDKAKVHGGCSGWKLWGAPVSQKLRGAPVGSCGGSFVPAGVCVSST

SEQ ID NO: 8457 - protein, 336 aa, Homo Sapiens
  misc_feature (1)..(1): Xaa can be any naturally occurring amino acid
XENGEGYEKAPSYSYKQSLNMAAVGITENVKGDAKKFEIWYNAREEVYIVQAPTPEIKAAWVNEIRKVLTSQLQACREASQHRALEQSQSLPLPAPTSTSPSRGNSRNIKKLEERKTDPLSLEGYVSSAPLTKPPEKGKDDTVTSSASESSALSRKRFTLQGFANLKGQKASPTSPDKKAKRHEVKSDPTPFGVRGWSKTSHSLEAPEDDGGWSSAEEQINSSDAEEDGGLGPKKLVPGKYTVVADHEKGGPDALRVRSGDVVELVQEGDEGLWYVRDPTTGKEGWVPASSLSVRLGPSGSAQCLSSSESSPGSAVLSNSSSCSEGGQAPFSDLQG

SEQ ID NO: 8458 - protein, 296 aa, Homo Sapiens
  misc_feature (1)..(1): Xaa can be any naturally occurring amino acid
XHLFLHEKAVLFCKKREENGEGYEKAPSYSYKQSLNMAAVGITENVKGDAKKFEIWYNAREEVYIVQAPTPEIKAAWVNEIRKVLTSQLQACREASQHRALEQSQSLPLPAPTSTSPSRGNSRNIKKLEERKTDPLSLEGYVSSAPLTKPPEKGKGWSKTSHSLEAPEDDGGWSSAEEQINSSDAEEDGGLGPKKLVPGKYTVVADHEKGGPDALRVRSGDVVELVQEGDEGLWYVRDPTTGKEGWVPASSLSVRLGPSGSAQCLSSSESSPGSAVLSNSSSCSEGGQAPFSDLQG

SEQ ID NO: 8459 - protein, 189 aa, Homo Sapiens
  misc_feature (1)..(1): Xaa can be any naturally occurring amino acid
XKKLEERKTDPLSLEGYVSSAPLTKPPEKGKASPTSPDKKAKRHEVKSDPTPFGVRGWSKTSHSLEAPEDDGGWSSAEEQINSSDAEEDGGLGPKKLVPGKYTVVADHEKGGPDALRVRSGDVVELVQEGDEGLWYVRDPTTGKEGWVPASSLSVRLGPSGSAQCLSSSESSPGSAVLSNSSSCSEGGQ

SEQ ID NO: 8460 - protein, 317 aa, Homo Sapiens
  misc_feature (1)..(1): Xaa can be any naturally occurring amino acid
XLGILKAVNDSMHLIAITGYDGNLGDLGKLLMQGSFSVWTDHKRGHTKVKELARFKPMQRHLFLHEKAVLFCKKREENGEGYEKAPSYSYKQSLNMAAVGITENVKGDAKKFEIWYNAREEVYIVQAPTPEIKAAWVNEIRKVLTSQLQACREASQHRALEQSQSLPLPAPTSTSPSRGNSRNIKKLEERKTDPLSLEGYVSSAPLTKPPEKGKDDTVTSSASESSALSRKRFTLQGFANLKASPTSPDKKAKRHEVKSDPTPFGVRGWSKTSHSLEAPEDDGGWSSAEEQINSSDAEEDGGLGPKKLVPGKYTVVA

SEQ ID NO: 8461 - protein, 151 aa, Homo Sapiens
  misc_feature (1)..(1): Xaa can be any naturally occurring amino acid
XQAPTPEIKAAWVNEIRKVLTSQLQACREASQHRALEQSQSLPLPAPTSTSPSRGNSRNIKKLEERKTDPLSLEGYVSSAPLTKPPEKGKDDTVTSSASESSALSRKRFTLQGFANLKGQKGWSKTSHSLEAPEDDGGWSSAEEQINSSDA

SEQ ID NO: 8462 - protein, 87 aa, Homo Sapiens
  misc_feature (1)..(1): Xaa can be any naturally occurring amino acid
XSAPLTKPPEKGKGWSKTSHSLEAPEDDGGWSSAEEQINSSDAEEDGGLGPKKLVPTQPPVEPTRGCTFLRGDSPHPPTLYVIECCH

SEQ ID NO: 8463 - protein, 69 aa, Homo Sapiens
  misc_feature (1)..(1): Xaa can be any naturally occurring amino acid
XSEIPDKEFQNVMTYLTSIPSLQDAGIGFILVIDRRRDKWTSVKASVLRIALRARCTESEPLHPGGSGI

SEQ ID NO: 8464 - protein, 793 aa, Homo Sapiens
  misc_feature (1)..(1): Xaa can be any naturally occurring amino acid
XSQKIATFTDIGNSLAHVEHLLRDLASFEEKSGVAVERARALSLDGEQLIGNKHYAVDSIRPKCQELRHLCDQFSAEIARRRGLLSKSLELHRRLETSMKWCDEGIYLLASQPVDKCQSQDGAEAALQEIEKFLETGAENKIQELNAIYKEYESILNQDLMEHVRKVFQKQASMEEVFHRRQASLKKLAARQTRPVQPVAPRPEALAKSPCPSPGIRRGSENSSSEGGALRRGPYRRAKSEMSESRQGRGSAGEEEESLAILRRHVMSELLDTERAYVEELLCVLEGYAAEMDNPLMAHLLSTGLHNKKDVLFGNMEEIYHFHNRIFLRELENYTDCPELVGRCFLERMEDFQIYEKYCQNKPRSESLWRQCSDCPFFQECQRKLDHKLSLDSYLLKPVQRITKYQLLLKEMLKYSRNCEGAEDLQEALSSILGILKAVNDSMHLIAITGYDGNLGDLGKLLMQGSFSVWTDHKRGHTKVKELARFKPMQRHLFLHEKAVLFCKKREENGEGYEKAPSYSYKQSLNMAAVGITENVKGDAKKFEIWYNAREEVYIVQAPTPEIKAAWVNEIRKVLTSQLQACREASQHRALEQSQSLPLPAPTSTSPSRGNSRNIKKLEERKTDPLSLEGYVSSAPLTKPPEKGKASPTSPDKKAKRHEVKSDPTPFGVRGWSKTSHSLEAPEDDGGWSSAEEQINSSDAEEDGGLGPKKLVPGKYTVVADHEKGGPDALRVRSGDVVELVQEGDEGLWYVRDPTTGKEGWVPASSLSVRLGPSGSAQCLSSSGKAHVPRAHP

SEQ ID NO: 8465 - protein, 94 aa, Homo Sapiens
MEHLEGVINKPEAEMSPQELQLHYFKMHDYDGNNLLDGLELSTAITHVHKEEGSEQAPLMSEDELINIIDGVLRDDDKNNDGYIDYAEFAKSLQ

SEQ ID NO: 8466 - protein, 94 aa, Homo Sapiens; identical to SEQ ID NO: 8465

SEQ ID NO: 8467 - protein, 94 aa, Homo Sapiens; identical to SEQ ID NO: 8465

SEQ ID NO: 8468 - protein, 127 aa, Homo Sapiens
MLSVCSCRTSSGMRSQWPSARQRSSSLSTFRHIMEHLEGVINKPEAEMSPQELQLHYFKMHDYDGNNLLDGLELSTAITHVHKEEGSEQAPLMSEDELINIIDGVLRDDDKNNDGYIDYAEFAKSLQ

SEQ ID NO: 8469 - protein, 61 aa, Homo Sapiens
MTMRSLLRTPFLCGLLWAFCAPGARAEEPAASFSQPGSMGLDKNTVHDQEHIMEHLEGVIN

SEQ ID NO: 8470 - protein, 146 aa, Homo Sapiens
MTMRSLLRTPFLCGLLWAFCAPGARAEEPAASFSQPGSMGLDKNTVHDQEHIMEHLEGVINKPEAEMSPQELQLHYFKMHDYDGNNLLDGLELSTAITHVHKEEGSEQAPLMSEDELINIIDGVLRDDDKNNDGYIDYAEFAKSLQ

SEQ ID NO: 8471 - protein, 146 aa, Homo Sapiens; identical to SEQ ID NO: 8470

SEQ ID NO: 8472 - protein, 146 aa, Homo Sapiens; identical to SEQ ID NO: 8470

SEQ ID NO: 8473 - protein, 146 aa, Homo Sapiens; identical to SEQ ID NO: 8470

SEQ ID NO: 8474 - protein, 146 aa, Homo Sapiens; identical to SEQ ID NO: 8470

SEQ ID NO: 8475 - protein, 146 aa, Homo Sapiens; identical to SEQ ID NO: 8470

SEQ ID NO: 8476 - protein, 90 aa, Homo Sapiens
SQPGSMGLDKNTVHDQEHIMEHLEGVINKPEAEMSPQELQLHYFKMHDYDGNNLLDGLELSTAITHVHKEANLCTELTLRRTGTFPIKEE

SEQ ID NO: 8477 - protein, 156 aa, Homo Sapiens
GPVGPQRVAEAGGGQLGSTAQGKCDKDNTEKDITQATNSHFTHGEMQDQSIWGNPSDGELIRTQPQRLPQLQTSAQVPSGEEIGKIKNGHTGLSNGNGIHHGAKHGSADNRKLSAPVSQKMHRKIQSSLSVNSDISKKSKVNAVFSQKTGSSPEVC

SEQ ID NO: 8478 - protein, 135 aa, Homo Sapiens
MQDQSIWGNPSDGELIRTQPQRLPQLQTSAQVPSGEEIGKIKNGHTGLSNGNGIHHGAKHGSADNRKLSAPVSQKMHRKIQSSLSVNSDISKKSKVNAVFSQKTGSSPEDCCVHCILACLFCEFLTLCNIVLGQA

SEQ ID NO: 8479 - protein, 246 aa, Homo Sapiens
MSGAGEALAPGPVGPQRVAEAGGGQLGSTAQGKCDKDNTEKDITQATNSHFTHGEMQDQSIWGNPSDGELIRTQPQRLPQLQTSAQVPSGEEIGKIKNGHTGLSNGNGIHHGAKHGSADNRKLSAPVSQKMHRKIQSSLSVNSDISKKSKVNAVFSQKTGSSPEDCCVHCILACLFCEFLTLCNIVLGQASCGICTSEACCCCCGDEMGDDCNCPCDMDCGIMDACCESSDCLEICMECCGICFPS

SEQ ID NO: 8480 - protein, 43 aa, Homo Sapiens
MSGAGEALAPGPVGPQRVAEAGGGQLGSTAQGLFSRSRTAAAL

SEQ ID NO: 8481 - protein, 43 aa, Homo Sapiens; identical to SEQ ID NO: 8480

SEQ ID NO: 8482 - protein, 156 aa, Homo Sapiens
PQRVAEAGGGQLGSTAQGKCDKDNTEKDITQATNSHFTHGEMQDQSIWGNPSDGELIRTQPQRLPQLQTSAQVPSGEEIGKIKNGHTGLSNGNGIHHGAKHGSADNRKLSAPVSQKMHRKIQSSLSVNSDISKKSKVNAVFSQKTGSSPEDKQEFW

SEQ ID NO: 8483 - protein, 355 aa, Homo Sapiens
VRGVRAATAAAVAATAASGLSRREAGGRAGAAAAVVRPPGRKCGRCRRLANFPGRKRRRRRRKGLGATTGGCGEAVSSLHPAPHSPSSVRPAGRRARRQRRGAGSAERPMSGAGEALAPGPVGPQRVAEAGGGQLGSTAQGKCDKDNTEKDITQATNSHFTHGEMQDQSIWGNPSDGELIRTQPQRLPQLQTSAQVPSGEEIGKIKNGHTGLSNGNGIHHGAKHGSADNRKLSAPVSQKMHRKIQSSLSVNSDISKKSKVNAVFSQKTGSSPEDCCVHCILACLFCEFLTLCNIVLGQASCGICTSEACCCCCGDEMGDDCNCPCDMDCGIMDACCESSDCLEICMECCGICFPS

SEQ ID NO: 8484 - protein, 355 aa, Homo Sapiens; identical to SEQ ID NO: 8483

SEQ ID NO: 8485 - protein, 973 aa, Homo Sapiens
MEVTCLLLLALIPFHCRGQGVYAPAQAQIVHAGQACVVKEDNISERVYTIREGDTLMLQCLVTGHPRPQVRWTKTAGSASDKFQETSVFNETLRIERIARTQGGRYYCKAENGVGVPAIKSIRVDVQYLDEPMLTVHQTVSDVRGNFYQEKTVFLRCTVNSNPPARFIWKRGSDTLSHSQDNGVDIYEPLYTQGETKVLKLKNLRPQDYASYTCQVSVRNVCGIPDKAITFRLTNTTAPPALKLSVNETLVVNPGENVTVQCLLTGGDPLPQLQWSHGPGPLPLGALAQGGTLSIPSVQARDSGYYNCTATNNVGNPAKKTVNLLVRSMKNATFQITPDVIKESENIQLGQDLKLSCHVDAVPQEKVTYQWFKNGKPARMSKRLLVTRNDPELPAVTSSLELIDLHFSDYGTYLCMASFPGAPVPDLSVEVNISSETVPPTISVPKGRAVVTVREGSPAELQCEVRGKPRPPVLWSRVDKEAALLPSGLPLEETPDGKLRLERVSRDMSGTYRCQTARYNGFNVRPREAQVQLNVQFPPEVEPSSQDVRQALGRPVLLRCSLLRGSPQRIASAVWRFKGQLLPPPPVVPAAAEAPDHAELRLDAVTRDSSGSYECSVSNDVGSAACLFQVSAKAYSPEFYFDTPNPTRSHKLSKNYSYVLQWTQREPDAVDPVLNYRLSIRQLNQHNAVVKAIPVRRVEKGQLLEYILTDLRVPHSYEVRLTPYTTFGAGDMASRIIHYTEPINSPNLSDNTCHFEDEKICGYTQDLTDNFDWTRQNALTQNPKRSPNTGPPTDISGTPEGYYMFIETSRPRELGDRARLVSPLYNASAKFYCVSFFYHMYGKHIGSLNLLVRSRNKGALDTHAWSLSGNKGNVWQQAHVPISPSGPFQIIFEGVRGPGYLGDIAIDDVTLKKGECPRKQTDPNKGARREGGGGAESGGSCAWRGFLSVEGGCLGLNRGSECLSDGNHVALTV

SEQ ID NO: 8486 - protein, 955 aa, Homo Sapiens
MEVTCLLLLALIPFHCRGQGVYAPAQAQIVHAGQACVVKEDNISERVYTIREGDTLMLQCLVTGHPRPQVRWTKTAGSASDKFQETSVFNETLRIERIARTQGGRYYCKAENGVGVPAIKSIRVDVQYLDEPMLTVHQTVSDVRGNFYQEKTVFLRCTVNSNPPARFIWKRGSDTLSHSQDNGVDIYEPLYTQGETKVLKLKNLRPQDYASYTCQVSVRNVCGIPDKAITFRLTNTTAPPALKLSVNETLVVNPGENVTVQCLLTGGDPLPQLQWSHGPGPLPLGALAQGGTLSIPSVQARDSGYYNCTATNNVGNPAKKTVNLLVRSMKNATFQITPDVIKESENIQLGQDLKLSCHVDAVPQEKVTYQWFKNGKPARMSKRLLVTRNDPELPAVTSSLELIDLHFSDYGTYLCMASFPGAPVPDLSVEVNISSETVPPTISVPKGRAVVTVREGSPAELQCEVRGKPRPPVLWSRVDKEAALLPSGLPLEETPDGKLRLERVSRDMSGTYRCQTARYNGFNVRPREAQVQLNVQFPPEVEPSSQDVRQALGRPVLLRCSLLRGSPQRIASAVWRFKGQLLPPPPVVPAAAEAPDHAELRLDAVTRDSSGSYECSVSNDVGSAACLFQVSAKAYSPEFYFDTPNPTRSHKLSKNYSYVLQWTQREPDAVDPVLNYRLSIRQLNQHNAVVKAIPVRRVEKGQLLEYILTDLRVPHSYEVRLTPYTTFGAGDMASRIIHYTEPINSPNLSDNTCHFEDEKICGYTQDLTDNFDWTRQNALTQNPKRSPNTGPPTDISGTPEGYYMFIETSRPRELGDRARLVSPLYNASAKFYCVSFFYHMYGKHIGSLNLLVRSRNKGALDTHAWSLSGNKGNVWQQAHVPISPSGPFQIIFEGVRGPGYLGDIAIDDVTLKKGECPRKQTDPNKVVVMPGSGAPCQSSPQLWGPMAIFLLALQR

SEQ ID NO: 8487 - protein, 77 aa, Homo Sapiens
MLQCLVTGHPRPQVRWTKTAGSASDKFQETSVFNETLRIERIARTQGGRYYCKAENGVGVPAIKSIRVDVQYLDEPM

SEQ ID NO: 8488 - protein, 129 aa, Homo Sapiens
MLQCLVTGHPRPQVRWTKTAGSASDKFQETSVFNETLRIERIARTQGGRYYCKAENGVGVPAIKSIRVDVQYLDEPMLTVHQTVSDVRGNFYQEKTVFLRCTVNSNPPARFIWKRGSDTLSHSQDNGVD

SEQ ID NO: 8489 - protein, 87 aa, Homo Sapiens
  misc_feature (1)..(1): Xaa can be any naturally occurring amino acid
XHKLSKNYSYVLQWTQREPDAVDPVLNYRLSIRQLNQHNAVVKAIPVRRVEKGQLLEYILTDLRVPHSYETTPATLRMRRSVAIPRT

SEQ ID NO: 8490 - protein, 160 aa, Homo Sapiens
  misc_feature (1)..(1): Xaa can be any naturally occurring amino acid
XNQHNAVVKAIPVRRVEKGQLLEYILTDLRVPHSYEVRLTPYTTFGAGDMASRIIHYTEHNTCHFEDEKICGYTQDLTDNFDWTRQNALTQNPKRSPNTGPPTDISGTPEGYYMFIETSRPRELGDRARLVSPLYNASAKFYCVSFFYHMYGKHIGSLNL

SEQ ID NO: 8491 - protein, 87 aa, Homo Sapiens
MQHRGFLLLTLLALLALTSAVAKKKADCKYKFENWGACDGGTGTKVRQGTLKKARYNAQCQETIRVTKPCTPKTKAKAKAKKGKGKD

SEQ ID NO: 8492 - protein, 49 aa, Homo Sapiens
MQHRGFLLLTLLALLALTSAVAKKKDKVKKGGPGSECAEWAWGPCTPSS

SEQ ID NO: 8493 - protein, 131 aa, Homo Sapiens
MQHRGFLLLTLLALLALTSAVAKKKDKVKKGGPGSECAEWAWGPCTPSSKDCGVGFREGTCGAQTQRIRCRVPCNWKKEFGADCKYKFENWGACDGGTGTKVRQGTLKKARYNAQCQETIRVTKPCTPKTK

SEQ ID NO: 8494 - protein, 143 aa, Homo Sapiens
MQHRGFLLLTLLALLALTSAVAKKKDKVKKGGPGSECAEWAWGPCTPSSKDCGVGFREGTCGAQTQRIRCRVPCNWKKEFGADCKYKFENWGACDGGTGTKVRQGTLKKARYNAQCQETIRVTKPCTPKTKAKAKAKKGKGKD

SEQ ID NO: 8495 - protein, 143 aa, Homo Sapiens; identical to SEQ ID NO: 8494

SEQ ID NO: 8496 - protein, 143 aa, Homo Sapiens; identical to SEQ ID NO: 8494

SEQ ID NO: 8497 - protein, 143 aa, Homo Sapiens; identical to SEQ ID NO: 8494

SEQ ID NO: 8498 - protein, 143 aa, Homo Sapiens; identical to SEQ ID NO: 8494

SEQ ID NO: 8499 - protein, 156 aa, Homo Sapiens
MQHRGFLLLTLLALLALTSAVAKKKDKVKKGGPGSECAEWAWGPCTPSSKDCGVGFREGTCGAQTQRIRCRVPCNWKKEFGADCKYKFENWGACDGGTGTKVRQGTLKKARYNAQCQETIRVTKPCTPKTKAKAKGQRKEKGVGLSRGAAPPPPRL

SEQ ID NO: 8500 - protein, 152 aa, Homo Sapiens
MQHRGFLLLTLLALLALTSAVAKKKEEGALQCSVPGDHPRHQALHPQDQSKGQSQEREGKGLDAKPGCQGAPGVTWGLAHALPLPGPRCDPPVPSVCSLALINHALPCPSHSPAPPLSAQSGEGQGILGSLSLPQSNVSPRARFCSSPQFHY

SEQ ID NO: 8501 - protein, 123 aa, Homo Sapiens
MGVTCVSQMPVAEGKSVQQTVELLTRKLEMLGAEKQGTFCVDCETYHTAASTLGSQGQTGKLMYVMHNSEYPLSCFALFENGPCLIADTNFDVLMVKLKGFFQSAKASKIETRGTRWSMAPVW

SEQ ID NO: 8502 - protein, 212 aa, Homo Sapiens
MGVTCVSQMPVAEGKSVQQTVELLTRKLEMLGAEKQGTFCVDCETYHTAASTLGSQGQTGKLMYVMHNSEYPLSCFALFENGPCLIADTNFDVLMVKLKGFFQSAKASKIETRGTRYQYCDFLVKVGTVTMGPSARGISVEVEYGPCVVASDCWSLLLEFLQSFLGSHTPGAPAVFGNRHDAVYGPADTMVQYMELFNKIRKQQQVPVAGIR

SEQ ID NO: 8503 - protein, 145 aa, Homo Sapiens
MGVTCVSQMPVAEGKSVQQTVELLTRKLEMLGAEKQGTFCVDCETYHTAASTLGSQGQTGKLMYVMHNSEYPLSCFALFENGPCLIADTNFDVLMVKLKGFFQSAKASKIETRGTRYQYCDFLVKVGTVTMGPSARGISVEVRPW

SEQ ID NO: 8504 - protein, 61 aa, Homo Sapiens [sequence omitted]

SEQ ID NO: 8505 - protein, 140 aa, Homo Sapiens
MPVAEGKSVQQTVELLTRKLEMLGAEKQGTFCVDCETYHTAASTLGSQGQTGKLMYVMHNSEYPLSCFALFENGPCLIADTNFDVLMVKLKGFFQSAKASKIETRGTRYQYCDFLVKVGTVTMGPSARGISVEVEYGPCV

SEQ ID NO: 8506 - protein, 1140 aa, Homo Sapiens
MVISLNSCLSFICLLLCHWIGTASPLNLEDPNVCSHWESYSVTVQESYPHPFDQIYYTSCTDILNWFKCTRHRVSYRTAYRHGEKTMYRRKSQCCPGFYESGEMCVPHCADKCVHGRCIAPNTCQCEPGWGGTNCSSACDGDHWGPHCTSRCQCKNGALCNPITGACHCAAGFRGWRCEDRCEQGTYGNDCHQRCQCQNGATCDHVTGECRCPPGYTGAFCEDLCPPGKHGPQCEQRCPCQNGGVCHHVTGECSCPSGWMGTVCGQPCPEGRFGKNCSQECQCHNGGTCDAATGQCHCSPGYTGERCQDECPVGTYGVLCAETCQCVNGGKCYHVSGACLCEAGFAGERCEARLCPEGLYGIKCDKRCPCHLENTHSCHPMSGECACKPGWSGLYCNETCSPGFYGEACQQICSCQNGADCDSVTGKCTCAPGFKGIDCSTPCPLGTYGINCSSRCGCKNDAVCSPVDGSCTCKAGWHGVDCSIRCPSGTWGFGCNLTCQCLNGGACNTLDGTCTCAPGWRGEKCELPCQDGTYGLNCAERCDCSHADGCHPTTGHCRCLPGWSGVHCDSVCAEGRWGPNCSLPCYCKNGASCSPDDGICECAPGFRGTTCQRICSPGFYGHRCSQTCPQCVHSSGPCHHITGLCDCLPGFTGALCNEVCPSGRFGKNCAGICTCTNNGTCNPIDRSCQCYPGWIGSDCSQPCPPAHWGPNCIHTCNCHNGAFCSAYDGECKCTPGWTGLYCTQRCPLGFYGKDCALICQCQNGADCDHISGQCTCRTGFMGRHCEQKCPSGTYGYGCRQICDCLNNSTCDHITGTCYCSPGWKGARCDQAGVIIVGNLNSLSRTSTALPADSYQIGAIAGIIILVLVVLFLLALFIIYRHKQKGKESSMPAVTYTPAMRVVNADYTISGTLPHSNGGNANSHYFTNPSYHTLTQCATSPHVNNRDRMTVTKSKNNQLFVNLKNVNPGKRGPVGDCTGTLPADWKHGGYLNELGAFGLDRSYMGKSLKDLGKNSEYNSSNCSLSSSENPYATIKDPPVLIPKSSECGYVEMKSPARRDSPYAEINNSTSANRNVYEVEPTVSVVQGVFSNNGRLSQDPYDLPKNSHIPCHYDLLPVRDSSSSPKQEDSGGSSSNSSSSSE

SEQ ID NO: 8507 - protein, 567 aa, Homo Sapiens
MVISLNSCLSFICLLLCHWIGTASPLNLEDPNVCSHWESYSVTVQESYPHPFDQIYYTSCTDILNWFKCTRHRVSYRTAYRHGEKTMYRRKSQCCPGFYESGEMCVPHCADKCVHGRCIAPNTCQCEPGWGGTNCSSACDGDHWGPHCTSRCQCKNGALCNPITGACHCAAGFRGWRCEDRCEQGTYGNDCHQRCQCQNGATCDHVTGECRCPPGYTGAFCEDLCPPGKHGPQCEQRCPCQNGGVCHHVTGECSCPSGWMGTVCGQPCPEGRFGKNCSQECQCHNGGTCDAATGQCHCSPGYTGERCQDECPVGTYGVLCAETCQCVNGGKCYHVSGACLCEAGFAGERCEARLCPEGLYGIKCDKRCPCHLENTHSCHPMSGECACKPGWSGLYCNETCSPGFYGEACQQICSCQNGADCDSVTGKCTCAPGFKGIDCSTPCPLGTYGINCSSRCGCKNDAVCSPVDGSCTCKAGWHGVDCSIRCPSGTWGFGCNLTCQCLNGGACNTLDGTCTCAPGWRGEKCELPCQDGTYGLNCAERCDCSHADGCHPTTGHCRCLPGWSGLF

SEQ ID NO: 8508 - protein, 1140 aa, Homo Sapiens; identical to SEQ ID NO: 8506

SEQ ID NO: 8509 - protein, 567 aa, Homo Sapiens; identical to SEQ ID NO: 8507

SEQ ID NO: 8510 - protein, 1229 aa, Homo Sapiens
MGASRDRGLAALWCLGLLGGLARVAGTHYRYLWRGCYPCHLGQAGYPVSAGDQRPDVDECRTHNGGCQHRCVNTPGSYLCECKPGFRLHTDSRTCLAINSCALGNGGCQHHCVQLTITRHRCQCRPGFQLQEDGRHCVRRSPCANRNGSCMHRCQVVRGLARCECHVGYQLAADGKACEDVDECAAGLAQCAHGCLNTQGSFKCVCHAGYELGADGRQCYRIEMEIVNSCEANNGGCSHGCSHTSAGPLCTCPRGYELDTDQRTCIDVDDCADSPCCQQVCTNNPGGYECGCYAGYRLSADGCGCEDVDECASSRGGCEHHCTNLAGSFQCSCEAGYRLHEDRRGCSPLEEPMVDLDGELPFVRPLPHIAVLQDELPQLFQDDDVGADEEEAELRGEHTLTEKFVCLDDSFGHDCSLTCDDCRNGGTCLLGLDGCDCPEGWTGLICNETCPPDTFGKNCSFSCSCQNGGTCDSVTGACRCPPGVSGTNCEDGCPKGYYGKHCRKKCNCANRGRCHRLYGACLCDPGLYGRFCHLTCPPWAFGPGCSEECQCVQPHTQSCDKRDGSCSCKAGFRGERCQAECELGYFGPGCWQACTCPVGVACDSVSGECGKRCPAGFQGEDCGQECPVGTFGVNCSSSCSCGGAPCHGVTGQCRCPPGRTGEDCEADCPEGRWGLGCQEICPACQHAARCDPETGACLCLPGFVGSRCQDVCPAGWYGPSCQTRCSCANDGHCHPATGHCSCAPGWTGFSCQRACDTGHWGPDCSHPCNCSAGHGSCDAISGLCLCEAGYVGPRCEQQCPQGHFGPGCEQRCQCQHGAACDHVSGACTCPAGWRGTFCEHACPAGFFGLDCRSACNCTAGAACDAVNGSCLCPAGRRGPRCAEKCLPRDVRAGCRHSGGCLNGGLCDPHTGRCLCPAGWTGDKCQSPCLRGWFGEACAQRCSCPPGAACHHVTGACRCPPGFTGSGCEQGCPPGRYGPGCEQLCGCLNGGSCDAATGACRCPTGFLGTDCNLTCPQGRFGPNCTHVCGCGQGAACDPVTGTCLCPPGRAGVRCERGCPQNRFGVGCEHTCSCRNGGLCHASNGSCSCGLGWTGRHCELACPPGRYGAACHLECSCHNNSTCEPATGTCRCGPGFYGQACEHRRSGATCNLDCRRGQFGPSCTLHCDCGGGADCDPVSGQCHCVDGYMGPTCREGGPLRLPENPSLAQGSAGTLPASSRPTSRSGGPARH

SEQ ID NO: 8511 - protein, 1541 aa, Homo Sapiens
MSFLEEARAAGRAVVLALVLLLLPAVPVGASVPPRPLLPLQPGMPHVCAEQELTLVGRRQPCVQALSHTVPVWKAGCGWQAWCVGHERRTVYYMGYRQVYTTEARTVLRCCRGWMQQPDEEGCLSAECSASLCFHGGRCVPGSAQPCHCPPGFQGPRCQYDVDECRTHNGGCQHRCVNTPGSYLCECKPGFRLHTDSRTCLAINSCALGNGGCQHHCVQLTITRHRCQCRPGFQLQEDGRHCVRRSPCANRNGSCMHRCQVVRGLARCECHVGYQLAADGKACEDVDECAAGLAQCAHGCLNTQGSFKCVCHAGYELGADGRQCYRIEMEIVNSCEANNGGCSHGCSHTSAGPLCTCPRGYELDTDQRTCIDVDDCADSPCCQQVCTNNPGGYECGCYAGYRLSADGCGCEDVDECASSRGGCEHHCTNLAGSFQCSCEAGYRLHEDRRGCSPLEEPMVDLDGELPFVRPLPHIAVLQDELPQLFQDDDVGADEEEAELRGEHTLTEKFVCLDDSFGHDCSLTCDDCRNGGTCLLGLDGCDCPEGWTGLICNETCPPDTFGKNCSFSCSCQNGGTCDSVTGACRCPPGVSGTNCEDGCPKGYYGKHCRKKCNCANRGRCHRLYGACLCDPGLYGRFCHLTCPPWAFGPGCSEECQCVQPHTQSCDKRDGSCSCKAGFRGERCQAECELGYFGPGCWQACTCPVGVACDSVSGECGKRCPAGFQGEDCGQECPVGTFGVNCSSSCSCGGAPCHGVTGQCRCPPGRTGEDCEADCPEGRWGLGCQEICPACQHAARCDPETGACLCLPGFVGSRCQDVCPAGWYGPSCQTRCSCANDGHCHPATGHCSCAPGWTGFSCQRACDTGHWGPDCSHPCNCSAGHGSCDAISGLCLCEAGYVGPRCEQQCPQGHFGPGCEQRCQCQHGAACDHVSGACTCPAGWRGTFCEHACPAGFFGLDCRSACNCTAGAACDAVNGSCLCPAGRRGPRCAETCPAHTYGHNCSQACACFNGASCDPVHGQCHCAPGWMGPSCLQACPAGLYGDNCRHSCLCQNGGTCDPVSGHCACPEGWAGLACEKECLPRDVRAGCRHSGGCLNGGLCDPHTGRCLCPAGWTGDKCQSPCLRGWFGEACAQRCSCPPGAACHHVTGACRCPPGFTGSGCEQACPPGSFGEDCAQMCQCPGENPACHPATGTCSCAAGYHGPSCQQRCPPGRYGPGCEQLCGCLNGGSCDAATGACRCPTGFLGTDCNLTCPQGRFGPNCTHVCGCGQGAACDPVTGTCLCPPGRAGVRCERGCPQNRFGVGCEHTCSCRNGGLCHASNGSCSCGLGWTGRHCELACPPGRYGAACHLECSCHNNSTCEPATGTCRCGPGFYGQACEHPCPPGFHGAGCQGLCWCQHGAPCDPISGRCLCPAGFHGHFCERGCEPGSFGEGCHQRCDCDGGAPCDPVTGLCLCPPGRSGATCNLDCRRGQFGPSCTLHCDCGGGADCDPVSGQCHCVDGYMGPTCREGGPLRLPENPSLAQGSAGTLPASSRPTSRSGGPARH

SEQ ID NO: 8512 - protein, 1323 aa, Homo Sapiens
MSFLEEARAAGRAVVLALVLLLLPAVPVGASVPPRPLLPLQPGMPHVCAEQELTLVGRRQPCVQALSHTVPVWKAGCGWQAWCVGHERRTVYYMGYRQVYTTEARTVLRCCRGWMQQPDEEGCLSDVGECANANGGCAGRCRDTVGGFYCRWPPPSHQLQGDGETCQDVDECRTHNGGCQHRCVNTPGSYLCECKPGFRLHTDSRTCLAINSCALGNGGCQHHCVQLTITRHRCQCRPGFQLQEDGRHCVRRSPCANRNGSCMHRCQVVRGLARCECHVGYQLAADGKACEDVDECAAGLAQCAHGCLNTQGSFKCVCHAGYELGADGRQCYRIEMEIVNSCEANNGGCSHGCSHTSAGPLCTCPRGYELDTDQRTCIDVDDCADSPCCQQVCTNNPGGYECGCYAGYRLSADGCGCEDVDECASSRGGCEHHCTNLAGSFQCSCEAGYRLHEDRRGCSPLEEPMVDLDGELPFVRPLPHIAVLQDELPQLFQDDDVGADEEEAELRGEHTLTEKFVCLDDSFGHDCSLTCDDCRNGGTCLLGLDGCDCPEGWTGLICNETCPPDTFGKNCSFSCSCQNGGTCDSVTGACRCPPGVSGTNCEDGCPKGYYGKHCRKKCNCANRGRCHRLYGACLCDPGLYGRFCHLTCPPWAFGPGCSEECQCVQPHTQSCDKRDGSCSCKAGFRGERCQAECELGYFGPGCWQACTCPVGVACDSVSGECGKRCPAGFQGEDCGQECPVGTFGVNCSSSCSCGGAPCHGVTGQCRCPPGRTGEDCEADCPEGRWGLGCQEICPACQHAARCDPETGACLCLPGFVGSRCQDVCPAGWYGPSCQTRCSCANDGHCHPATGHCSCAPGWTGFSCQRACDTGHWGPDCSHPCNCSAGHGSCDAISGLCLCEAGYVGPRCEQQCPQGHFGPGCEQRCQCQHGAACDHVSGACTCPAGWRGTFCEHACPAGFFGLDCRSACNCTAGAACDAVNGSCLCPAGRRGPRCAETCPAHTYGHNCSQACACFNGASCDPVHGQCHCAPGWMGPSCLQACPAGLYGDNCRHSCLCQNGGTCDPVSGHCACPEGWAGLACEKECLPRDVRAGCRHSGGCLNGGLCDPHTGRCLCPAGWTGDKCQSPCAKGTFGPHCEGRCACRWGGPCHLATGACLCPPGWRGAPGVRMPACGAGLERPVPSAAAARLALPATTSLGPAAVPLASLAPAASRPAHPAALGRTVRRCASVPVRTRPATLPPGPAHVLLATTAPAASNDVRPGGMGQAVNSCVGVSTGAPVMRPRGPAAAPLGSSGRTATSPVRRAASAPTAPTCVGVGRGRPATL

SEQ ID NO: 8513 - protein, 248 aa, Homo Sapiens
  misc_feature (1)..(1): Xaa can be any naturally occurring amino acid
XDAATGACRCPTGFLGTDCNLTCPQGRFGPNCTHVCGCGQGAACDPVTGTCLCPPGRAGVRCERGCPQNRFGVGCEHTCSCRNGGLCHASNGSCSCGLGWTGRHCELACPPGRYGAACHLECSCHNNSTCEPATGTCRCGPGFYGQACEHPCPPGFHGAGCQGLCWCQHGAPCDPISGRCLCPAGFHGHFCERDCRRGQFGPSCTLHCDCGGGADCDPVSGQCHCVDGYMGPTCREGGPLRLPENPSL

SEQ ID NO: 8514 - protein, 1274 aa, Homo Sapiens
MAVRQAATAGTPGPRREEEAALLFERAHYRHDPRWLLPVTPRLCLACALELLPDPGVSLVRKKHMLSCFQDALVRHTSLVTQLVSQDQRVCIHFISVLFGLLCSMEDGSVTDLCIEVLIQITTQLKLEQTIRCLLDECHKELCNMPSMRGSLATLTLLGKLVDAIPALADELVMEHGNLMEHLLRGLVYPSEGIQASVCYLYGKLYSSPVAAEMLSGHFREKLFPLFLSILDGAQTKELQINCLGLLRQLLKYDLFVSMIMNQDGLGESAKNIEGSSGNTSLPLVLKKLLLSRDETLQVASAHCITAVLVHSPAKHASAFIHADIPEFLFEHLSSSSEVLVWSSCNCLTLLVEEPLFFSKCHTVYGIEAVVRSLQGSLKMNNIELHKQGLLLFAEILTRQPEEIKLFTSSAMCRDAGRALQEAVSSPVLEVAAEALKATSAFLRKDHQSTPPVQYGELQALLEAMLNRCAEFSQTLLSRRPLGHASSRDSEKAILQRGKFLLSTLEGFRSACRLAIEFQSEPSAQENPFTAPSAKKEDTLEAFSEFLLSACDSLCIPMVMRHLEQTTHPALMEVFLSILHNLFVIVPHMKEKFSKKLASSSFIRLTLELKARFCSGLSHSALNQVCSNFLYYMCLNLLSAPEKTGPPSKEELSAVSELLQHGLPQISSRSPESLAFLSDRQYMEGAARQRQYCILLLFYLAYIHEDRFVSEAELFEAVQSFLLSLQDQGERPPLVVFKASIYLLAICQDKDNTLRETMVSAIRKFLEGIPDLQLVYTHHPLLLRFFLLYPELMSRYGHRVLELWFFWEESSYEELDDVTSAGQPALPASLVVLFQLLRSIPSILLILLDLIYSSPVDTAHKVLISLRTFLRRNEDIQVGGLIRGHFLLILQRLLVEHGASPSGASGNLPLLLSLLSLMQLRNVSEQELDSVAMKLLHQVSKLCGKCSPTDVDILQPSFNFLYWSLHQTTPSSQKRAAAVLLSSTGLMELLEKMLALTLAKADSPRTALLCSAWLLTASFSAQQHKGSLQVHQTLSVEMDQVLKALSFPKKKAALLSAAILCFLRTALRQSFSSALVALVPSGAQPLPATKDTVLAPLRMSQVRSLVIGLQNLLVQKDPLLSQACVGCLEALLDYLDARSPDIALHVASQPWNRFLLFTLLDAGENSFLRPEILRLMTLFMRYRSSSVLSHEEVGDVLQGVALADLSTLSNTTLQALHGFFQQLQSMGHLADHSMAQTLQASLEGLPPSTSSGQPPLQDMLCLGGVAVSLSHIRN

SEQ ID NO: 8515 - protein, 238 aa, Homo Sapiens
MLALTLAKADSPRTALLCSAWLLTASFSAQQHKGSLQVHQTLSVEMDQVLKALSFPKKKAALLSAAILCFLRTALRQSFSSALVALVPSGAQPLPATKDTVLAPLRMSQVRSLVIGLQNLLVQKDPLLSQACVGCLEALLDYLDARSPDIALHVASQPWNRFLLFTLLDAGENSFLRPEILRLMTLLQSMGHLADHSMAQTLQASLEGLPPSTSSGQPPLQDMLCLGGVAVSLSHIRN

SEQ ID NO: 8516 - protein, 506 aa, Homo Sapiens
MNQDGLGESAKNIEGSSGNTSLPLVLKKLLLSRDETLQVASAHCITAVLVHSPAKHASAFIHADIPEFLFEHLSSSSEVLVWSSCNCLTLLVEEPLFFSKCHTVYGIEAVVRSLQGSLKMNNIELHKQGLLLFAEILTRQPEEIKLFTSSAMCRDAGRALQEAVSSPVLEVAAEALKATSAFLRKDHQSTPPVQYGELQALLEAMLNRCAEFSQTLLSRRPLGHASSRDSEKAILQRGKFLLSTLEGFRSACRLAIEFQSEPSAQENPFTAPSAKKEDTLEAFSEFLLSACDSLCIPMVMRHLEQTTHPALMEVFLSILHNLFVIVPHMKEKFSKKLASSSFIRLTLELKARFCSGLSHSALNQVCSNFLYYMCLNLLSAPEKTGPPSKEELSAVSELLQHGLPQISSRSPESLAFLSDRQYMEGAARQRQYCILLLFYLAYIHEDRFVSEAELFEAVQSFLLSLQDQGERPPLVVFKASIYLLAICQDKDNTLREQLHCSLISIS

SEQ ID NO: 8517 - protein, 63 aa, Homo Sapiens
  misc_feature (1)..(1): Xaa can be any naturally occurring amino acid
XRSSSVLSHEELQSMGHLADHSMAQTLQASLEGLPPSTSSGQPPLQDMLCLGGVAVSLSHIRN

SEQ ID NO: 8518 - protein, 385 aa, Homo Sapiens
MDVQKWYLRTSKLALALAIIRSKPADKSSREYTEHLAMLLSEEQSKWRSKVEILEAEVMQLRQKLLVSRLCSGSFKSGYVSSQLEAQEPKSSESTLTSMEDSGCDLSNEQRTESSDLSQHFVESCTPTHFPPLPLVKRPCAILQNPLSSHMQFLQYLLELKNLTESGNLKRDLTHFEKDSSTVSDSVFQLLDGLITFYRNPKLPFSRFWTEAVGTLASLISDYNLSSHILKKCSKKLEEFEKTLLHAILGNNHINQFQVQHYVSQSLVTLGNCSLLRKSIISLLLSEVNGFADDLGAINQEQASYDVSRYENIFYLFWVLEQLLQKETEEGNTSSIGHDDQEIKKFLQKHDETIFQLSDAFPLFTFYLWRVGILLSSAQIETLRK

SEQ ID NO: 8519 - protein, 325 aa, Homo Sapiens
MAQGLRLQGSRRKGRHPLFPLLALIFEKCELATCTPREPGVAGGDVCSSESFNEDIAVFAKQIRAEKPLFSSNPELDNLMIQAIQVLRFHLLELEKVHELCDNFCHRYISCLKGKMPIDLVIDDREGGSKSDSEDITRSANLTDQPSWNRDHDDTASTRSGGTPGPSSGGHTSHSGDNSSEQGDGLDNSVASPSTGDDDDPDKDKKRHKKRGIFPKVATNIMRAWLFQHLTHPYPSEEQKKQLAQDTGLTILQVNNWFINARRRIVQPMIDQSNRAVSQGTPYNPDGQPMGGFVMDGQQHMGIRAPGPMSGMGMNMGMEGQWHYM

SEQ ID NO: 8520 - protein, 390 aa, Homo Sapiens
MAQRYDDLPHYGGMDGVGIPSTMYGDPHAARSMQPVHHLNHGPPLHSHQYPHTAHTNAMAPSMGSSVNDALKRDKDAIYGHPLFPLLALIFEKCELATCTPREPGVAGGDVCSSESFNEDIAVFAKQIRAEKPLFSSNPELDNLMIQAIQVLRFHLLELEKVHELCDNFCHRYISCLKGKMPIDLVIDDREGGSKSDSEDITRSANLTDQPSWNRDHDDTASTRSGGTPGPSSGGHTSHSGDNSSEQGDGLDNSVASPSTGDDDDPDKDKKRHKKRGIFPKVATNIMRAWLFQHLTHPYPSEEQKKQLAQDTGLTILQVNNWFINARRRIVQPMIDQSNRAVSQGTPYNPDGQPMGGFVMDGQQHMGIRAPGPMSGMGMNMGMEGQWHYM

SEQ ID NO: 8521 - protein, 370 aa, Homo Sapiens
MAQRYDDLPHYGGMDGVGIPSTMYGDPHAARSMQPVHHLNHGPPLHSHQYPHTAHTNAMAPSMGSSVNDALKRDKDAIYGHPLFPLLALIFEKCELATCTPREPGVAGGDVCSSESFNEDIAVFAKQIRAEKPLFSSNPELDNLMIQAIQVLRFHLLELEKVHELCDNFCHRYISCLKGKMPIDLVIDDREGGSKSDSEDITRSANLTDQPSWNRDHDDTASTRSGGTPGPSSGGHTSHSGDNSSEQGDGLDNSVASPSTGDDDDPDKDKKRHKKRGIFPKVATNIMRAWLFQHLTHPYPSEEQKKQLAQDTGLTILQVNNWFINARRRIVQPMIDQSNRAGKSPIVTVFKSRKRKPSSSHSPGGPLPGK

SEQ ID NO: 8522 - protein, 378 aa, Homo Sapiens
MAQRYDDLPHYGGMDGVGIPSTMYGDPHAARSMQPVHHLNHGPPLHSHQYPHTAHTNAMAPSMGSSVNDALKRDKDAIYGHPLFPLLALIFEKCELATCTPREPGVAGGDVCSSESFNEDIAVFAKQIRAEKPLFSSNPELDNLMIQAIQVLRFHLLELEKVHELCDNFCHRYISCLKGKMPIDLVIDDREGGSKSDSEDITRSANLTDQPSWNRDHDDTASTRSGGTPGPSSGGHTSHSGDNSSEQGDGLDNSVASPSTGDDDDPDKDKKRHKKRGIFPKVATNIMRAWLFQHLTHPYPSEEQKKQLAQDTGLTILQVNNWFINARRRIVQPMIDQSNRAVSQGTPYNPDGQPMGGFVMDGQQHMGIRAPGKTLFLW

SEQ ID NO: 8523 - protein, 463 aa, Homo Sapiens
MQYDDLPHYGGMDGVGIPSTMYGDPHAARSMQPVHHLNHGPPLHSHQYPHTAHTNAMAPSMGSSVNDALKRDKDAIYGHPLFPLLALIFEKCELATCTPREPGVAGGDVCSSESFNEDIAVFAKQIRAEKPLFSSNPELDNLMIQAIQVLRFHLLELEKVHELCDNFCHRYISCLKGKMPIDLVIDDREGGSKSDSEDITRSANLTDQPSWNRDHDDTASTRSGGTPGPSSGGHTSHSGDNSSEQGDGLDNSVASPSTGDDDDPDKDKKRHKKRGIFPKVATNIMRAWLFQHLTHPYPSEEQKKQLAQDTGLTILQVNNWFINARRRIVQPMIDQSNRAVSQGTPYNPDGQPMGGFVMDGQQHMGIRAPGLQSMPGEYVARGGPMGVSMGQPSYTQPQMPPHPAQLRHGPPMHTYIPGHPHHPTVMMHGGPPHPGMPMSASSPTVLNTGDPTMSGQVMDIHAQ

SEQ ID NO: 8524 - protein, 121 aa, Homo Sapiens
  misc_feature (1)..(1): Xaa can be any naturally occurring amino acid
XLCFESPEISRPVFPCLQMIQAIQVLRFHLLELEKVHELCDNFCHRYISCLKGKMPIDLVIDDREGGSKSDSEDITRSANLTDQPSWNRDHDDTASTRSGGTPGPSSGGHTSHSGDNSSEQ

SEQ ID NO: 8525 - protein, 126 aa, Homo Sapiens
FPKVATNIMRAWLFQHLSAGAGRHVIAPSLRLPWSPSWGAQRRSEAPVLPDVCLGLGSPSPGPRWARPWGSDCGRPGRQSDSCWWLQHPYPSEEQKKQLAQDTGLTILQVNNWFINARRRIVQPMI

SEQ ID NO: 8526 - protein, 404 aa, Homo Sapiens
MARRYDELPHYPGIVDGPAALASFPETVPAVPGPYGPHRPPQPLPPGLDSDGLKREKDEIYGHPLFPLLALVFEKCELATCSPRDGAGAGLGTPPGGDVCSSDSFNEDIAAFAKQVRSERPLFSSNPELDNLMIQAIQVLRFHLLELEKGKMPIDLVIEDRDGGCREDFEDYPASCPSLPDQNNMWIRDHEDSGSVHLGTPGPSSGGLASQSGDNSSDQGDGLDTSVASPSSGGEDEDLDQERRRNKKRGIFPKVATNIMRAWLFQHLSRRSEAPVLPDVCLGLGSPSPGPRWARPWGSDCGRPGRQSDSCWWLQHPYPSEEQKKQLAQDTGLTILQVNNWFINARRRIVQPMIDQSNRTGQGAAFSPEGQPIGGYTETQPHVAVRPPGSVGMSLNLEGEWHYL

SEQ ID NO: 8527 - protein, 358 aa, Homo Sapiens
MARRYDELPHYPGIVDGPAALASFPETVPAVPGPYGPHRPPQPLPPGLDSDGLKREKDEIYGHPLFPLLALVFEKCELATCSPRDGAGAGLGTPPGGDVCSSDSFNEDIAAFAKQVRSERPLFSSNPELDNLMIQAIQVLRFHLLELEKGKMPIDLVIEDRDGGCREDFEDYPASCPSLPDQNNMWIRDHEDSGSVHLGTPGPSSGGLASQSGDNSSDQGDGLDTSVASPSSGGEDEDLDQERRRNKKRGIFPKVATNIMRAWLFQHLSHPYPSEEQKKQLAQDTGLTILQVNNWFINARRRIVQPMIDQSNRTGQGAAFSPEGQPIGGYTETQPHVAVRPPGSVGMSLNLEGEWHYL

SEQ ID NO: 8528 - protein, 375 aa, Homo Sapiens
MARRYDELPHYPGIVDGPAALASFPETVPAVPGPYGPHRPPQPLPPGLDSDGLKREKDEIYGHPLFPLLALVFEKCELATCSPRDGAGAGLGTPPGGDVCSSDSFNEDIAAFAKQVRSERPLFSSNPELDNLMIQAIQVLRFHLLELEKVHDLCDNFCHRYITCLKGKMPIDLVIEDRDGGCREDFEDYPASCPSLPDQNNMWIRDHEDSGSVHLGTPGPSSGGLASQSGDNSSDQGDGLDTSVASPSSGGEDEDLDQERRRNKKRGIFPKVATNIMRAWLFQHLSHPYPSEEQKKQLAQDTGLTILQVNNWFINARRRIVQPMIDQSNRTGQGAAFSPEGQPIGGYTETQPHVAVRPPGSVGMSLNLEGEWHYL

SEQ ID NO: 8529 - protein, 421 aa, Homo Sapiens
MARRYDELPHYPGIVDGPAALASFPETVPAVPGPYGPHRPPQPLPPGLDSDGLKREKDEIYGHPLFPLLALVFEKCELATCSPRDGAGAGLGTPPGGDVCSSDSFNEDIAAFAKQVRSERPLFSSNPELDNLMIQAIQVLRFHLLELEKVHDLCDNFCHRYITCLKGKMPIDLVIEDRDGGCREDFEDYPASCPSLPDQNNMWIRDHEDSGSVHLGTPGPSSGGLASQSGDNSSDQGDGLDTSVASPSSGGEDEDLDQERRRNKKRGIFPKVATNIMRAWLFQHLSRRSEAPVLPDVCLGLGSPSPGPRWARPWGSDCGRPGRQSDSCWWLQHPYPSEEQKKQLAQDTGLTILQVNNWFINARRRIVQPMIDQSNRTGQGAAFSPEGQPIGGYTETQPHVAVRPPGSVGMSLNLEGEWHYL

SEQ ID NO: 8530 - protein, 421 aa, Homo Sapiens; identical to SEQ ID NO: 8529

SEQ ID NO: 8531 - protein, 221 aa, Homo Sapiens [sequence omitted]

SEQ ID NO: 8532 - protein, 463 aa, Homo Sapiens
MCTLCTTMRGSYRRCPWISLSVCLSLCLCHCLLTPLSPSLFPPSQTLPSLPLGPPAHMSGISAWTGSSLPTEAAPGDLEGFKLGGSDTWGPQYDELPHYPGIVDGPAALASFPETVPAVPGPYGPHRPPQPLPPGLDSDGLKREKDEIYGHPLFPLLALVFEKCELATCSPRDGAGAGLGTPPGGDVCSSDSFNEDIAAFAKQVRSERPLFSSNPELDNLMIQAIQVLRFHLLELEKVHDLCDNFCHRYITCLKGKMPIDLVIEDRDGGCREDFEDYPASCPSLPDQNNMWIRDHEDSGSVHLGTPGPSSGGLASQSGDNSSDQGDGLDTSVASPSSGGEDEDLDQERRRNKKRGIFPKVATNIMRAWLFQHLSHPYPSEEQKKQLAQDTGLTILQVNNWFINARRRIVQPMIDQSNRTGQGAAFSPEGQPIGGYTETQPHVAVRPPGSVGMSLNLEGEWHYL

SEQ ID NO: 8533 - protein, 250 aa, Homo Sapiens
PPPSLSTPALPPWVAPPSTPVPPQVHDLCDNFCHRYITCLKGKMPIDLVIEDRDGGCREDFEDYPASCPSLPDQNNMWIRDHEDSGSVHLGTPGPSSGGLASQSGDNSSDQGDGLDTSVASPSSGGEDEDLDQERRRNKKRGIFPKVATNIMRAWLFQHLSHPYPSEEQKKQLAQDTGLTILQVNNWFINARRRIVQPMIDQSNRTGQGAAFSPEGQPIGGYTETQPHVAVRPPGSVGMSLNLEGEWHYL

SEQ ID NO: 8534 - protein, 178 aa, Homo Sapiens
  misc_feature (1)..(1): Xaa can be any naturally occurring amino acid
XGLSLPSQVRSERPLFSSNPELDNLGKMPIDLVIEDRDGGCREDFEDYPASCPSLPDQNNMWIRDHEDSGSVHLGTPGPSSGGLASQSGDNSSDQGDGLDTSVASPSSGGEDEDLDQERRRNKKRGIFPKVATNIMRAWLFQHLSRRSEAPVLPDVCLGLGSPSPGPRWARPWGSDCG

SEQ ID NO: 8535 - protein, 302 aa, Homo Sapiens
MRGPSGALWLLLALRTVLGGMEVRWCATSDPEQHKCGNMSEAFREAGIQPSLLCVRGTSADHCVQLIAAQEADAITLDGGAIYEAGKEHGLKPVVGEVYDQEVGTSYYAVAVVRRSSHVTIDTLKGVKSCHTGINRTVGWNVPVGYLVESGRLSVMGCDVLKAVSDYFGGSCVPGAGETSYSESLCRLCRGDSSGEGVCDKSPLERYYDYSGAFRCLAEGAGDVAFVKHSTVLENTDESPSRRQTWTRSEEEEGECPAHEEARRTMRSSAGQAWKWAPVHRPQDESDKGEFGKRAKSRDMLG

SEQ ID NO: 8536 - protein, 738 aa, Homo Sapiens
MRGPSGALWLLLALRTVLGGMEVRWCATSDPEQHKCGNMSEAFREAGIQPSLLCVRGTSADHCVQLIAAQEADAITLDGGAIYEAGKEHGLKPVVGEVYDQEVGTSYYAVAVVRRSSHVTIDTLKGVKSCHTGINRTVGWNVPVGYLVESGRLSVMGCDVLKAVSDYFGGSCVPGAGETSYSESLCRLCRGDSSGEGVCDKSPLERYYDYSGAFRCLAEGAGDVAFVKHSTVLENTDGKTLPSWGQALLSQDFELLCRDGSRADVTEWRQCHLARVPAHAVVVRADTDGGLIFRLLNEGQRLFSHEGSSFQMFSSEAYGQKDLLFKDSTSELVPIATQTYEAWLGHEYLHAMKGLLCDPNRLPPYLRWCVLSTPEIQKCGDMAVAFRRQRLKPEIQCVSAKSPQHCMERIQAEQVDAVTLSGEDIYTAGKTYGLVPAAGEHYAPEDSSNSYYVVAVVRRDSSHAFTLDELRGKRSCHAGFGSPAGWDVPVGALIQRGFIRPKDCDVLTAVSEFFNASCVPVNNPKNYPSSLCALCVGDEQGRNKCVGNSQERYYGYRGAFRCLVENAGDVAFVRHTTVFDNTNGHNSEPWAAELRSEDYELLCPNGARAEVSQFAACNLAQIPPHAVMVRPDTNIFTVYGLLDKAQDLFGDDHNKNGFKMFDSSNYHGQDLLFKDATVRAVPVGEKTTYRGWLGLDYVAALEGMSSQQCSGAAAPAPGAPLLPLLLPALAARLLPPAL

SEQ ID NO: 8537 - protein, 181 aa, Homo Sapiens
MRGPSGALWLLLALRTVLGGMEVRWCATSDPEQHKCGNMSEAFREAGIQPSLLCVRGTSADHCVQLIAAQEADAITLDGGAIYEAGKEHGLKPVVGEVYDQEVGTSYYAVAVVRRSSHVTIDTLKGVKSCHTGINRTVGWNVPVGYLVESGRLSVMGCDVLKGPKRGADLHPESSQVAHQP

SEQ ID NO: 8538 - protein, 96 aa, Homo Sapiens
MRVFCVGLLLFSVTWAAPTFQPQTEKTKQSCVEEQRAPQASLLQNSGSQNLPDPHPMPRPTSRSASGPVAAGVILMDLSRKKKTKTILVFTIWARE

SEQ ID NO: 8539 - protein, 556 aa, Homo Sapiens
MRVFCVGLLLFSVTWAAPTFQPQTEKTKQSCVEEQRITYKGHYEKHGHYVFKCVYMSPEKKNQTDVKQEEKNKDNIGFHHLGKRINQELSSKENIVQERKKDLSLSEASENKGSSKSQNYFTNRQRLNKEYSISNKENTHNGLRMSIYPKSTGNKGFEDGDDAISKLHDQEEYGAALIRNNMQHIMGPVTAIKLLGEENKENTPRNVLNIIPASMNYAKAHSKDKKKPQRDSQAQKSPVKSKSTHRIQHNIDYLKHLSKVKKIPSDFEGSGYTDLQERGDNDISPFSGDGQPFKDIPGKGEATGPDLEGKDIQTGFAGPSEAESTHLDTKKPGYNEIPEREENGGNTIGTRDETAKEADAVDVSLVEGSNDIMGSTNFKELPGREGNRVDAGSQNAHQGKVEFHYPPAPSKEKRKEGSSDAAESTNYNEIPKNGKGSTRKGVDHSNRNQATLNEKQRFPSKGKSQGLPIPSRGLDNEIKNEMDSFNGPSHENIITHGRKYHYVPHRQNNSTRNKGMPQGKGSWGRQPHSNRRFSSRRRDDSSESSDSGSSSESDGD

SEQ ID NO: 8540 - protein, 525 aa, Homo Sapiens
MRVFCVGLLLFSVTWAAPTFQPQTEKTKQSCVEEQRQEEKNKDNIGFHHLGKRINQELSSKENIVQERKKDLSLSEASENKGSSKSQNYFTNRQRLNKEYSISNKENTHNGLRMSIYPKSTGNKGFEDGDDAISKLHDQEEYGAALIRNNMQHIMGPVTAIKLLGEENKENTPRNVLNIIPASMNYAKAHSKDKKKPQRDSQAQKSPVKSKSTHRIQHNIDYLKHLSKVKKIPSDFEGSGYTDLQERGDNDISPFSGDGQPFKDIPGKGEATGPDLEGKDIQTGFAGPSEAESTHLDTKKPGYNEIPEREENGGNTIGTRDETAKEADAVDVSLVEGSNDIMGSTNFKELPGREGNRVDAGSQNAHQGKVEFHYPPAPSKEKRKEGSSDAAESTNYNEIPKNGKGSTRKGVDHSNRNQATLNEKQRFPSKGKSQGLPIPSRGLDNEIKNEMDSFNGPSHENIITHGRKYHYVPHRQNNSTRNKGMPQGKGSWGRQPHSNRRFSSRRRDDSSESSDSGSSSESDGD

SEQ ID NO: 8541 - protein, 525 aa, Homo Sapiens; identical to SEQ ID NO: 8540

SEQ ID NO: 8542 - protein, 412 aa, Homo Sapiens
MSIYPKSTGNKGFEDGDDAISKLHDQEEYGAALIRNNMQHIMGPVTAIKLLGEENKENTPRNVLNIIPASMNYAKAHSKDKKKPQRDSQAQKSPVKSKSTHRIQHNIDYLKHLSKVKKIPSDFEGSGYTDLQERGDNDISPFSGDGQPFKDIPGKGEATGPDLEGKDIQTGFAGPSEAESTHLDTKKPGYNEIPEREENGGNTIGTRDETAKEADAVDVSLVEGSNDIMGSTNFKELPGREGNRVDAGSQNAHQGKVEFHYPPAPSKEKRKEGSSDAAESTNYNEIPKNGKGSTRKGVDHSNRNQATLNEKQRFPSKGKSQGLPIPSRGLDNEIKNEMDSFNGPSHENIITHGRKYHYVPHRQNNSTRNKGMPQGKGSWGRQPHSNRRFSSRRRDDSSESSDSGSSSESDGD

SEQ ID NO: 8543 - protein, 412 aa, Homo Sapiens; identical to SEQ ID NO: 8542

SEQ ID NO: 8544 - protein, 501 aa, Homo Sapiens
MSPEKKNQTDVKQEEKNKDNIGFHHLGKRINQELSSKENIVQERKKDLSLSEASENKGSSKSQNYFTNRQRLNKEYSISNKENTHNGLRMSIYPKSTGNKGFEDGDDAISKLHDQEEYGAALIRNNMQHIMGPVTAIKLLGEENKENTPRNVLNIIPASMNYAKAHSKDKKKPQRDSQAQKSPVKSKSTHRIQHNIDYLKHLSKVKKIPSDFEGSGYTDLQERGDNDISPFSGDGQPFKDIPGKGEATGPDLEGKDIQTGFAGPSEAESTHLDTKKPGYNEIPEREENGGNTIGTRDETAKEADAVDVSLVEGSNDIMGSTNFKELPGREGNRVDAGSQNAHQGKVEFHYPPAPSKEKRKEGSSDAAESTNYNEIPKNGKGSTRKGVDHSNRNQATLNEKQRFPSKGKSQGLPIPSRGLDNEIKNEMDSFNGPSHENIITHGRKYHYVPHRQNNSTRNKGMPQGKGSWGRQPHSNRRFSSRRRDDSSESSDSGSSSESDGD

SEQ ID NO: 8545 - protein, 80 aa, Homo Sapiens
MAASRWARKAVVLLCASDLLLLLLLLPPPGSCAAEGSPGTPDESTPPPRKKKKDIRDYNDADMARLLEQWEANTCPTSTH

SEQ ID NO: 8546 - protein, 234 aa, Homo Sapiens
MAASRWARKAVVLLCASDLLLLLLLLPPPGSCAAEGSPGTPDESTPPPRKKKKDIRDYNDADMARLLEQWEKDDDIEEGDLPEHKRPSAPVDFSKIDPSKPESILKMTKKGKTLMMFVTVSGSPTEKETEEITSLWQGSLFNANYDVQRFIVGSDRAIFMLRDGSYAWEIKDFLVGQDRCADVTLEGQVYPGKGGGSKEKNKTKQDKGKKKKEGDLKSRSSKEENRAGNKREDL

SEQ ID NO: 8547 - protein, 234 aa, Homo Sapiens; identical to SEQ ID NO: 8546

SEQ ID NO: 8548 - protein, 234 aa, Homo Sapiens; identical to SEQ ID NO: 8546

SEQ ID NO: 8549 - protein, 138 aa, Homo Sapiens
MAASRWARKAVVLLCASDLLLLLLLLPPPGSCAAEGSPGTPDESTPPPRKKKKDIRDYNDADMARLLEQWETPEPLPVLPEVPSTCACLSSASLIWTCFSHLSPHALVKRVWPPAKQGLGGKESPASAWLPHRGGELK

SEQ ID NO: 8550 - protein, 173 aa, Homo Sapiens
LLSHDYGDIVAQELLYRYKQNRSGRLTIKSLCLSNGGIFPETHRPLLLQKLLKDGGVLSPILTRLMNFFLWDMWAGIRNNDGNLVIDSLLQYINQRKKFRRRWVGALASVTIPIHFIYGPLDPVNPYPEFLELYRKTLPRSTVSILDDHISHYPQLEDPMGFLNAYMGFINSF

SEQ ID NO: 8551 - protein, 118 aa, Homo Sapiens
MREWWVQVGLLAVPLLAAYLHIPPPQLSPALHSWKSSGKFFTYKGLRIFYQDSVGVVGSPEIVVLLHGFPTSSYDWYKIWEGLTLRFHRVIALDFLGFGFSDKPRPHHYSIFEQASIV

SEQ ID NO: 8552 - protein, 160 aa, Homo Sapiens
MREWWVQVGLLAVPLLAAYLHIPPPQLSPALHSWKSSGKFFTYKGLRIFYQDSVGVVGSPEIVVLLHGFPTSSYDWYKIWEGLTLRFHRVIALDFLGFGFSDKPRPHHYSIFEQASIVEALLRHLGLQNRRINLLSHDYGDIVAQELLYRYKQNRSGRLT

SEQ ID NO: 8553 - protein, 169 aa, Homo Sapiens
MREWWVQVGLLAVPLLAAYLHIPPPQLSPALHSWKSSGKFFTYKGLRIFYQDSVGVVGSPEIVVLLHGFPTSSYDWYKIWEGLTLRFHRVIALDFLGFGFSDKPRPHHYSIFEQASIVEALLRHLGLQNRRINLLSHDYGDIVAQELLYRYKQNRSGRLTIKSLCLSNG

SEQ ID NO: 8554 - protein, 188 aa, Homo Sapiens
MREWWVQVGLLAVPLLAAYLHIPPPQLSPALHSWKSSGKFFTYKGLRIFYQDSVGVVGSPEIVVLLHGFPTSSYDWYKIWEGLTLRFHRVIALDFLGFGFSDKPRPHHYSIFEQASIVEALLRHLGLQNRRINLLSHDYGDIVAQELLYRYKQNRSGRLTIKSLCLSNGGIFPETHRPLLLQKLLKDG

SEQ ID NO: 8555 - protein, 292 aa, Homo Sapiens
MREWWVQVGLLAVPLLAAYLHIPPPQLSPALHSWKSSGKFFTYKGLRIFYQDSVGVVGSPEIVVLLHGFPTSSYDWYKIWEGLTLRFHRVIALDFLGFGFSDKPRPHHYSIFEQASIVEALLRHLGLQNRRINLLSHDYGDIVAQELLYRYKQNRSGRLTIKSLCLSNGGIFPETHRPLLLQKLLKDGGVLSPILTRLMNFFVFSRGLLQYINQRKKFRRRWVGALASVTIPIHFIYGPLDPVNPYPEFLELYRKTLPRSTVSILDDHISHYPQLEDPMGFLNAYMGFINSF

SEQ ID NO: 8556 - protein, 292 aa, Homo Sapiens; identical to SEQ ID NO: 8555

SEQ ID NO: 8557 - protein, 292 aa, Homo Sapiens; identical to SEQ ID NO: 8555

SEQ ID NO: 8558 - protein, 213 aa, Homo Sapiens
MREWWVQVGLLAVPLLAAYLHIPPPQLSPALHSWKSSGKFFTYKGLRIFYQDSVGVVGSPEIVVLLHGFPTSSYDWYKIWEGLTLRFHRVIALDFLGFGFSDKPRPHHYSIFEQASIVEALLRHLGLQNRRINLLSHDYGDIVAQELLYRYKQNRSGRLTIKSLCLSNGGIFPETHRPLLLQKLLKDGGVLSPILTRLMNFFVFSRGLTPVFG

SEQ ID NO: 8559 - protein, 326 aa, Homo Sapiens
MREWWVQVGLLAVPLLAAYLHIPPPQLSPALHSWKSSGKFFTYKGLRIFYQDSVGVVGSPEIVVLLHGFPTSSYDWYKIWEGLTLRFHRVIALDFLGFGFSDKPRPHHYSIFEQASIVEALLRHLGLQNRRINLLSHDYGDIVAQELLYRYKQNRSGRLTIKSLCLSNGGIFPETHRPLLLQKLLKDGGVLSPILTRLMNFFVFSRGLTPVFGPYTRPSESELWDMWAGIRNNDGNLVIDSLLQYINQRKKFRRRWVGALASVTIPIHFIYGPLDPVNPYPEFLELYRKTLPRSTVSILDDHISHYPQLEDPMGFLNAYMGFINSF

SEQ ID NO: 8560 - protein, 326 aa, Homo Sapiens; identical to SEQ ID NO: 8559

SEQ ID NO: 8561 - protein, 326 aa, Homo Sapiens; identical to SEQ ID NO: 8559

SEQ ID NO: 8562 - protein, 325 aa, Homo Sapiens
MVRRDRLRRMREWWVQVGLLAVPLLAAYLHIPPPQLSPALHSWKSSGKFFTYKGLRIFYQDSVGVVGSPEIVVLLHGFPTSSYDWYKIWEGLTLRFHRVIALDFLGFGFSDKPASIVEALLRHLGLQNRRINLLSHDYGDIVAQELLYRYKQNRSGRLTIKSLCLSNGGIFPETHRPLLLQKLLKDGGVLSPILTRLMNFFVFSRGLTPVFGPYTRPSESELWDMWAGIRNNDGNLVIDSLLQYINQRKKFRRRWVGALASVTIPIHFIYGPLDPVNPYPEFLELYRKTLPRSTVSILDDHISHYPQLEDPMGFLNAYMGFINSF

SEQ ID NO: 8563 - protein, 335 aa, Homo Sapiens
MVRRDRLRRMREWWVQVGLLAVPLLAAYLHIPPPQLSPALHSWKSSGKFFTYKGLRIFYQDSVGVVGSPEIVVLLHGFPTSSYDWYKIWEGLTLRFHRVIALDFLGFGFSDKPRPHHYSIFEQASIVEALLRHLGLQNRRINLLSHDYGDIVAQELLYRYKQNRSGRLTIKSLCLSNGGIFPETHRPLLLQKLLKDGGVLSPILTRLMNFFVFSRGLTPVFGPYTRPSESELWDMWAGIRNNDGNLVIDSLLQYINQRKKFRRRWVGALASVTIPIHFIYGPLDPVNPYPEFLELYRKTLPRSTVSILDDHISHYPQLEDPMGFLNAYMGFINSF

SEQ ID NO: 8564 - protein, 158 aa, Homo Sapiens
AVKGEVLKVGNKSCENIHLHSEAVLCTVPNDLLKLNSELNIEWKQAISSTVLGKVIVQPDQNFTGLIAGVVSISTALLLLLGFFLWLKKRKQIKDQFPNSSQNGSCRQVQYPLTDMSPILTSGDSDISSPLLQNTVHIDLSALNPELVQAVQHVVIGP

SEQ ID NO: 8565 - protein, 214 aa, Homo Sapiens
AVKLKIDLANRETSIFSYREDPIVYEIHPTKSFISGGSTITGVGKNLNSVSVPRMVINVHEAGRNFTVACQHRSNSEIICCTTPSLQQLNLQLPLKTKAFFMLDGILSKYFDLIYVHNPVFKPFEKPVMISMGNENVLEIKGNDIDPEAVKGEVLKVGNKSCENIHLHSEAVLCTVPNDLLKLNSELNIEVGFLHSSHDVNKEASVIMLFSGLK

SEQ ID NO: 8566 - protein, 1408 aa, Homo Sapiens
MKAPAVLAPGILVLLFTLVQRSNGECKEALAKSEMNVNMKYQLPNFTAETPIQNVILHEHHIFLGATNYIYVLNEEDLQKVAEYKTGPVLEHPDCFPCQDCSSKANLSGGVWKDNINMALVVDTYYDDQLISCGSVNRGTCQRHVFPHNHTADIQSEVHCIFSPQIEEPSQCPDCVVSALGAKVLSSVKDRFINFFVGNTINSSYFPDHPLHSISVRRLKETKDGFMFLTDQSYIDVLPEFRDSYPIKYVHAFESNNFIYFLTVQRETLDAQTFHTRIIRFCSINSGLHSYMEMPLECILTEKRKKRSTKKEVFNILQAAYVSKPGAQLARQIGASLNDDILFGVFAQSKPDSAEPMDRSAMCAFPIKYVNDFFNKIVNKNNVRCLQHFYGPNHEHCFNRTLLRNSSGCEARRDEYRTEFTTALQRVDLFMGQFSEVLLTSISTFIKGDLTIANLGTSEGRFMQVVVSRSGPSTPHVNFLLDSHPVSPEVIVEHTLNQNGYTLVITGKKITKIPLNGLGCRHFQSCSQCLSAPPFVQCGWCHDKCVRSEECLSGTWTQQICLPAIYKVFPNSAPLEGGTRLTICGWDFGFRRNNKFDLKKTRVLLGNESCTLTLSESTMNTLKCTVGPAMNKHFNMSIIISNGHGTTQYSTFSYVDPVITSISPKYGPMAGGTLLTLTGNYLNSGNSRHISIGGKTCTLKSVSNSILECYTPAQTISTEFAVKLKIDLANRETSIFSYREDPIVYEIHPTKSFISTWWKEPLNIVSFLFCFASGGSTITGVGKNLNSVSVPRMVINVHEAGRNFTVACQHRSNSEIICCTTPSLQQLNLQLPLKTKAFFMLDGILSKYFDLIYVHNPVFKPFEKPVMISMGNENVLEIKGNDIDPEAVKGEVLKVGNKSCENIHLHSEAVLCTVPNDLLKLNSELNIEWKQAISSTVLGKVIVQPDQNFTGLIAGVVSISTALLLLLGFFLWLKKRKQIKDLGSELVRYDARVHTPHLDRLVSARSVSPTTEMVSNESVDYRATFPEDQFPNSSQNGSCRQVQYPLTDMSPILTSGDSDISSPLLQNTVHIDLSALNPELVQAVQHVVIGPSSLIVHFNEVIGRGHFGCVYHGTLLDNDGKKIHCAVKSLNRITDIGEVSQFLTEGIIMKDFSHPNVLSLLGICLRSEGSPLVVLPYMKHGDLRNFIRNETHNPTVKDLIGFGLQVAKGMKYLASKKFVHRDLAARNCMLDEKFTVKVADFGLARDMYDKEYYSVHNKTGAKLPVKWMALESLQTQKFTTKSDVWSFGVLLWELMTRGAPPYPDVNTFDITVYLLQGRRLLQPEYCPDPLYEVMLKCWHPKAEMRPSFSELVSRISAIFSTFIGEHYVHVNATYVNVKCVAPYPSLLSSEDNADDEVDTRPASFWETS

SEQ ID NO: 8567 - protein, 1390 aa, Homo Sapiens
MKAPAVLAPGILVLLFTLVQRSNGECKEALAKSEMNVNMKYQLPNFTAETPIQNVILHEHHIFLGATNYIYVLNEEDLQKVAEYKTGPVLEHPDCFPCQDCSSKANLSGGVWKDNINMALVVDTYYDDQLISCGSVNRGTCQRHVFPHNHTADIQSEVHCIFSPQIEEPSQCPDCVVSALGAKVLSSVKDRFINFFVGNTINSSYFPDHPLHSISVRRLKETKDGFMFLTDQSYIDVLPEFRDSYPIKYVHAFESNNFIYFLTVQRETLDAQTFHTRIIRFCSINSGLHSYMEMPLECILTEKRKKRSTKKEVFNILQAAYVSKPGAQLARQIGASLNDDILFGVFAQSKPDSAEPMDRSAMCAFPIKYVNDFFNKIVNKNNVRCLQHFYGPNHEHCFNRTLLRNSSGCEARRDEYRTEFTTALQRVDLFMGQFSEVLLTSISTFIKGDLTIANLGTSEGRFMQVVVSRSGPSTPHVNFLLDSHPVSPEVIVEHTLNQNGYTLVITGKKITKIPLNGLGCRHFQSCSQCLSAPPFVQCGWCHDKCVRSEECLSGTWTQQICLPAIYKVFPNSAPLEGGTRLTICGWDFGFRRNNKFDLKKTRVLLGNESCTLTLSESTMNTLKCTVGPAMNKHFNMSIIISNGHGTTQYSTFSYVDPVITSISPKYGPMAGGTLLTLTGNYLNSGNSRHISIGGKTCTLKSVSNSILECYTPAQTISTEFAVKLKIDLANRETSIFSYREDPIVYEIHPTKSFISGGSTITGVGKNLNSVSVPRMVINVHEAGRNFTVACQHRSNSEIICCTTPSLQQLNLQLPLKTKAFFMLDGILSKYFDLIYVHNPVFKPFEKPVMISMGNENVLEIKGNDIDPEAVKGEVLKVGNKSCENIHLHSEAVLCTVPNDLLKLNSELNIEWKQAISSTVLGKVIVQPDQNFTGLIAGVVSISTALLLLLGFFLWLKKRKQIKDLGSELVRYDARVHTPHLDRLVSARSVSPTTEMVSNESVDYRATFPEDQFPNSSQNGSCRQVQYPLTDMSPILTSGDSDISSPLLQNTVHIDLSALNPELVQAVQHVVIGPSSLIVHFNEVIGRGHFGCVYHGTLLDNDGKKIHCAVKSLNRITDIGEVSQFLTEGIIMKDFSHPNVLSLLGICLRSEGSPLVVLPYMKHGDLRNFIRNETHNPTVKDLIGFGLQVAKGMKYLASKKFVHRDLAARNCMLDEKFTVKVADFGLARDMYDKEYYSVHNKTGAKLPVKWMALESLQTQKFTTKSDVWSFGVLLWELMTRGAPPYPDVNTFDITVYLLQGRRLLQPEYCPDPLYEVMLKCWHPKAEMRPSFSELVSRISAIFSTFIGEHYVHVNATYVNVKCVAPYPSLLSSEDNADDEVDTRPASFWETS

SEQ ID NO: 8568 - protein, 764 aa, Homo Sapiens
MKAPAVLAPGILVLLFTLVQRSNGECKEALAKSEMNVNMKYQLPNFTAETPIQNVILHEHHIFLGATNYIYVLNEEDLQKVAEYKTGPVLEHPDCFPCQDCSSKANLSGGVWKDNINMALVVDTYYDDQLISCGSVNRGTCQRHVFPHNHTADIQSEVHCIFSPQIEEPSQCPDCVVSALGAKVLSSVKDRFINFFVGNTINSSYFPDHPLHSISVRRLKETKDGFMFLTDQSYIDVLPEFRDSYPIKYVHAFESNNFIYFLTVQRETLDAQTFHTRIIRFCSINSGLHSYMEMPLECILTEKRKKRSTKKEVFNILQAAYVSKPGAQLARQIGASLNDDILFGVFAQSKPDSAEPMDRSAMCAFPIKYVNDFFNKIVNKNNVRCLQHFYGPNHEHCFNRTLLRNSSGCEARRDEYRTEFTTALQRVDLFMGQFSEVLLTSISTFIKGDLTIANLGTSEGRFMQVVVSRSGPSTPHVNFLLDSHPVSPEVIVEHTLNQNGYTLVITGKKITKIPLNGLGCRHFQSCSQCLSAPPFVQCGWCHDKCVRSEECLSGTWTQQICLPAIYKVFPNSAPLEGGTRLTICGWDFGFRRNNKFDLKKTRVLLGNESCTLTLSESTMNTLKCTVGPAMNKHFNMSIIISNGHGTTQYSTFSYVDPVITSISPKYGPMAGGTLLTLTGNYLNSGNSRHISIGGKTCTLKSVSNSILECYTPAQTISTEFAVKLKIDLANRETSIFSYREDPIVYEIHPTKSFIRHVNIALIQR

SEQ ID NO: 8569 - protein, 190 aa, Homo Sapiens
MKSKSKSLAECFPYDKPLIMKAPAVLAPGILVLLFTLVQRSNGECKEALAKSEMNVNMKYQLPNFTAETPIQNVILHEHHIFLGATNYIYVLNEEDLQKVAEYKTGPVLEHPDCFPCQDCSSKANLSGGVWKDNINMALVVDTYYDDQLISCGSVNRGTCQRHVFPHNHTADIQSEVHCIFSPQIEEPSQ

SEQ ID NO: 8570 - protein, 187 aa, Homo Sapiens
LAPAARAGYSEERCSWRGSGLTQEPGSVGQLALACAEGAVEWLYPAGALRLTLGGPDPRARPGIACLRPVRPFAGAQVFAERAGGALELLLAEGPGPAGGRCVRWGPRERRALFLQATPHQDISRRVAAFRFELREDGRPELPPQAHGLGVDGACRPCSDAELLLAACTSDFGECPRHGGSLEPAFP

SEQ ID NO: 8571 - protein, 69 aa, Homo Sapiens
MGFPAAALLCALCCGLLAPAARAGYSEERCSWRGRPRRTRTSAAAWPPSALSCARTGAPSCPRRPTVSA

SEQ ID NO: 8572 - protein, 293 aa, Homo Sapiens
MGFPAAALLCALCCGLLAPAARAGYSEERCSWRGSGLTQEPGSVGQLALACAEGAVEWLYPAGALRLTLGGPDPRARPGIACLRPVRPFAGAQVFAERAGGALELLLAEGPGPAGGRCVRWGPRERRALFLQATPHQDISRRVAAFRFELREDGRPELPPQAHGLGVDGACRPCSDAELLLAACTSDFVIHGIIHGVTHDVELQESVITVVAARVLRQTPPLFQAGRSGDQGLTSIRTPLRCGVHPGPGTFLFMGWSRFGEARLGCAPRFQEFRRAYEAARAAHLHPCEVALH

SEQ ID NO: 8573 - protein, 160 aa, Homo Sapiens
MLGCICQMGVQEGGPGQLIARHGPQAHVCVHSCLGGACRPCSDAELLLAACTSDFVIHGIIHGVTHDVELQESVITVVAARVLRQTPPLFQAGRSGDQGLTSIRTPLRCGVHPGPGTFLFMGWSRFGEARLGCAPRFQEFRRAYEAARAAHLHPCEVALH

SEQ ID NO: 8574 - protein, 175 aa, Homo Sapiens
  misc_feature (1)..(1): Xaa can be any naturally occurring amino acid
XAVEWLYPAGALRLTLGGPDPRARPGIACLRPVRPFAGAQVFAERAGGALELLLAEGPGPAGGRCVRWGPRERRALFLQATPHQDISRRVAAFRFELREDGRPELPPQAHGLGVDGACRPCSDAELLLAACTSDFVIHGIIHGVTHDVELQESVITVGGPTALEVMGLSIRTLFT

SEQ ID NO: 8575 - protein, 311 aa, Homo Sapiens
MRGAARAAWGRAGQPWPRPPAPGPPPPPLPLLLLLLAGLLGGAGAQYSSDRCSWKGSGLTHEAHRKEVEQVYLRCAAGAVEWMYPTGALIVNLRPNTFSPARHLTVCIRSFTDSSGANIYLEKTGELRLLVPDGDGRPGRVQCFGLEQGGLFVEATPQQDIGRRTTGFQYELVRRHRASDLHELSAPCRPCSDTEVLLAVCTSDFAVRGSIQQVTHEPERQDSAIHLRVSRLYRQKSRVFEPVPEGDGHWQGRVRTLLECGVRPGHGDFLFTGHMHFGEARLGCAPRFKDFQRMYRDAQERGLNPCEVGTD

SEQ ID NO: 8576 - protein, 229 aa, Homo Sapiens
MYPTGALIVNLRPNTFSPARHLTVCIRSFTDSSGANIYLEKTGELRLLVPDGDGRPGRVQCFGLEQGGLFVEATPQQDIGRRTTGFQYELVRRHRASDLHELSAPCRPCSDTEVLLAVCTSDFAVRGSIQQVTHEPERQDSAIHLRVSRLYRQKSRVFEPVPEGDGHWQGRVRTLLECGVRPGHGDFLFTGHMHFGEARLGCAPRFKDFQRMYRDAQERGLNPCEVGTD

SEQ ID NO: 8577 - protein, 229 aa, Homo Sapiens; identical to SEQ ID NO: 8576

SEQ ID NO: 8578 - protein, 90 aa, Homo Sapiens
RTAVRGSIQQVTHEPERQDSAIHLRVSRLYRQKSRVFEPVPEGDGHWQGRVRTLLECGARLGCAPRFKDFQRMYRDAQERGLNPCEVGTD

SEQ ID NO: 8579 - protein, 456 aa, Homo Sapiens
MAAALKCLLTLGRWCPGLGVAPQARALAALVPGVTQVDNKSGFLQKRPHRQHPGILKLPHVRLPQALANGAQLLLLGSAGPTMENQVQTLTSYLWSRHLPVEPEELQRRARHLEKKFLENPDLSQTEEKLRGAVLHALRKTTYHWQELSYTEGLSLVYMAARLDGGFAAVSRAFHEIRARNPAFQPQTLMDFGSGTGSVTWAAHSIWGQSLREYMCVDRSAAMLVLAEKLLKGGSESGEPYIPGVFFRQFLPVSPKVQFDVVVSAFSLSELPSKADRTEVVQTLWRKTGHFLVLVENGTKAGHSLLMDARDLVLKGKEKSPLDPRPGFVFAPCPHELPCPQLTNLACSFSQAYHPIPFSWNKKPKEEKFSMVILARGSPEEAHRWPRITQPVLKRPRHVHCHLCCPDGHMQHAVLTARRHGRDLYRCARVSSWGDLLPVLTPSAFPPSTAQDPSES

SEQ ID NO: 8580 - protein, 478 aa, Homo Sapiens
MAAALKCLLTLGRWCPGLGVAPQARALAALVPGVTQVDNKSGFLQKRPHRQHPGILKLPHVRLPQALANGAQLLLLGSAGPTMENQVQTLTSYLWSRHLPVEPEELQRRARHLEKKFLENPDLSQTEEKLRGAVLHALRKTTYHWQELSYTEGLSLVYMAARLDGGFAAVSRAFHEIRARNPAFQPQTLMDFGSGTGSVTWAAHSIWGQSLREYMCVDRSAAMLVLAEKLLKGGSESGEPYIPGVFFRQFLPVSPKVQFDVVVSAFSLSELPSKADRTEVVQTLWRKTGHFLVLVENGTKAGHSLLMDARDLVLKGKEKSPLDPRPGFVFAPCPHELPCPQLTNLACSFSQAYHPIPFSWNKKPKEEKFSMVILARGSPEEAHRWPRITQPVLKRPRHVHCHLCCPDGHMQHAVLTARRHGRYGGCDQNQWDVAGSCSPRQHLFPQGFVSLCPCQLLGRSFTCAYSVCVSSIYGSGSL

SEQ ID NO: 8581 - protein, 447 aa, Homo Sapiens
MAAALKCLLTLGRWCPGLGVAPQARALAALVPGVTQVDNKSGFLQKRPHRQHPGILKLPHVRLPQALANGAQLLLLGSAGPTMENQVQTLTSYLWSRHLPVEPEELQRRARHLEKKFLENPDLSQTEEKLRGAVLHALRKTTYHWQELSYTEGLSLVYMAARLDGGFAAVSRAFHEIRARNPAFQPQTLMDFGSGTGSVTWAAHSIWGQSLREYMCVDRSAAMLVLAEKLLKGGSESGEPYIPGVFFRQFLPVSPKVQFDVVVSAFSLSELPSKADRTEVVQTLWRKTGHFLVLVENGTKAGHSLLMDARDLVLKGKEKSPLDPRPGFVFAPCPHELPCPQLTNLACSFSQAYHPIPFSWNKKPKEEKFSMVILARGSPEEAHRWPRITQPVLKRPRHVHCHLCCPDGHMQHAVLTARRHGSSWGDLLPVLTPSAFPPSTAQDPSES

SEQ ID NO: 8582 - protein, 158 aa, Homo Sapiens
MAAALKCLLTLGRWCPGLGVAPQARALAALVPGVTQVDNKSGFLQKRPHRQHPGILKLPHVRLPQALANGAQLLLLGSAGPTMENQVQTLTSYLWSRHLPVEPEELQRRARHLEKKFLENPGPDFQSLFSPQTYLRQRRNFVEQCYTHYVKLPTIGKN

SEQ ID NO: 8583 - protein, 158 aa, Homo Sapiens; identical to SEQ ID NO: 8582

SEQ ID NO: 8584 - protein, 158 aa, Homo Sapiens; identical to SEQ ID NO: 8582

SEQ ID NO: 8585 - protein, 102 aa, Homo Sapiens
MENQVQTLTSYLWSRHLPVEPEELQRRARHLEKKFLENPDLSQTEEKLRGAVLHALRKTTYHWQELSYTEGLSLVYMAARLDGGFAAVSRAFHEIRARNPAF

SEQ ID NO: 8586 - protein, 140 aa, Homo Sapiens
MENQVQTLTSYLWSRHLPVEPEELQRRARHLEKKFLENPDLSQTEEKLRGAVLHALRKTTYHWQELSYTEGLSLVYMAARLDGGFAAVSRAFHEIRARNPAFQPQTLMDFGSGTGSVTWAAHSIWGQSLREYMCVDRSAA

SEQ ID NO: 8587 - protein, 174 aa, Homo Sapiens
MENQVQTLTSYLWSRHLPVEPEELQRRARHLEKKFLENPDLSQTEEKLRGAVLHALRKTTYHWQELSYTEGLSLVYMAARLDGGFAAVSRAFHEIRARNPAFQPQTLMDFGSGTGSVTWAAHSIWGQSLREYMCVDRSAAMLVLAEKLLKGGSESGEPYIPGVFFRQFLPVSPK

SEQ ID NO: 8588 - protein, 186 aa, Homo Sapiens
MVPRPWSGSPGPGECLHSLLSERLWICRDISAQRRSAPGSPRPSDCQQLSFLPGNQPTFLCLQALAALVPGVTQVDNKSGFLQKRPHRQHPGILKLPHVRLPQALANGAQLLLLGSAGPTMENQVQTLTSYLWSRHLPVEPEELQRRARHLEKKFLENPDLSQTEEKLRGAVLHALRKTTYHWQEL

SEQ ID NO: 8589 - protein, 123 aa, Homo Sapiens
  misc_feature (1)..(1): Xaa can be any naturally occurring amino acid
XPGFVFAPCPHELPCPQLTNLACSFSQAYHPIPFSWNKKPKEEKFSMVILARGSPEEAHRWPRITQPVLKRPRHVHCHLCCPDGHMQHAVLTARRHGSSWGDLLPVLTPSAFPPSTAQDPSES

SEQ ID NO: 8590 - protein, 366 aa, Homo Sapiens
MARERPPGRGCGVLRRCLLGAVLLFGLRLCAELRRAGPGSPTRSAPPGPAWRPPGPHLPPAPGQPRGASRRQVTYVRSGRRAPPGGGGSGTPEPGCCAPRGRPRRKGPRWHIDLQPWAGSAQSLDEEAWRFLRYISTTQIACNHMNTDSLATDSSPTHKPWSVCLDDRFNLAHQIRNKQCRLYSLGLGSDDTHFEVSMANNGCEVHRFDPSVKSAHILESQHLWYHRLSIDWRDPHPAVAAQKPHSNTRKLGSILNEFGHHKIDVLKADLESAEWKVLENLILEDVLEQIGQLIFEIHLHWPGFEVSGSDSSVVRFWYSLLKELEQKDFRLFHSYKDLSKPQLFLKKDIFNASSCYTLSWVNTRWK

SEQ ID NO: 8591 - protein, 244 aa, Homo Sapiens
MDILVPLLQLLVLLLTLPLHLMALLGCWQPLCKSYFPYLMAVLTPKSNRKMESKKRELFSQIKGLTGASGKVALLELGCGTGANFQFYPPGCRVTCLDPNPHFEKFLTKSMAENRHLQYERFVVAPGEDMRQLADGSMDVVVCTLVLCSVQSPRKVLQEVRRVLRPGGVLFFWEHVAEPYGSWAFMWQQVFEPTWKHIGDGCCLTRETWKDLENAQFSEIQMERQPPPLKWLPVGPHIMGKAVK

SEQ ID NO: 8592 - protein, 276 aa, Homo Sapiens
MDILVPLLQLLVLLLTLPLHLMALLGCWQPLCKSYFPYLMAVLTPKSNRKMESKKRELFSQIKGLTGASGKVALLELGCGTGANFQFYPPGCRVTCLDPNPHFEKFLTKSMAENRHLQYERFVVAPGEDMRQLADGSMDVVVCTLVLCSVQSPRKVLQEVRRVLRPGGVLFFWEHVAEPYGSWAFMWQQVFEPTWKHIGDGCCLTRETWKDLENAQFSEIQMERQPPPLKWLPVGPHIMGKAVKSFPSSKALICSFPSLQLEQATHQPIYLPLRGT

SEQ ID NO: 8593 - protein, 243 aa, Homo Sapiens
MDRKTTSWDTKFYEKWYVCNREKLCESLQAVFVQSYLDQGTQIFLNNSIEKSGWLFIQLYHSFVSSVFSLFMSRTSINGLLGRGSMFVFSPDQFQRLLKINPDWKTHRLLDLGAGDGEVTKIMSPHFEEIYATELSETMIWQLQKKKYRVLGINEWQNTGFQYDVISCLNLLDRCDQPLTLLKDIRSVLEPTRGRVILALVLPFHPYVENVGGKWEKPSEILEIKGQNWEEQVNSLPEVFRKA

SEQ ID NO: 8594 - protein, 61 aa, Homo Sapiens
MRLLAGWLCLSLASVWLARRMWTLRSPLTRSLGMCATERNYANHSRLSLFRVTLIKEHRSS

SEQ ID NO: 8595 - protein, 74 aa, Homo Sapiens
MRLLAGWLCLSLASVWLARRMWTLRSPLTRSLYVNMTSGPGGPAAAAGGRKENHQVARKRLNVCVFTRSVSETA

SEQ ID NO: 8596 - protein, 317 aa, Homo Sapiens
MRLLAGWLCLSLASVWLARRMWTLRSPLTRSLYVNMTSGPGGPAAAAGGRKENHQWYVCNREKLCESLQAVFVQSYLDQGTQIFLNNSIEKSGWLFIQLYHSFVSSVFSLFMSRTSINGLLGRGSMFVFSPDQFQRLLKINPDWKTHRLLDLGAGDGEVTKIMSPHFEEIYATELSETMIWQLQKKKYRVLGINEWQNTGFQYDVISCLNLLDRCDQPLTLLKDIRSVLEPTRGRVILALVLPFHPYVENGGKWEKPSEILEIKGQNWEEQVNSLPEVFRKAGFVIEAFTRLPYLCEGDMYNDYYVLDDAVFVLKPV

SEQ ID NO: 8597 - protein, 318 aa, Homo Sapiens
MRLLAGWLCLSLASVWLARRMWTLRSPLTRSLYVNMTSGPGGPAAAAGGRKENHQWYVCNREKLCESLQAVFVQSYLDQGTQIFLNNSIEKSGWLFIQLYHSFVSSVFSLFMSRTSINGLLGRGSMFVFSPDQFQRLLKINPDWKTHRLLDLGAGDGEVTKIMSPHFEEIYATELSETMIWQLQKKKYRVLGINEWQNTGFQYDVISCLNLLDRCDQPLTLLKDIRSVLEPTRGRVILALVLPFHPYVENVGGKWEKPSEILEIKGQNWEEQVNSLPEVFRKAGFVIEAFTRLPYLCEGDMYNDYYVLDDAVFVLKPV

SEQ ID NO: 8598 - protein, 139 aa, Homo Sapiens
MSRTSINGLLGRGSMFVFSPDQFQRLLKINPDWKTHRLLDLGAGDGEVTKIMSPHFEEIYATELSETMIWQLQKKKYRVLGINEWQNTGFQYDVISCLNLLDRCDQPLTLLKDIRSVLEPTRGRVILALVLPFHPYVEN

SEQ ID NO: 8599 - protein, 282 aa, Homo Sapiens
MWTLRSPLTRSLYVKENHQWYVCNREKLCESLQAVFVQSYLDQGTQIFLNNSIEKSGWLFIQLYHSFVSSVFSLFMSRTSINGLLGRGSMFVFSPDQFQRLLKINPDWKTHRLLDLGAGDGEVTKIMSPHFEEIYATELSETMIWQLQKKKYRVLGINEWQNTGFQYDVISCLNLLDRCDQPLTLLKDIRSVLEPTRGRVILALVLPFHPYVENVGGKWEKPSEILEIKGQNWEEQVNSLPEVFRKAGFVIEAFTRLPYLCEGDMYNDYYVLDDAVFVLKPV

SEQ ID NO: 8600 - protein, 128 aa, Homo Sapiens
  misc_feature (1)..(1): Xaa can be any naturally occurring amino acid
XPDQFQRLLKINPDWKTHRLLDLGAGDGEVTKIMSPHFEEIYATELSETMIWQLQKKKYRVLGINEWQNTGFQYDVISCLNLLDRCDQPLTLLKDIRSVLEPTRGRVILALVLPFHPYVENGKCGQSG

SEQ ID NO: 8601 - protein, 125 aa, Homo Sapiens
  misc_feature (1)..(1): Xaa can be any naturally occurring amino acid
XSYLDQGTQIFLNNSIEKSGWLFIQLYHSFVSSVFSLFMSRTSINGVLGINEWQNTGFQYDVISCLNLLDRCDQPLTLLKDIRSVLEPTRGRVILALVLPFHPYVENVGGKWEKPSEILEIKGQN

SEQ ID NO: 8602 - protein, 489 aa, Homo Sapiens
MPSGSSAALALAAAGVLYGGDDAQGMMAAMLSHAYGPGGCGAAAAALNGEQAALLRRKSVNTTECVPVPSSEHVAEIVGRQGCKIKALRAKTNTYIKTPVRGEEPIFVVTGRKEDVAMAKREILSAAEHFSMIRASRNKNGPALGGLSCSPNLPGQTTVQVRVPYRVVGLVVGPKGATIKRIQQQTHTYIVTPSRDKEPVFEVTGMPENVDRAREEIEMHIAMRTGNYIELNEENDFHYNGTDVSFEGGTLGSAWLSSNPVPPSRARMISNYRNDSSSSLGSGSTDSYFGSNRLADFSPTSPFSTGNFWFGDTLPSVGSEDLAVDSPAFDSLPTSAQTIWTPFEPVNPLSGFGSDPSGNMKTQRRGSQPSTPRLSPTFPESIEHPLARRVRSDPPSTGNHVGLPIYIPAFSNGTNSYSSSNGGSTSSSPPESRRKHDCVICFENEVIAALVPCGHNLFCMECANKICEKRTPSCPVCQTAVTQAIQIHS

SEQ ID NO: 8603 - protein, 659 aa, Homo Sapiens
MPSGSSAALALAAAPAPLPQPPPPPPPPPPPLPPPSGGPELEGDGLLLRERLAALGLDDPSPAEPGAPALRAPAAAAQGQARRAAELSPEERAPPGRPGAPEAAELELEEDEEEGEEAELDGDLLEEEELEEAEEEDRSSLLLLSPPAATASQTQQIPGGSLGSVLLPAARFDAREAAAAAAAAGVLYGGDDAQGMMAAMLSHAYGPGGCGAAAAALNGEQAALLRRKSVNTTECVPVPSSEHVAEIVGRQGCKIKALRAKTNTYIKTPVRGEEPIFVVTGRKEDVAMAKREILSAAEHFSMIRASRNKNGPALGGLSCSPNLPGQTTVQVRVPYRVVGLVVGPKGATIKRIQQQTHTYIVTPSRDKEPVFEVTGMPENVDRAREEIEMHIAMRTGNYIELNEENDFHYNGTDVSFEGGTLGSAWLSSNPVPPSRARMISNYRNDSSSSLGSGSTDSYFGSNRLADFSPTSPFSTGNFWFGDTLPSVGSEDLAVDSPAFDSLPTSAQTIWTPFEPVNPLSGFGSDPSGNMKTQRRGSQPSTPRLSPTFPESIEHPLARRVRSDPPSTGNHVGLPIYIPAFSNGTNSYSSSNGGSTSSSPPESRRKHDCVICFENEVIAALVPCGHNLFCMECANKICEKRTPSCPVCQTAVTQAIQIHS

SEQ ID NO: 8604 - protein, 115 aa, Homo Sapiens
YGGDDAQGMMAAMLSHAYGPGGCGAAAAALNGEQAALLRRKSVNTTECVPVPSSEHVAEIVGRQGECRGGEVQLGMAPGVGGETRERSVGRKRRTRRGPQVHREGVWEEPRVDQM

SEQ ID NO: 8605 - protein, 183 aa, Homo Sapiens
MRAAYLFLLFLPAGLLAQGQYDLDPLPPFPDHVQYTHYSDQIDNPDYYDYQEVTPRPSEEQFQFQSQQQVQQEVIPAPTPEPGNAELEPTEPGPLDCREEQYPCTRLYSIHRPCKQCLNEVCFYSLRRVYVINKEICVRTVCAHEELLRADLCRDKFSKCGVMASSGLCQSVAASCARSCGSC

SEQ ID NO: 8606 - protein, 182 aa, Homo Sapiens
MRAAYLFLLFLPGLLAQGQYDLDPLPPFPDHVQYTHYSDQIDNPDYYDYQEVTPRPSEEQFQFQSQQQVQQEVIPAPTPEPGNAELEPTEPGPLDCREEQYPCTRLYSIHRPCKQCLNEVCFYSLRRVYVINKEICVRTVCAHEELLRADLCRDKFSKCGVMASSGLCQSVAASCARSCGSC

SEQ ID NO: 8607 - protein, 17 aa, Homo Sapiens
MKLHCCLFTLVASIIVP

SEQ ID NO: 8608 - protein, 109 aa, Homo Sapiens
MKLHCCLFTLVASIIVPAAFVLEDVDFDQMVSLEANRSSYNASFPSSFELSASSHSDDDVIIAKEGTSVSIECLLTASHYEDVHWHNSKGQQLDGRSRGGKWLVSDNFL

SEQ ID NO: 8609 - protein, 123 aa, Homo Sapiens
MKLHCCLFTLVASIIVPAAFVLEDVDFDQMVSLEANRSSYNASFPSSFELSASSHSDDDVIIAKEGTSVSIECLLTASHYEDVHWHNSKGQQLDGRSRGGKWLVSDNFLNITNVAFDDRGLYT

SEQ ID NO: 8610 - protein, 362 aa, Homo Sapiens
MKLHCCLFTLVASIIVPAAFVLEDVDFDQMVSLEANRSSYNASFPSSFELSASSHSDDDVIIAKEGTSVSIECLLTASHYEDVHWHNSKGQQLDGRSRGGKWLVSDNFLNITNVAFDDRGLYTCFVTSPIRASYSVTLRVIFTSGDMSVYYMIVCLIAFTITLILNVTRLCMMSSHLRKTEKAINEFFRTEGAEKLQKAFEIAKRIPIITSAKTLELAKVTQFKTMEFARYIEELARSVPLPPLILNCRAFVEEMFEAVRVDDPDDLGERIKERPALNAQGGIYVINPEMGRSNSPGGDSDDGSLNEQGQEIAVQVSVHLQSETKSIDTESQGSSHFSPPDDIGSAESNCNYKDGAYENCQL

SEQ ID NO: 8611 - protein, 216 aa, Homo Sapiens
MSVYYMIVCLIAFTITLILNVTRLCMMSSHLRKTEKAINEFFRTEGAEKLQKAFEIAKRIPIITSAKTLELAKVTQFKTMEFARYIEELARSVPLPPLILNCRAFVEEMFEAVRVDDPDDLGERIKERPALNAQGGIYVINPEMGRSNSPGGDSDDGSLNEQGQEIAVQVSVHLQSETKSIDTESQGSSHFSPPDDIGSAESNCNYKDGAYENCQL

SEQ ID NO: 8612 - protein, 73 aa, Homo Sapiens
MDRLKSHLTVCFLPSVPFLILVSTLATAKSVTNSTLNGTNVVLGSVPVIIARTDHIIVKEGNSALINCSVYGI

SEQ ID NO: 8613 - protein, 90 aa, Homo Sapiens
MDRLKSHLTVCFLPSVPFLILVSTLATAKSVTNSTLNGTNVVLGSVPVIIARTDHIIVKEGNSALINCSVYGIPDPQFKWYNSIGKLLKE

SEQ ID NO: 8614 - protein, 98 aa, Homo Sapiens
MDRLKSHLTVCFLPSVPFLILVSTLATAKSVTNSTLNGTNVVLGSVPVIIARTDHIIVKEGNSALINCSVYGIPDPQFKWYNSIGKLLKEEEDEKERG

SEQ ID NO: 8615 - protein, 409 aa, Homo Sapiens
MDRLKSHLTVCFLPSVPFLILVSTLATAKSVTNSTLNGTNVVLGSVPVIIARTDHIIVKEGNSALINCSVYGIPDPQFKWYNSIGKLLKEEEDEKERGGGKWQMHDSGLLNITKVSFSDRGKYTCVASNIYGTVNNTVTLRVIFTSGDMGVYYMVVCLVAFTIVMVLNITRLCMMSSHLKKTEKAINEFFRTEGAEKLQKAFEIAKRIPIITSAKTLELAKVTQFKTMEFARYIEELARSVPLPPLIMNCRTIMEEIMEVVGLEEQGQNFVRHTPEGQEAADRDEVYTIPNSLKRSDSPAADSDASSLHEQPQQIAIKVSVHPQSKKEHADDQEGGQFEVKDVEETELSAEHSPETAEPSTDVTSTELTSEEPTPVEVPDKVLPPAYLEATEPAVTHDKNTCIIYESHV

SEQ ID NO: 8616 - protein, 102 aa, Homo Sapiens
MDRLKSHLTVCFLPSVPFLILVSTLATAKSVTNSTLNGTNVVLGSVPVIIARTDHIIVKEGNSALINCSVYGIPDPQFKWYNSIGKLLKEEEDEKERGGGRL

SEQ ID NO: 8617 - protein, 102 aa, Homo Sapiens; identical to SEQ ID NO: 8616

SEQ ID NO: 8618 - protein, 44 aa, Homo Sapiens
MHDSGLLNITKVSFSDRGKYTCVASNIYGTVNNTVTLRVIFTSG

SEQ ID NO: 8619 - protein, 64 aa, Homo Sapiens
MHDSGLLNITKVSFSDRGKYTCVASNIYGTVNNTVTLRVIFTSGDMGVYYMVVCLVAFTIVMVL

SEQ ID NO: 8620 - protein, 157 aa, Homo Sapiens
MHDSGLLNITKVSFSDRGKYTCVASNIYGTVNNTVTLRVIFTSGDMGVYYMVVCLVAFTIVMVLNITRLCMMSSHLKKTEKAINEFFRTEGAEKLQKAFEIAKRIPIITSAKTLELAKVTQFKTMEFARYIEELARSVPLPPLIMNCRTIMEEIMEV

SEQ ID NO: 8621 - protein, 306 aa, Homo Sapiens
MHDSGLLNITKVSFSDRGKYTCVASNIYGTVNNTVTLRVIFTSGDMGVYYMVVCLVAFTIVMVLNITRLCMMSSHLKKTEKAINEFFRTEGAEKLQKAFEIAKRIPIITSAKTLELAKVTQFKTMEFARYIEELARSVPLPPLIMNCRTIMEEIMEVVGLEEQGQNFVRHTPEGQEAADRDEVYTIPNSLKRSDSPAADSDASSLHEQPQQIAIKVSVHPQSKKEHADDQEGGQFEVKDVEETELSAEHSPETAEPSTDVTSTELTSEEPTPVEVPDKVLPPAYLEATEPAVTHDKNTCIIYESHV

SEQ ID NO: 8622 - protein, 279 aa, Homo Sapiens
MGELSPLQRPLATEGTMKAQGVLLKLALLALPLLLLLSTPPCAPQVSGIRGDALERFCLQQPLDCDDIYAQGYQSDGVYLIYPSGPSVPVPVFCDMTTEGGKWTVFQKRFNGSVSFFRGWNDYKLGFGRADGEYWLGLQNMHLLTLKQKYELRVDLEDFENNTAYAKYADFSISPNAVSAEEDGYTLFVAGFEDGGAGDSLSYHSGQKFSTFDRDQDLFVQNCAALSSGAFWFRSCHFANLNGFYLGGSHLSYANGINWAQWKGFYYSLKRTEMKIRRA

SEQ ID NO: 8623 - protein, 255 aa, Homo Sapiens
MKALLALPLLLLLSTPPCAPQVSGIRGDALERFCLQQPLDCDDIYAQGYQSDGVYLIYPSGPSVPVPVFCDMTTEGGKWTVFQKRFNGSVSFFRGWNDYKLGFGRADGEYWLGLQNMHLLTLKQKYELRVDLEDFENNTAYAKYADFSISPNAVSAEEDGYTLFVAGFEDGGAGDSLSYHSGQKFSTFDRDQDLFVQNCAALSSGAFWFRSCHFANLNGFYLGGSHLSYANGINWAQWKGFYYSLKRTEMKIRRA

SEQ ID NO: 8624 - protein, 280 aa, Homo Sapiens
MVGANAKRTGDLWSWEGAVLTLSAHRQALLALPLLLLLSTPPCAPQVSGIRGDALERFCLQQPLDCDDIYAQGYQSDGVYLIYPSGPSVPVPVFCDMTTEGGKWTVFQKRFNGSVSFFRGWNDYKLGFGRADGEYWLGLQNMHLLTLKQKYELRVDLEDFENNTAYAKYADFSISPNAVSAEEDGYTLFVAGFEDGGAGDSLSYHSGQKFSTFDRDQDLFVQNCAALSSGAFWFRSCHFANLNGFYLGGSHLSYANGINWAQWKGFYYSLKRTEMKIRRA

SEQ ID NO: 8625 - protein, 151 aa, Homo Sapiens
MSLLGPKVLLFLAAFIITSDDVTQATPETFTEDPNLVNDPATDETVLAVLADIAPSTDDLECWDEKFTCTRLYSVHRPVKQCIHQLCFTSLRRMYIVNKEICSRLVCKEHEAMKDELCRQMAGLPPRRLRRSNYFRLPPCENVDLQRPNGL

SEQ ID NO: 8626 - protein, 148 aa, Homo Sapiens
MSLLGPKVLLFLAAFIITSDWIPLGVNSQRGDDVTQATPETFTEDPNLVNDPATDETECWDEKFTCTRLYSVHRPVKQCIHQLCFTSLRRMYIVNKEICSRLVCKEHEAMKDELCRQMAGLPPRRLRRSNYFRLPPCENVDLQRPNGL

SEQ ID NO: 8627 - protein, 91 aa, Homo Sapiens
MSLLGPKVLLFLAAFIITSDWIPLGVNSQRGDDVTQATPETFTEDPNLVNDPATDETVLAVLADIAPSTDDLASLSEKNTTAECWDEKFTC

SEQ ID NO: 8628 - protein, 173 aa, Homo Sapiens
MSLLGPKVLLFLAAFIITSDWIPLGVNSQRGDDVTQATPETFTEDPNLVNDPATDETVLAVLADIAPSTDDLASLSEKNTTAECWDEKFTCTRLYSVHRPVKQCIHQLCFTSLRRMYIVNKEICSRLVCKEHEAMKDELCRQMAGLPPRRLRRSNYFRLPPCENVDLQRPNGL

SEQ ID NO: 8629 - protein, 138 aa, Homo Sapiens
MSLLGPKVLLFLAAFIITSDWIPLGVNSQRGDDVTQATPETFTEDPNLVNDPATDETVLAVLADIAPSTDDLASLSEKNTTAECWDEKFTCTRLYSVHRPVKQCIHQLCFTSLRRMYIVNKEICSRLVCKEHEAMKDP

SEQ ID NO: 8630 - protein, 109 aa, Homo Sapiens
MSLLGPKVLLFLAAFIITSDWIPLGVNSQRGDDVTQATPETFTEDPNLVNDPATDETVLAVLADIAPSTDDLDELCRQMAGLPPRRLRRSNYFRLPPCENVDLQRPNGL

SEQ ID NO: 8631 - protein, 163 aa, Homo Sapiens
MSLLGPKVLLFLAAFIITSDWIPLGVNSQRGDDVTQATPETFTEDPNLVNDPATDETVLAVLADIAPSTDDLECWDEKFTCTRLYSVHRPVKQCIHQLCFTSLRRMYIVNKEICSRLVCKEHEAMKDELCRQMAGLPPRRLRRSNYFRLPPCENVDLQRPNGL

SEQ ID NO: 8632 - protein, 163 aa, Homo Sapiens; identical to SEQ ID NO: 8631

SEQ ID NO: 8633 - protein, 128 aa, Homo Sapiens
MSLLGPKVLLFLAAFIITSDWIPLGVNSQRGDDVTQATPETFTEDPNLVNDPATDETVLAVLADIAPSTDDLECWDEKFTCTRLYSVHRPVKQCIHQLCFTSLRRMYIVNKEICSRLVCKEHEAMKDP

SEQ ID NO: 8634 - protein, 163 aa, Homo Sapiens
  misc_feature (1)..(1): Xaa can be any naturally occurring amino acid
XLAAFIITSDWIPLGVNSQRGDDVTQATPETFTEDPNLVNDPATDETVLAVLADIAPSTDDLASLSEKNTTAECWDEKFTCTRLYSVHRPVKQCIHQLCFTSLRRMYIVNKEICSRLVCKEHEAMKDELCRQMAGLPPRRLRRSNYFRLPPCENVDLQRPNGL

SEQ ID NO: 8635 - protein, 79 aa, Homo Sapiens
YSVHRPVKQCIHQLCFTSLRRMYIVNKEICSRLVCKEHEAMKDELCRQMAGLPPRRLRRSNYFRLPPCENVDLQRPNGL

SEQ ID NO: 8636 - protein, 75 aa, Homo Sapiens
FDFIHDVNKKHKEFVGNWNKNAVHVNLFETPVEAQYVRLYPTSCHTACTLRFELLGCELNARKADLRRGADDREQ

SEQ ID NO: 8637 - protein, 268 aa, Homo Sapiens
MPRPRLLAALCGALLCAPSLLVALDICSKNPCHNGGLCEEISQEVRGDVFPSYTCTCLKGYAGNHCETKCVEPLGLENGNIANSQIAASSVRVTFLGLQHWVPELARLNRAGMVNAWTPSSNDDNPWIQVNLLRRMWVTGVVTQGASRLASHEYLKAFKVAYSLNGHEFDFIHDVNKKHKEFVGNWNKNAVHVNLFETPVEAQYVRLYPTSCHTACTLRFELLGCELNAATRPGACISSAGTPPMHGWTSRATSTPGLRGATVTISGC

SEQ ID NO: 8638 - protein, 335 aa, Homo Sapiens
MPRPRLLAALCGALLCAPSLLVALDICSKNPCHNGGLCEEISQEVRGDVFPSYTCTCLKGYAGNHCETKCVEPLGLENGNIANSQIAASSVRVTFLGLQHWVPELARLNRAGMVNAWTPSSNDDNPWIQVNLLRRMWVTGVVTQGASRLASHEYLKAFKVAYSLNGHEFDFIHDVNKKHKEFVGNWNKNAVHVNLFETPVEAQYVRLYPTSCHTACTLRFELLGCELNGCANPLGLKNNSIPDKQITASSSYKTWGLHLFSWNPSYARLDKQGNFNAWVAGSYGNDQWLQIFPGNWDNHSHKKNLFETPILARYVRILPVAWHNRIALRLELLGC

SEQ ID NO: 8639 - protein, 387 aa, Homo Sapiens
MPRPRLLAALCGALLCAPSLLVALDICSKNPCHNGGLCEEISQEVRGDVFPSYTCTCLKGYAGNHCETKCVEPLGLENGNIANSQIAASSVRVTFLGLQHWVPELARLNRAGMVNAWTPSSNDDNPWIQVNLLRRMWVTGVVTQGASRLASHEYLKAFKVAYSLNGHEFDFIHDVNKKHKEFVGNWNKNAVHVNLFETPVEAQYVRLYPTSCHTACTLRFELLGCELNGCANPLGLKNNSIPDKQITASSSYKTWGLHLFSWNPSYARLDKQGNFNAWVAGSYGNDQWLQVDLGSSKEVTGIITQGARNFGSVQFVASYKVAYSNDSANWTEYQDPRTGSSKIFPGNWDNHSHKKNLFETPILARYVRILPVAWHNRIALRLELLGC

SEQ ID NO: 8640 - protein, 387 aa, Homo Sapiens; identical to SEQ ID NO: 8639

SEQ ID NO: 8641 - protein, 343 aa, Homo Sapiens
MPRPRLLAALCGALLCAPSLLVALECVEPLGLENGNIANSQIAASSVRVTFLGLQHWVPELARLNRAGMVNAWTPSSNDDNPWIQVNLLRRMWVTGVVTQGASRLASHEYLKAFKVAYSLNGHEFDFIHDVNKKHKEFVGNWNKNAVHVNLFETPVEAQYVRLYPTSCHTACTLRFELLGCELNGCANPLGLKNNSIPDKQITASSSYKTWGLHLFSWNPSYARLDKQGNFNAWVAGSYGNDQWLQVDLGSSKEVTGIITQGARNFGSVQFVASYKVAYSNDSANWTEYQDPRTGSSKIFPGNWDNHSHKKNLFETPILARYVRILPVAWHNRIALRLELLGC

SEQ ID NO: 8642 - protein, 25 aa, Homo Sapiens
MPRPRLLAALCGALLCAPSLLVALG

SEQ ID NO: 8643 - protein, 43 aa, Homo Sapiens
MAAEFDTFLASGLRWFCHVDDDNYVNPRALLQLLRAFPLARDV

SEQ ID NO: 8644 - protein, 132 aa, Homo Sapiens
MAAEFDTFLASGLRWFCHVDDDNYVNPRALLQLLRAFPLARDVYVGRPSLNRPIHASEPQPHNRTRLVQFWFATGGAGFCINRKLALKMAPWASGSRFMDTSALIRLPDDCTMGYIIECKLGGRLQPSPLFH

SEQ ID NO: 8645 - protein, 130 aa, Homo Sapiens
MQCRLPRGLAGALLTLLCMGLLCLRYHLNLSPQRVQGTPELSQPNPGPPKLQLHDVFIAVKTTRAFHRLRLELLLDTWVSRTREQGPTLWSPTAPRNTATQLCPARWLLSSTPSWPVGLGGSAMWTMTTM

SEQ ID NO: 8646 - protein, 321 aa, Homo Sapiens
MQCRLPRGLAGALLTLLCMGLLCLRYHLNLSPQRVQGTPELSQPNPGPPKLQLHDVFIAVKTTRAFHRLRLELLLDTWVSRTREQTFVFTDSPDKGLQERLGSHLVVTNCSAEHSHPALSCKMAAEFDTFLASGLRWFCHVDDDNYVNPRALLQLLRAFPLARDVYVGRPSLNRPIHASEPQPHNRTRLVQFWFATGGAGFCINRKLALKMAPWASGSRFMDTSALIRLPDDCTMGYIIECKLGGRLQPSPLFHSHLETLQLLRTAQLPEQVTLSYGVFEGKLNVIKLQGPFSPEEDPSRFRSLHCLLYPDTPWCPQLGAR

SEQ ID NO: 8647 - protein, 118 aa, Homo Sapiens
MQCRLPRGLAGALLTLLCMGLLCLRYHLNLSPQRVQGTPELSQPNPGPPKLQLHDVFIAVKTTRAFHRLRLELLLDTWVSRTREQTFVFTDSPDKGLQERLGSPDSSSLLQGPTLWSP

SEQ ID NO: 8648 - protein, 127 aa, Homo Sapiens
MQCRLPRGLAGALLTLLCMGLLCLRYHLNLSPQRVQGTPELSQPNPGPPKLQLHDVFIAVKTTRAFHRLRLELLLDTWVSRTREQVTNICLHRQPRQRPPGETGVPPCGHQLLRGTQPPSSVLQDGC

SEQ ID NO: 8649 - protein, 307 aa, Homo Sapiens
MQCRLPRGLAGALLTLLCMGLLCLRYHLNLSPQRVQGTPELSQPNPGPPKLQLHDVFIAVKTTRAFHRLRLELLLDTWVSRTREQVTRSHLVVTNCSAEHSHPALSCKMAAEFDTFLASGLRWFCHVDDDNYVNPRALLQLLRAFPLARDVYVGRPSLNRPIHASEPQPHNRTRLVQFWFATGGAGFCINRKLALKMAPWASGSRFMDTSALIRLPDDCTMGYIIECKLGGRLQPSPLFHSHLETLQLLRTAQLPEQVTLSYGVFEGKLNVIKLQGPFSPEEDPSRFRSLHCLLYPDTPWCPQLGAR

SEQ ID NO: 8650 - protein, 87 aa, Homo Sapiens
  misc_feature (1)..(1): Xaa can be any naturally occurring amino acid
XSHLETLQLLRTAQLPEQISLPPLSALSRYTLVSPAGCPMNPELLGKGWAETSGCALAPKVALWVPGKCLVIGSPWQGLRVVGKPRI

SEQ ID NO: 8651 - protein, 3065 aa, Homo Sapiens
MEEKQQIILANQDGGTVAGAAPTFFVILKQPGNGKTDQGILVTNQDACALASSVSSPVKSKGKICLPADCTVGGITVTLDNNSMWNEFYHRSTEMILTKQGRRMFPYCRYWITGLDSNLKYILVMDISPVDNHRYKWNGRWWEPSGKAEPHVLGRVFIHPESPSTGHYWMHQPVSFYKLKLTNNTLDQEGHIILHSMHRYLPRLHLVPAEKAVEVIQLNGPGVHTFTFPQTEFFAVTAYQNIQITQLKIDYNPFAKGFRDDGLNNKPQRDGKQKNSSDQEGNNISSSSGHRVRLTEGQGSEIQPGDLDPLSRGHETSGKGLEKTSLNIKRDFLGFMDTDSALSEVPQLKQEISECLIASSFEDDSRVASPLDQNGSFNVVIKEEPLDDYDYELGECPEGVTVKQEETDEETDVYSNSDDDPILEKQLKRHNKVDNPEADHLSSKWLPSSPSGVAKAKMFKLDTGKMPVVYLEPCAVTRSTVKISELPDNMLSTSRKDKSSMLAELEYLPTYIENSNETAFCLGKESENGLRKHSPDLRVVQKYPLLKEPQWKYPDISDSISTERILDDSKDSVGDSLSGKEDLGRKRTTMLKIATAAKVVNANQNASPNVPGKRGRPRKLKLCKAGRPPKNTGKSLISTKNTPVSPGSTFPDVKPDLEDVDGVLFVSFESKEALDIHAVDGTTEESSSLQASTTNDSGYRARISQLEKELIEDLKTLRHKQVIHPGLQEVGLKLNSVDPTMSIDLKYLGVQLPLAPATSFPFWNLTGTNPASPDAGFPFVSRTGKTNDFTKIKGWRGKFHSASASRNEGGNSESSLKNRSAFCSDKLDEYLENEGKLMETSMGFSSNAPTSPVVYQLPTKSTSYVRTLDSVLKKQSTISPSTSYSLKPHSVPPVSRKAKSQNRQATFSGRTKSSYKSILPYPVSPKQKYSHVILGDKVTKNSSGIISENQANNFVVPTLDENIFPKQISLRQAQQQQQQQQGSRPPGLSKSQVKLMDLEDCALWEGKPRTYITEERADVSLTTLLTAQASLKTKPIHTIIRKRAPPCNNDFCRLGCVCSSLALEKRQPAHCRRPDCMFGCTCLKRKVVLVKGGSKTKHFQRKAAHRDPVFYDTLGEEAREEEEGIREEEEQLKEKKKRKKLEYTICETEPEQPVRHYPLWVKVEGEVDPEPVYIPTPSVIEPMKPLLLPQPEVLSPTVKGKLLTGIKSPRSYTPKPNPVIREEDKDPVYLYFESMMTCARVRVYERKKEDQRQPSSSSSPSPSFQQQTSCHSSPENHNNAKEPDSEQQPLKQLTCDLEDDSDKLQEKSWKSSCNEGESSSTSYMHQRSPGGPTKLIEIISDCNWEEDRNKILSILSQHINSNMPQSLKVGSFIIELASQRKSRGEKNPPVYSSRVKISMPSCQDQDDMAEKSGSETPDGPLSPGKMEDISPVQTDALDSVRERLHGGKGLPFYAGLSPAGKLVAYKRKPSSSTSGLIQVASNAKVAASRKPRTLLPSTSNSKMASSSGTATNRPGKNLKAFVPAKRPIAARPSPGGVFTQFVMSKVGALQQKIPGVSTPQTLAGTQKFSIRPSPVMVVTPVVSSEPVQVCSPVTAAVTTTTPQVFLENTTAVTPMTAISDVETKETTYSSGATTTGVVEVSETNTSTSVTSTQSTATVNLTKTTGITTPVASVAFPKSLVASPSTITLPVASTASTSLVVVTAAASSSMVTTPTSSLGSVPIILSGINGSPPVSQRPENAAQIPVATPQVSPNTVKRAGPRLLLIPVQQGSPTLRPVSNTQLQGHRMVLQPVRSPSGMNLFRHPNGQIVQLLPLHQLRGSNTQPNLQPVMFRNPGSVMGIRLPAPSKPSETPPSSTSSSAFSVMNPVIQAVGSSSAVNVITQAPSLLSSGASFVSQAGTLTLRISPPEPQSFASKTGSETKITYSSGGQPVGTASLIPLQSGSFALLQLPGQKPVPSSILQHVASLQMKRESQNPDQKDETNSIKREQETKKVLQSEGEAVDPEANVIKQNSGAATSEETLNDSLEDRGDHLDEECLPEEGCATVKPSEHSCITGSHTDQDYKDVNEEYGARNRKSSKEKVAVLEVRTISEKASNKTVQNLSKVQHQKLGDVKVEQQKGFDNPEENSSEFPVTFKEESKFELSGSKVMEQQSNLQPEAKEKECGDSLEKDRERWRKHLKGPLTRKCVGASQECKKEADEQLIKETKTCQENSDVFQQEQGISDLLGKSGITEDARVLKTECDSWSRISNPSAFSIVPRRAAKSSRGNGHFQGHLLLPGEQIQPKQEKKGGRSSADFTVLDLEEDDEDDNEKTDDSIDEIVDVVSDYQSEEVDDVEKNNCVEYIEDDEEHVDIETVEELSEEINVAHLKTTAAHTQSFKQPSCTHISADEKAAERSRKAPPIPLKLKPDYWSDKLQKEAEAFAYYRRTHTANERRRRGEMRDLFEKLKITLGLLHSSKVSKSLILTRAFSEIQGLTDQADKLIGQKNLLTRKRNILIRKVSSLSGKTEEVVLKKLEYIYAKQQALEAQKRKKKMGSDEFDISPRISKQQEGSSASSVDLGQMFINNRRGKPLILSRKKDQATENTSPLNTPHTSANLVMTPQGQLLTLKGPLFSGPVVAVSPDLLESDLKPQVAGSAVALPENDDLFMMPRIVNVTSLATEGGLVDMGGSKYPHEVPDSKPSDHLKDTVRNEDNSLEDKGRISSRGNRDGRVTLGPTQVFLANKDSGYPQIVDVSNMQKAQEFLPKKISGDMRGIQYKWKESESRGERVKSKDSSFHKLKMKDLKDSSIEMELRKVTSAIEEAALDSSELLTNMEDEDDTDETLTSLLNEIAFLNQQLNDDSVGLAELPSSMDTEFPGDARRAFISKVPPGSRATFQVEHLGTGLKELPDVQGESDSISPLLLHLEDDDFSENEKQLAEPASEPDVLKIVIDSEIKDSLLSNKKAIDGGKNTSGLPAEPESVSSPPTLHMKTGLENSNSTDTLWRPMPKLAPLGLKVANPSSDADGQSLKVMPCLAPIAAKVGSVGHKMNLTGNDQEGRESKVMPTLAPVVAKLGNSGASPSSAGK

SEQ ID NO: 8652 - protein, 1086 aa, Homo Sapiens
MEEKQQIILANQDGGTVAGAAPTFFVILKQPGNGKTDQGILVTNQDACALASSVSSPVKSKGKICLPADCTVGGITVTLDNNSMWNEFYHRSTEMILTKQGRRMFPYCRYWITGLDSNLKYILVMDISPVDNHRYKWNGRWWEPSGKAEPHVLGRVFIHPESPSTGHYWMHQPVSFYKLKLTNNTLDQEGHIILHSMHRYLPRLHLVPAEKAVEVIQLNGPGVHTFTFPQTEFFAVTAYQNIQITQLKIDYNPFAKGFRDDGLNNKPQRDGKQKNSSDQEGNNISSSSGHRVRLTEGQGSEIQPGDLDPLSRGHETSGKGLEKTSLNIKRDFLGFMDTDSALSEVPQLKQEISECLIASSFEDDSRVASPLDQNGSFNVVIKEEPLDDYDYELGECPEGVTVKQEETDEETDVYSNSDDDPILEKQLKRHNKVDNPEADHLSSKWLPSSPSGVAKAKMFKLDTGKMPVVYLEPCAVTRSTVKISELPDNMLSTSRKDKSSMLAELEYLPTYIENSNETAFCLGKESENGLRKHSPDLRVVQKYPLLKEPQWKYPDISDSISTERILDDSKDSVGDSLSGKEDLGRKRTTMLKIATAAKVVNANQNASPNVPGKRGRPRKLKLCKAGRPPKNTGKSLISTKNTPVSPGSTFPDVKPDLEDVDGVLFVSFESKEALDIHAVDGTTEESSSLQASTTNDSGYRARISQLEKELIEDLKTLRHKQVIHPGLQEVGLKLNSVDPTMSIDLKYLGVQLPLAPATSFPFWNLTGTNPASPDAGFPFVSRTGKTNDFTKIKGWRGKFHSASASRNEGGNSESSLKNRSAFCSDKLDEYLENEGKLMETSMGFSSNAPTSPVVYQLPTKSTSYVRTLDSVLKKQSTISPSTSYSLKPHSVPPVSRKAKSQNRQATFSGRTKSSYKSILPYPVSPKQKYSHVILGDKVTKNSSGIISENQANNFVVPTLDENIFPKQISLRQAQQQQQQQQGSRPPGLSKSQVKLMDLEDCALWEGKPRTYITEERADVSLTTLLTAQASLKTKPIHTIIRKRAPPCNNDFCRLGCVCSSLALEKRQPAHCRRPDCMFGCTCLKRK

SEQ ID NO: 8653 - protein, 1138 aa, Homo Sapiens
MEEKQQIILANQDGGTVAGAAPTFFVILKQPGNGKTDQGILVTNQDACALASSVSSPVKSKGKICLPADCTVGGITVTLDNNSMWNEFYHRSTEMILTKQGRRMFPYCRYWITGLDSNLKYILVMDISPVDNHRYKWNGRWWEPSGKAEPHVLGRVFIHPESPSTGHYWMHQPVSFYKLKLTNNTLDQEGHIILHSMHRYLPRLHLVPAEKAVEVIQLNGPGVHTFTFPQTEFFAVTAYQNIQITQLKIDYNPFAKGFRDDGLNNKPQRDGKQKNSSDQEGNNISSSSGHRVRLTEGQGSEIQPGDLDPLSRGHETSGKGLEKTSLNIKRDFLGFMDTDSALSEVPQLKQEISECLIASSFEDDSRVASPLDQNGSFNVVIKEEPLDDYDYELGECPEGVTVKQEETDEETDVYSNSDDDPILEKQLKRHNKVDNPEADHLSSKWLPSSPSGVAKAKMFKLDTGKMPVVYLEPCAVTRSTVKISELPDNMLSTSRKDKSSMLAELEYLPTYIENSNETAFCLGKESENGLRKHSPDLRVVQKYPLLKEPQWKYPDISDSISTERILDDSKDSVGDSLSGKEDLGRKRTTMLKIATAAKVVNANQNASPNVPGKRGRPRKLKLCKAGRPPKNTGKSLISTKNTPVSPGSTFPDVKPDLEDVDGVLFVSFESKEALDIHAVDGTTEESSSLQASTTNDSGYRARISQLEKELIEDLKTLRHKQVIHPGLQEVGLKLNSVDPTMSIDLKYLGVQLPLAPATSFPFWNLTGTNPASPDAGFPFVSRTGKTNDFTKIKGWRGKFHSASASRNEGGNSESSLKNRSAFCSDKLDEYLENEGKLMETSMGFSSNAPTSPVVYQLPTKSTSYVRTLDSVLKKQSTISPSTSYSLKPHSVPPVSRKAKSQNRQATFSGRTKSSYKSILPYPVSPKQKYSHVILGDKVTKNSSGIISENQANNFVVPTLDENIFPKQISLRQAQQQQQQQQGSRPPGLSKSQVKLMDLEDCALWEGKPRTYITEERADVSLTTLLTAQASLKTKPIHTIIRKRAPPCNNDFCRLGCVCSSLALEKRQPAHCRRPDCMFGCTCLKRKVVLVKGGSKTKHFQRKAAHRDPVFYDTLGEEAREEEEGIREEEEQLKEKKKR

SEQ ID NO: 8654 - protein, 2856 aa, Homo Sapiens
MEEKQQIILANQDGGTVAGAAPTFFVILKQPGNGKTDQGILVTNQDACALASSVSSPVKSKGKICLPADCTVGGITVTLDNNSMWNEFYHRSTEMILTKQGRRMFPYCRYWITGLDSNLKYILVMDISPVDNHRYKWNGRWWEPSGKAEPHVLGRVFIHPESPSTGHYWMHQPVSFYKLKLTNNTLDQEGHIILHSMHRYLPRLHLVPAEKAVEVIQLNGPGVHTFTFPQTEFFAVTAYQNIQITQLKIDYNPFAKGFRDDGLNNKPQRDGKQKNSSDQEGNNISSSSGHRVRLTEGQGSEIQPGDLDPLSRGHETSGKGLEKTSLNIKRDFLGFMDTDSALSEVPQLKQEISECLIASSFEDDSRVASPLDQNGSFNVVIKEEPLDDYDYELGECPEGVTVKQEETDEETDVYSNSDDDPILEKQLKRHNKVDNPEADHLSSKWLPSSPSGVAKAKMFKLDTGKMPVVYLEPCAVTRSTVKISELPDNMLSTSRKDKSSMLAELEYLPTYIENSNETAFCLGKESENGLRKHSPDLRVVQKYPLLKEPQWKYPDISDSISTERILDDSKDSVGDSLSGKEDLGRKRTTMLKIATAAKVVNANQNASPNVPGKRGRPRKLKLCKAGRPPKNTGKSLISTKNTPVSPGSTFPDVKPDLEDVDGVLFVSFESKEALDIHAVDGTTEESSSLQASTTNDSGYRARISQLEKELIEDLKTLRHKQVIHPGLQEVGLKLNSVDPTMSIDLKYLGVQLPLAPATSFPFWNLTGTNPASPDAGFPFVSRTGKTNDFTKIKGWRGKFHSASASRNEGGNSESSLKNRSAFCSDKLDEYLENEGKLMETSMGFSSNAPTSPVVYQLPTKSTSYVRTLDSVLKKQSTISPSTSYSLKPHSVPPVSRKAKSQNRQATFSGRTKSSYKSILPYPVSPKQKYSHVILGDKVTKNSSGIISENQANNFVVPTLDENIFPKQISLRQAQQQQQQQQGSRPPGLSKSQVKLMDLEDCALWEGKPRTYITEERADVSLTTLLTAQASLKTKPIHTIIRKRAPPCNNDFCRLGCVCSSLALEKRQPAHCRRPDCMFGCTCLKRKVVLVKGGSKTKHFQRKAAHRDPVFYDTLGEEAREEEEGIREEEEQLKEKKKRKKLEYTICETEPEQPVRHYPLWVKVEGEVDPEPVYIPTPSVIEPMKPLLLPQPEVLSPTVKGKLLTGIKSPRSYTPKPNPVIREEDKDPVYLYFESMMTCARVRVYERKKEDQRQPSSSSSPSPSFQQQTSCHSSPENHNNAKEPDSEQQPLKQLTCDLEDDSDKLQEKSWKSSCNEGESSSTSYMHQRSPGGPTKLIEIISDCNWEEDRNKILSILSQHINSNMPQSLKVGSFIIELASQRKSRGEKNPPVYSSRVKISMPSCQDQDDMAEKSGSETPDGPLSPGKMEDISPVQTDALDSVRERLHGGKGLPFYAGLSPAGKLVAYKRKPSSSTSGLIQVASNAKVAASRKPRTLLPSTSNSKMASSSGTATNRPGKNLKAFVPAKRPIENAAQIPVATPQVSPNTVKRAGPRLLLIPVQQGSPTLRPVSNTQLQGHRMVLQPVRSPSGMNLFRHPNGQIVQLLPLHQLRGSNTQPNLQPVMFRNPGSVMGIRLPAPSKPSETPPSSTSSSAFSVMNPVIQAVGSSSAVNVITQAPSLLSSGASFVSQAGTLTLRISPPEPQSFASKTGSETKITYSSGGQPVGTASLIPLQSGSFALLQLPGQKPVPSSILQHVASLQMKRESQNPDQKDETNSIKREQETKKVLQSEGEAVDPEANVIKQNSGAATSEETLNDSLEDRGDHLDEECLPEEGCATVKPSEHSCITGSHTDQDYKDVNEEYGARNRKSSKEKVAVLEVRTISEKASNKTVQNLSKVQHQKLGDVKVEQQKGFDNPEENSSEFPVTFKEESKFELSGSKVMEQQSNLQPEAKEKECGDSLEKDRERWRKHLKGPLTRKCVGASQECKKEADEQLIKETKTCQENSDVFQQEQGISDLLGKSGITEDARVLKTECDSWSRISNPSAFSIVPRRAAKSSRGNGHFQGHLLLPGEQIQPKQEKKGGRSSADFTVLDLEEDDEDDNEKTDDSIDEIVDVVSDYQSEEVDDVEKNNCVEYIEDDEEHVDIETVEELSEEINVAHLKTTAAHTQSFKQPSCTHISADEKAAERSRKAPPIPLKLKPDYWSDKLQKEAEAFAYYRRTHTANERRRRGEMRDLFEKLKITLGLLHSSKVSKSLILTRAFSEIQGLTDQADKLIGQKNLLTRKRNILIRKVSSLSGKTEEVVLKKLEYIYAKQQALEAQKRKKKMGSDEFDISPRISKQQEGSSASSVDLGQMFINNRRGKPLILSRKKDQATENTSPLNTPHTSANLVMTPQGQLLTLKGPLFSGPVVAVSPDLLESDLKPQVAGSAVALPENDDLFMMPRIVNVTSLATEGGLVDMGGSKYPHEVPDSKPSDHLKDTVRNEDNSLEDKGRISSRGNRDGRVTLGPTQVFLANKDSGYPQIVDVSNMQKAQEFLPKKISGDMRGIQYKWKESESRGERVKSKDSSFHKLKMKDLKDSSIEMELRKVTSAIEEAALDSSELLTNMEDEDDTDETLTSLLNEIAFLNQQLNDDSVGLAELPSSMDTEFPGDARRAFISKVPPGSRATFQVEHLGTGLKELPDVQGESDSISPLLLHLEDDDFSENEKQLAEPASEPDVLKIVIDSEIKDSLLSNKKAIDGGKNTSGLPAEPESVSSPPTLHMKTGLENSNSTDTLWRPMPKLAPLGLKVANPSSDADGQSLKVMPCLAPIAAKVGSVGHKMNLTGNDQEGRESKVMPTLAPVVAKLGNSGASPSSAGK

SEQ ID NO: 8655 - protein, 3065 aa, Homo Sapiens; identical to SEQ ID NO: 8651

SEQ ID NO: 8656 - protein, 2856 aa, Homo Sapiens; identical to SEQ ID NO: 8654

SEQ ID NO: 8657 - protein, 61 aa, Homo Sapiens [sequence omitted]

SEQ ID NO: 8658 - protein, 83 aa, Homo Sapiens
  misc_feature (1)..(1): Xaa can be any naturally occurring amino acid
XDQEGNNISSSSGHRVRLTEGQGSEIQPGDLDPLSRGHETSGKGLEKTSLNIKRDFLGFMDTDSALSEVPQLKQEISEWYSFA

SEQ ID NO: 8659 - protein, 1174 aa, Homo Sapiens
  misc_feature (1)..(1): Xaa can be any naturally occurring amino acid
XLTCDLEDDSDKLQEKSWKSSCNEGESSSTSYMHQRSPGGPTKLIEIISDCNWEEDRNKILSILSQHINSNMPQSLKVNGKSYPQAKLLLGQMGALHPANRLAAYITGRLRPSVLDLSTLSTVISKVASNAKVAASRKPRTLLPSTSNSKMASSSGTATNRPGKNLKAFVPAKRPIAARPSPGGVFTQFVMSKVGALQQKIPGVSTPQTLAGTQKFSIRPSPVMVVTPVVSSEPVQVCSPVTAAVTTTTPQVFLENTTAVTPMTAISDVETKETTYSSGATTTGVVEVSETNTSTSVTSTQSTATVNLTKTTGITTPVASVAFPKSLVASPSTITLPVASTASTSLVVVTAAASSSMVTTPTSSLGSVPIILSGINGSPPVSQRPENAAQIPVATPQVSPNTVKRAGPRLLLIPVQQGSPTLRPVSNTQLQGHRMVLQPVRSPSGMNLFRHPNGQIVQLLPLHQLRGSNTQPNLQPVMFRNPGSVMGIRLPAPSKPSETPPSSTSSSAFSVMNPVIQAVGSSSAVNVITQAPSLLSSGASFVSQAGTLTLRISPPEPQSFASKTGSETKITYSSGGQPVGTASLIPLQSGSFALLQLPGQKPVPSSILQHVASLQMKRESQNPDQKDETNSIKREQETKKVLQSEGEAVDPEANVIKQNSGAATSEETLNDSLEDRGDHLDEECLPEEGCATVKPSEHSCITGSHTDQDYKDVNEEYGARNRKSSKEKVAVLEVRTISEKASNKTVQNLSKVQHQKLGDVKVEQQKGFDNPEENSSEFPVTFKEESKFELSGSKVMEQQSNLQPEAKEKECGDSLEKDRERWRKHLKGPLTRKCVGASQECKKEADEQLIKETKTCQENSDVFQQEQGISDLLGKSGITEDARVLKTECDSWSRISNPSAFSIVPRRAAKSSRGNGHFQGHLLLPGEQIQPKQEKKGGRSSADFTVLDLEEDDEDDNEKTDDSIDEIVDVVSDYQSEEVDDVEKNNCVEYIEDDEEHVDIETVEELSEEINVAHLKTTAAHTQSFKQPSCTHISADEKAAERSRKAPPIPLKLKPDYWSDKLQKEAEAFAYYRRTHTANERRRRGEMRDLFEKLKITLGLLHSSKVSKSLILTRAFSEIQGLTDQADKLIGQKNLLTRKRNILIRKVSSLSGKTEEVVLKKLEYIYAKQQALEA

SEQ ID NO: 8660 - protein, 447 aa, Homo Sapiens
MRFRIYKRKVLILTLVVAACGFVLWSSNGRQRKNEALAPPLLDAEPARGAGGRGGDHPSVAVGIRRVSNVSAASLVPAVPQPEADNLTLRYRSLVYQLNFDQTLRNVDKAGTWAPRELVLVVQVHNRPEYLRLLLDSLRKAQGIDNVLVIFSHDFWSTEINQLIAGVNFCPVLQVFFPFSIQLYPNEFPGSDPRDCPRDLPKNAALKLGCINAEYPDSFGHYREAKFSQTKHHWWWKLHFVWERVKILRDYAGLILFLEEDHYLAPDFYHVFKKMWKLKQQECPECDVLSLGTYSASRSFYGMADKVDVKTWKSTEHNMGLALTRNAYQKLIECTDTFCTYDDYNWDWTLQYLTVSCLPKFWKVLVPQIPRIFHAGDCGMHHKKTCRPSTQSAQIESLLNNNKQYMFPETLTISEKFTVVAISPPRKNGGWGDIRDHELCKSYRRLQ

SEQ ID NO: 8661 - protein, 108 aa, Homo Sapiens
MESCSCHPGSGVQWRDHGSLQLPPPGFKMKMRRYKLFLMFCMAGLCLISFLHFFKTLSYVTFPRELASLSPNLVSSFFWNNAPVTPQASPEPGGPDLLRTPLYSHSPL

SEQ ID NO: 8662 - protein, 161 aa, Homo Sapiens
MKMRRYKLFLMFCMAGLCLISFLHFFKTLSYVTFPRELASLSPNLVSSFFWNNAPVTPQASPEPGGPDLLRTPLYSHSPLLQPLPPSKAAEELHRVDLVLPEDTTEYFVRTKAGGVCFKPGTKMLERPPPGRPEEKPEGANGSSARRPPRYLLSARERTGG

SEQ ID NO: 8663 - protein, 533 aa, Homo Sapiens
MKMRRYKLFLMFCMAGLCLISFLHFFKTLSYVTFPRELASLSPNLVSSFFWNNAPVTPQASPEPGGPDLLRTPLYSHSPLLQPLPPSKAAEELHRVDLVLPEDTTEYFVRTKAGGVCFKPGTKMLERPPPGRPEEKPEGANGSSARRPPRYLLSARERTGGRGARRKWVECVCLPGWHGPSCGVPTVVQYSNLPTKERLVPREVPRRVINAINVNHEFDLLDVRFHELGDVVDAFVVCESNFTAYGEPRPLKFREMLTNGTFEYIRHKVLYVFLDHFPPGGRQDGWIADDYLRTFLTQDGVSRLRNLRPDDVFIIDDADEIPARDGVLFLKLYDGWTEPFAFHMRKSLYGFFWKQPGTLEVVSGCTVDMLQAVYGLDGIRLRRRQYYTMPNFRQYENRTGHILVQWSLGSPLHFAGWHCSWCFTPEGIYFKLVSAQNGDFPRWGDYEDKRDLNYIRGLIRTGGWFDGTQQEYPPADPSEHMYAPKYLLKNYDRFHYLLDNPYQEPRSTAAGGWRHRGPEGRPPARGKLDEAEV

SEQ ID NO: 8664 - protein, 423 aa, Homo Sapiens
MNYSITVSIVMGIPTVKREVKSYLIETLHSLIDNLYPEEKLDCVIVVFIGETDIDYVHGVVANLEKEFSKEISSGLVEVISPPESYYPDLTNLKETFGDSKERVRWRTKQNLDYCFLMMYAQEKGIYYIQLEDDIIVKQNYFNTIKNFALQLSSEEWMILEFSQLGFIGKMFQAPDLTLIVEFIFMFYKEKPIDWLLDHILWVKVCNPEKDAKHCDRQKANLRIRFRPSLFQHVGLHSSLSGKIQKLTDKDYMKPLLLKIHVNPPAEVSTSLKVYQGHTLEKTYMGEDFFWAITPIAGDYILFKFDKPVNVESYLFHSGNQEHPGDILLNTTVEVLPFKSEGLEISKETKDKRLEDGYFRIGKFENGVAEGMVDPSLNPISAFRLSVIQNSAVWAILNEQRVFSGWWQKSRDKAEGPQAPLLF

SEQ ID NO: 8665 - protein, 535 aa, Homo Sapiens
MRLRNGTVATALAFITSFLTLSWYTTWQNGKEKLIAYQREFLALKERLRIAEHRISQRSSELNTIVQQFKRVGAETNGSKDALNKFSDNTLKLLKELTSKKSLQVPSIYYHLPHLLKNEGSLQPAVQIGNGRTGVSIVMGIPTVKREVKSYLIETLHSLIDNLYPEEKLDCVIVVFIGETDIDYVHGVVANLEKEFSKEISSGLVEVISPPESYYPDLTNLKETFGDSKERVRWRTKQNLDYCFLMMYAQEKGIYYIQLEDDIIVKQNYFNTIKNFALQLSSEEWMILEFSQLGFIGKMFQAPDLTLIVEFIFMFYKEKPIDWLLDHILWVKVCNPEKDAKHCDRQKANLRIRFRPSLFQHVGLHSSLSGKIQKLTDKDYMKPLLLKIHVNPPAEVSTSLKVYQGHTLEKTYMGEDFFWAITPIAGDYILFKFDKPVNVESYLFHSGNQEHPGDILLNTTVEVLPFKSEGLEISKETKDKRLEDGYFRIGKFENGVAEGMVDPSLNPISAFRLSVIQNSAVWAILNEIHIKKATN

SEQ ID NO: 8666 - protein, 535 aa, Homo Sapiens; identical to SEQ ID NO: 8665

SEQ ID NO: 8667 - protein, 535 aa, Homo Sapiens; identical to SEQ ID NO: 8665

SEQ ID NO: 8668 - protein, 44 aa, Homo Sapiens
MRLRNGTVATALAFITSFLTLSWYTTWQNGKGKENDSENVHEMY

SEQ ID NO: 8669 - protein, 200 aa, Homo Sapiens
MGIPSVRREVHSYLTDTLHSLISELSPQEKEDSVIVVLIAETDSQYTSAVTENIKALFPTEIHSGLLEVISPSPHFYPDFSRLRESFGDPKERVRWRTKQNLDYCFLMMYAQSKGIYYVQLEDDIVAKPNYLSTMKNFALQQPSEDWMILEFSQLGFIGKMFKSLDLSLIVEFILMFYRDKPIDWLLDHILWVKVCNPEK

SEQ ID NO: 8670 - protein, 548 aa, Homo Sapiens
MRLRNGTFLTLLLFCLCAFLSLSWYAALSGQKGDVVDVYQREFLALRDRLHAAEQESLKRSKELNLVLDEIKRAVSERQALRDGDGNRTWGRLTEDPRLKPWNGSHRHVLHLPTVFHHLPHLLAKESSLQPAVRVGQGRTGVSVVMGIPSVRREVHSYLTDTLHSLISELSPQEKEDSVIVVLIAETDSQYTSAVTENIKALFPTEIHSGLLEVISPSPHFYPDFSRLRESFGDPKERVRWRTKQNLDYCFLMMYAQSKGIYYVQLEDDIVAKPNYLSTMKNFALQQPSEDWMILEFSQLGFIGKMFKSLDLSLIVEFILMFYRDKPIDWLLDHILWVKVCNPEKDAKHCDRQKANLRIRFKPSLFQHVGTHSSLAGKIQKLKDKDFGKQALRKEHVNPPAEVSTSLKTYQHFTLEKAYLREDFFWAFTPAAGDFIRFRFFQPLRLERFFFRSGNIEHPEDKLFNTSVEVLPFDNPQSDKEALQEGRTATLRYPRSPDGYLQIGSFYKGVAEGEVDPAFGPLEALRLSIQTDSPVWVILSEIFLKKAD

SEQ ID NO: 8671 - protein, 157 aa, Homo Sapiens
MSRVAGTRTDVNELLQRWTPRCVRWHTGGARRVALDRPLVTACLPPAGDVVDVYQREFLALRDRLHAAEQESLKRSKELNLVLDEIKRAVSERQALRDGDGNRTWGRLTEDPRLKPWNGSHRHVLHLPTVFHHLPHLLAKESSLQPAVRVGQGRTGD

SEQ ID NO: 8672 - protein, 563 aa, Homo Sapiens
MSRVAGTRTDVNELLQRWTPRCVRWHTGGARRVALDRPLVTACLPPAGDVVDVYQREFLALRDRLHAAEQESLKRSKELNLVLDEIKRAVSERQALRDGDGNRTWGRLTEDPRLKPWNGSHRHVLHLPTVFHHLPHLLAKESSLQPAVRVGQGRTGVSVVMGIPSVRREVHSYLTDTLHSLISELSPQEKEDSVIVVLIAETDSQYTSAVTENIKALFPTEIHSGLLEVISPSPHFYPDFSRLRESFGDPKERVRWRTKQNLDYCFLMMYAQSKGIYYVQLEDDIVAKPNYLSTMKNFALQQPSEDWMILEFSQLGFIGKMFKSLDLSLIVEFILMFYRDKPIDWLLDHILWVKVCNPEKDAKHCDRQKANLRIRFKPSLFQHVGTHSSLAGKIQKLKDKDFGKQALRKEHVNPPAEVSTSLKTYQHFTLEKAYLREDFFWAFTPAAGDFIRFRFFQPLRLERFFFRSGNIEHPEDKLFNTSVEVLPFDNPQSDKEALQEGRTATLRYPRSPDGYLQIGSFYKGVAEGEVDPAFGPLEALRLSIQTDSPVWVILSEIFLKKAD

SEQ ID NO: 8673 - protein, 373 aa, Homo Sapiens
  misc_feature (1)..(1): Xaa can be any naturally occurring amino acid
XEDSVIVVLIAETDSQYTSAVTENIKALFPTEIHSGLLEVISPSPHFYPDFSRLRESFGDPKERVRWRTKQNLDYCFLMMYAQSKGIYYVQLEDDIVAKPNYLSTMKNFALQQPSEDWMILEFSQLGFIGKMFKSLDLSLIVEFILMFYRDKPIDWLLDHILWVKVCNPEKDAHCDRQKANLRIRFKPSLFQHVGTHSSLAGKIQKLKDKDFGKQALRKEHVNPPAEVSTSLKTYQHFTLEKAYLREDFFWAFTPAAGDFIRFRFFQPLRLERFFFRSGNIEHPEDKLFNTSVEVLPFDNPQSDKEALQEGRTATLRYPRSPDGYLQIGSFYKGVAEGEVDPAFGPLEALRLSIQTDSPVWVILSEIFLKKAD

SEQ ID NO: 8674 - protein, 429 aa, Homo Sapiens
  misc_feature (1)..(1): Xaa can be any naturally occurring amino acid
XEQESLKRSKELNLVLDEIKRAVSERQALRDGDGNRTWGRLTEDPRLKPWNGSHRHVLHLPTVFHHLPHLLAKESSLQPAVRVGQGRTGVSVVMGIPSVRREVHSYLTDTLHSLISELSPQEKEDSVIVVLIAETDSQYTSAVTENIKALFPTEIHSGLLEVISPSPHFYPDFSRLRESFGDPKERVRWRTKQNLDYCFLMMYAQSKGIYYVQLEDDIVAKPNYLSTMKNFALQQPSEDWMILEFSQLGFIGQRLWKAGAAEGACEPASRGEHEPEDIPALHPGESLPARGLLLGLHPCRGGLHPLPLLPTSKTGAVLLPQWEHRAPGGQALQHVCGGAALRQPSVRQGGPAGGPHRHPPVPSEPRRLPPDRLLLQGSGRGRGGPSLRPSGSTAPLDPDGLPCVGDSERDLPEKGRLSCGLLRVPCGQP

SEQ ID NO: 8675 - protein, 322 aa, Homo Sapiens
  misc_feature (1)..(1): Xaa can be any naturally occurring amino acid
XFPTEIHSGLLEVISPSPHFYPDFSRLRESFGDPKERVRWRTKQNLDYCFLMMYAQSKGIYYVQLEDDIVAKPNYLSTMKNFALQQPSEDWMILEFSQLGFIGKMFKSLDLSLIVEFILMFYRDKPIDWLLDHILWVKVCNPEKDAAGIKVGAHAITAVPPPLQDKDFGKQALRKEHVNPPAEVSTSLKTYQHFTLEKAYLREDFFWAFTPAAGDFIRFRFFQPLRLERFFFRSGNIEHPEDKLFNTSVEVLPFDNPQSDKEALQEGRTATLRYPRSPDGYLQIGSFYKGVAEGEVDPAFGPLEALRLSIQTDSPVWVILSE

SEQ ID NO: 8676 - protein, 240 aa, Homo Sapiens
  misc_feature (1)..(1): Xaa can be any naturally occurring amino acid
XKMFKSLDLSLIVEFILMFYRDKPIDWLLDHILWVKVCNPEKDAKHCDRQKANLRIRFKPSLFQHVGTHSSLAGKIQKLKDKDFGKQALRKEHVNPPAEVSTSLKTYQHFTLEKAYLREDFFWAFTPAAGDFIRFRFFQPLRLERGNIEHPEDKLFNTSVEVLPFDNPQSDKEALQEGRTATLRYPRSPDGYLQIGSFYKGVAEGEVDPAFGPLEALRLSIQTDSPVWVILSEIFLKKAD

SEQ ID NO: 8677 - protein, 150 aa, Homo Sapiens
  misc_feature (1)..(1): Xaa can be any naturally occurring amino acid
XLLLFCLCAFLSLSWYAALSGQKGDVVDVYQREFLALRDRLHAAEQESLKRSKELNLVLDEIKRAVSERQALRDGDGNRTWGRLTGPPIEAVERLTPARAAPAHRLPSPATPAGQGEQSAARGARGPGPHRSVGGDGHPERAARGALVPD

SEQ ID NO: 8678 - protein, 245 aa, Homo Sapiens
  misc_feature (1)..(1): Xaa can be any naturally occurring amino acid
XQYTSAVTENIKALFPTEIHSGLLEVISPSPHFYPDFSRLRESFGDPKERVRWRTKQNLDYCFLMMYAQSKGIYYVQLEDDIVAKPNYLSTMKNFALQQPSEDWMILEFSQLGFIGKMFKSLDLSLIVEFILMFYRDKPIDWLLDHILWVKVCNPEKDAKHCDRQKANLRIRFKPSLFQHVGTHSSLAGKIQKLKDKDFGKQALRKEHVNPPAEWEHRAPGGQALQHVCGGAALRQPSVRQGGPA

SEQ ID NO: 8679 - protein, 307 aa, Homo Sapiens
  misc_feature (1)..(1): Xaa can be any naturally occurring amino acid
XTSAVTENIKALFPTEIHSGLLEVISPSPHFYPDFSRLRESFGDPKERVRWRTKQNLDYCFLMMYAQSKGIYYVQLEDDIVAKPNYLSTMKNFALQQPSEDWMILEFSQLGFIARGHSLLAGWQDPETEGQRLWKAGAAEGACEPASRGEHEPEDIPALHPGESLPARGLLLGLHPCRGGLHPLPLLPTSKTGAVLLPQWEHRAPGGQALQHVCGGAALRQPSVRQGGPAGGPHRHPPVPSEPRRLPPDRLLLQGSGRGRGGPSLRPSGSTAPLDPDGLPCVGDSERDLPEKGRLSCGLLRVPCGQP

SEQ ID NO: 8680 - protein, 113 aa, Homo Sapiens
MRTKQVNLLITLVAVALFSFSCFSIYRITQTISFALGISTVNRGNYSYLKQTLTSVVSRMTLSQEKDSVVIVLVADSNEDYLHSVVKMITKKFKRQVRSGSLEVISIPAFLYS

SEQ ID NO: 8681 - protein, 166 aa, Homo Sapiens
MRTKQVNLLITLVAVALFSFSCFSIYRITQTNNQLINCRNHILEFKENMLHLRNKTEKNTQEMMKVLNRMKYEITKREILSGNLGKLFRSEDLTHFVRFFLMFYKEKPIDWLLNDIFQVKVCDAGEDLRNCMKRKKQIRIQYKPSLFQHVGIHSSFPRKEQYEKKI

SEQ ID NO: 8682 - protein, 375 aa, Homo Sapiens
MRTKQVNLLITLVAVALFSFSCFSIYRITQTNNQLINCRNHILEFKENMLHLRNKTEKNTQEMMKVLNRMKYEITKREILSGNLVAQKADILNKNETVSNTFEDLKFFFPHLRKEGRIYPDVIIGKGKTGVSFALGISTVNRGNYSYLKQTLTSVVSRMTLSQEKDSVVIVLVADSNEDYLHSVVKMITKKFKRQVRSGSLEVISIPAFLYSSMLNAKHLAEASQKLASWRIKQVLDFCILLLYAQPKAKYYLQLEDDIIAKEMYFTKITDFVGNISSNNWFFIEFSMLGFIGKLFRSEDLTHFVRFFLMFYKEKPIDWLLNDIFQVKVCDAGEDLRNCMKRKKQIRIQYKPSLFQHVGIHSSFPRKEQYEKDVY

SEQ ID NO: 8683 - protein, 374 aa, Homo Sapiens
MRTKQVNLLITLVAVALFSFSCFSIYRITQTNNQLINCRNHILEFKENMLHLRNKTEKNTQEMMKVLNRMKYEITKREILSGNLVAQKADILNKNETVSNTFEDLKFFFPHLRKEGRIYPDVIIGKGKTGVSFALGISTVNRGNYSYLKQTLTSVVSRMTLSQEKDSVVIVLVADSNEDYLHSVVKMITKKFKRQVRSGSLEVISIPAFLYSSMLNAKHLAEASQKLASWRIKQVLDFCILLLYAQPKAKYYLQLEDDIIAKEMYFTKITDFVGNISSNNWFFIEFSMLGFIGKLFRSEDLTHFVRFFLMFYKEKPIDWLLNDIFQVKVCDAGEDLRNCMKRKKQIRIQYKPSLFQHVGIHSSFPRKEQYEKKI

SEQ ID NO: 8684 - protein, 36 aa, Homo Sapiens
MRTKQVNLLITLVAVALFSFSCFSIYRITQTNSKGK

SEQ ID NO: 8685 - protein, 91 aa, Homo Sapiens
  misc_feature (1)..(1): Xaa can be any naturally occurring amino acid
XNISSNNWFFIEFSMLGFIGKLFRSEDLTHFVRFFLMFYKEKPIDWLLNDIFQRNCMKRKKQIRIQYKPSLFQHVGIHSSFPRKEQYEKKI

SEQ ID NO: 8686 - protein, 283 aa, Homo Sapiens
METGPEDPSSMPEESSPRRTPQSIPYQDLPHLVNADGQYLFCRYWKPTGTPKALIFVSHGAGEHSGRYEELARMLMGLDLLVFAHDHVGHGQSEGERMVVSDFHVFVRDVLQHVDSMQKDYPGLPVFLLGHSMGGAIAILTAAERPGHFAGMVLISPLVLANPESATTFKVDIYNSDPLICRAGLKVCFGIQLLNAVSRVERALPKLTVPFLLLQGSADRLCDSKGAYLLMELAKSQDKTLKIYEGAYHVLHKELPEVTNSVFHEINMWVSQRTATAGTASPP

SEQ ID NO: 8687 - protein, 313 aa, Homo Sapiens
METGPEDPSSMPEESSPRRTPQSIPYQDLPHLVNADGQYLFCRYWKPTGTPKALIFVSHGAGEHSGRYEELARMLMGLDLLVFAHDHVGHGQSEGERMVVSDFHVFVRDVLQHVDSMQKDYPGLPVFLLGHSMGGAIAILTAAERPGHFAGMVLISPLVLANPESATTFKVLAAKVLNLVLPNLSLGPIDSSVLSRNKTEVDIYNSDPLICRAGLKVCFGIQLLNAVSRVERALPKLTVPFLLLQGSADRLCDSKGAYLLMELAKSQDKTLKIYEGAYHVLHKELPEVTNSVFHEINMWVSQRTATAGTASPP

SEQ ID NO: 8688 - protein, 89 aa, Homo Sapiens
MLMGLDLLVFAHDHVGHGQSEGERMVVSDFHVFVRDVLQHVDSMQKDYPGLPVFLLGHSMGGAIAILTAAERPGHFAGMVLISPLVLAN

SEQ ID NO: 8689 - protein, 77 aa, Homo Sapiens
MPEESSPRRTPQSIPYQDLPHLVNADGQYLFCRYWKPTGTPKALIFVSHGAGEHSGRYEELARMLMGLDLLVFAHDH

SEQ ID NO: 8690 - protein, 303 aa, Homo Sapiens
MPEESSPRRTPQSIPYQDLPHLVNADGQYLFCRYWKPTGTPKALIFVSHGAGEHSGRYEELARMLMGLDLLVFAHDHVGHGQSEGERMVVSDFHVFVRDVLQHVDSMQKDYPGLPVFLLGHSMGGAIAILTAAERPGHFAGMVLISPLVLANPESATTFKVLAAKVLNLVLPNLSLGPIDSSVLSRNKTEVDIYNSDPLICRAGLKVCFGIQLLNAVSRVERALPKLTVPFLLLQGSADRLCDSKGAYLLMELAKSQDKTLKIYEGAYHVLHKELPEVTNSVFHEINMWVSQRTATAGTASPP

SEQ ID NO: 8691 - protein, 303 aa, Homo Sapiens; identical to SEQ ID NO: 8690

SEQ ID NO: 8692 - protein, 277 aa, Homo Sapiens
MQTRFRRIFPWKDASTKRMPEFIHFSPLKPYKGREWEKAGSEHVLETHLLPVGHGQSEGERMVVSDFHVFVRDVLQHVDSMQKDYPGLPVFLLGHSMGGAIAILTAAERPGHFAGMVLISPLVLANPESATTFKVLAAKVLNLVLPNLSLGPIDSSVLSRNKTEVDIYNSDPLICRAGLKVCFGIQLLNAVSRVERALPKLTVPFLLLQGSADRLCDSKGAYLLMELAKSQDKTLKIYEGAYHVLHKELPEVTNSVFHEINMWVSQRTATAGTASPP

SEQ ID NO: 8693 - protein, 197 aa, Homo Sapiens
PVGHGQSEGERMVVSDFHVFVRDVLQHVDSMQKDYPGLPVFLLGHSMGGAIAILTAAERPGHFAGMVLISPLVLANPESATTFKVDIYNSDPLICRAGLKVCFGIQLLNAVSRVERALPKLTVPFLLLQGSADRLCDSKGAYLLMELAKSQDKTLKIYEGAYHVLHKELPEVTNSVFHEINMWVSQRTATAGTASPP

SEQ ID NO: 8694 - protein, 155 aa, Homo Sapiens [sequence omitted]

SEQ ID NO: 8695 - protein, 209 aa, Homo Sapiens
  misc_feature (1)..(1): Xaa can be any naturally occurring amino acid
XLQGGAIAILTAAERPGHFAGMVLISPLVLANPESATTFKDYSRILKHLMEKASRMLKFWIPRPFWVLAAKVLNLVLPNLSLGPIDSSVLSRNKTEVDIYNSDPLICRAGLKVCFGIQLLNAVSRVERALPKLTVPFLLLQGSADRLCDSKGAYLLMELAKSQDKTLKIYEGAYHVLHKELPEVTNSVFHEINMWVSQRTATAGTASPP

SEQ ID NO: 8696 - protein, 103 aa, Homo Sapiens
MKSLILLAILAALAVVTLCYESHESMESYELNPFINRRNANTFISPQQRWRAKVQERIRERSKPVHELNREACDDYRLCERYAMVYGYNAAYNRYFRKRRGTK

SEQ ID NO: 8697 - protein, 128 aa, Homo Sapiens
MKSLILLAILAALAVVTLCYGEWQKEENFGFDIVSVLSLNWHRAQESHESMESYELNPFINRRNANTFISPQQRWRAKVQERIRERSKPVHELNREACDDYRLCERYAMVYGYNAAYNRYFRKRRGTK

SEQ ID NO: 8698 - protein, 74 aa, Homo Sapiens
  misc_feature (1)..(1): Xaa can be any naturally occurring amino acid
XSHESMESYELRSENALSLSTSSIGKPVMTTDFANATPWFMDTMLPIIATSGSAEGPNETEGRKKISFFLEAGT

SEQ ID NO: 8699 - protein, 77 aa, Homo Sapiens
MAGNSILLAAVSILSACQQSYFALQVGKARLKYKVTPPAVTGSPEFERVFRAHFCYLSGSGVHIWPSPILLGIFRSC

SEQ ID NO: 8700 - protein, 147 aa, Homo Sapiens
MAGNSILLAAVSILSACQQSYFALQVGKARLKYKVTPPAVTGSPEFERVFRAQQNCVEFYPIFIITLWMAGWYFNQVFATCLGLVYIYGRHLYFWGYSEAAKKRITGFRLSLGILALLTLLGALGIANSFLDEYLDLNIAKKLRRQF

SEQ ID NO: 8701 - protein, 147 aa, Homo Sapiens; identical to SEQ ID NO: 8700

SEQ ID NO: 8702 - protein, 147 aa, Homo Sapiens; identical to SEQ ID NO: 8700

SEQ ID NO: 8703 - protein, 46 aa, Homo Sapiens
MARSLVCLGVIILLSAFSGPGVRGGPMPKLADRKLCADQECSHPIS

SEQ ID NO: 8704 - protein, 131 aa, Homo Sapiens
MARSLVCLGVIILLSAFSGPGVRGGPMPKLADRKLCADQECSHPISMAVALQDYMAPDCRFLTIHRGQVVYVFSKLKGRGRLFWGGSVQGDYYGDLAARLGYFPSSIVREDQTLKPGKVDVKTDKWDFYCQ

SEQ ID NO: 8705 - protein, 131 aa, Homo Sapiens; identical to SEQ ID NO: 8704

SEQ ID NO: 8706 - protein, 131 aa, Homo Sapiens; identical to SEQ ID NO: 8704

SEQ ID NO: 8707 - protein, 95 aa, Homo Sapiens
  misc_feature (1)..(1): Xaa can be any naturally occurring amino acid
XRSLVCLGVIILLSAFSGPGVRGGPMPKLADRKLCADQECSHPISMAVALQDYMAPDCRFLTIHRGQVVFREITMEIWLLAWAISPVALSERTRP

SEQ ID NO: 8708 - protein, 58 aa, Homo Sapiens
  misc_feature (1)..(1): Xaa can be any naturally occurring amino acid
XSLVCLGVIILLSAFSGPGVRGGPMPKLADRKLCADQECSRSGRLLWRSGCSPGLFPQ

SEQ ID NO: 8709 - protein, 1412 aa, Homo Sapiens
MAKFGVHRILLLAISLTKCLESTKLLADLKKCGDLECEALINRVSAMRDYRGPDCRYLNFTKGEEISVYVKLAGEREDLWAGSKGKEFGYFPRDAVQIEEVFISEEIQMSTKESDFLCLLGVSYTFDNEDSELNGDYGENIYPYEEDKDEKSSIYESDFQIEPGFYATYESTLFEDQVPALEAPEDIGSTSESKDWEEVVVESMEQDRIPEVHVPPSSAVSGVKEWFGLGGEQAEEKAFESVIEPVQESSFRSRKIAVEDENDLEELNNGEPQTEHQQESESEIDSVPKTQSELASESEHIPKPQSTGWFGGGFTSYLGFGDEDTGLELIAEESNPPLQDFPNSISSDKEATVPCTEILTEKKDTITNDSLSLKPSWFDFGFAILGFAYAKEDKIMLDDRKNEEDGGADEHEHPLTSELDPEKEQEIETIKIIETEDQIDKKPVSEKTDESDTIPYLKKFLYNFDNPWNFQNIPKETELPFPKQILDQNNVIENEETGEFSIDNYPTDNTKVMIFKSSYSLSDMVSNIELPTRIHEEVYFEPSSSKDSDENSKPSVDTEGPALVEIDRSVENTLLNSQMVSTDNSLSSQNYISQKEDASEFQILKYLFQIDVYDFMNSAFSPIVILTERVVAALPEGMRPDSNLYGFPWELVICAAVVGFFAVLFFLWRSFRSVRSRLYVGREKKLALMLSGLIEEKSKLLEKFSLVQKEYEGYEVESSLKDASFEKEATEAQSLEATCEKLNRSNSELEDEILCLEKELKEEKSKHSEQDELMADISKRIQSLEDESKSLKSQVAEAKMTFKIFQMNEERLKIAIKDALNENSQLQESQKQLLQEAEVWKEQVSELNKQKVTFEDSKVHAEQVLNDKESHIKTLTERLLKMKDWAAMLGEDITDDDNLELEMNSESENGAYLDNPPKGALKKLIHAAKLNASLKTLEGERNQIYIQLSEVDKTKEELTEHIKNLQTEQASLQSENTHFENENQKLQQKLKVMTELYQENEMKLHRKLTVEENYRLEKEEKLSKVDEKISHATEELETYRKRAKDLEEELERTIHSYQGQIISHEKKAHDNWLAARNAERNLNDLRKENAHNRQKLTETELKFELLEKDPYALDVPNTAFGREHSPYGPSPLGWPSSETRAFLSPPTLLEGPLRLSPLLPGGGGRGSRGPGNPLDHQITNERGESSCDRLTDPHRAPSDTGSLSPPWDQDRRMMFPPPGQSYPDSALPPQRQDRFCSNSGRLSGPAELRSFNMPSLDKMDGSMPSEMESSRNDTKDDLGNLNVPDSSLPAENEATGPGFVPPPLAPIRGPLFPVDARGPFLRRGPPFPPPPPGAMFGASRDYFPPGDFPGPPPAPFAMRNVYPPRGFPPYLPPRPGFFPPPPHSEGRSEFPSGLIPPSNEPATEHPEPQQET

SEQ ID NO: 8710 - protein, 1907 aa, Homo Sapiens
MAAAPGLLVWLLVLRLPWRVPGQLDPSTGRRFSEHKLCADDECSMLMYRGEALEDFTGPDCRFVNFKKGDPVYVYYKLARGWPEVWAGSVGRTFGYFPKDLIQVVHEYTKEELQVPTDETDFVCFDGGRDDFHNYNVEELLGFLELYNSAATDSEKAVEKTLQDMEKNPELSKEREPEPEPVEANSEESDSVFSENTEDLQEQFTTQKHHSHANSQANHAQGEQASFESFEEMLQDKLKVPESENNKTSNSSQVSNEQDKIDAYKLLKKEMTLDLKTKFGSTADALVSDDETTRLVTSLEDDFDEELDTEYYAVGKEDEENQEDFDELPLLTFTDGEDMKTPAKSGVEKYPTDKEQNSNEEDKVQLTVPPGIKNDDKNILTTWGDTIFSIVTGGEETRDTMDLESSSSEEEKEDDDDALVPDSKQGKPQSATDYSDPDNVDDGLFIVDIPKTNNDKEVNAEHHIKGKGRGVQESKRGLVQDKTELEDENQEGMTVHSSVHSNNLNSMPAAEKGKDTLKSAYDDTENDLKGAAIHISKGMLHEEKPGEQILEGGSESESAQKAAGNQMNDRKIQQESLGSAPLMGDDHPNASRDSVEGDALVNGAKLHTLSVEHQREELKEELVLKTQNQPRFSSPDEIDLPRELEDEVPILGRNLPWQQERDVAATASKQMSEKIRLSEGEAKEDSLDEEFFHHKAMQGTEVGQTDQTDSTGGPAFLSKVEEDDYPSEELLEDENAINAKRSKEKNPGNQGRQFDVNLQVPDRAVLGTIHPDPEIEESKQETSMILDSEKTSETAAKGVNTGGREPNTMVEKERPLADKKAQRPFERSDFSDSIKIQTPELGEVFQNKDSDYLKNDNPEEHLKTSGLAGEPEGELSKEDHENTEKYMGTESQGSAAAEPEDDSFHWTPHTSVEPGHSDKREDLLIISSFFKEQQSLQRFQKYFNVHELEALLQEMSSKLKSAQQESLPYNMEKVLDKVFRASESQILSIAEKMLDTRVAENRDLGMNENNIFEEAAVLDDIQDLIYFVRYKHSTAEETATLVMAPPLEEGLGGAMEEMQPLHEDNFSREKTAELNVQVPEEPTHLDQRVIGDTHASEVSQKPNTEKDLDPGPVTTEDTPMDAIDANKQPETAAEEPASVTPLENAILLIYSFMFYLTKSLVATLPDDVQPGPDFYGLPWKPVFITAFLGIASFAIFLWRTVLVVKDRVYQVTEQQISEKLKTIMKENTELVQKLSNYEQKIKESKKHVQETRKQNMILSDEAIKYKDKIKTLEKNQEILDDTAKNLRVMLESEREQNVKNQDLISENKKSIEKLKDVISMNASEFSEVQIALNEAKLSEEKVKSECHRVQEENARLKKKKEQLQQEIEDWSKLHAELSEQIKSFEKSQKDLEVALTHKDDNINALTNCITQLNLLECESESEGQNKGGNDSDELANGEVGGDRNEKMKNQIKQMMDVSRTQTAISVVEEDLKLLQLKLRASVSTKCNLEDQVKKLEDDRNSLQAAKAGLEDECKTLRQKVEILNELYQQKEMALQKKLSQEEYERQEREHRLSAADEKAVSAAEEVKTYKRRIEEMEDELQKTERSFKNQIATHEKKAHENWLKARAAERAIAEEKREAANLRHKLLELTQKMAMLQEEPVIVKPMPGKPNTQNPPRRGPLSQNGSFGPSPVSGGECSPPLTVEPPVRPLSATLNRRDMPRSEFGSVDGPLPHPRWSAEASGKPSPSDPGSGTATMMNSSSRGSSPTRVLDEGKVNMAPKGPPPFPGVPLMSTPMGGPVPPPIRYGPPPQLCGPFGPRPLPPPFGPGMRPPLGLREFAPGVPPGRRDLPLHPRGFLPGHAPFRPLGSLGPREYFIPGTRLPPPTHGPQEYPPPPAVRDLLPSGSRDEPPPASQSTSQDCSQALKQSP

SEQ ID NO: 8711 - protein, 500 aa, Homo Sapiens
MAAAPGLLVWLLVLRLPWRVPGQLDPSTGRRFSEHKLCADDECSMLMYRGEALEDFTGPDCRFVNFKKGDPVYVYYKLARGWPEVWAGSVGRTFGYFPKDLIQVVHEYTKEELQVPTDETDFVCFDGGRDDFHNYNVEELLGFLELYNSAATDSEKAVEKTLQDMEKNPELSKEREPEPEPVEANSEESDSVFSENTEDLQEQFTTQKHHSHANSQANHAQGEQASFESFEEMLQDKLKVPESENNKTSNSSQVSNEQDKIDAYKLLKKEMTLDLKTKFGSTADALVSDDETTRLVTSLEDDFDEELDTEYYAVGKEDEENQEDFDELPLLTFTDGEDMKTPAKSGVEKYPTDKEQNSNEEDKVQLTVPPGIKNDDKNILTTWGDTIFSIVTGGEETRDTMDLESSSSEEEKEDDDDALVPDSKQGKPQSATDYSDPDNVDDGLFIVDIPKTNNDKEVNAEHHIKGKGRGVQESKRGLVQDKTELEDENQEGFKTEPIKL

SEQ ID NO: 8712 - protein, 785 aa, Homo Sapiens
MDSVPATVPSIAATPGDPELVGPLSVLYAAFIAKLLELVATLPDDVQPGPDFYGLPWKPVFITAFLGIASFAIFLWRTVLVVKDRVYQVTEQQISEKLKTIMKENTELVQKLSNYEQKIKESKKHVQETRKQNMILSDEAIKYKDKIKTLEKNQEILDDTAKNLRVMLESEREQNVKNQDLISENKKSIEKLKDVISMNASEFSEVQIALNEAKLSEEKVKSECHRVQEENARLKKKKEQLQQEIEDWSKLHAELSEQIKSFEKSQKDLEVALTHKDDNINALTNCITQLNLLECESESEGQNKGGNDSDELANGEVGGDRNEKMKNQIKQMMDVSRTQTAISVVEEDLKLLQLKLRASVSTKCNLEDQVKKLEDDRNSLQAAKAGLEDECKTLRQKVEILNELYQQKEMALQKKLSQEEYERQEREHRLSAADEKAVSAAEEVKTYKRRIEEMEDELQKTERSFKNQIATHEKKAHENWLKARAAERAIAEEKREAANLRHKLLELTQKMAMLQEEPVIVKPMPGKPNTQNPPRRGPLSQNGSFGPSPVSGGECSPPLTVEPPVRPLSATLNRRDMPRSEFGSVDGPLPHPRWSAEASGKPSPSDPGSGTATMMNSSSRGSSPTRVLDEGKVNMAPKGPPPFPGVPLMSTPMGGPVPPPIRYGPPPQLCGPFGPRPLPPPFGPGMRPPLGLREFAPGVPPGRRDLPLHPRGFLPGHAPFRPLGSLGPREYFIPGTRLPPPTHGPQEYPPPPAVRDLLPSGSRDEPPPASQSTSQDCSQALKQSP

SEQ ID NO: 8713 - protein, 1016 aa, Homo Sapiens
  misc_feature (1)..(1): Xaa can be any naturally occurring amino acid
XLVPDSKQGKPQSATDYSDPDNVDDGLFIVDIPKTNNDKEVNAEHHIKGKGRGVQESKRGLVQDKTELEDENQEGMTVHSSVHSNNLNSMPAAEKGKDTLKSAYDDTENDLKGAAIHISKGMLHEEKPGEQILEGGSESESAQKAAGNQMNDRKIQQESLGSAPLMGDDHPNASRDSVEGDALVNGAKLHTLSVEHQREELKEELVLKTQNQPRFSSPDEIDLPRELEDEVPILGRNLPWQQERDVAATASKQMSEKIRLSEGEAKEDSLDEEFFHHKAMQGTEVGQTDQTDSTGGPAFLSKVEEDDYPSEELLEDENAINAKRSKEKNPGNQGRQFDVNLQVPDRAVLGTIHPDPEIEESKQETSMILDSEKTSETAAKGVNTGGREPNTMVEKERPLADKKAQRPFERSDFSDSIKIQTPELGEVFQNKDSDYLKNDNPEEHLKTSGLAGEPEGELSKEDHENTEKYMGTESQGSAAAEPEDDSFHWTPHTSVEPGHSDKREDLLIISSFFKEQQSLQRFQKYFNVHELEALLQEMSSKLKSAQQESLPYNMEKVLDKVFRASESQILSIAEKMLDTRVAENRDLGMNENNIFEEAAVLDDIQDLIYFVRYKHSTAEETATLVMAPPLEEGLGGAMEEMQPLHEDNFSREKTAELNVQVPEEPTHLDQRVIGDTHASEVSQKPNTEKDLDPGPVTTEDTPMDAIDANKQPETAAEEPASVTPLENAILLIYSFMFYLTKSLVATLPDDVQPGPDFYGLPWKPVFITAFLGIASFAIFLWRTVLVVKDRVYQVTEQQISEKLKTIMKENTELVQKLSNYEQKIKESKKHVQETRKQNMILSDEAIKYKDKIKTLEKNQEILDDTAKNLRVMLESEREQNVKNQDLLQQEIEDWSKLHAELSEQIKSFEKSQKDLEVALTHKDDNINALTNCITQLNLLECESESEGQNKGGNDSDELANGEVGGDRNEKMKNQIKQMMDVSRTQTAISVVEEDLKLLQLKLRASVSTKCNLEDQV

SEQ ID NO: 8714 - protein, 107 aa, Homo Sapiens
  misc_feature (1)..(1): Xaa can be any naturally occurring amino acid
XSAEASGKPSPSDPGSGTATMMNSSSRGSSPTRVLDEGKVNMAPKGPPPFPGVPLMSTPMGGPVPPPIRYGPPPQLCGPFGPRPLPPPFDKDGRPGTVAHACNPSTL

SEQ ID NO: 8715 - protein, 388 aa, Homo Sapiens
MFRLNSLSALAELAVGSRWYHGGSQPIQIRRRLMMVAFLGASAVTASTGLLWKRAHAESPPCVDNLKSDIGDKGKNKDEGDVCNHEKKTADLAPHPEEKKKKRSGFRDRKVMEYENRIRAYSTPDKIFRYFATLKVISEPGEAEVFMTPEDFVRSITPNEKQPEHLGLDQYIIKRFDGKARFSKKKILHRVRKKSKGSILQRRKKALQKEERTRHGSTKHNEQEVRRTIMEWLEKAGVQWHHLSSLQPPTPWFKRFFCLSLLSSWDYRHTPPCPANFFIFSRDRVSPCWPGWSRYPDLMIRPPWLRKVLGLQKISQEREKFADEGSIFYTLGECGLISFSDYIFLTTVLSTPQRNFEIAFKMFDLNGDGEVDMEEFEQVQSIIRSQTS

SEQ ID NO: 8716 - protein, 480 aa, Homo Sapiens
MFRLNSLSALAELAVGSRWYHGGSQPIQIRRRLMMVAFLGASAVTASTGLLWKRAHAESPPCVDNLKSDIGDKGKNKDEGDVCNHEKKTADLAPHPEEKKKKRSGFRDRKVMEYENRIRAYSTPDKIFRYFATLKVISEPGEAEVFMTPEDFVRSITPNEKQPEHLGLDQYIIKRFDGKDFWQKISQEREKFADEGSIFYTLGECGLISFSDYIFLTTVLSTPQRNFEIAFKMFDLNGDGEVDMEEFEQVQSIIRSQTSMGMRHRDRPTTGNTLKSGLCSALTTYFFGADLKGKLTIKNFLEFQRKLQHDVLKLEFERHDPVDGRITERQFGGMLLAYSGVQSKKLTAMQRQLKKHFKEGKGLTFQEVENFFTFLKNINDVDTALSFYHMAGASLDKVTMQQVARTVAKVELSDHVCDVVFALFDCDGNGELSNKEFVSIMKQRLMRGLEKPKDMGFTRLMQAMWKCAQETAWDFALPKQ

SEQ ID NO: 8717 - protein, 482 aa, Homo Sapiens
MFRLNSLSALAELAVGSRWYHGGSQPIQIRRRLMMVAFLGASAVTASTGLLWKRAHAESPPCVDNLKSDIGDKGKNKDEGDVCNHEKKTADLAPHPEEKKKKRSGFRDRKVMEYENRIRAYSTPDKIFRYFATLKVISEPGEAEVFMTPEDFVRSITPNEKQPEHLGLDQYIIKRFDGKDFWQTEKISQEREKFADEGSIFYTLGECGLISFSDYIFLTTVLSTPQRNFEIAFKMFDLNGDGEVDMEEFEQVQSIIRSQTSMGMRHRDRPTTGNTLKSGLCSALTTYFFGADLKGKLTIKNFLEFQRKLQHDVLKLEFERHDPVDGRITERQFGGMLLAYSGVQSKKLTAMQRQLKKHFKEGKGLTFQEVENFFTFLKNINDVDTALSFYHMAGASLDKVTMQQVARTVAKVELSDHVCDVVFALFDCDGNGELSNKEFVSIMKQRLMRGLEKPKDMGFTRLMQAMWKCAQETAWDFALPKQ

SEQ ID NO: 8718 - protein, 476 aa, Homo Sapiens
MFRLNSLSALAELAVGSRWYHGGSQPIQIRRRLMMVAFLGASAVTASTGLLWKRAHAESPPCVDNLKSDIGDKGKNKDEGDVCNHEKKTADLAPHPEEKKKKRSGFRDRKVMEYENRIRAYSTPDKIFRYFATLKVISEPGEAEVFMTPEDFVRSITPNEKQPEHLGLDQYIIKRFDGKKISQEREKFADEGSIFYTLGECGLISFSDYIFLTTVLSTPQRNFEIAFKMFDLNGDGEVDMEEFEQVQSIIRSQTSMGMRHRDRPTTGNTLKSGLCSALTTYFFGADLKGKLTIKNFLEFQRKLQHDVLKLEFERHDPVDGRITERQFGGMLLAYSGVQSKKLTAMQRQLKKHFKEGKGLTFQEVENFFTFLKNINDVDTALSFYHMAGASLDKVTMQQVARTVAKVELSDHVCDVVFALFDCDGNGELSNKEFVSIMKQRLMRGLEKPKDMGFTRLMQAMWKCAQETAWDFALPKQ

SEQ ID NO: 8719 - protein, 478 aa, Homo Sapiens [sequence omitted]

SEQ ID NO: 8720 - protein, 154 aa, Homo Sapiens
MKRIYTYRRAKEIFKDTPKAPQRNFEIAFKMFDLNGDGEVDMEEFEQVQSIIRSQTSMGMRHRDRPTTGNTLKSGLCSALTTYFFGADLKGKLTIKNFLEFQRKLQHDVLKLEFERHDPVDGRITERQFGGMLLAYSGVQSKKLTAMQRQLKKH

SEQ ID NO: 8721 - protein, 278 aa, Homo Sapiens
MKRIYTYRRAKEIFKDTPKAPQRNFEIAFKMFDLNGDGEVDMEEFEQVQSIIRSQTSMGMRHRDRPTTGNTLKSGLCSALTTYFFGADLKGKLTIKNFLEFQRKLQHDVLKLEFERHDPVDGRITERQFGGMLLAYSGVQSKKLTAMQRQLKKHFKEGKGLTFQEVENFFTFLKNINDVDTALSFYHMAGASLDKVTMQQVARTVAKVELSDHVCDVVFALFDCDGNGELSNKEFVSIMKQRLMRGLEKPKDMGFTRLMQAMWKCAQETAWDFALPKQ

SEQ ID NO: 8722 - protein, 212 aa, Homo Sapiens
MVAFLGASAVTASTGLLWKRAHAESPPCVDNLKSDIGDKGKNKDEGDVCNHEKKTADLAPHPEEKKKKRSGFRDRKVMEYENRIRAYSTPDKIFRYFATLKVISEPGEAEVFMTPEDFVRSITPNEKQPEHLGLDQYIIKRFDGKKISQEREKFADEGSIFYTLGECGLISFSDYIFLTTVLSTPQRNFEIAFKMFDLNGDGEVDMEEFEQA

SEQ ID NO: 8723 - protein, 278 aa, Homo Sapiens
MVSLKAKLNHLRQSMLKQKAPQRNFEIAFKMFDLNGDGEVDMEEFEQVQSIIRSQTSMGMRHRDRPTTGNTLKSGLCSALTTYFFGADLKGKLTIKNFLEFQRKLQHDVLKLEFERHDPVDGRITERQFGGMLLAYSGVQSKKLTAMQRQLKKHFKEGKGLTFQEVENFFTFLKNINDVDTALSFYHMAGASLDKVTMQQVARTVAKVELSDHVCDVVFALFDCDGNGELSNKEFVSIMKQRLMRGLEKPKDMGFTRLMQAMWKCAQETAWDFALPKQ

SEQ ID NO: 8724 - protein, 246 aa, Homo Sapiens
  misc_feature (1)..(1): Xaa can be any naturally occurring amino acid
XNEKQPEHLGLDQYIIKRFDGKKISQEREKFADEGSIFYTLGECGLISFSDYIFLTTVLSTPQRNFEIAFKMFDLNGDGEVDMEEFEQVQSIIRSQTSMGMRHRDRPTTGNTLKSGLCSALTTYFFGADLKGKLTIKNFLEFQRKLQHDVLKLEFERHDPVDGRITERQFGGMLLAYSGVQSKKLTAMQRQLKKHFKEGKGLTFQEVENFFTFLKNINDVDTALSFYHMAGASLDKGKGTIFMGRR

SEQ ID NO: 8725 - protein, 512 aa, Homo Sapiens
MAEPSVESSSPGGSATSDDHEFDPSADMLVHDFDDERTLEEEEMMEGETNFSSEIEDLAREGDMPIHELLSLYGYGSTVRLPEEDEEEEEEEEEGEDDEDADNDDNSGCSGENKEENIKDSSGQEDETQSSNDDPSQSVASQDAQEIIRPRRCKYFDTNSEVEEESEEDEDYIPSEDWKKEIMVGSMFQAEIPVGICRYKENEKVYENDDQLLWDPEYLPEDKVIIFLKDASRRTGDEKGVEAIPEGSHIKDNEQALYELVKCNFDTEEALRRLRFNVKAAREELSVWTEEECRNFEQGLKAYGKDFHLIQANKVRTRSVGECVAFYYMWKKSERYDFFAQQTRFGKKKYNLHPGVTDYMDRLLDESESAASSRAPSPPPTASNSSNSQSEKEDGTVSTANQNGVSSNGPGEILNKEEVKVEGLHINGPTGGNKKPLHADMDTNGYETDNLTTDPKLAHMTARNENDFDEKSERPAKRRRVNSNGKESPGSSEFFQEAVSHGKFEELENTDD

SEQ ID NO: 8726 - protein, 433 aa, Homo Sapiens
MAEPSVESSSPGGSATSDDHEFDPSADMLVHDFDDERTLEEEEMMEGETNFSSEIEDLAREGDMPIHELLSLYGYGSTVRLPEEDEEEEEEEEEGEDDEDADNDDNSGCSGENKEENIKDSSGQEDETQSSNDDPSQSVASQDAQEIIRPRRCKYFDTNSEVEEESEEDEDYIPSEDWKKEIMVGSMFQAEIPVGICRYKENEKVYENDDQLLWDPEYLPEDKVIIFLKDASRRTGDEKGVEAIPEGSHIKDNEQALYELVKCNFDTEEALRRLRFNVKAAREELSVWTEEECRNFEQGLKAYGKDFHLIQANKVRTRSVGECVAFYYMWKKSERYDFFAQQTRFGKKKYNLHPGVTDYMDRLLDESESAASSRAPSPPPTASNSSNSQSEKEDGTVSTANQNGVSSNGPGILQMLLPVHFSAISSRANAFLK

SEQ ID NO: 8727 - protein, 486 aa, Homo Sapiens
MDGASSGGGGSSEGGGGSSGSGYGVVARFSQCLAEFRTWLRTNWLRFNADKTDVMLPSVESSSPGGSATSDDHEFDPSADMLVHDFDDERTLEEEEMMEGETNFSSEIEDLAREGDMPIHELLSLYGYGSTVRLPEEDEEEEEEEEEGEDDEDADNDDNSGCSGENKEENIKDSSGQEDETQSSNDDPSQSVASQDAQEIIRPRRCKYFDTNSEVEEESEEDEDYIPSEDWKKEIMVGSMFQAEIPVGICRYKENEKVYENDDQLLWDPEYLPEDKVIIFLKDASRRTGDEKGVEAIPEGSHIKDNEQALYELVKCNFDTEEALRRLRFNVKAAREELSVWTEEECRNFEQGLKAYGKDFHLIQANKVRTRSVGECVAFYYMWKKSERYDFFAQQTRFGKKKYNLHPGVTDYMDRLLDESESAASSRAPSPPPTASNSSNSQSEKEDGTVSTANQNGVSSNGPGILQMLLPVHFSAISSRANAFLK

SEQ ID NO: 8728 - protein, 565 aa, Homo Sapiens
MDGASSGGGGSSEGGGGSSGSGYGVVARFSQCLAEFRTWLRTNWLRFNADKTDVMLPSVESSSPGGSATSDDHEFDPSADMLVHDFDDERTLEEEEMMEGETNFSSEIEDLAREGDMPIHELLSLYGYGSTVRLPEEDEEEEEEEEEGEDDEDADNDDNSGCSGENKEENIKDSSGQEDETQSSNDDPSQSVASQDAQEIIRPRRCKYFDTNSEVEEESEEDEDYIPSEDWKKEIMVGSMFQAEIPVGICRYKENEKVYENDDQLLWDPEYLPEDKVIIFLKDASRRTGDEKGVEAIPEGSHIKDNEQALYELVKCNFDTEEALRRLRFNVKAAREELSVWTEEECRNFEQGLKAYGKDFHLIQANKVRTRSVGECVAFYYMWKKSERYDFFAQQTRFGKKKYNLHPGVTDYMDRLLDESESAASSRAPSPPPTASNSSNSQSEKEDGTVSTANQNGVSSNGPGEILNKEEVKVEGLHINGPTGGNKKPLHADMDTNGYETDNLTTDPKLAHMTARNENDFDEKSERPAKRRRVNSNGKESPGSSEFFQEAVSHGKFEELENTDD

SEQ ID NO: 8729 - protein, 450 aa, Homo Sapiens
MFMFNWFTDCLWTLFLSNYQPSVESSSPGGSATSDDHEFDPSADMLVHDFDDERTLEEEEMMEGETNFSSEIEDLAREGDMPIHELLSLYGYGSTVRLPEEDEEEEEEEEEGEDDEDADNDDNSGCSGENKEENIKDSSGQEDETQSSNDDPSQSVASQDAQEIIRPRRCKYFDTNSEVEEESEEDEDYIPSEDWKKEIMVGSMFQAEIPVGICRYKENEKVYENDDQLLWDPEYLPEDKVIIFLKDASRRTGDEKGVEAIPEGSHIKDNEQALYELVKCNFDTEEALRRLRFNVKAAREELSVWTEEECRNFEQGLKAYGKDFHLIQANKVRTRSVGECVAFYYMWKKSERYDFFAQQTRFGKKKYNLHPGVTDYMDRLLDESESAASSRAPSPPPTASNSSNSQSEKEDGTVSTANQNGVSSNGPGILQMLLPVHFSAISSRANAFLK

SEQ ID NO: 8730 - protein, 470 aa, Homo Sapiens
MFMFNWFTDCLWTLFLSNYQPSVESSSPGGSATSDDHEFDPSADMLVHDFDDERTLEEEEMMEGETNFSSEIEDLAREGDMPIHELLSLYGYGSTVRLPEEDEEEEEEEEEGEDDEDADNDDNSGCSGENKEENIKDSSGQEDETQSSNDDPSQSVASQDAQEIIRPRRCKYFDTNSEVEEESEEDEDYIPSEDWKKEIMVGSMFQAEIPVGICRYKENEKVYENDDQLLWDPEYLPEDKVIIFLKDASRRTGDEKGVEAIPEGSHIKDNEQALYELVKCNFDTEEALRRLRFNVKAAREELSVWTEEECRNFEQGLKAYGKDFHLIQANKVRTRSVGECVAFYYMWKKSERYDFFAQQTRFGKKKYNLHPGVTDYMDRLLDESESAASSRAPSPPPTASNSSNSQSEKEDGTVSTANQNGVSSNGPGEILNKEEVKVEGLHINGPTGILQMLLPVHFSAISSRANAFLK

SEQ ID NO: 8731 - protein, 529 aa, Homo Sapiens
MFMFNWFTDCLWTLFLSNYQPSVESSSPGGSATSDDHEFDPSADMLVHDFDDERTLEEEEMMEGETNFSSEIEDLAREGDMPIHELLSLYGYGSTVRLPEEDEEEEEEEEEGEDDEDADNDDNSGCSGENKEENIKDSSGQEDETQSSNDDPSQSVASQDAQEIIRPRRCKYFDTNSEVEEESEEDEDYIPSEDWKKEIMVGSMFQAEIPVGICRYKENEKVYENDDQLLWDPEYLPEDKVIIFLKDASRRTGDEKGVEAIPEGSHIKDNEQALYELVKCNFDTEEALRRLRFNVKAAREELSVWTEEECRNFEQGLKAYGKDFHLIQANKVRTRSVGECVAFYYMWKKSERYDFFAQQTRFGKKKYNLHPGVTDYMDRLLDESESAASSRAPSPPPTASNSSNSQSEKEDGTVSTANQNGVSSNGPGEILNKEEVKVEGLHINGPTGGNKKPLHADMDTNGYETDNLTTDPKLAHMTARNENDFDEKSERPAKRRRVNSNGKESPGSSEFFQEAVSHGKFEELENTDD

SEQ ID NO: 8732 - protein, 81 aa, Homo Sapiens
MFMFNWFTDCLWTLFLSNYQPSVESSSPGGSATSDDHEFDPSADMLVHDFDDERTLEEEEMMEGETNFSSEIEDLARVNNM

SEQ ID NO: 8733 - protein, 370 aa, Homo Sapiens
MPIHELLSLYGYGSTVRLPEEDEEEEEEEEEGEDDEDADNDDNSGCSGENKEENIKDSSGQEDETQSSNDDPSQSVASQDAQEIIRPRRCKYFDTNSEVEEESEEDEDYIPSEDWKKEIMVGSMFQAEIPVGICRYKENEKVYENDDQLLWDPEYLPEDKVIIFLKDASRRTGDEKGVEAIPEGSHIKDNEQALYELVKCNFDTEEALRRLRFNVKAAREELSVWTEEECRNFEQGLKAYGKDFHLIQANKVRTRSVGECVAFYYMWKKSERYDFFAQQTRFGKKKYNLHPGVTDYMDRLLDESESAASSRAPSPPPTASNSSNSQSEKEDGTVSTANQNGVSSNGPGILQMLLPVHFSAISSRANAFLK

SEQ ID NO: 8734 - protein, 70 aa, Homo Sapiens
MFQPLSSPDSHRKGTGFGLGIVFSLTFFKRRMWPLAFGSGMGLGMAYSNCQHDFQAPYLLHGKYVKEQEQ

SEQ ID NO: 8735 - protein, 71 aa, Homo Sapiens
RKWDRCLADAVVKIGTGFGLGIVFSLTFFKRRMWPLAFGSGMGLGMAYSNCQHDFQAPYLLHGKYVKEQEQ

SEQ ID NO: 8736 - protein, 46 aa, Homo Sapiens
  misc_feature (1)..(1): Xaa can be any naturally occurring amino acid
XKWDRCLADAVVKIEMGFHHVAQAGLELRVQTIHLPWPPNVPGLQA

SEQ ID NO: 8737 - protein, 286 aa, Homo Sapiens
MCLFQLCGLVRYMEFGPPTVNDKLMRFFDHCEKFLTEVEKNATALYHVEAFKTGPEMQNILKKVAATLQVPVNDLNADLIQVAFFTCSFDLAIKGVKSPWCDVFDIDDAKVLEYLNDLKQYWKRGYGYTINSRSSCTLFQDIFQHLDKAVEQKQRSQPISSPVILQFGHAETLLPLLSLMGYFKDKEPLTAYNYKKQMHRKFRSGLIVPYASNLIFVLYHCENAKTPKEQFRVQMLLNEKVLPLAYSQETVSFYEDLKNHYKDILQSCQTSEECELARANSTSDEL

SEQ ID NO: 8738 - protein, 312 aa, Homo Sapiens
MLRAPGCLLRTSVAPAAALAAALLSSLARCSLLEPRDPVASSLSPYFGTKTRYEDVNPVLLSGPEAPWRDPELLEGTCTPVQLVALIRHGTRYPTVKQIRKLRQLHGLLQARGSRDGGASSTGSRDLGAALADWPLWYADWMDGQLVEKGRQDMRQLALRLASLFPALFSRENYGRLRLITSSKHRCMDSSAAFLQGLWQHYHPGLPPPDVADMEFGPPTVNDKLMRFFDHCEKFLTEVEKNATALYHVEAFKTGPEMQNILKKVAATLQVPVNDLNAGLSQFLLQSSSSLVMQRLFFHCFLSWATSKTRNP

SEQ ID NO: 8739 - protein, 487 aa, Homo Sapiens
MLRAPGCLLRTSVAPAAALAAALLSSLARCSLLEPRDPVASSLSPYFGTKTRYEDVNPVLLSGPEAPWRDPELLEGTCTPVQLVALIRHGTRYPTVKQIRKLRQLHGLLQARGSRDGGASSTGSRDLGAALADWPLWYADWMDGQLVEKGRQDMRQLALRLASLFPALFSRENYGRLRLITSSKHRCMDSSAAFLQGLWQHYHPGLPPPDVADMEFGPPTVNDKLMRFFDHCEKFLTEVEKNATALYHVEAFKTGPEMQNILKKVAATLQVPVNDLNADLIQVAFFTCSFDLAIKGVKSPWCDVFDIDDAKVLEYLNDLKQYWKRGYGYTINSRSSCTLFQDIFQHLDKAVEQKQRSQPISSPVILQFGHAETLLPLLSLMGYFKDKEPLTAYNYKKQMHRKFRSGLIVPYASNLIFVLYHCENAKTPKEQFRVQMLLNEKVLPLAYSQETVSFYEDLKNHYKDILQSCQTSEECELARANSTSDEL

SEQ ID NO: 8740 - protein, 146 aa, Homo Sapiens
MKLPILRSNPEDQILYQTERYNEETFGYEVPIKEEGDYVLVLKFAEVYFAQSQQKVFDVRLNGHVVVKDLDIFDRVGHSTAHDEIIPMSIRKGKLSVQGEVSTFTGKLYIEFVKGYYDNPKVCALYIMAGTVDDVPKLQPHPGLEK

SEQ ID NO: 8741 - protein, 217 aa, Homo Sapiens
MLGAWAVEGTAVALLRLLLLLLPPAIRGPGLGVAGVAGAAGAGLPESVIWAVNAGGEAHVDVHGIHFRKDPLEGRVGRASDYGMKLPILRSNPEDQILYQTERYNEETFGYEVPIKEEGDYVLVLKFAEVYFAQSQQKMYQSFSLIRDWRRKKRKKKKKNMMKGLISKNRPIRTGCSQAPAHPTPMPRTTAASCFPSWWPSESSFQPSSASAGCENK

SEQ ID NO: 8742 - protein, 292 aa, Homo Sapiens
MLGAWAVEGTAVALLRLLLLLLPPAIRGPGLGVAGVAGAAGAGLPESVIWAVNAGGEAHVDVHGIHFRKDPLEGRVGRASDYGMKLPILRSNPEDQILYQTERYNEETFGYEVPIKEEGDYVLVLKFAEVYFAQSQQKVFDVRLNGHVVVKDLDIFDRVGHSTAHDEIIPMSIRKGKLSVQGEVSTFTGKLYIEFVKGYYDNPKVCALYIMAGTVDDVPKLQPHPGLEKKEEEEEEEEYDEGSNLKKQTNKNRVQSGPRTPNPYASDNSSLMFPILVAFGVFIPTLFCLCRL

SEQ ID NO: 8743 - protein, 173 aa, Homo Sapiens
  misc_feature (1)..(1): Xaa can be any naturally occurring amino acid
XNEETFGYEVPIKEEGDYVLVLKFAEVYFAQSQQKVFDVRLNGHVVVKDLDIFDRVGHSTAHDEIIPMSIRKGKLSVQGEVSTFTGKLYIEFVKMYQSFSLIRDWRRKKRKKKKKNMMKGLISKNRPIRTGCSQAPAHPTPMPRTTAASCFPSWWPSESSFQPSSASAGCENK

SEQ ID NO: 8744 - protein, 115 aa, Homo Sapiens
MVSRKAVAALLVVHVAAMLASQTEAFVPIFTYGELQRMQEKERNKGQKKSLSVWQRSGEEGPVDPAEPIREEENEMIKLTAPLEIGMRMNSRQLEKYPATLEGLLSEMLPQHAAK

SEQ ID NO: 8745 - protein, 114 aa, Homo Sapiens
MVSRKAVAALLVVHVAAMLASQTEAFVPIFTYGELQRMQEKERNKGQKKSLSVWQRSGEEGPVDPAEPIREEENEMIKLTAPLEIGMRMNSRQLEKYPATLEGLLSEMLPQHAK

SEQ ID NO: 8746 - protein, 108 aa, Homo Sapiens
MVSRKAVAALLVVHVAAMLASQTEAFVPIFTYGELQRMQEKERNKGQKKSLSVWQRSGEEGPVDPAEPIREEENEMIKLTAPLEIGMRMNSRQLEKYPATLEGLLTAK

SEQ ID NO: 8747 - protein, 919 aa, Homo Sapiens
MAADVFMCSPRRPRSRGRQVLLKPQVSEDDDDSDTDEPSPPPASGAATPARAHASAAPPPPRAGPGREEPPRRQQIIHSGHFMVSSPHREHPPKKGYDFDTVNKQTCQTYSFGKTSSCHLSIDASLTKLFECMTLAYSGKLVSPKWKNFKGLKLQWRDKIRLNNAIWRAWYMQYLEKRKNPVCHFVTPLDGSVDVDEHRRPEAITTEGKYWKSRIEIVIREYHKWRTYFKKRLQQHKDEDLSSLVQDDDMLYWHKHGDGWKTPVPMEEDPLLDTDMLMSEFSDTLFSTLSSHQPVAWPNPREIAHLGNADMIQPGLIPLQPNLDFMDTFEPFQDLFSSSRSIFGSMLPASASAPVPDPNNPPAQESILPTTALPTVSLPDSLIAPPTAPSLAHMDEQGCEHTSRTEDPFIQPTDFGPSEPPLSVPQPFLPVFTMPLLSPSPAPPPISPVLPLVPPPATALNPPAPPTFHQPQKFAGVNKAPSVITHTASATLTHDAPATTFSQSQGLVITTHHPAPSAAPCGLALSPVTRPPQPRLTFVHPKPVSLTGGRPKQPHKIVPAPKPEPVSLVLKNARIAPAAFSGQPQAVIMTSGPLKREGMLASTVSQSNVVIAPAAIARAPGVPEFHSSILVTDLGHGTSSPPAPVSRLFPSTAQDPLGKGEQVPLHGGSPQVTVTGPSRDCPNSGQASPCASEQSPSPQSPQNNCSGKSDPKNVAALKNRQMKHISAEQKRRFNIKMCFDMLNSLISNNSKLTSHAITLQKTVEYITKLQQERGQMQEEARRLREEIEELNATIISCQQLLPATGVPVTRRQFDHMKDMFDEYVKTRTLQNWKFWIFSIIIKPLFESFKGMVSTSSLEELHRTALSWLDQHCSLPILRPMVLSTLRQLSTSTSILTDPAQLPEQASKAVTRIGKRLGES

SEQ ID NO: 8748 - protein, 217 aa, Homo Sapiens
MDEQGCEHTSRTEDPFIQPTDFGPSEPPLSVPPPISPVLPLVPPPATALNPPAPPTFHQPQKFAGVNKAPSVITHTASATLTHDAPATTFSQSQGLVITTHHPAPSAAPCGLALSPVTRPPQPRLTFVHPKPVSLTGGRPKQPHKIVPAPKPEPVSLVLKNARIAPGEPGGETQCGAPPDPEGCFPIPKAFKLVTTTTTLVCTCMRTHIHLNETKVS

SEQ ID NO: 8749 - protein, 526 aa, Homo Sapiens
MDEQGCEHTSRTEDPFIQPTDFGPSEPPLSVPQPFLPVFTMPLLSPSPAPPPISPVLPLVPPPATALNPPAPPTFHQPQKFAGVNKAPSVITHTASATLTHDAPATTFSQSQGLVITTHHPAPSAAPCGLALSPVTRPPQPRLTFVHPKPVSLTGGRPKQPHKIVPAPKPEPVSLVLKNARIAPAAFSGQPQAVIMTSGPLKREGMLASTVSQSNVVIAPAAIARAPGVPEFHSSILVTDLGHGTSSPPAPVSRLFPSTAQDPLGKGEQVPLHGGSPQVTVTGPSRDCPNSGQASPCASEQSPSPQSPQNNCSGKSDPKNVAALKNRQMKHISAEQKRRFNIKMCFDMLNSLISNNSKLTSHAITLQKTVEYITKLQQERGQMQEEARRLREEIEELNATIISCQQLLPATGVPVTRRQFDHMKDMFDEYVKTRTLQNWKFWIFSIIIKPLFESFKGMVSTSSLEELHRTALSWLDQHCSLPILRPMVLSTLRQLSTSTSILTDPAQLPEQASKAVTRIGKRLGES

SEQ ID NO: 8750 - protein, 74 aa, Homo Sapiens
MLYWHKHGDGWKTPVPMEEDPLLDTDMLMSEFSDTLFSTLSSHQPVAWPNPREIAHLGNADMIQPGLIPLQPNL

SEQ ID NO: 8751 - protein, 308 aa, Homo Sapiens
MVLGALVALSSCPLGLRTSCLTGREAASAGWARPCGPGLHLNILLILAAAFSGQPQAVIMTSGPLKREGMLASTVSQSNVVIAPAAIARAPGVPEFHSSILVTDLGHGTSSPPAPVSRLFPSTAQDPLGKGEQVPLHGGSPQVTVTGPSRDCPNSGQASPCASEQSPSPQSPQNNCSGKSDPKNVAALKNRQMKHISAEQKRRFNIKMCFDMLNSLISNNSKLTSHAITLQKTVEYITKLQQERGQMQEEARRLREEIEELNATIISCQQLLPATGVPVTRRQFDHMKDMFDEYVKTRTLQNWKFWIV

SEQ ID NO: 8752 - protein, 171 aa, Homo Sapiens
  misc_feature (1)..(1): Xaa can be any naturally occurring amino acid
XHGGSPQVTVTGPSRDCPNSGQASPCASEQSPSPQSPQNNCSGKSDPKNVAALKNRQMKHISAEQKRRFNIKMCFDMLNSLISNNSKLTSHAITLQKTVEYITKLQQERGQMQEEARRLREEIEELNATIIDPFSVGRYFPAPGERSTPVQPPSGLQSPAPLRACLFFNHT

SEQ ID NO: 8753 - protein, 213 aa, Homo Sapiens
MAGALAGLAAGLQVPRVAPSPDSDSDTDSEDPSLRRSAGGLLRSQVIHSGHFMVSSPHSDSLPRRRDQEGSVGPSDFGPRSIDPTLTRLFECLSLAYSGKLVSPKWKNFKGLKLLCRDKIRLNNAIWRAWYIQYFFTNSRLPQPPMPSNFPEPPSFSPVVDSLFSSGTLGPEVPPASSAMTHLSGHSRLQARNSCPGPLDSSAFLSSDFLLPE

SEQ ID NO: 8754 - protein, 721 aa, Homo Sapiens
MAGALAGLAAGLQVPRVAPSPDSDSDTDSEDPSLRRSAGGLLRSQVIHSGHFMVSSPHSDSLPRRRDQEGSVGPSDFGPRSIDPTLTRLFECLSLAYSGKLVSPKWKNFKGLKLLCRDKIRLNNAIWRAWYIQYVKRRKSPVCGFVTPLQGPEADAHRKPEAVVLEGNYWKRRIELPPEDAYVGNADMIQPDLTPLQPSLDDFMDISDFFTNSRLPQPPMPSNFPEPPSFSPVVDSLFSSGTLGPEVPPASSAMTHLSGHSRLQARNSCPGPLDSSAFLSSDFLLPEDPKPRLPPPPVPPPLLHYPPPAKVPGLEPCPPPPFPPMAPPTALLQEEPLFSPRFPFPTVPPAPGVSPLPAPAAFPPTPQSVPSPAPTPFPIELLPLGYSEPAFGPCFSMPRGKPPAPSPRGQKASPPTLAPATASPPTTAGSNNPCLTQLLTAAKPEQALEPPLVSSTLLRSPGSPETVPEFPCTFLPPTPAPTPPRPPPGPATLAPSRPLLVPKAERLSPPAPSGSERRLSGDLSSMPGPGTLSVRVSPPQPILSRGRPDSNKTENRRITHISAEQKRRFNIKLGFDTLHGLVSTLSAQPSLKVSKATTLQKTAEYILMLQQERAGLQEEAQQLRDEIEELNAAINLCQQQLPATGVPITHQRFDQMRDMFDDYVRTRTLHNWKFWVFSILIRPLFESFNGMVSTASVHTLRQTSLAWLDQYCSLPALRPST

SEQ ID NO: 8755 - protein, 852 aa, Homo Sapiens
MAGALAGLAAGLQVPRVAPSPDSDSDTDSEDPSLRRSAGGLLRSQVIHSGHFMVSSPHSDSLPRRRDQEGSVGPSDFGPRSIDPTLTRLFECLSLAYSGKLVSPKWKNFKGLKLLCRDKIRLNNAIWRAWYIQYVKRRKSPVCGFVTPLQGPEADAHRKPEAVVLEGNYWKRRIEVVMREYHKWRIYYKKRLRKPSREDDLLAPKQAEGRWPPPEQWCKQLFSSVVPVLLGDPEEEPGGRQLLDLNCFLSDISDTLFTMTQSGPSPLQLPPEDAYVGNADMIQPDLTPLQPSLDDFMDISDFFTNSRLPQPPMPSNFPEPPSFSPVVDSLFSSGTLGPEVPPASSAMTHLSGHSRLQARNSCPGPLDSSAFLSSDFLLPEDPKPRLPPPPVPPPLLHYPPPAKVPGLEPCPPPPFPPMAPPTALLQEEPLFSPRFPFPTVPPAPGVSPLPAPAAFPPTPQSVPSPAPTPFPIELLPLGYSEPAFGPCFSMPRGKPPAPSPRGQKASPPTLAPATASPPTTAGSNNPCLTQLLTAAKPEQALEPPLVSSTLLRSPGSPQETVPEFPCTFLPPTPAPTPPRPPPGPATLAPSRPLLVPKAERLSPPAPSGSERRLSGDLSSMPGPGTLSVRVSPPQPILSRGRPDSNKTENRRITHISAEQKRRFNIKLGFDTLHGLVSTLSAQPSLKVSKATTLQKTAEYILMLQQERAGLQEEAQQLRDEIEELNAAINLCQQQLPATGVPITHQRFDQMRDMFDDYVRTRTLHNWKFWVFSILIRPLFESFNGMVSTASVHTLRQTSLAWLDQYCSLPALRPTVLNSLRQLGTSTSILTDPGRIPEQATRAVTEGTLGKPL

SEQ ID NO: 8756 - protein, 575 aa, Homo Sapiens
MAGALAGLAAGLQVPRVAPSPDSDSDTDSEDPSLRRSAGGLLRSQVIHSGHFMVSSPHSDSLPRRRDQEGSVGPSDFGPRSIDPTLTRLFECLSLAYSGKLVSPKWKNFKGLKLLCRDKIRLNNAIWRAWYIQYVKRRKSPVCGFVTPLQGPEADAHRKPEAVVLEGNYWKRRIEVVMREYHKWRIYYKKRLRKPSREDDLLAPKQAEGRWPPPEQWCKQLFSSVVPVLLGDPEEEPGGRQLLDLNCFLSDISDTLFTMTQSGPSPLQLPPEDAYVGNADMIQPDLTPLQPSLDDFMDISDFFTNSRLPQPPMPSNFPEPPSFSPVVDSLFSSGTLGPEVPPASSAMTHLSGHSRLQARNSCPGPLDSSAFLSSDFLLPEDPKPRLPPPPVPPPLLHYPPPAKVPGLEPCPPPPFPPMAPPTALLQEEPLFSPRFPFPTVPPAPGVSPLPAPAAFPPTPQSVPSPAPTPFPIELLPLGYSEPAFGPCFSMPRGKPPAPSPRGQKASPPTLAPATASPPTTAGSNNPCLTQLLTAAKPEQALEPPLVSSTLLRSPGSPAVNGGCQGTSAPCQALGL

SEQ ID NO: 8757 - protein, 831 aa, Homo Sapiens
MAGALAGLAAGLQVPRVAPSPDSDSDTDSEDPSLRRSAGGLLRSQVIHSGHFMVSSPHSDSLPRRRDQEGSVGPSDFGPRSIDPTLTRLFECLSLAYSGKLVSPKWKNFKGLKLLCRDKIRLNNAIWRAWYIQYVKRRKSPVCGFVTPLQGPEADAHRKPEAVVLEGNYWKRRIEVVMREYHKWRIYYKKRLRKPSREDDLLAPKQAEGRWPPPEQWCKQLFSSVVPVLLGDPEEEPGGRQLLDLNCFLSDISDTLFTMTQSGPSPLQLPPEDAYVGNADMIQPDLTPLQPSLDDFMDISDFFTNSRLPQPPMPSNFPEPPSFSPVVDSLFSSGTLGPEVPPASSAMTHLSGHSRLQARNSCPGPLDSSAFLSSDFLLPEDPKPRLPPPPVPPPLLHYPPPAKVPGLEPCPPPPFPPMAPPTALLQEEPLFSPRFPFPTVPPAPGVSPLPAPAAFPPTPQSVPSPAPTPFPIELLPLGYSEPAFGPCFSMPRGKPPAPSPRGQKASPPTLAPATASPPTTAGSNNPCLTQLLTAAKPEQALEPPLVSSTLLRSPGSPQETVPEFPCTFLPPTPAPTPPRPPPGPATLAPSRPLLVPKAERLSPPAPSGSERRLSGDLSSMPGPGTLSVRVSPPQPILSRGRPDSNKNRRITHISAEQKRRFNIKLGFDTLHGLVSTLSAQPSLKERAGLQEEAQQLRDEIEELNAAINLCQQQLPATGVPITHQRFDQMRDMFDDYVRTRTLHNWKFWVFSILIRPLFESFNGMVSTASVHTLRQTSLAWLDQYCSLPALRPTVLNSLRQLGTSTSILTDPGRIPEQATRAVTEGTLGKPL

SEQ ID NO: 8758 - protein, 833 aa, Homo Sapiens
MAGALAGLAAGLQVPRVAPSPDSDSDTDSEDPSLRRSAGGLLRSQVIHSGHFMVSSPHSDSLPRRRDQEGSVGPSDFGPRSIDPTLTRLFECLSLAYSGKLVSPKWKNFKGLKLLCRDKIRLNNAIWRAWYIQYVKRRKSPVCGFVTPLQGPEADAHRKPEAVVLEGNYWKRRIEVVMREYHKWRIYYKKRLRKPSREDDLLAPKQAEGRWPPPEQWCKQLFSSVVPVLLGDPEEEPGGRQLLDLNCFLSDISDTLFTMTQSGPSPLQLPPEDAYVGNADMIQPDLTPLQPSLDDFMDISDFFTNSRLPQPPMPSNFPEPPSFSPVVDSLFSSGTLGPEVPPASSAMTHLSGHSRLQARNSCPGPLDSSAFLSSDFLLPEDPKPRLPPPPVPPPLLHYPPPAKVPGLEPCPPPPFPPMAPPTALLQEEPLFSPRFPFPTVPPAPGVSPLPAPAAFPPTPQSVPSPAPTPFPIELLPLGYSEPAFGPCFSMPRGKPPAPSPRGQKASPPTLAPATASPPTTAGSNNPCLTQLLTAAKPEQALEPPLVSSTLLRSPGSPQETVPEFPCTFLPPTPAPTPPRPPPGPATLAPSRPLLVPKAERLSPPAPSGSERRLSGDLSSMPGPGTLSVRVSPPQPILSRGRPDSNKTENRRITHISAEQKRRFNIKLGFDTLHGLVSTLSAQPSLKERAGLQEEAQQLRDEIEELNAAINLCQQQLPATGVPITHQRFDQMRDMFDDYVRTRTLHNWKFWVFSILIRPLFESFNGMVSTASVHTLRQTSLAWLDQYCSLPALRPTVLNSLRQLGTSTSILTDPGRIPEQATRAVTEGTLGKPL

SEQ ID NO: 8759 - protein, 850 aa, Homo Sapiens
MAGALAGLAAGLQVPRVAPSPDSDSDTDSEDPSLRRSAGGLLRSQVIHSGHFMVSSPHSDSLPRRRDQEGSVGPSDFGPRSIDPTLTRLFECLSLAYSGKLVSPKWKNFKGLKLLCRDKIRLNNAIWRAWYIQYVKRRKSPVCGFVTPLQGPEADAHRKPEAVVLEGNYWKRRIEVVMREYHKWRIYYKKRLRKPSREDDLLAPKQAEGRWPPPEQWCKQLFSSVVPVLLGDPEEEPGGRQLLDLNCFLSDISDTLFTMTQSGPSPLQLPPEDAYVGNADMIQPDLTPLQPSLDDFMDISDFFTNSRLPQPPMPSNFPEPPSFSPVVDSLFSSGTLGPEVPPASSAMTHLSGHSRLQARNSCPGPLDSSAFLSSDFLLPEDPKPRLPPPPVPPPLLHYPPPAKVPGLEPCPPPPFPPMAPPTALLQEEPLFSPRFPFPTVPPAPGVSPLPAPAAFPPTPQSVPSPAPTPFPIELLPLGYSEPAFGPCFSMPRGKPPAPSPRGQKASPPTLAPATASPPTTAGSNNPCLTQLLTAAKPEQALEPPLVSSTLLRSPGSPQETVPEFPCTFLPPTPAPTPPRPPPGPATLAPSRPLLVPKAERLSPPAPSGSERRLSGDLSSMPGPGTLSVRVSPPQPILSRGRPDSNKNRRITHISAEQKRRFNIKLGFDTLHGLVSTLSAQPSLKVSKATTLQKTAEYILMLQQERAGLQEEAQQLRDEIEELNAAINLCQQQLPATGVPITHQRFDQMRDMFDDYVRTRTLHNWKFWVFSILIRPLFESFNGMVSTASVHTLRQTSLAWLDQYCSLPALRPTVLNSLRQLGTSTSILTDPGRIPEQATRAVTEGTLGKPL

SEQ ID NO: 8760 - protein, 235 aa, Homo Sapiens
PKWKNFKGLKLLCRDKIRLNNAIWRAWYIQYVKRRKSPVCGFVTPLQGPEADAHRKPEAVVLEGNYWKRRIEVVMREYHKWRIYYKKRVSGGGPGRPQSFPPAAAGYRPPRKIPGKGILTPELAPLGPSIQSRADSATVWPQRLLAASLPRGRLRKPSREDDLLAPKQAEGRWPPPEQWCKQLFSSVVPVLLGDPEEEPGGRQLLDLNCFLSDISDTLFTMTQSGPSPLQLPPED

SEQ ID NO: 8761 - protein, 469 aa, Homo Sapiens
MHSFPPLLLLLFWGVVSHSFPATLETQEQDVDLVQKYLEKYYNLKNDGRQVEKRRNSGPVVEKLKQMQEFFGLKVTGKPDAETLKVMKQPRCGVPDVAQFVLTEGNPRWEQTHLTYRIENYTPDLPRADVDHAIEKAFQLWSNVTPLTFTKVSEGQADIMISFVRGDHRDNSPFDGPGGNLAHAFQPGPGIGGDAHFDEDERWTNNFREYNLHRVAAHELGHSLGLSHSTDIGALMYPSYTFSGDVQLAQDDIDGIQAIYGRSQNPVQPIGPQTPKACDSKLTFDAITTIRGEVMFFKDRFYMRTNPFYPEVELNFISVFWPQLPNGLEAAYEFADRDEVRFFKGNKYWAVQGQNVLHGYPKDIYSSFGFPRTVKHIDAALSEENTGKTYFFVANKYWRYDEYKRSMDPGYPKMIAHDFPGIGHKVDAVFMKDGFFYFFHGTRQYKFDPKTKRILTLQKANSWFNCRKN

SEQ ID NO: 8762 - protein, 476 aa, Homo Sapiens
MMHLAFLVLLCLPVCSAYPLSGAAKEEDSNKDLAQQYLEKYYNLEKDVKQFRRKDSNLIVKKIQGMQKFLGLEVTGKLDTDTLEVMRKPRCGVPDVGHFSSFPGMPKWRKTHLTYRIVNYTPDLPRDAVDSAIEKALKVWEEVTPLTFSRLYEGEADIMISFAVKEHGDFYSFDGPGHSLAHAYPPGPGLYGDIHFDDDEKWTEDASGTNLFLVAAHELGHSLGLFHSANTEALMYPLYNSFTELAQFRLSQDDVNGIQSLYGPPPASTEEPLVPTKSVPSGSEMPAKCDPALSFDAISTLRGEYLFFKDRYFWRRSHWNPEPEFHLISAFWPSLPSYLDAAYEVNSRDTVFIFKGNEFWAIRGNEVQAGYPRGIHTLGFPPTIRKIDAAVSDKEKKKTYFFAADKYWRFDENSQSMEQGFPRLIADDFPGVEPKVDAVLQAFGFFYFFSGSSQFEFDPNARMVTHILKSNSWLHC

SEQ ID NO: 8763 - protein, 181 aa, Homo Sapiens
MMHLAFLVLLCLPVCSAYPLSGAAKEEDSNKDLAQQYLEKYYNLEKDVKQFRRKDSNLIVKKIQGMQKFLGLEVTGKLDTDTLEVMRKPRCGVPDVGHFSSFPGMPKWRKTHLTYRIVNYTPDLPRDAVDSAIEKALKVWEEVTPLTFSRLYEGEADIMISFAVKGHSLAHAYPPGPGLYG

SEQ ID NO: 8764 - protein, 113 aa, Homo Sapiens
MAPAAWLRSAAARALLPPMLLLLLQPPPLLARALPPDAHHLHAERRGPQPWHAALPSSPAPAPATQEAPRPASSLRPPRCGVPDPSDGLSARNRQKRFVLSGGRWEKTDLTYR

SEQ ID NO: 8765 - protein, 488 aa, Homo Sapiens
MAPAAWLRSAAARALLPPMLLLLLQPPPLLARALPPDAHHLHAERRGPQPWHAALPSSPAPAPATQEAPRPASSLRPPRCGVPDPSDGLSARNRQKRFVLSGGRWEKTDLTYRILRFPWQLVQEQVRQTMAEALKVWSDVTPLTFTEVHEGRADIMIDFARYWHGDDLPFDGPGGILAHAFFPKTHREGDVHFDYDETWTIGDDQGTDLLQVAAHEFGHVLGLQHTTAAKALMSAFYTFRYPLSLSPDDCRGVQHLYGQPWPTVTSRTPALGPQAGIDTNEIAPLEPDAPPDACEASFDAVSTIRGELFFFKAGFVWRLRGGQLQPGYPALASRHWQGLPSPVDAAFEDAQGHIWFFQGAQYWVYDGEKPVLGPAPLTELGLVRFPVHAALVWGPEKNKIYFFRGRDYWRFHPSTRRVDSPVPRRATDWRGVPSEIDAAFQDADGYAYFLRGRLYWKFDPVKVKALEGFPRLVGPDFFGCAEPANTFL

SEQ ID NO: 8766 - protein, 354 aa, Homo Sapiens
MAPAAWLRSAAARALLPPMLLLLLQPPPLLARALPPDAHHLHAERRGPQPWHAALPSSPAPAPATQEAPRPASSLRPPRCGVPDPSDGLSARNRQKRILRFPWQLVQEQVRQTMAEALKVWSDVTPLTFTEVHEGRADIMIDFARYWHGDDLPFDGPGGILAHAFFPKTHREGDVHFDYDETWTIGDDQGTDLLQVAAHEFGHVLGLQHTTAAKALMSAFYTFRYPLSLSPDDCRGVQHLYGQPWPTVTSRTPALGPQAGIDTNEIAPLEPDAPPDACEASFDAVSTIRGELFFFKAGFVWRLRGGQLQPGYPALASRHWQGLPSPVDAAFEDAQGHIWFFQGTTGVSTPAPGV

SEQ ID NO: 8767 - protein, 170 aa, Homo Sapiens
  misc_feature (1)..(1): Xaa can be any naturally occurring amino acid
XAHEFGHVLGLQHTTAAKALMSAFYTFRYPLSLSPDDCRGVQHLYGQPWPTVTSRTPALGPQAGIDTNEIAPLEPDAPPDACEASFDAVSTIRGELFFFKAGFVWRLRGGQLQPGYPALASRHWQGLPSPVDAAFEDAQGHIWFFQELGFPSSTGRDESLEHCRCQGLHK

SEQ ID NO: 8768 - protein, 470 aa, Homo Sapiens
MKFLLILLLQATASGALPLNSSTSLEKNNVLFGERYLEKFYGLEINKLPVTKMKYSGNLMKEKIQEMQHFLGLKVTGQLDTSTLEMMHAPRCGVPDVHHFREMPGGPVWRKHYITYRINNYTPDMNREDVDYAIRKAFQVWSNVTPLKFSKINTGMADILVVFARGAHGDFHAFDGKGGILAHAFGPGSGIGGDAHFDEDEFWTTHSGGTNLFLTAVHEIGHSLGLGHSSDPKAVMFPTYKYVDINTFRLSADDIRGIQSLYGDPKENQRLPNPDNSEPALCDPNLSFDAVTTVGNKIFFFKDRFFWLKVSERPKTSVNLISSLWPTLPSGIEAAYEIEARNQVFLFKDDKYWLISNLRPEPNYPKSIHSFGFPNFVKKIDAAVFNPRFYRTYFFVDNQYWRYDERRQMMDPGYPKLITKNFQGIGPKIDAVFYSKNKYYYFFQGSNQFEYDFLLQRITKTLKSNSWFGC

SEQ ID NO: 8769 - protein, 471 aa, Homo Sapiens
MHPGVLAAFLFLSWTHCRALPLPSGGDEDDLSEEDLQFAERYLRSYYHPTNLAGILKENAASSMTERLREMQSFFGLEVTGKLDDNTLDVMKKPRCGVPDVGEYNVFPRTLKWSKMNLTYRIVNYTPDMTHSEVEKAFKKAFKVWSDVTPLNFTRLHDGIADIMISFGIKEHGDFYPFDGPSGLLAHAFPPGPNYGGDAHFDDDETWTSSSKGYNLFLVAAHEFGHSLGLDHSKDPGALMFPIYTYTGKSHFMLPDDDVQGIQSLYGPGDEDPNPKHPKTPDKCDPSLSLDAITSLRGETMIFKDRFFWRLHPQQVDAELFLTKSFWPELPNRIDAAYEHPSHDLIFIFRGRKFWALNGYDILEGYPKKISELGLPKEVKKISAAVHFEDTGKTLLFSGNQVWRYDDTNHIMDKDYPRLIEEDFPGIGDKVDAVYEKNGYIYFFNGPIQFEYSIWSNRIVRVMPANSILWC

SEQ ID NO: 8770 - protein, 489 aa, Homo Sapiens
MHPGVLAAFLFLSWTHCRALPLPSGGDEDDLSEEDLQFAERYLRSYYHPTNLAGILKENAASSMTERLREMQSFFGLEVTGKLDDNTLDVMKKPRCGVPDVGEYNVFPRTLKWSKMNLTYRIVNYTPDMTHSEVEKAFKKAFKVWSDVTPLNFTRLHDGIADIMISFGIKEHGDFYPFDGPSGLLAHAFPPGPNYGGDAHFDDDETWTSSSKGYNLFLVAAHEFGHSLGLDHSKDPGALMFPIYTYTGKSHFMLPDDDVQGIQSLYGPGDEDPNPKHPKTPDKCDPSLSLDAITSLRGETMIFKDRFFWRLHPQQVDAELFLTKSFWPELPNRIDAAYEHPSHDLIFIFRGRKFWALNGYDILEGYPKKISELGLPKEVKKISAAVHFEDTGKTLLFSGNQVWRYDDTNHIMDKDYPRLIEEDFPGIGDKVDAVYEKNESHSVTQAGVHCRNLSSLQPPPPGFKRFSCLSLWSSWDYRLYLFFQRTHTV

SEQ ID NO: 8771 - protein, 383 aa, Homo Sapiens [sequence omitted]

SEQ ID NO: 8772 - protein, 194 aa, Homo Sapiens
MRESLLFLRLPSSPALSRRRALRWALRPPRVAQAFSGRVCGQAWLQQYGYLPPGDLRTHTQRSPQSLSAAIAAMQKFYGLQVTGKADADTMKAMRRPRCGVPDKFGAEIKANVRRKRYAIQGLKWQHNEITFCIQNYTPKVGEYATYEAIRKAFRVWESATPLRFREVPYAYIREGHEKQADIMIFFAEGFHGD

SEQ ID NO: 8773 - protein, 582 aa, Homo Sapiens
MSPAPRPPRCLLLPLLTLGTALASLGSAQSSSFSPEAWLQQYGYLPPGDLRTHTQRSPQSLSAAIAAMQKFYGLQVTGKADADTMKAMRRPRCGVPDKFGAEIKANVRRKRYAIQGLKWQHNEITFCIQNYTPKVGEYATYEAIRKAFRVWESATPLRFREVPYAYIREGHEKQADIMIFFAEGFHGDSTPFDGEGGFLAHAYFPGPNIGGDTHFDSAEPWTVRNEDLNGNDIFLVAVHELGHALGLEHSSDPSAIMAPFYQWMDTENFVLPDDDRRGIQQLYGGESGFPTKMPPQPRTTSRPSVPDKPKNPTYGPNICDGNFDTVAMLRGEMFVFKERWFWRVRNNQVMDGYPMPIGQFWRGLPASINTAYERKDGKFVFFKGDKHWVFDEASLEPGYPKHIKELGRGLPTDKIDAALFWMPNGKTYFFRGNKYYRFNEELRAVDSEYPKNIKVWEGIPESPRGSFMGSDEVFTYFYKGNKYWKFNNQKLKVEPGYPKSALRDWMGCPSGGRPDEGTEEETEVIIIEVDEEGGGAVSAAAVVLPVLLLLLVLAVGLAVFFFRRHGTPRRLLYCQRSLLDKV

SEQ ID NO: 8774 - protein, 71 aa, Homo Sapiens
MSPAPRPPRCLLLPLLTLGTALASLGSAQSSSFSPESLEELYNWGELPLPRFPWALLSALEPPDKHLDSAQ

SEQ ID NO: 8775 - protein, 143 aa, Homo Sapiens
MDPGYPAQSPLWRGVPSTLDDAMRWSDGASYFFRGQEYWKVLDGELEVAPGYPQSTARDWLVCGDSQADGSVAAGVDAAEGPRAPPGQHDQSRSEDGYEVCSCTSGASSPPGAPGPLVAATMLLLLPPLSPGALWTAAQALTL

SEQ ID NO: 8776 - protein, 118 aa, Homo Sapiens
MHRFWRGLPLHLDSVDAVYERTSDHKIVFFKGDRYWVFKDNNVEEGYPRPVSDFSLPPGGIDAAFSWAHNDRTYFFKDQLYWRYDDHTRHMDPGYPAQSPLWRGVPSTLDDAMRWSDG

SEQ ID NO: 8777 - protein, 39 aa, Homo Sapiens
MHRFWRGLPLHLDSVDAVYERTSDHKIVFFKGPAVLALR

SEQ ID NO: 8778 - protein, 169 aa, Homo Sapiens
MKTPRCSLPDLPVLTQARRRRQAPAPTKWNKRNLSWRVRTFPRDSPLGHDTVRALMYYALKVWSDIAPLNFHEVAGSAADIQIDFSKADHNDGYPFDGPGGTVAHAFFPGHHHTAGDTHFDDDEAWTFRSSDAHGMDLFAVAVHEFGHAIGLSHVAAAHSIMRPYYQGP

SEQ ID NO: 8779 - protein, 115 aa, Homo Sapiens
MQQFGGLEATGILDEATLALMKTPRCSLPDLPVLTQARRRRQAPAPTKWNKRNLSWRVRTFPRDSPLGHDTVRALMYYALKVWSDIAPLNFHEVAGSAADIQIDFSKADHNDGYP

SEQ ID NO: 8780 - protein, 519 aa, Homo Sapiens
MQQFGGLEATGILDEATLALMKTPRCSLPDLPVLTQARRRRQAPAPTKWNKRNLSWRVRTFPRDSPLGHDTVRALMYYALKVWSDIAPLNFHEVAGSAADIQIDFSKADHNDGYPFDGPGGTVAHAFFPGHHHTAGDTHFDDDEAWTFRSSDAHGMDLFAVAVHEFGHAIGLSHVAAAHSIMRPYYQGPVGDPLRYGLPYEDKVRVWQLYGVRESVSPTAQPEEPPLLPEPPDNRSSAPPRKDVPHRCSTHFDAVAQIRGEAFFFKGKYFWRLTRDRHLVSLQPAQMHRFWRGLPLHLDSVDAVYERTSDHKIVFFKGDRYWVFKDNNVEEGYPRPVSDFSLPPGGIDAAFSWAHNDRTYFFKDQLYWRYDDHTRHMDPGYPAQSPLWRGVPSTLDDAMRWSDGASYFFRGQEYWKVLDGELEVAPGYPQSTARDWLVCGDSQADGSVAAGVDAAEGPRAPPGQHDQSRSEDGYEVCSCTSGASSPPGAPGPLVAATMLLLLPPLSPGALWTAAQALTL

SEQ ID NO: 8781 - protein, 603 aa, Homo Sapiens
MRRRAARGPGPPPPGPGLSRLPLPLLLLLALGTRGGCAAPAPAPRAEDLSLGVEWLSRFGYLPPADPTTGQLQTQEELSKAITAMQQFGGLEATGILDEATLALMKTPRCSLPDLPVLTQARRRRQAPAPTKWNKRNLSWRVRTFPRDSPLGHDTVRALMYYALKVWSDIAPLNFHEVAGSAADIQIDFSKADHNDGYPFDGPGGTVAHAFFPGHHHTAGDTHFDDDEAWTFRSSDAHGMDLFAVAVHEFGHAIGLSHVAAAHSIMRPYYQGPVGDPLRYGLPYEDKVRVWQLYGVRESVSPTAQPEEPPLLPEPPDNRSSAPPRKDVPHRCSTHFDAVAQIRGEAFFFKGKYFWRLTRDRHLVSLQPAQMHRFWRGLPLHLDSVDAVYERTSDHKIVFFKGDRYWVFKDNNVEEGYPRPVSDFSLPPGGIDAAFSWAHNDRTYFFKDQLYWRYDDHTRHMDPGYPAQSPLWRGVPSTLDDAMRWSDGASYFFRGQEYWKVLDGELEVAPGYPQSTARDWLVCGDSQADGSVAAGVDAAEGPRAPPGQHDQSRSEDGYEVCSCTSGASSPPGAPGPLVAATMLLLLPPLSPGALWTAAQALTL

SEQ ID NO: 8782 - protein, 302 aa, Homo Sapiens
MYYALKVWSDIAPLNFHEVAGSAADIQIDFSKADHNDGYPFDGPGGTVAHAFFPGHHHTAGDTHFDDDEAWTFRSSDAHGMDLFAVAVHEFGHAIGLSHVAAAHSIMRPYYQGPVGDPLRYGLPYEDKVRVWQLYGVRESVSPTAQPEEPPLLPEPPDNRSSAPPRKDVPHRCSTHFDAVAQIRGEAFFFKGKYFWRLTRDRHLVSLQPAQMHRFWRGLPLHLDSVDAVYERTSDHKIVFFKGDRYWVFKDNNVEEGYPRPVSDFSLPPGGIDAAFSWAHNDRTYFFKDQLYWRYDDHTRHM

SEQ ID NO: 8783 - protein, 485 aa, Homo Sapiens
MNCQQLWLGFLLPMTVSGRVLGLAEVAPVDYLSQYGYLQKPLEGSNNFKPEDITEALRAFQEASELPVSGQLDDATRARMRQPRCGLEDPFNQKTLKYLLLARAALRQAFQDWSNVAPLTFQEVQAGAADIRLSFHGRQSSYCSNTFDGPGRVLAHADIPELGSVHFDEDEFWTEGTYRGVNLRIIAAHEVGHALGLGHSRYSQALMAPVYEGYRPHFKLHPDDVAGIQALYGKKSPVIRDEEEEETELPTVPPVPTEPSPMPDPCSSELDAMMLGPRGKTYAFKGDYVWTVSDSGPGPLFRVSALWEGLPGNLDAAVYSPRTQWIHFFKGDKVWRYINFKMSPGFPKKLNRVEPNLDAALYWPLNQKVFLFKGSGYWQWDELARTDFSSYPKPIKGLFTGVPNQPSAAMSWQDGRVYFFKGKVYWRLNQQLRVEKGYPRNISHNWMHCRPRTIDTTPSGGNTTPSGTGITLDTTLSATETTFEY

SEQ ID NO: 8784 - protein, 305 aa, Homo Sapiens
MNCQQLWLGFLLPMTVSGRVLGLAEVAPVDYLSQYGYLQKPLEGSNNFKPEDITEALRAFQEASELPVSGQLDDATRARMRQPRCGLEDPFNQKTLKYLLLGRWRKKHLTFRILNLPSTLPPHTARAALRQAFQDWSNVAPLTFQEVQAGAADIRLSFHGRQSSYCSNTFDGPGKKSPVIRDEEEEETELPTVPPVPTEPSPMPDPCSSELDAMMLGEAPPLQAVGRRWGQPADPEAWTNGSDMGLQHEQWRAPWEDLCFQGGLCVDCIRFRTGPLVPSVCPLGGAPRKPGCCCLLASNTMDSLL

SEQ ID NO: 8785 - protein, 508 aa, Homo Sapiens
MNCQQLWLGFLLPMTVSGRVLGLAEVAPVDYLSQYGYLQKPLEGSNNFKPEDITEALRAFQEASELPVSGQLDDATRARMRQPRCGLEDPFNQKTLKYLLLGRWRKKHLTFRILNLPSTLPPHTARAALRQAFQDWSNVAPLTFQEVQAGAADIRLSFHGRQSSYCSNTFDGPGRVLAHADIPELGSVHFDEDEFWTEGTYRGVNLRIIAAHEVGHALGLGHSRYSQALMAPVYEGYRPHFKLHPDDVAGIQALYGKKSPVIRDEEEEETELPTVPPVPTEPSPMPDPCSSELDAMMLGPRGKTYAFKGDYVWTVSDSGPGPLFRVSALWEGLPGNLDAAVYSPRTQWIHFFKGDKVWRYINFKMSPGFPKKLNRVEPNLDAALYWPLNQKVFLFKGSGYWQWDELARTDFSSYPKPIKGLFTGVPNQPSAAMSWQDGRVYFFKGKVYWRLNQQLRVEKGYPRNISHNWMHCRPRTIDTTPSGGNTTPSGTGITLDTTLSATETTFEY

SEQ ID NO: 8786 - protein, 81 aa, Homo Sapiens
MNCQQLWLGFLLPMTVSGRVLGLAEVAPVDYLSQYGYLQKPLEGSNNFKPEDITEALRESPGPCRHPRAGQCALRRRRVLD

SEQ ID NO: 8787 - protein, 108 aa, Homo Sapiens
MNCQQLWLGFLLPMTVSGRVLGLAEVAPVDYLSQYGYLQKPLEGSNNFKPEDITEALRPLEKEAPDFPHLEPALHPSTPHSPGSPASSLPGLEQCGSLDLPRGAGWCG

SEQ ID NO: 8788 - protein, 63 aa, Homo Sapiens
MNCQQLWLGFLLPMTVSGRVLGLAEVAPVDYLSQYGYLQKPLEGSNNFKPEDITEALSLRSAG

SEQ ID NO: 8789 - protein, 252 aa, Homo Sapiens
GTTEDYDRDKKYGFCPETGYSLFLVAAHEFGHAMGLEHSQDPGALMAPIYTYTKNFRLSQDDIKGIQELYGASPDIDLGTGPTPTLGPVTPEICKQDIVFDGIAQIRGEIFFFKDRFIWRTVTPRDKPMGPLLVATFWPELPEKIDAVYEAPQEEKAVFFAGNEYWIYSASTLERGYPKPLTSLGLPPDVQRVDAAFNWSKNKKTYIFAGDKFWRYNEVKKKMDPGFPKLIADAWNAIPDNLDAVVDLQGGG

SEQ ID NO: 8790 - protein, 660 aa, Homo Sapiens
MEALMARGALTGPLRALCLLGCLLSHAAAAPSPIIKFPGDVAPKTDKELAVQYLNTFYGCPKESCNLFVLKDTLKKMQKFFGLPQTGDLDQNTIETMRKPRCGNPDVANYNFFPRKPKWDKNQITYRIIGYTPDLDPETVDDAFARAFQVWSDVTPLRFSRIHDGEADIMINFGRWEHGDGYPFDGKDGLLAHAFAPGTGVGGDSHFDDDELWTLGEGQVVRVKYGNADGEYCKFPFLFNGKEYNSCTDTGRSDGFLWCSTTYNFEKDGKYGFCPHEALFTMGGNAEGQPCKFPFRFQGTSYDSCTTEGRTDGYRWCGTTEDYDRDKKYGFCPETAMSTVGGNSEGAPCVFPFTFLGNKYESCTSAGRSDGKMWCATTANYDDDRKWGFCPDQGYSLFLVAAHEFGHAMGLEHSQDPGALMAPIYTYTKNFRLSQDDIKGIQELYGASPDIDLGTGPTPTLGPVTPEICKQDIVFDGIAQIRGEIFFFKDRFIWRTVTPRDKPMGPLLVATFWPELPEKIDAVYEAPQEEKAVFFAGNEYWIYSASTLERGYPKPLTSLGLPPDVQRVDAAFNWSKNKKTYIFAGDKFWRYNEVKKKMDPGFPKLIADAWNAIPDNLDAVVDLQGGGHSYFFKGAYYLKLENQSLKSVKFGSIKSDWLGC

SEQ ID NO: 8791 - protein, 118 aa, Homo Sapiens
MQKFFGLPQTGDLDQNTIETMRKPRCGNPDVANYNFFPRKPKWDKNQITYRIIGYTPDLDPETVDDAFARAFQVWSDVTPLRFSRIHDGEADIMINFGRWEHGDGYPFDGKDGLLAHA

SEQ ID NO: 8792 - protein, 201 aa, Homo Sapiens
MQKFFGLPQTGDLDQNTIETMRKPRCGNPDVANYNFFPRKPKWDKNQITYRIIGYTPDLDPETVDDAFARAFQVWSDVTPLRFSRIHDGEADIMINFGRWEHGDGYPFDGKDGLLAHAFAPGTGVGGDSHFDDDELWTLGEGQVVRVKYGNADGEYCKFPFLFNGKEYNSCTDTGRSDGFLWCSTTYNFEKDGKYGFCPHE

SEQ ID NO: 8793 - protein, 584 aa, Homo Sapiens
MQKFFGLPQTGDLDQNTIETMRKPRCGNPDVANYNFFPRKPKWDKNQITYRIIGYTPDLDPETVDDAFARAFQVWSDVTPLRFSRIHDGEADIMINFGRWEHGDGYPFDGKDGLLAHAFAPGTGVGGDSHFDDDELWTLGEGQVVRVKYGNADGEYCKFPFLFNGKEYNSCTDTGRSDGFLWCSTTYNFEKDGKYGFCPHEALFTMGGNAEGQPCKFPFRFQGTSYDSCTTEGRTDGYRWCGTTEDYDRDKKYGFCPETAMSTVGGNSEGAPCVFPFTFLGNKYESCTSAGRSDGKMWCATTANYDDDRKWGFCPDQGYSLFLVAAHEFGHAMGLEHSQDPGALMAPIYTYTKNFRLSQDDIKGIQELYGASPDIDLGTGPTPTLGPVTPEICKQDIVFDGIAQIRGEIFFFKDRFIWRTVTPRDKPMGPLLVATFWPELPEKIDAVYEAPQEEKAVFFAGNEYWIYSASTLERGYPKPLTSLGLPPDVQRVDAAFNWSKNKKTYIFAGDKFWRYNEVKKKMDPGFPKLIADAWNAIPDNLDAVVDLQGGGHSYFFKGAYYLKLENQSLKSVKFGSIKSDWLGC

SEQ ID NO: 8794 - protein, 584 aa, Homo Sapiens; identical to SEQ ID NO: 8793

SEQ ID NO: 8795 - protein, 610 aa, Homo Sapiens
MQYLNTFYGCPKESCNLFVLKDTLKKMQKFFGLPQTGDLDQNTIETMRKPRCGNPDVANYNFFPRKPKWDKNQITYRIIGYTPDLDPETVDDAFARAFQVWSDVTPLRFSRIHDGEADIMINFGRWEHGDGYPFDGKDGLLAHAFAPGTGVGGDSHFDDDELWTLGEGQVVRVKYGNADGEYCKFPFLFNGKEYNSCTDTGRSDGFLWCSTTYNFEKDGKYGFCPHEALFTMGGNAEGQPCKFPFRFQGTSYDSCTTEGRTDGYRWCGTTEDYDRDKKYGFCPETAMSTVGGNSEGAPCVFPFTFLGNKYESCTSAGRSDGKMWCATTANYDDDRKWGFCPDQGYSLFLVAAHEFGHAMGLEHSQDPGALMAPIYTYTKNFRLSQDDIKGIQELYGASPDIDLGTGPTPTLGPVTPEICKQDIVFDGIAQIRGEIFFFKDRFIWRTVTPRDKPMGPLLVATFWPELPEKIDAVYEAPQEEKAVFFAGNEYWIYSASTLERGYPKPLTSLGLPPDVQRVDAAFNWSKNKKTYIFAGDKFWRYNEVKKKMDPGFPKLIADAWNAIPDNLDAVVDLQGGGHSYFFKGAYYLKLENQSLKSVKFGSIKSDWLGC

SEQ ID NO: 8796 - protein, 22 aa, Homo Sapiens
  misc_feature (1)..(1): Xaa can be any naturally occurring amino acid
XLENQSLKSVKFGSIKSDWLGC

SEQ ID NO: 8797 - protein, 483 aa, Homo Sapiens
MKVLPASGLAVFLIMALKFSTAAPSLVAASPRTWRNNYRLAQAYLDKYYTNKEGHQIGEMVARGSNSMIRKIKELQAFFGLQVTGKLDQTTMNVIKKPRCGVPDVANYRLFPGEPKWKKNTLTYRISKYTPSMSSVEVDKAVEMALQAWSSAVPLSFVRINSGEADIMISFENGDHGDSYPFDGPRGTLAHAFAPGEGLGGDTHFDNAEKWTMGTNGFNLFTVAAHEFGHALGLAHSTDPSALMYPTYKYKNPYGFHLPKDDVKGIQALYGPRKVFLGKPTLPHAPHHKPSIPDLCDSSSSFDAVTMLGKELLLFKDRIFWRRQVHLRTGIRPSTITSSFPQLMSNVDAAYEVAERGTAYFFKGPHYWITRGFQMQGPPRTIYDFGFPRHVQQIDAAVYLREPQKTLFFVGDEYYSYDERKRKMEKDYPKNTEEEFSGVNGQIDAAVELNGYIYFFSGPKTYKYDTEKEDVVSVVKSSSWIGC

SEQ ID NO: 8798 - protein, 569 aa, Homo Sapiens
MLAASIFRPTLLLCWLAAPWPTQPESLFHSRDRSDLEPSPLRQAKPIADLHAAQRFLSRYGWSGVWAAWGPSPEGPPETPKGAALAEAVRRFQRANALPASGELDAATLAAMNRPRCGVPDMRPPPPSAPPSPPGPPPRARSRRSPRAPLSLSRRGWQPRGYPDGGAAQAFSKRTLSWRLLGEALSSQLSVADQRRIVALAFRMWSEVTPLDFREDLAAPGAAVDIKLGFGRGRHLGCPRAFDGSGQEFAHAWRLGDIHFDDDEHFTPPTSDTGISLLKVAVHEIGHVLGLPHTYRTGSIMQPNYIPQEPAFELDWSDRKAIQKLYGSCEGSFDTAFDWIRKERNQYGEVMVRFSTYFFRNSWYWLYENRNNRTRYGDPIQILTGWPGIPTHNIDAFVHIWTWKRDERYFFQGNQYWRYDSDKDQALTEDEQGKSYPKLISEGFPGIPSPLDTAFYDRRQKLIYFFKESLVFAFDVNRNRVLNSYPKRITEVFPAVIPQNHPFRNIDSAYYSYAYNSIFFFKGNAYWKVVNDKDKQQNSWLPANGLFPKKFISEKWFDVCDVHISTLNM

SEQ ID NO: 8799 - protein, 183 aa, Homo Sapiens
MDPGTVATMRKPRCSLPDVLGVAGLVRRRRRYALSGSVWKKRTLTWRVRSFPQSSQLSQETVRVLMSYALMAWGMESGLTFHEVDSPQGQEPDILIDFARAFHQDSYPFDGLGGTLAHAFFPGEHPISGDTHFDDEETWTFGSKASQQLEQELAGGSPVDEELGFSRGWRVNPLGPGSPERLS

SEQ ID NO: 8800 - protein, 562 aa, Homo Sapiens
MRLRLRLLALLLLLLAPPARAPKPSAQDVSLGVDWLTRYGYLPPPHPAQAQLQSPEKLRDAIKVMQRFAGLPETGRMDPGTVATMRKPRCSLPDVLGVAGLVRRRRRYALSGSVWKKRTLTWRVRSFPQSSQLSQETVRVLMSYALMAWGMESGLTFHEVDSPQGQEPDILIDFARAFHQDSYPFDGLGGTLAHAFFPGEHPISGDTHFDDEETWTFGSKDGEGTDLFAVAVHEFGHALGLGHSSAPNSIMRPFYQGPVGDPDKYRLSQDDRDGLQQLYGKAPQTPYDKPTRKPLAPPPQPPASPTHSPSFPIPDRCEGNFDAIANIRGETFFFKGPWFWRLQPSGQLVSPRPARLHRFWEGLPAQVRVVQAAYARHRDGRILLFSGPQFWVFQDRQLEGGARPLTELGLPPGEEVDAVFSWPQNGKTYLVRGRQYWRYDEAAARPDPGYPRDLSLWEGAPPSPDDVTVSNAGDTYFFKGAHYWRFPKNSIKTEPDAPQPMGPNWLDCPAPSSGPRAPRPPKATPVSETCDCQCELNQAAGRWPAPIPLLLLPLLVGGVASR

SEQ ID NO: 8801 - protein, 261 aa, Homo Sapiens
MQLVILRVTIFLPWCFAVPVPPAADHKGWDFVEGYFHQFFLTKKESPLLTQETQTQLLQQFHRNGTDLLDMQMHALLHQPHCGVPDGSDTSISPGRCKWNKHTLTYRIINYPHDMKPSAVKDSIYNAVSIWSNVTPLIFQQVQNGDADIKVSFWQWAHEDGWPFDGPGGILGHAFLPNSGNPGVVHFDKNEHWSASDTGYNLFLVATHEIGHSLGLQHSGNQSSIMYPTYWYHDPRTFQLSADDIQRIQHLYGEKCSSDIP

SEQ ID NO: 8802 - protein, 261 aa, Homo Sapiens; identical to SEQ ID NO: 8801

SEQ ID NO: 8803 - protein, 513 aa, Homo Sapiens
MKRLLLLFLFFITFSSAFPLVRMTENEENMQLAQAYLNQFYSLEIEGNHLVQSKNRSLIDDKIREMQAFFGLTVTGKLDSNTLEIMKTPRCGVPDVGQYGYTLPGWRKYNLTYRIINYTPDMARAAVDEAIQEGLEVWSKVTPLKFTKISKGIADIMIAFRTRVHGRCPRYFDGPLGVLGHAFPPGPGLGGDTHFDEDENWTKDGAGFNLFLVAAHEFGHALGLSHSNDQTALMFPNYVSLDPRKYPLSQDDINGIQSIYGGLPKEPAKPKEPTIPHACDPDLTFDAITTFRREVMFFKGRHLWRIYYDITDVEFELIASFWPSLPADLQAAYENPRDKILVFKDENFWMIRGYAVLPDYPKSIHTLGFPGRVKKIDAAVCDKTTRKTYFFVGIWCWRFDEMTQTMDKGFPQRVVKHFPGISIRVDAAFQYKGFFFFSRGSKQFEYDIKTKNITRIMRTNTWFQCKEPKNSSFGFDINKEKAHSGGIKILYHKSLSLFIFGIVHLLKNTSIYQ

SEQ ID NO: 8804 - protein, 89 aa, Homo Sapiens
DFETWDSYSPQGRRPETQGPKYCHSSFDAITVDRQQQLYIFKGSHFWEVAADGNVSEPRPLQERWVGLPPNIEAAAVSLNDGDFYFFKA

SEQ ID NO: 8805 - protein, 189 aa, Homo Sapiens
KYGYLNEQVPKAPTSTRFSDAIRAFQWVSQLPVSGVLDRATLRQMTRPRCGVTDTNSYAAWAERISDLFARHRTKMRRKKRFAKQGGALAHAFLPRRGEAHFDQDERWSLSRRRGRNLFVVLAHEIGHTLGLTHSPAPRALMAPYYKRLGRDALLSWDDVLAVQSLYGKPLGGSVAVQLPGKLFTDFET

SEQ ID NO: 8806 - protein, 130 aa, Homo Sapiens
MVARVGLLLRALQLLLWGHLDAQPAERGGQELRKEAEAFLEKYGYLNEQVPKAPTSTRFSDAIRAFQWVSQLPVSGVLDRATLRQMTRPRCGVTDTNSYAAWAERISDLFARHRTKMRRKKRFAKQGEHC

SEQ ID NO: 8807 - protein, 510 aa, Homo Sapiens
MVARVGLLLRALQLLLWGHLDAQPAERGGQELRKEAEAFLEKYGYLNEQVPKAPTSTRFSDAIRAFQWVSQLPVSGVLDRATLRQMTRPRCGVTDTNSYAAWAERISDLFARHRTKMRRKKRFAKQGNKWYKQHLSYRLVNWPEHLPEPAVRGAVRAAFQLWSNVSALEFWEAPATGPADIRLTFFQGDHNDGLGNAFDGPGGALAHAFLPRRGEAHFDQDERWSLSRRRGRNLFVVLAHEIGHTLGLTHSPAPRALMAPYYKRLGRDALLSWDDVLAVQSLYGKPLGGSVAVQLPGKLFTDFETWDSYSPQGRRPETQGPKYCHSSFDAITVGSHFWEVAADGNVSEPRPLQERWVGLPPNIEAAAVSLNDGDFYFFKGGRCWRFRGPKPVWGLPQLCRAGGLPRHPDAALFFPPLRRLILFKGARYYVLARGGLQVEPYYPRSLQDWGGIPEEVSGALPRPDGSIIFFRDDRYWRLDQAKLQATTSGRWATELPWMGCWHANSGSALF

SEQ ID NO: 8808 - protein, 393 aa, Homo Sapiens
MVARVGLLLRALQLLLWGHLDAQPAERGGQELRKEAEAFLEKYGYLNEQVPKAPTSTRFSDAIRAFQWVSQLPVSGVLDRATLRQMTRPRCGVTDTNSYAAWAERISDLFARHRTKMRRKKRFAKQGNKWYKQHLSYRLVNWPEHLPEPAVRGAVRAAFQLWSNVSALEFWEAPATGPADIRLTFFQGDHNDGLGNAFDGPGGALAHAFLPRRGEAHFDQDERWSLSRRRGRNLFVVLAHEIGHTLGLTHSPAPRALMAPYYKRLGRDALLSWDDVLAVQSLYGKPLGGSVAVQLPGKLFTDFETWDSYSPQGRRPETQGPKYCHSSFDAITVDRQQQLYIFKGSHFWEVAADGNVSEPRPLQERWVGLPPNIEAAAVSLNDGDFYFFKVQSV

SEQ ID NO: 8809 - protein, 520 aa, Homo Sapiens
MVARVGLLLRALQLLLWGHLDAQPAERGGQELRKEAEAFLEKYGYLNEQVPKAPTSTRFSDAIRAFQWVSQLPVSGVLDRATLRQMTRPRCGVTDTNSYAAWAERISDLFARHRTKMRRKKRFAKQGNKWYKQHLSYRLVNWPEHLPEPAVRGAVRAAFQLWSNVSALEFWEAPATGPADIRLTFFQGDHNDGLGNAFDGPGGALAHAFLPRRGEAHFDQDERWSLSRRRGRNLFVVLAHEIGHTLGLTHSPAPRALMAPYYKRLGRDALLSWDDVLAVQSLYGKPLGGSVAVQLPGKLFTDFETWDSYSPQGRRPETQGPKYCHSSFDAITVDRQQQLYIFKGSHFWEVAADGNVSEPRPLQERWVGLPPNIEAAAVSLNDGDFYFFKGGRCWRFRGPKPVWGLPQLCRAGGLPRHPDAALFFPPLRRLILFKGARYYVLARGGLQVEPYYPRSLQDWGGIPEEVSGALPRPDGSIIFFRDDRYWRLDQAKLQATTSGRWATELPWMGCWHANSGSALF

SEQ ID NO: 8810 - protein, 42 aa, Homo Sapiens
MKSLPILLLLCVAVCSAYPLDGAAREISRKLLRPQKRCETVC

SEQ ID NO: 8811 - protein, 477 aa, Homo Sapiens
MKSLPILLLLCVAVCSAYPLDGAARGEDTSMNLVQKYLENYYDLKKDVKQFVRRKDSGPVVKKIREMQKFLGLEVTGKLDSDTLEVMRKPRCGVPDVGHFRTFPGIPKWRKTHLTYRIVNYTPDLPKDAVDSAVEKALKVWEEVTPLTFSRLYEGEADIMISFAVREHGDFYPFDGPGNVLAHAYAPGPGINGDAHFDDDEQWTKDTTGTNLFLVAAHEIGHSLGLFHSANTEALMYPLYHSLTDLTRFRLSQDDINGIQSLYGPPPDSPETPLVPTEPVPPEPGTPANCDPALSFDAVSTLRGEILIFKDRHFWRKSLRKLEPELHLISSFWPSLPSGVDAAYEVTSKDLVFIFKGNQFWAIRGNEVRAGYPRGIHTLGFPPTVRKIDAAISDKEKNKTYFFVEDKYWRFDEKRNSMEPGFPKQIAEDFPGIDSKIDAVFEEFGFFYFFTGSSQLEFDPNAKKVTHTLKSNSWLNC

SEQ ID NO: 8812 - protein, 99 aa, Homo Sapiens
  misc_feature (1)..(1): Xaa can be any naturally occurring amino acid
XNQFWAIRGNEVRAGYPRGIHTLGFPPTVRKIDAAISDKEKNKTYFFVEDKYWRFDEKRNSMEPGFPKQIAEDFPGIDSKIDAVFEEFDRAGTECCLHS

SEQ ID NO: 8813 - protein, 267 aa, Homo Sapiens
MRLTVLCAVCLLPGSLALPLPQEAGGMSELQWEQAQDYLKRFYLYDSETKNANSLEAKLKEMQKFFGLPITGMLNSRVIEIMQKPRCGVPDVAEYSLFPNSPKWTSKVVTYRIVSYTRDLPHITVDRLVSKALNMWGKEIPLHFRKVVWGTADIMIGFARGAHGDSYPFDGPGNTLAHAFAPGTGLGGDAHFDEDERWTDGSSLGINFLYAATHELGHSLGMGHSSDPNAVMYPTYGNGDPQNFKLSQDDIKGIQKLYGKRSNSRKK

SEQ ID NO: 8814 - protein, 467 aa, Homo Sapiens [sequence omitted]

SEQ ID NO: 8815 - protein, 56 aa, Homo Sapiens
MFSLKTLPFLLLLHVQISKAFPVSSKEKNTKTVQHKAISEANQMQPPDLGLPSLQN

SEQ ID NO: 8816 - protein, 56 aa, Homo Sapiens; identical to SEQ ID NO: 8815

SEQ ID NO: 8817 - protein, 36 aa, Homo Sapiens
MFSLKTLPFLLLLHVQISKAFPVSSKEKNTKTVQNK

SEQ ID NO: 8818 - protein, 43 aa, Homo Sapiens
MFSLKTLPFLLLLHVQISKAFPVSSKEKNTKTVQRQKYLKSDK

SEQ ID NO: 8819 - protein, 344 aa, Homo Sapiens
  misc_feature (1)..(1): Xaa can be any naturally occurring amino acid
XKEKNTKTVQDYLEKFYQLPSNQYQSTRKNGTNVIVEKLKEMQRFFGLNVTGKPNEETLDMMKKPRCGVPDSGGFMLTPGNPKWERTNLTYRIRNYTPQLSEAEVERAIKDAFELWSVASPLIFTRISQGEADINIAFYQRDHGDNSPFDGPNGILAHAFQPGQGIGGDAHFDAEETWTNTSANYNLFLVAAHEFGHSLGLAHSSDPGALMYPNYAFRETSNYSLPQDDIDGIQAIYGLSSNPIQPTGPSTPKPCDPSLTFDAITTLRGEILFFKDRYFWRRHPQLQRVEMNFISLFWPSLPTGIQAAYEDFDRDLIFLFKDMITKDNSWSQVIPKAYQVPFQE

SEQ ID NO: 8820 - protein, 707 aa, Homo Sapiens
MSLWQPLVLVLLVLGCCFAAPRQRQSTLVLFPGDLRTNLTDRQLAEEYLYRYGYTRVAEMRGESKSLGPALLLLQKQLSLPETGELDSATLKAMRTPRCGVPDLGRFQTFEGDLKWHHHNITYWIQNYSEDLPRAVIDDAFARAFALWSAVTPLTFTRVYSRDADIVIQFGVAEHGDGYPFDGKDGLLAHAFPPGPGIQGDAHFDDDELWSLGKGVVVPTRFGNADGAACHFPFIFEGRSYSACTTDGRSDGLPWCSTTANYDTDDRFGFCPSERLYTQDGNADGKPCQFPFIFQGQSYSACTTDGRSDGYRWCATTANYDRDKLFGFCPTRADSTVMGGNSAGELCVFPFTFLGKEYSTCTSEGRGDGRLWCATTSNFDSDKKWGFCPDQGYSLFLVAAHEFGHALGLDHSSVPEALMYPMYRFTEGPPLHKDDVNGIRHLYGPRPEPEPRPPTTTTPQPTAPPTVCPTGPPTVHPSERPTAGPTGPPSAGPTGPPTAGPSTATTVPLSPVDDACNVNIFDAIAEIGNQLYLFKDGKYWRFSEGRGSRPQGPFLIADKWPALPRKLDSVFEERLSKKLFFFSGRQVWVYTGASVLGPRRLDKLGLGADVAQVTGALRSGRGKMLLFSGRRLWRFDVKAQMVDPRSASEVDRMFPGVPLDTHDVFQYREKAYFCQDRFYWRVSSRSELNQVDQVGYVTYDILQCPED

SEQ ID NO: 8821 - protein, 1228 aa, Homo Sapiens
MKGARLFVLLSSLWSGGIGLNNSKHSWTIPEDGNSQKTMPSASVPPNKIQSLQILPTTRVMSAEIATTPEARTSEDSLLKSTLPPSETSAPAEGVRNQTLTSTEKAEGVVKLQNLTLPTNASIKFNPGAESVVLSNSTLKFLQSFARKSNEQATSLNTVGGTGGIGGVGGTGGVGNRAPRETYLSRGDSSSSQRTDYQKSNFETTRGKNWCAYVHTRLSPTVILDNQVTYVPGGKGPCGWTGGSCPQRSQKISNPVYRMQHKIVTSLDWRCCPGYSGPKCQLRAQEQQSLIHTNQAESHTAVGRGVAEQQQQQGCGDPEVMQKMTDQVNYQAMKLTLLQKKIDNISLTVNDVRNTYSSLEGKVSEDKSREFQSLLKGLKSKSINVLIRDIVREQFKIFQNDMQETVAQLFKTVSSLSEDLESTRQIIQKVNESVVSIAAQQKFVLVQENRPTLTDIVELRNHIVNVRQEMTLTCEKPIKELEVKQTHLEGALEQEHSRSILYYESLNKTLSKLKEVHEQLLSTEQVSDQKNAPAAESVSNNVTEYMSTLHENIKKQSLMMLQMFEDLHIQESKINNLTVSLEMEKESLRGECEDMLSKCRNDFKFQLKDTEENLHVLNQTLAEVLFPMDNKMDKMSEQLNDLTYDMEILQPLLEQGASLRQTMTYEQPKEAIVIRKKIENLTSAVNSLNFIIKELTKRHNLLRNEVQGRDDALERRINEYALEMEDGLNKTMTIINNAIDFIQDNYALKETLSTIKDNSEIHHKCTSDMETILTFIPQFHRLNDSIQTLVNDNQRYNFVLQVAKTLAGIPRDEKLNQSNFQKMYQMFNETTSQVRKYQQNMSHLEEKLLLTTKISKNFETRLQDIESKVTQTLIPYYISVKKGSVVTNERDQALQLQVLNSRFKALEAKSIHLSINFFSLNKTLHEVLTMCHNASTSVSELNATIPKWIKHSLPDIQLLQKGLTEFVEPIIQIKTQAALSNLTCCIDRSLPGSLANVVKSQKQVKSLPKKINALKKPTVNLTTVLIGRTQRNTDNIIYPEEYSSCSRHPCQNGGTCINGRTSFTCACRHPFTGDNCTIKLVEENALAPDFSKGSYRYAPMVAFFASHTYGMTIPGPILFNNLDVNYGASYTPRTGKFRIPYLGVYVFKYTIESFSAHISGFLVVDGIDKLAFESENINSEIHCDRVLTGDALLELNYGQEVWLRLAKGTIPAKFPPVTTFSGYLLYRT

SEQ ID NO: 8822 - protein, 1228 aa, Homo Sapiens; identical to SEQ ID NO: 8821

SEQ ID NO: 8823 - protein, 970 aa, Homo Sapiens
MQHKIVTSLDWRCCPGYSGPKCQLRAQEQQSLIHTNQAESHTAVGRGVAEQQQQQGCGDPEVMQKMTDQVNYQAMKLTLLQKKIDNISLTVNDVRNTYSSLEGKVSEDKSREFQSLLKGLKSKSINVLIRDIVREQFKIFQNDMQETVAQLFKTVSSLSEDLESTRQIIQKVNESVVSIAAQQKFVLVQENRPTLTDIVELRNHIVNVRQEMTLTCEKPIKELEVKQTHLEGALEQEHSRSILYYESLNKTLSKLKEVHEQLLSTEQVSDQKNAPAAESVSNNVTEYMSTLHENIKKQSLMMLQMFEDLHIQESKINNLTVSLEMEKESLRGECEDMLSKCRNDFKFQLKDTEENLHVLNQTLAEVLFPMDNKMDKMSEQLNDLTYDMEILQPLLEQGASLRQTMTYEQPKEAIVIRKKIENLTSAVNSLNFIIKELTKRHNLLRNEVQGRDDALERRINEYALEMEDGLNKTMTIINNAIDFIQDNYALKETLSTIKDNSEIHHKCTSDMETILTFIPQFHRLNDSIQTLVNDNQRYNFVLQVAKTLAGIPRDEKLNQSNFQKMYQMFNETTSQVRKYQQNMSHLEEKLLLTTKISKNFETRLQDIESKVTQTLIPYYISVKKGSVVTNERDQALQLQVLNSRFKALEAKSIHLSINFFSLNKTLHEVLTMCHNASTSVSELNATIPKWIKHSLPDIQLLQKGLTEFVEPIIQIKTQAALSNLTCCIDRSLPGSLANVVKSQKQVKSLPKKINALKKPTVNLTTVLIGRTQRNTDNIIYPEEYSSCSRHPCQNGGTCINGRTSFTCACRHPFTGDNCTIKLVEENALAPDFSKGSYRYAPMVAFFASHTYGMTIPGPILFNNLDVNYGASYTPRTGKFRIPYLGVYVFKYTIESFSAHISGFLVVDGIDKLAFESENINSEIHCDRVLTGDALLELNYGQEVWLRLAKGTIPAKFPPVTTFSGYLLYRT

SEQ ID NO: 8824 - protein, 204 aa, Homo Sapiens
MAHKPVYQVKQKVLTSLAWRCCPGYTGPNCEHHDSMAIPEPADPGDSHQEPQDGPVSFKPGHLAAVINEVEVQQEQQEHLLGDLQNDVHRVADSLPGLWKALPGNLTAAVMEANQTGHEFPDRSLEQVLLPHVDTFLQVHFSPIWRSFNQSLHSLTQAIRNLSLDVEANRQAISRVQDSAVARADFQELGAKFEAKVQENTQRV

SEQ ID NO: 8825 - protein, 295 aa, Homo Sapiens
MGTSASWAGGMGIKGQPEAAKSWRKPKQSNWCPYPMSKLVTLLALCKTEKFLIHSQQPCPQGAPDCQKVKVMYRMAHKPVYQVKQKVLTSLAWRCCPGYTGPNCEHHDSMAIPEPADPGDSHQEPQDGPVSFKPGHLAAVINEVEVQQEQQEHLLGDLQNDVHRVADSLPGLWKALPGNLTAAVMEANQTGHEFPDRSLEQVLLPHVDTFLQVHFSPIWRSFNQSLHSLTQAIRNLSLDVEANRQAISRVQDSAVARADFQELGAKFEAKVQENTQRVGQLRQDVEDRLHAQHFT

SEQ ID NO: 8826 - protein, 109 aa, Homo Sapiens
MILSLLFSLGGPLGWGLLGAWAQASSTSLSDLQSSRTPGVWKAEAEDTGKDPVGRIMDSRIPALLRQEARTGGSALAPPVDLGVAQQPSPLACFPVTGAPTQCPSWSPY

SEQ ID NO: 8827 - protein, 949 aa, Homo Sapiens
MILSLLFSLGGPLGWGLLGAWAQASSTSLSDLQSSRTPGVWKAEAEDTGKDPVGRNWCPYPMSKLVTLLALCKTEKFLIHSQQPCPQGAPDCQKVKVMYRMAHKPVYQVKQKVLTSLAWRCCPGYTGPNCEHHDSMAIPEPADPGDSHQEPQDGPVSFKPGHLAAVINEVEVQQEQQEHLLGDLQNDVHRVADSLPGLWKALPGNLTAAVMEANQTGHEFPDRSLEQVLLPHVDTFLQVHFSPIWRSFNQSLHSLTQAIRNLSLDVEANRQAISRVQDSAVARADFQELGAKFEAKVQENTQRVGQLRQDVEDRLHAQHFTLHRSISELQADVDTKLKRLHKAQEAPGTNGSLVLATPGAGARPEPDSLQARLGQLQRNLSELHMTTARREEELQYTLEDMRATLTRHVDEIKELYSESDETFDQISKVERQVEELQVNHTALRELRVILMEKSLIMEENKEEVERQLLELNLTLQHLQGGHADLIKYVKDCNCQKLYLDLDVIREGQRDATRALEETQVSLDERRQLDGSSLQALQNAVDAVSLAVDAHKAEGERARAATSRLRSQVQALDDEVGALKAAAAEARHEVRQLHSAFAALLEDALRHEAVLAALFGEEVLEEMSEQTPGPLPLSYEQIRVALQDAASGLQEQALGWDELAARVTALEQASEPPRPAEHLEPSHDAGREEAATTALAGLARELQSLSNDVKNVGRCCEAEAGAGAASLNASLHGLHNALFATQRSLEQHQRLFHSLFGNFQGLMEANVSLDLGKLQTMLSRKGKKQQKDLEAPRKRDKKEAEPLVDIRVTGPVPGALGAALWEAGSPVAFYASFSEGTAALQTVKFNTTYINIGSSYFPEHGYFRAPERGVYLFAVSVEFGPGPGTGQLVFGGHHRTPVCTTGQGSGSTATVFAMAELQKGERVWFELTQGSITKRSLSGTAFGGFLMFKT

SEQ ID NO: 8828 - protein, 123 aa, Homo Sapiens
MSKLVTLLALCKTEKFLIHSQQPCPQGAPDCQKVKVMYRMAHKPVYQVKQKVLTSLAWRCCPGYTGPNCEHHDSMAIPEPADPGDSHQEPQDGPVSFKPGHLAAVINEVEVQQEQQEHLLGDL

SEQ ID NO: 8829 - protein, 613 aa, Homo Sapiens
MCCWPLLLLWGLLPGTAAGGSGRTYPHRTLLDSEGKYWLGWSQRGSQIAFRLQVRTAGYVGFGFSPTGAMASADIVVGGVAHGRPYLQDYFTNANRELKKDAQQDYHLEYAMENSTHTIIEFTRELHTCDINDKSITDSTVRVIWAYHHEDAGEAGPKYHDSNRGTKSLRLLNPEKTSVLSTALPYFDLVNQDVPIPNKDTTYWCQMFKIPVFQEKHHVIKVEPVIQRGHESLVHHILLYQCSNNFNDSVLESGHECYHPNMPDAFLTCETVIFAWAIGGEGFSYPPHVGLSLGTPLDPHYVLLEVHYDNPTYEEGLIDNSGLRLFYTMDIRKYDAGVIEAGLWVSLFHTIPPGMPEFQSEGHCTLECLEEALEAEKPSGIHVFAVLLHAHLAGRGIRLRHFRKGKEMKLLAYDDDFDFNFQEFQYLKEEQTILPGDNLITECRYNTKDRAEMTWGGLSTRSEMCLSYLLYYPRINLTRCASIPDIMEQLQFIGVKEIYRPVTTWPFIIKSPKQYKNLSFMDAMNKFKWTKKEGLSFNKLVLSLPVNVRCSKTDNAEWSIQGMTALPPDIERPYKAEPLVCGTSSSSSLHRDFSINLLVCLLLLSCTLSTKSL

SEQ ID NO: 8830 - protein, 115 aa, Homo Sapiens
MCCWPLLLLWGLLPGTAAGGSGRTYPHRTLLDSEGKYWLGWSQRGSQIAFRLQVRTAGYVGFGFSPTGAMASADIVVGGVAHGRPYLQPCLLVSKTEACDAKCLQQQGNCCRATC

SEQ ID NO: 8831 - protein, 545 aa, Homo Sapiens
MNSFLSVFRYPDFSFPYFPQDYFTNANRELKKDAQQDYHLEYAMENSTHTIIEFTRELHTCDINDKSITDSTVRVIWAYHHEDAGEAGPKYHDSNRGTKSLRLLNPEKTSVLSTALPYFDLVNQDVPIPNKDTTYWCQMFKIPVFQEKHHVIKVEPVIQRGHESLVHHILLYQCSNNFNDSVLESGHECYHPNMPDAFLTCETVIFAWAIGGEGFSYPPHVGLSLGTPLDPHYVLLEVHYDNPTYEEGLIDNSGLRLFYTMDIRKYDAGVIEAGLWVSLFHTIPPGMPEFQSEGHCTLECLEEALEAEKPSGIHVFAVLLHAHLAGRGIRLRHFRKGKEMKLLAYDDDFDFNFQEFQYLKEEQTILPGDNLITECRYNTKDRAEMTWGGLSTRSEMCLSYLLYYPRINLTRCASIPDIMEQLQFIGVKEIYRPVTTWPFIIKSPKQYKNLSFMDAMNKFKWTKKEGLSFNKLVLSLPVNVRCSKTDNAEWSIQGMTALPPDIERPYKAEPLVCGTSSSSSLHRDFSINLLVCLLLLSCTLSTKSL

SEQ ID NO: 8832 - protein, 125 aa, Homo Sapiens
MAVFLQLLPLLLSRAQGNPGASLDGRPGDRVNLSCGGVSHPIRWVWAPSFPACKGLSKGRRPILWASSSGTPTVPPLQPFVGRLRSLDSAPDPAAGRWVGARTGSFGPGLVAAQAPAPATDSTTP

SEQ ID NO: 8833 - protein, 193 aa, Homo Sapiens
MAVFLQLLPLLLSRAQGNPGASLDGRPGDRVNLSCGGVSHPIRWVWAPSFPACKGLSKGRRPILWASSSGTPTVPPLQPFVGRLRSLDSGIRRLELLLSAGDSGTFFCKGRHEDESRTVLHVLGDRTYCKAPGPTHALSPPHSSTCENRAPEASKGGRAQDSRGPGPGTEPALCGSGPSSPQQAPPAVHSGPC

SEQ ID NO: 8834 - protein, 197 aa, Homo Sapiens
MAVFLQLLPLLLSRAQGNPGASLDGRPGDRVNLSCGGVSHPIRWVWAPSFPACKGLSKGRRPILWASSSGTPTVPPLQPFVGRLRSLDSGIRRLELLLSAGDSGTFFCKGRHEDESRTVLHVLGDRTYCKAPGPTHAPLVKTEPQRPVKEEEPKIPGDLDQEPSLLYADLDHLALSRPRRLSTADPADASTIYAVVV

SEQ ID NO: 8835 - protein, 217 aa, Homo Sapiens
MAVFLQLLPLLLSRAQGNPGASLDGRPGDRVNLSCGGVSHPIRWVWAPSFPACKGLSKGRRPILWASSSGTPTVPPLQPFVGRLRSLDSGIRRLELLLSAGDSGTFFCKGRHEDESRTVLHVLGDRTYCKAPGPTHGACPRNRFDHSLDLLCPPHIAPLVKTEPQRPVKEEEPKIPGDLDQEPSLLYADLDHLALSRPRRLSTADPADASTIYAVVV

SEQ ID NO: 8836 - protein, 237 aa, Homo Sapiens
MAVFLQLLPLLLSRAQGNPGASLDGRPGDRVNLSCGGVSHPIRWVWAPSFPACKGLSKGRRPILWASSSGTPTVPPLQPFVGRLRSLDSGIRRLELLLSAGDSGTFFCKGRHEDESRTVLHVLGDRTYCKAPGPTHGSVYPQLLIPLLGAGLVLGLGALGLVWWLHRRLPPQPIRPLPRFALSPPHSSTCENRAPEASKGGRAQDSRGPGPGTEPALCGSGPSSPQQAPPAVHSGPC

SEQ ID NO: 8837 - protein, 222 aa, Homo Sapiens
MAVFLQLLPLLLSRAQGNPGASLDGRPGDRVNLSCGGVSHPIRWVWAPSFPACKGLSKGRRPILWASSSGTPTVPPLQPFVGRLRSLDSGIRRLELLLSAGDSGTFFCKGRHEDESRTVLHVLGDRTYCKAPGPTHGSVYPQLLIPLLGAGLVLGLGALGLVWWLHRRLPPQPIRPLPRFALSPPHSSTCENRAPEASKGGRAQDSRGPGPGTGKGMGMGRG

SEQ ID NO: 8838 - protein, 241 aa, Homo Sapiens
MAVFLQLLPLLLSRAQGNPGASLDGRPGDRVNLSCGGVSHPIRWVWAPSFPACKGLSKGRRPILWASSSGTPTVPPLQPFVGRLRSLDSGIRRLELLLSAGDSGTFFCKGRHEDESRTVLHVLGDRTYCKAPGPTHGSVYPQLLIPLLGAGLVLGLGALGLVWWLHRRLPPQPIRPLPRFAPLVKTEPQRPVKEEEPKIPGDLDQEPSLLYADLDHLALSRPRRLSTADPADASTIYAVVV

SEQ ID NO: 8839 - protein, 220 aa, Homo Sapiens
MAVFLQLLPLLLSRAQGNPGASLDGRPGDRVNLSCGGVSHPIRWVWAPSFPACKGLSKGRRPILWASSSGTPTVPPLQPFVGRLRSLDSGIRRLELLLSAGDSGTFFCKGRHEDESRTVLHVLGDRTYCKAPGPTHGSVYPQLLIPLLGAGLVLGLGALGLVWWLHRRLPPQPIRPLPRFAPLVKTEPQRPVKEEEPKIPGDLDQEPVRAWGWEGDSQNL

SEQ ID NO: 8840 - protein, 745 aa, Homo Sapiens
MGVPFFSSLRCMVDLGPCWAGGLTAEMKLLLALAGLLAILATPQPSEGAAPAVLGEVDTSLVLSSMEEAKQLVDKAYKERRESIKQRLRSGSASPMELLSYFKQPVAATRTAVRAADYLHVALDLLERKLRSLWRRPFNVTDVLTPAQLNVLSKSSGCAYQDVGVTCPEQDKYRTITGMCNNRRSPTLGASNRAFVRWLPAEYEDGFSLPYGWTPGVKRNGFPVALARAVSNEIVRFPTDQLTPDQERSLMFMQWGQLLDHDLDFTPEPAARASFVTGVNCETSCVQQPPCFPLKIPPNDPRIKNQADCIPFFRSCPACPGSNITIRNQINALTSFVDASMVYGSEEPLARNLRNMSNQLGLLAVNQRFQDNGRALLPFDNLHDDPCLLTNRSARIPCFLAGDTRSSEMPELTSMHTLLLREHNRLATELKSLNPRWDGERLYQEARKIVGAMVQIITYRDYLPLVLGPTAMRKYLPTYRSYNDSVDPRIANVFTNAFRYGHTLIQPFMFRLDNRYQPMEPNPRVPLSRVFFASWRVVLEGGIDPILRGLMATPAKLNRQNQIAVDEIRERLFEQVMRIGLDLPALNMQRSRDHGLPGYNAWRRFCGLPQPETVGQLGTVLRNLKLARKLMEQYGTPNNIDIWMGGVSEPLKRKGRVGPLLACIIGTQFRKLRDGDRFWWENEGVFSMQQRQALAQISLPRIICDNTGITTVSKNNIFMSNSYPRDFVNCSTLPALNLASWREAS

SEQ ID NO: 8841 - protein, 87 aa, Homo Sapiens [sequence omitted]

SEQ ID NO: 8842 - protein, 74 aa, Homo Sapiens
MWRSRWDASVLKAEALALLPCGLGMAFSQSHVMAARRHQHSRLIIEVDEYSSNPTQAFTFYNINQGRFQPPHVQ

SEQ ID NO: 8843 - protein, 119 aa, Homo Sapiens
MWRSRWDASVLKAEALALLPCGLGMAFSQSHVMAARRHQHSRLIIEVDEYSSNPTQAFTFYNINQGRFQPPHVQMVDPVPHDAPKPPGYTRFVCVSDTHSRTDPIQMPYGDVLIHAGDF

SEQ ID NO: 8844 - protein, 326 aa, Homo Sapiens
MWRSRWDASVLKAEALALLPCGLGMAFSQSHVMAARRHQHSRLIIEVDEYSSNPTQAFTFYNINQGRFQPPHVQMVDPVPHDAPKPPGYTRFVCVSDTHSRTDPIQMPYGDVLIHAGDFTELGLPSEVKKFNEWLGSLPYEYKIVIAGNHELTFDQEFMADLIKQDFYYFPSVSKLKPENYENVQSLLTNCIYLQDSEVTVRGFRIYGSPWQPWFYGWGFNLPRGQALLEKWNLIPEGVDILITHGPPLGFLDWVPKKMQRVGCVELLNTVQRRVQPRLHVFGHIHEGYGVMADGTTTYVNASVCTVNYQPVNPPIVIDLPTPRNS

SEQ ID NO: 8845 - protein, 326 aa, Homo Sapiens; identical to SEQ ID NO: 8844

SEQ ID NO: 8846 - protein, 209 aa, Homo Sapiens
MAASAGAGAVIAAPDSRRWLWSVLAAALGLLTAGVSALEVYTPKEIFVANGTQGKLTCKFKSTSTTGGLTSVSWSFQPEGADTTVSFFHYSQGQVYLGNYPPFKDRISWAGDLDKKDASINIENMQFIHNGTYICDVKNPPDIVVQPGHIRLYVVEKENLPVFPVWVVVGIVTAVVLGLTLLISMILAVLYRRKNSKRDYTGAQSYMHS

SEQ ID NO: 8847 - protein, 269 aa, Homo Sapiens
MAASAGAGAVIAAPDSRRWLWSVLAAALGLLTAGVSALEVYTPKEIFVANGTQGKLTCKFKSTSTTGGLTSVSWSFQPEGADTTVSFFHYSQGQVYLGNYPPFKDRISWAGDLDKKDASINIENMQFIHNGTYICDVKNPPDIVVQPGHIRLYVVEKENLPVFPVWVVVGIVTAVVLGLTLLISMILAVLYRRKNSKRDYTGCSTSESLSPVKQAPRKSPSDTEGLVKSLPSGSHQGPVIYAQLDHSGGHHSDKINKSESVVYADIRKN

SEQ ID NO: 8848 - protein, 119 aa, Homo Sapiens
MAASAGAGAVIAAPDSRRWLWSVLAAALGLLTAGVSALEVYTPKEIFVANGTQGKLTCKFKSTSTTGGLTSVSWSFQPEGADTTVSGPVIYAQLDHSGGHHSDKINKSESVVYADIRKN

SEQ ID NO: 8849 - protein, 95 aa, Homo Sapiens
MAASAGAGAVIAAPDSRRWLWSVLAAALGLLTAGVSALEVYTPKEIFVANGTQGKLTCKFKSTSTTGGLTSVSWSFQPEGADTTVSRICLCFQFG

SEQ ID NO: 8850 - protein, 183 aa, Homo Sapiens
PFSSVTAGVSALEVYTPKEIFVANGTQGKLTCKFKSTSTTGGLTSVSWSFQPEGADTTVSFFHYSQGQVYLGNYPPFKDRISWAGDLDKKDASINIENMQFIHNGTYICDVKNPPDIVVQPGHIRLYVVEKENLPVFPVWVVVGIVTAVVLGLTLLISMILAVLYRRKNSKRDYTGAQSYMHS

SEQ ID NO: 8851 - protein, 296 aa, Homo Sapiens
MGELMAFLLPLIIVLMVKHSDSRTHSLRYFRLGVSDPIHGVPEFISVGYVDSHPITTYDSVTRQKEPRAPWMAENLAPDHWERYTQLLRGWQQMFKVELKRLQRHYNHSDNVAHTIKQAWEANQHELLYQKNWLEEECIAWLKRFLEYGKDTLQRTEPPLVRVNRKETFPGVTALFCKAHGFYPPEIYMTWMKNGEEIVQEIDYGDILPSGDGTYQAWASIELDPQSSNLYSCHVEHCGVHMVLQVPQESETIPLVMKAVSGSIVLVIVLAGVGVLVWRRRPREQNGAIYLPTPDR

SEQ ID NO: 8852 - protein, 341 aa, Homo Sapiens
MGELMAFLLPLIIVLMVKHSDSRTHSLRYFRLGVSDPIHGVPEFISVGYVDSHPITTYDSVTRQKEPRAPWMAENLAPDHWERYTQLLRGWQQMFKVELKRLQRHYNHSGSHTYQRMIGCELLEDGSTTGFLQYAYDGQDFLIFNKDTLSWLAVDNVAHTIKQAWEANQHELLYQKNWLEEECIAWLKRFLEYGKDTLQRTEPPLVRVNRKETFPGVTALFCKAHGFYPPEIYMTWMKNGEEIVQEIDYGDILPSGDGTYQAWASIELDPQSSNLYSCHVEHCGVHMVLQVPQESETIPLVMKAVSGSIVLVIVLAGVGVLVWRRRPREQNGAIYLPTPDR

SEQ ID NO: 8853 - protein, 341 aa, Homo Sapiens; identical to SEQ ID NO: 8852

SEQ ID NO: 8854 - protein, 214 aa, Homo Sapiens
MGELMAFLLPLIIVLMVKHSDSRTHSLRYFRLGVSDPIHGVPEFISVGYVDSHPITTYDSVTRQKEPRAPWMAENLAPDHWERYTQLLRGWQQMFKVELKRLQRHYNHSGSHTYQRMIGCELLEDGSTTGFLQYAYDGQDFLIFNKDTLSWLAVDNVAHTIKQAWEANQHELLYQKNWLEEECIAWLKRFLEYGKDTLQRTEQNGAIYLPTPDR

SEQ ID NO: 8855 - protein, 249 aa, Homo Sapiens
MGELMAFLLPLIIVLMVKHSDSRTHSLRYFRLGVSDPIHGVPEFISVGYVDSHPITTYDSVTRQKEPRAPWMAENLAPDHWERYTQLLRGWQQMFKVELKRLQRHYNHSGSHTYQRMIGCELLEDGSTTGFLQYAYDGQDFLIFNKDTLSWLAVDNVAHTIKQAWEANQHELLYQKNWLEEECIAWLKRFLEYGKDTLQRTESETIPLVMKAVSGSIVLVIVLAGVGVLVWRRRPREQNGAIYLPTPDR

SEQ ID NO: 8856 - protein, 249 aa, Homo Sapiens; identical to SEQ ID NO: 8855

SEQ ID NO: 8857 - protein, 103 aa, Homo Sapiens
MALCALTRALRSLNLAPPTVAAPAPSLFPAAQMMNNGLLQQPSALMLLPCRPVLTSVALNANFVSWKSRTKYTITPVKMRKSGGRDHTGAGNVRSNSRPSIQR

SEQ ID NO: 8858 - protein, 96 aa, Homo Sapiens
MALCALTRALRSLNLAPPTVAAPAPSLFPAAQMMNNGLLQQPSALMLLPCRPVLTSVALNANFVSWKSRTKYTITPVKMRKSGGRDHTGGNKDRGI

SEQ ID NO: 8859 - protein, 225 aa, Homo Sapiens
MALCALTRALRSLNLAPPTVAAPAPSLFPAAQMMNNGLLQQPSALMLLPCRPVLTSVALNANFVSWKSRTKYTITPVKMRKSGGRDHTGRIRVHGIGGGHKQRYRMIDFLRFRPEETKSGPFEEKVIQVRYDPCRSADIALVAGGSRKRWIIATENMQAGDTILNSNHIGRMAVAAREGDAHPLGALPVGTLINNVESEPGRGAQYIRAAGAGNVRSNSRPSIQR

SEQ ID NO: 8860 - protein, 305 aa, Homo Sapiens [sequence omitted]

SEQ ID NO: 8861 - protein, 94 aa, Homo Sapiens
MALCALTRALRSLNLAPPTVAAPAPSLFPAAQVIHLTREEGCFHSGCRRWGLRACEAGVASLVRSHADDEQWPPPTALCLDVAPLPPSSYFCGP

SEQ ID NO: 8862 - protein, 49 aa, Homo Sapiens
MAASSLTVTLGRLASACSHSILRPSGPGAASLWSASRRFNSQSTSYLPG

SEQ ID NO: 8863 - protein, 49 aa, Homo Sapiens; identical to SEQ ID NO: 8862

SEQ ID NO: 8864 - protein, 150 aa, Homo Sapiens
MAASSLTVTLGRLASACSHSILRPSGPGAASLWSASRRFNSQSTSYLPGYVPKTSLSSPPWPEVVLPDPVEETRHHAEVVKKVNEMIVTGQYGRLFAVVHFASRQWKVTSEDLILIGNELDLACGERIRLEKVLLVGADNFTLLGKPLLG

SEQ ID NO: 8865 - protein, 205 aa, Homo Sapiens
MAASSLTVTLGRLASACSHSILRPSGPGAASLWSASRRFNSQSTSYLPGYVPKTSLSSPPWPEVVLPDPVEETRHHAEVVKKVNEMIVTGQYGRLFAVVHFASRQWKVTSEDLILIGNELDLACGERIRLEKVLLVGADNFTLLGKPLLGKDLVRVEATVIEKTESWPRIIMRFRKRKNFKKKRIVTTPQTVLRINSIEIAPCLL

SEQ ID NO: 8866 - protein, 36 aa, Homo Sapiens
MAASSLTVTLGRLASACSHSILRPSGPGADMFLKHP

SEQ ID NO: 8867 - protein, 120 aa, Homo Sapiens
MIVTGQYGRLFAVVHFASRQWKVTSEDLILIGNELDLACGERIRLEKVLLVGADNFTLLGKPLLGKDLVRVEATVIEKTESWPRIIMRFRKRKNFKKKRIVTTPQTVLRINSIEIAPCLL

SEQ ID NO: 8868 - protein, 195 aa, Homo Sapiens
MIVTGQYGRLFAVVHFASRQWKVTSEDLILIGNELDLACGERIRLEKVLLVGADNFTLLGKPLLGKDLVRVEATVIEKTESWPRIIMRFRKRKNFKKKRSKLEKVPLGPVARCWLPRRMRTEGVGHVGLGTGSPGRSQPGCHCPLATLILEGAPRGSSLAPLLLHAPRVTPPRSPSPPRSARDPTSLPFSSTLRA

SEQ ID NO: 8869 - protein, 38 aa, Homo Sapiens
EMESELTACVDVAGALWIHNLRSRGKLALGKSTTVEDK

SEQ ID NO: 8870 - protein, 212 aa, Homo Sapiens
MAAAVLGQLGALWIHNLRSRGKLALGLLSFHSVLPQSYIHTSASLDISRKWEKKNKIVYPPQLPGEPRRPAEIYHCRRQIKYSKDKMWYLAKLIRGMSIDQALAQLEFNDKKGAKIIKEVLLEAQDMAVRDHNVEFRSNLYIAESTSGRGQCLKRIRYHGRGRFGIMEKVYCHYFVKLVEGPPPPPEPPKTAVAHAKEYIQQLRSRTIVHTL

SEQ ID NO: 8871 - protein, 206 aa, Homo Sapiens
MAAAVLGQLGALWIHNLRSRGKLALGVLPQSYIHTSASLDISRKWEKKNKIVYPPQLPGEPRRPAEIYHCRRQIKYSKDKMWYLAKLIRGMSIDQALAQLEFNDKKGAKIIKEVLLEAQDMAVRDHNVEFRSNLYIAESTSGRGQCLKRIRYHGRGRFGIMEKVYCHYFVKLVEGPPPPPEPPKTAVAHAKEYIQQLRSRTIVHTL

SEQ ID NO: 8872 - protein, 232 aa, Homo Sapiens
MAAAVLGQLGKDFLVVKRQKGVEMESELTACVDVAGALWIHNLRSRGKLALGVLPQSYIHTSASLDISRKWEKKNKIVYPPQLPGEPRRPAEIYHCRRQIKYSKDKMWYLAKLIRGMSIDQALAQLEFNDKKGAKIIKEVLLEAQDMAVRDHNVEFRSNLYIAESTSGRGQCLKRIRYHGRGRFGIMEKVYCHYFVKLVEGPPPPPEPPKTAVAHAKEYIQQLRSRTIVHTL

SEQ ID NO: 8873 - protein, 126 aa, Homo Sapiens
MWYLAKLIRGMSIDQALAQLEFNDKKGAKIIKEVLLEAQDMAVRDHNVEFRSNLYIAESTSGRGQCLKRIRYHGRGRFGIMEKVYCHYFVKLVEGPPPPPEPPKTAVAHAKEYIQQLRSRTIVHTL

SEQ ID NO: 8874 - protein, 68 aa, Homo Sapiens
MRLSALLALASKVTLPPHYRYGMSPPGSVADKRKNPPWIRRRPVVVEPISDEDWYLFCGDTVEILEGK

SEQ ID NO: 8875 - protein, 99 aa, Homo Sapiens
MRLSALLALASKVTLPPHYRYGMSPPGSVADKRKNPPWIRRRPVVVEPISDEDWYLFCGDTVEILEGKDAGKQGKVVQVIRQRNWVVVGGLNTHYRYIG

SEQ ID NO: 8876 - protein, 173 aa, Homo Sapiens
MRLSALLALASKVTLPPHYRYGMSPPGSVADKRKNPPWIRRRPVVVEPISDEDWYLFCGDTVEILEGKDAGKQGKVVQVIRQRNWVVVGGLNTHYRYIGKTMDYRGTMIPSEAPLLHRQVKLVDPMDRKPTEIEWRFTEAGERVRVSTRSGRIIPKPEFPRADGIVPETWIDG

SEQ ID NO: 8877 - protein, 216 aa, Homo Sapiens
MRLSALLALASKVTLPPHYRYGMSPPGSVADKRKNPPWIRRRPVVVEPISDEDWYLFCGDTVEILEGKDAGKQGKVVQVIRQRNWVVVGGLNTHYRYIGKTMDYRGTMIPSEAPLLHRQVKLVDPMDRKPTEIEWRFTEAGERVRVSTRSGRIIPKPEFPRADGIVPETWIDGPKDTSVEDALERTYVPCLKTLQEEVMEAMGIKETRKYKKVYWY

SEQ ID NO: 8878 - protein, 216 aa, Homo Sapiens; identical to SEQ ID NO: 8877

SEQ ID NO: 8879 - protein, 148 aa, Homo Sapiens
MASVVLALRTRTAVTSLLSPTPATALAVRYASKKSGGSSKNLGGKSSGRRQGIKKMEGHYVHAGNIIATQRHFRWHPGAHVGVGKNKCLYALEEGIVRYTKEVYVPHPRNTEAVDLITRLPKGAVLYKTFVHVVPAKPEGTFKLVAML

SEQ ID NO: 8880 - protein, 94 aa, Homo Sapiens
MASVVLALRTRTAVTSLLSPTPATALAVRYASKKSGGSSKNLGGKSSGRRQGIKKMEGHYVHAGNIIATQRHFRWHPGAHVSCSVAAPLFPFLG

SEQ ID NO: 8881 - protein, 84 aa, Homo Sapiens
MASVVLALRTRTAVTSLLSPTPATALAVRYASKKSGGSSKNLGGKSSGRRQGIKKMEGHYVHAGNIIATQRHFRWHPGAHWRWK

SEQ ID NO: 8882 - protein, 93 aa, Homo Sapiens
MEGHYVHAGNIIATQRHFRWHPGAHVGVGKNKCLYALEEGIVRYTKEVYVPHPRNTEAVDLITRLPKGAVLYKTFVHVVPAKPEGTFKLVAML

SEQ ID NO: 8883 - protein, 93 aa, Homo Sapiens; identical to SEQ ID NO: 8882

SEQ ID NO: 8884 - protein, 136 aa, Homo Sapiens
  misc_feature (1)..(1): Xaa can be any naturally occurring amino acid
XSPTPATALAVRYASKKSGGSSKNLGGKSSGRRQGIKKMEGHYVHAGNIIATQRHFRWHPGAHVCVLQVGVGKNKCLYALEEGIVRYTKEVYVPHPRNTEAVDLITRLPKGAVLYKTFVHVVPAKPEGTFKLVAML

SEQ ID NO: 8885 - protein, 188 aa, Homo Sapiens [sequence omitted]

SEQ ID NO: 8886 - protein, 107 aa, Homo Sapiens
MALAMLVLVVSPWSAARGVLRNYWERLLRKLPQSRPGFPSPPWGPALAVQGPAMFTEPANDTSGSKENSSLLDSIFWMAAPKNRRTIEVNRCRRRNPQKLIKVKVMH

SEQ ID NO: 8887 - protein, 42 aa, Homo Sapiens
  misc_feature (1)..(1): Xaa can be any naturally occurring amino acid
XENSSLLDSIFWMAAPKNRRTIEVNRCRRRNPQKLIKVKSSC

SEQ ID NO: 8888 - protein, 36 aa, Homo Sapiens
MAVLAGSLLGPTSRLAGMSISRATSNARTSTAGSGA

SEQ ID NO: 8889 - protein, 92 aa, Homo Sapiens [sequence omitted]

SEQ ID NO: 8890 - protein, 92 aa, Homo Sapiens [sequence omitted]

SEQ ID NO: 8891 - protein, 92 aa, Homo Sapiens [sequence omitted]

SEQ ID NO: 8892 - protein, 184 aa, Homo Sapiens
MPRRPSGYFLSSGGAGSGSGRALGEGSGSQSRNSWSSVLTVSGHSSITMWLPSSMSFRNARSRICRRRRAQGLERLWAPESPAAGTAGPTADMAVLAGSLLGPTSRSAALLGGRWLQPRAWLGFPDAWGLPTPQQARGKARGNEYQPSNIKRKNKHGWVRRLSTPAGVQVILRRMLKGRKSLSH

SEQ ID NO: 8893 - protein, 95 aa, Homo Sapiens
MAASAFAGAVRAASGILRPLNILASSTYRNCVKNASLISALSTGRFSHIQTPVVSSTPRLTTSERNLTCGHTSVILNRLAIRKNYGKRHLQGRSD

SEQ ID NO: 8894 - protein, 170 aa, Homo Sapiens
MAASAFAGAVRAASGILRPLNILASSTYRNCVKNASLISALSTGRFSHIQTPVVSSTPRLTTSERNLTCGHTSVILNRMAPVLPSVLKLPVRSLTYFSARKGKRKTVKAVIDRFLRLHCGLWVRRKAGYKKKLWKKTPARKKRLREFVFCNKTQSKLLDKMTTSFWKRRN

SEQ ID NO: 8895 - protein, 177 aa, Homo Sapiens
MAASAFAGAVRAASGILRPLNILASSTYRNCVKNASLISALSTGRFSHIQTPVVSSTPRLTTSERNLTCGHTSVILNRMAPVLPSVLKLPVRSLTYFSARKGKRKTVKAVIDRFLRLHCGLWVRRKAGYKKKLWKKTPARKKRLREFVFCNKTQSKLLDKMTTSFWKRRNWHSPICR

SEQ ID NO: 8896 - protein, 188 aa, Homo Sapiens [sequence omitted]

SEQ ID NO: 8897 - protein, 122 aa, Homo Sapiens
MAALGTVLFSVRRLHCSVAAWAGGQWRLQQGLAANPSGYGPLTELPDWSYADGRPAPPMKGQLRRKAERETFARRVVLLSQEMDAGLQAWQLRQQKLQEEQRKQENALKPKGASLKSPLPSQ

SEQ ID NO: 8898 - protein, 110 aa, Homo Sapiens
MAALGTVLFSVRRLHCSVAAWAGGQWRLQQGLAANPSGYGPLTELPDWSYADGRPAPPMKGQLRRKAERETFAVSETSCTAVTGNGRWITSMAAQAAEVAGRTKEAGKCS

SEQ ID NO: 8899 - protein, 72 aa, Homo Sapiens
MAALGTVLFSVRRLHCSVAAWAGGQWRLQQGLAANPSGYGPLTELPDWSYAETSCTAVTGNGRWITSMAAQA

SEQ ID NO: 8900 - protein, 123 aa, Homo Sapiens
MAALGTVLFTGVRRLHCSVAAWAGGQWRLQQGLAANPSGYGPLTELPDWSYADGRPAPPMKGQLRRKAERETFARRVVLLSQEMDAGLQAWQLRQQKLQEEQRKQENALKPKGASLKSPLPSQ

SEQ ID NO: 8901 - protein, 87 aa, Homo Sapiens
MAALGTVLFTGVRRLHCSVAAWAGGQWRLQQGLAANPSGYGPLTELPDWSYAETSCTAVTGNGRWITSMAAQAAEVAGRTKEAGKCS

SEQ ID NO: 8902 - protein, 64 aa, Homo Sapiens
MKGQLRRKAERETFARRVVLLSQEMDAGLQAWQLRQQKLQEEQRKQENALKPKGASLKSPLPSQ

SEQ ID NO: 8903 - protein, 64 aa, Homo Sapiens; identical to SEQ ID NO: 8902

SEQ ID NO: 8904 - protein, 64 aa, Homo Sapiens; identical to SEQ ID NO: 8902

SEQ ID NO: 8905 - protein, 52 aa, Homo Sapiens
MKGQLRRKAERETFAVSETSCTAVTGNGRWITSMAAQAAEVAGRTKEAGKCS

SEQ ID NO: 8906 - protein, 51 aa, Homo Sapiens
MRRRVVLLSQEMDAGLQAWQLRQQKLQEEQRKQENALKPKGASLKSPLPSQ

SEQ ID NO: 8907 - protein, 52 aa, Homo Sapiens
MVKIFSTCYLLDELYCCHRKWTLDYKHGSSGSRSCRKNKGSRKMLLNPKGLH

SEQ ID NO: 8908 - protein, 5 aa, Homo Sapiens
MAAVG

SEQ ID NO: 8909 - protein, 9 aa, Homo Sapiens
MAAVGSLLG

SEQ ID NO: 8910 - protein, 164 aa, Homo Sapiens
MAAVGSLLGLAASSWLGGQNASDHSLWLLRKPRGSSCPGTGHQLCRLRQSTVKATGPALRRLHTSSWRADSSRASLTRVHRQAYARLYPVLLVKQDGSTIHIRYREPRRMLAMPIDLDTLSPEERRARLRKREAQLQSRKEYEQELSDDLHVERYRQFWTRTKK

SEQ ID NO: 8911 - protein, 164 aa, Homo Sapiens; identical to SEQ ID NO: 8910

SEQ ID NO: 8912 - protein, 24 aa, Homo Sapiens
MAAVGSLLGRLRQSTVKATGPALR

SEQ ID NO: 8913 - protein, 43 aa, Homo Sapiens
MAAVGSLLGRLRQSTVKATGPALRRLHTSSWRADSSRASLTRV

SEQ ID NO: 8914 - protein, 76 aa, Homo Sapiens
MAAVGSLLGRLRQSTVKATGPALRRLHTSSWRADSSRASLTRVHRQAYARLYPVLLVKQDGSTIHIRYREPRRMLA

SEQ ID NO: 8915 - protein, 128 aa, Homo Sapiens
MAAVGSLLGRLRQSTVKATGPALRRLHTSSWRADSSRASLTRVHRQAYARLYPVLLVKQDGSTIHIRYREPRRMLAMPIDLDTLSPEERRARLRKREAQLQSRKEYEQELSDDLHVERYRQFWTRTKK

SEQ ID NO: 8916 - protein, 128 aa, Homo Sapiens; identical to SEQ ID NO: 8915

SEQ ID NO: 8917 - protein, 128 aa, Homo Sapiens; identical to SEQ ID NO: 8915

SEQ ID NO: 8918 - protein, 128 aa, Homo Sapiens; identical to SEQ ID NO: 8915

SEQ ID NO: 8919 - protein, 128 aa, Homo Sapiens; identical to SEQ ID NO: 8915

SEQ ID NO: 8920 - protein, 128 aa, Homo Sapiens; identical to SEQ ID NO: 8915

SEQ ID NO: 8921 - protein, 128 aa, Homo Sapiens; identical to SEQ ID NO: 8915

SEQ ID NO: 8922 - protein, 128 aa, Homo Sapiens; identical to SEQ ID NO: 8915

SEQ ID NO: 8923 - protein, 128 aa, Homo Sapiens; identical to SEQ ID NO: 8915

SEQ ID NO: 8924 - protein, 128 aa, Homo Sapiens; identical to SEQ ID NO: 8915

SEQ ID NO: 8925 - protein, 128 aa, Homo Sapiens; identical to SEQ ID NO: 8915

SEQ ID NO: 8926 - protein, 128 aa, Homo Sapiens; identical to SEQ ID NO: 8915

SEQ ID NO: 8927 - protein, 128 aa, Homo Sapiens; identical to SEQ ID NO: 8915

SEQ ID NO: 8928 - protein, 128 aa, Homo Sapiens; identical to SEQ ID NO: 8915

SEQ ID NO: 8929 - protein, 128 aa, Homo Sapiens; identical to SEQ ID NO: 8915

SEQ ID NO: 8930 - protein, 128 aa, Homo Sapiens; identical to SEQ ID NO: 8915

SEQ ID NO: 8931 - protein, 55 aa, Homo Sapiens
MLAMPIDLDTLSPEERRARLRKREAQLQSRKEYEQELSDDLHVERYRQFWTRTKK

SEQ ID NO: 8932 - protein, 55 aa, Homo Sapiens; identical to SEQ ID NO: 8931

SEQ ID NO: 8933 - protein, 55 aa, Homo Sapiens; identical to SEQ ID NO: 8931

SEQ ID NO: 8934 - protein, 128 aa, Homo Sapiens
MAAFMLGSLLRTFKQMVPSSASGQVRSHYVDWRMWRDVKRRKMAYEYADERLRINSLRKNTILPKILQDVADEEIAALPRDSCPVRIRNRCVMTSRPRGVKRRWRLSRIVFRHLADHGQLSGIQRATW

SEQ ID NO: 8935 - protein, 60 aa, Homo Sapiens
MAAFMLGSLLRTFKQVRPLLLSTPLPLTAESHNPRVPHGSATCSARWFLHQLQAKFEVTM

SEQ ID NO: 8936 - protein, 200 aa, Homo Sapiens
GTTVLLWSLLRSSPGVERVCFRARIQPWHGGLLQPLPCSFEMGLPRRRFSSEAASYLLKSILAESGSPETKKPTFMDEEVQSILTKMTGLNLQKTFKPAIQELKPPTYKLMTQAQLEEATRQAVEAAKVRLKMPPVLEERVPINDVLAEDKILEGTETTKYVFTDISYSIPHRERFIVVREPSGTLRKASWEERDRMIQV

SEQ ID NO: 8937 - protein, 360 aa, Homo Sapiens
MAPLGTTVLLWSLLRSSPGVERVCFRARIQPWHGGLLQPLPCSFEMGLPRRRFSSEAAESGSPETKKPTFMDEEVQSILTKMTGLNLQKTFKPAIQELKPPTYKLMTQAQLEEATRQAVEAAKVRLKMPPVLEERVPINDVLAEDKILEGTETTKYVFTDISYSIPHRERFIVVREPSGTLRKASWEERDRMIQVYFPKEGRKILTPIIFKEENLRTMYSQDRHVDVLNLCFAQFEPDSTEYIKVHHKTYEDIDKRGKYDLLRSTRYFGGMVWYFVNNKKIDGLLIDQIQRDLIDDATNLVQLYHVLHPDGQSAQGAKDQAAEGINLIKVFAKTEAQKGAYIELTLQTYQEALSRHSAAS

SEQ ID NO: 8938 - protein, 360 aa, Homo Sapiens; identical to SEQ ID NO: 8937

SEQ ID NO: 8939 - protein, 168 aa, Homo Sapiens
MAPLGTTVLLWSLLRSSPGVERVCFRARIQPWHGGLLQPLPCSFEMGLPRRRFSSEAESGSPETKKPTFMDEEVQSILTKMTGLNLQKTFKPAIQELKPPTYKLMTQAQLEEATRQAVEAAKVRLKMPPVLEERVPINDVLAEDKILEGTETTKYVFTDISYSIPHRC

SEQ ID NO: 8940 - protein, 359 aa, Homo Sapiens
MAPLGTTVLLWSLLRSSPGVERVCFRARIQPWHGGLLQPLPCSFEMGLPRRRFSSEAESGSPETKKPTFMDEEVQSILTKMTGLNLQKTFKPAIQELKPPTYKLMTQAQLEEATRQAVEAAKVRLKMPPVLEERVPINDVLAEDKILEGTETTKYVFTDISYSIPHRERFIVVREPSGTLRKASWEERDRMIQVYFPKEGRKILTPIIFKEENLRTMYSQDRHVDVLNLCFAQFEPDSTEYIKVHHKTYEDIDKRGKYDLLRSTRYFGGMVWYFVNNKKIDGLLIDQIQRDLIDDATNLVQLYHVLHPDGQSAQGAKDQAAEGINLIKVFAKTEAQKGAYIELTLQTYQEALSRHSAAS

SEQ ID NO: 8941 - protein, 319 aa, Homo Sapiens
MSRNETEHRYLGTHFGAESGSPETKKPTFMDEEVQSILTKMTGLNLQKTFKPAIQELKPPTYKLMTQAQLEEATRQAVEAAKVRLKMPPVLEERVPINDVLAEDKILEGTETTKYVFTDISYSIPHRERFIVVREPSGTLRKASWEERDRMIQVYFPKEGRKILTPIIFKEENLRTMYSQDRHVDVLNLCFAQFEPDSTEYIKVHHKTYEDIDKRGKYDLLRSTRYFGGMVWYFVNNKKIDGLLIDQIQRDLIDDATNLVQLYHVLHPDGQSAQGAKDQAAEGINLIKVFAKTEAQKGAYIELTLQTYQEALSRHSAAS

SEQ ID NO: 8942 - protein, 51 aa, Homo Sapiens
MVQTGRSEGIPGWEQSMSKGREIPGSDSESGSPETKKPTFMDEEVQSILTK

SEQ ID NO: 8943 - protein, 121 aa, Homo Sapiens
  misc_feature (1)..(1): Xaa can be any naturally occurring amino acid
XKYVFTDISYSIPHRERFIVVREPSGTLRKASWEERDRMIQVYFPKEGRKILTPIIFKEENLRFEPDSTEYIKVHHKTYEDIDKRGKYDLLRSTRYFGGMVWYFVNNKKIDGLLIDQIQRD

SEQ ID NO: 8944 - protein, 165 aa, Homo Sapiens
  misc_feature (1)..(1): Xaa can be any naturally occurring amino acid
XTTVLLWSLLRSSPGVERVCFRARIQPWHGGLLQPLPCSFEMGLPRRRFSSEAAESGSPETKKPTFMDEEVQSILTKMTGLNLQKTFKPAIQELKPPTYKLMTQAQLEEATRQAVEAAKVRLKMPPVLEERVPINDVLAEDKILEGTETTKYVFTDISYSIPHRC

SEQ ID NO: 8945 - protein, 86 aa, Homo Sapiens
MAALCRTRAVAAESHFLRVFLFFRPFRGVGTESGSESGSSNAKEPKTRAGGFASALERHSELLQKVEPLQKEIPERNQGPVAAIRS

SEQ ID NO: 8946 - protein, 187 aa, Homo Sapiens
MAALCRTRAVAAESHFLRVFLFFRPFRGVGTESGSESGSSNAKEPKTRAGGFASALERHSELLQKVEPLQKGSPKNVESFASMLRHSPLTQMGPAKDKLVIGRIFHIVENDLYIDFGGKFHCVCRRPEVDGEKYQKGTRVRLRLLDLELTSRFLGATTDTTVLEANAVLLGIQESKDSRSKEEHHEK

SEQ ID NO: 8947 - protein, 109 aa, Homo Sapiens
MLPRLVLNSWVQVILLRWPPKVLGLQMTDMGPAKDKLVIGRIFHIVENDLYIDFGGKFHCVCRRPEVDGEKYQKGTRVRLRLLDLELTSRFLGATTDTTVLEANAVLLG

SEQ ID NO: 8948 - protein, 125 aa, Homo Sapiens
MLPRLVLNSWVQVILLRWPPKVLGLQMTDMGPAKDKLVIGRIFHIVENDLYIDFGGKFHCVCRRPEVDGEKYQKGTRVRLRLLDLELTSRFLGATTDTTVLEANAVLLGIQESKDSRSKEEHHEK

SEQ ID NO: 8949 - protein, 103 aa, Homo Sapiens
MLRHSPLTQMGPAKDKLVIGRIFHIVENDLYIDFGGKFHCVCRRPEVDGEKYQKGTRVRLRLLDLELTSRFLGATTDTTVLEANAVLLGIQESKDSRSKEEHH

SEQ ID NO: 8950 - protein, 143 aa, Homo Sapiens
  misc_feature (1)..(1): Xaa can be any naturally occurring amino acid
XFCVAFAYWAGSVHTALVFLGLNAGGKGSPKNVESFASMLRHSPLTQMGPAKDKLVIGRIFHIVENDLYIDFGGKFHCVCRRPEVDGEKYQKGTRVRLRLLDLELTSRFLGATTDTTVLEANAVLLGIQESKDSRSKEEHHEK

SEQ ID NO: 8951 - protein, 83 aa, Homo Sapiens
  misc_feature (1)..(1): Xaa can be any naturally occurring amino acid
XMLRHSPLTQMGPAKDKLVIGRIFHIVENDLYIDFGGKFHCVCRRPEVDGESPISWYAVWRRFSQVMITCFSSNSDFGKHRKR

SEQ ID NO: 8952 - protein, 163 aa, Homo Sapiens
  misc_feature (1)..(1): Xaa can be any naturally occurring amino acid
XTRAVAAESHFLRVFLFFRPFRGVGTESGSESGSSNAKEPKTRAGGFASALERHSELLQKRWGFAMLPRLVLNSWVQVILLRWPPKVLGLQMTDGSPKNVESFASMLRHSPLTQMGPAKDKLVIGRIFHIVENDLYIDFGGKFHCVCRRPEVDGEKYQKGTRV

SEQ ID NO: 8953 - protein, 170 aa, Homo Sapiens
MESTSQDRRATHVITIKPNETVLTAFPYRPHSSLLDFLKGEPRVLGATQILLALIIVGFGTIFALNYIGFSQRLPLVVLTGYPFWGALIFILTGYLTVTDKKSKLLGQGVTGMNVISSLVAITGITFTILSYRHQDKYCQMPSFEEICVFSRTLFIDFILLTPPHSSHFL

SEQ ID NO: 8954 - protein, 712 aa, Homo Sapiens
MESTSQDRRATHVITIKPNETVLTAFPYRPHSSLLDFLKGEPRVLGATQILLALIIVGFGTIFALNYIGFSQRLPLVVLTGYPFWGALIFILTGYLTVTDKKSKLLGQGVTGMNVISSLVAITGITFTILSYRHQDKYCQMPSFEEICVFSRTLFIGILLILLIISIAELSISVTIASFRSKCWTQSDEVLFFLPSDVTQNSEQPAPEENDQLQFVLQEEFSSDDSTTNAQSVIFGGYAFFKLTLSRSPLVSQPGNKGREFVPDEQKQSILPSPKFSEEEIEPLPPTLEKKPSENMSIQLDSTFKQMKDEDLQSAIVQPSQMQTKLLQDQAASLQVFPSHSALKLEDISPEDLPSQALPVEGLSEQTMPSKSTSSHVKQSSNLTANDLPPQGILSQDTSSQDMLFHDMTSQDMQSLDMLSQDTPSHAMPPQDIPSQDMLSQALSAHAILPEASTSHIVQFPEIQHLLQQPPDLQPENTEPQNQQILQMSYQDIRSEVMEETKEWKSEEELHRRKSSRRHSLNQQTKALQYLRRHSLDVQAKGQKSSKRHSLDQQSKGWQSPKQKSLDQQIKDWLSPKRHSVDKQAQLNQTKEQLPDQQAEDQQAKGEQYPEGQSKDGQVKDQQTDKEQNSKKQTQDQQTEDQPAQEKKSPKGQFQNVQAEGQQAQVEKVPKLLCQDSESQIQQYQFWQFHKGNLQAGQPRTVNLLAKNPLTG

SEQ ID NO: 8955 - protein, 679 aa, Homo Sapiens
MESTSQDRRATHVITIKPNETVLTAFPYRPHSSLLDFLKGEPRVLGATQILLALIIVGFGTIFALNYIGFSQRLPLVVLTGYPFWGALIFILTGYLTVTDKKSKLLGQGVTGMNVISSLVAITGITFTILSYRHQDKYCQMPSFEEICVFSRTLFIVLFFLPSDVTQNSEQPAPEENDQLQFVLQEEFSSDDSTTNAQSVIFGGYAFFKLTLSRSPLVSQPGNKGREFVPDEQKQSILPSPKFSEEEIEPLPPTLEKKPSENMSIQLDSTFKQMKDEDLQSAIVQPSQMQTKLLQDQAASLQVFPSHSALKLEDISPEDLPSQALPVEGLSEQTMPSKSTSSHVKQSSNLTANDLPPQGILSQDTSSQDMLFHDMTSQDMQSLDMLSQDTPSHAMPPQDIPSQDMLSQALSAHAILPEASTSHIVQFPEIQHLLQQPPDLQPENTEPQNQQILQMSYQDIRSEVMEETKEWKSEEELHRRKSSRRHSLNQQTKALQYLRRHSLDVQAKGQKSSKRHSLDQQSKGWQSPKQKSLDQQIKDWLSPKRHSVDKQAQLNQTKEQLPDQQAEDQQAKGEQYPEGQSKDGQVKDQQTDKEQNSKKQTQDQQTEDQPAQEKKSPKGQFQNVQAEGQQAQVEKVPKLLCQDSESQIQQYQFWQFHKGNLQAGQPRTVNLLAKNPLTG

SEQ ID NO: 8956 - protein, 153 aa, Homo Sapiens
MESTSQDRRATHVITIKPNETVLTAFPYRPHSSLLDFLKGEPRVLGATQILLALIIVGFGTIFALNYIGFSQRLPLVVLTGYPFWGALIGQGVTGMNVISSLVAITGITFTILSYRHQDKYCQMPSFEEICVFSRTLFIDFILLTPPHSSHFL

SEQ ID NO: 8957 - protein, 153 aa, Homo Sapiens; identical to SEQ ID NO: 8956

SEQ ID NO: 8958 - protein, 148 aa, Homo Sapiens
MESTSQDRRATHVITIKPNETVLTAFPYRPHSSLLDFLKGEPRVLGATQILLALIIVGFGTIFALNYIGFSQRLPLVVLTGYPFWGALIGQGVTGMNVISSLVAITGITFTILSYRHQDKYCQMPSFEEICVFSRTLFIGILLILLII

SEQ ID NO: 8959 - protein, 695 aa, Homo Sapiens
MESTSQDRRATHVITIKPNETVLTAFPYRPHSSLLDFLKGEPRVLGATQILLALIIVGFGTIFALNYIGFSQRLPLVVLTGYPFWGALIGQGVTGMNVISSLVAITGITFTILSYRHQDKYCQMPSFEEICVFSRTLFIGILLILLIISIAELSISVTIASFRSKCWTQSDEVLFFLPSDVTQNSEQPAPEENDQLQFVLQEEFSSDDSTTNAQSVIFGGYAFFKLTLSRSPLVSQPGNKGREFVPDEQKQSILPSPKFSEEEIEPLPPTLEKKPSENMSIQLDSTFKQMKDEDLQSAIVQPSQMQTKLLQDQAASLQVFPSHSALKLEDISPEDLPSQALPVEGLSEQTMPSKSTSSHVKQSSNLTANDLPPQGILSQDTSSQDMLFHDMTSQDMQSLDMLSQDTPSHAMPPQDIPSQDMLSQALSAHAILPEASTSHIVQFPEIQHLLQQPPDLQPENTEPQNQQILQMSYQDIRSEVMEETKEWKSEEELHRRKSSRRHSLNQQTKALQYLRRHSLDVQAKGQKSSKRHSLDQQSKGWQSPKQKSLDQQIKDWLSPKRHSVDKQAQLNQTKEQLPDQQAEDQQAKGEQYPEGQSKDGQVKDQQTDKEQNSKKQTQDQQTEDQPAQEKKSPKGQFQNVQAEGQQAQVEKVPKLLCQDSESQIQQYQFWQFHKGNLQAGQPRTVNLLAKNPLTG

SEQ ID NO: 8960 - protein, 662 aa, Homo Sapiens
MESTSQDRRATHVITIKPNETVLTAFPYRPHSSLLDFLKGEPRVLGATQILLALIIVGFGTIFALNYIGFSQRLPLVVLTGYPFWGALIGQGVTGMNVISSLVAITGITFTILSYRHQDKYCQMPSFEEICVFSRTLFIVLFFLPSDVTQNSEQPAPEENDQLQFVLQEEFSSDDSTTNAQSVIFGGYAFFKLTLSRSPLVSQPGNKGREFVPDEQKQSILPSPKFSEEEIEPLPPTLEKKPSENMSIQLDSTFKQMKDEDLQSAIVQPSQMQTKLLQDQAASLQVFPSHSALKLEDISPEDLPSQALPVEGLSEQTMPSKSTSSHVKQSSNLTANDLPPQGILSQDTSSQDMLFHDMTSQDMQSLDMLSQDTPSHAMPPQDIPSQDMLSQALSAHAILPEASTSHIVQFPEIQHLLQQPPDLQPENTEPQNQQILQMSYQDIRSEVMEETKEWKSEEELHRRKSSRRHSLNQQTKALQYLRRHSLDVQAKGQKSSKRHSLDQQSKGWQSPKQKSLDQQIKDWLSPKRHSVDKQAQLNQTKEQLPDQQAEDQQAKGEQYPEGQSKDGQVKDQQTDKEQNSKKQTQDQQTEDQPAQEKKSPKGQFQNVQAEGQQAQVEKVPKLLCQDSESQIQQYQFWQFHKGNLQAGQPRTVNLLAKNPLTG

SEQ ID NO: 8961 - protein, 94 aa, Homo Sapiens
MESTSQDRRATHVITIKPNETVLTAFPYRPHSSLLDFLKGEPRVLGATQILLALIIVGFGTIFALNYIGFSQRLPLVVLTGYPFWGALIVSTVD

SEQ ID NO: 8962 - protein, 567 aa, Homo Sapiens
MNVISSLVAITGITFTILSYRHQDKYCQMPSFEEICVFSRTLFIVLFFLPSDVTQNSEQPAPEENDQLQFVLQEEFSSDDSTTNAQSVIFGGYAFFKLTLSRSPLVSQPGNKGREFVPDEQKQSILPSPKFSEEEIEPLPPTLEKKPSENMSIQLDSTFKQMKDEDLQSAIVQPSQMQTKLLQDQAASLQVFPSHSALKLEDISPEDLPSQALPVEGLSEQTMPSKSTSSHVKQSSNLTANDLPPQGILSQDTSSQDMLFHDMTSQDMQSLDMLSQDTPSHAMPPQDIPSQDMLSQALSAHAILPEASTSHIVQFPEIQHLLQQPPDLQPENTEPQNQQILQMSYQDIRSEVMEETKEWKSEEELHRRKSSRRHSLNQQTKALQYLRRHSLDVQAKGQKSSKRHSLDQQSKGWQSPKQKSLDQQIKDWLSPKRHSVDKQAQLNQTKEQLPDQQAEDQQAKGEQYPEGQSKDGQVKDQQTDKEQNSKKQTQDQQTEDQPAQEKKSPKGQFQNVQAEGQQAQVEKVPKLLCQDSESQIQQYQFWQFHKGNLQAGQPRTVNLLAKNPLTG

SEQ ID NO: 8963 - protein, 139 aa, Homo Sapiens
  misc_feature (1)..(1): Xaa can be any naturally occurring amino acid
XRVLGATQILLALIIVGFGTIFALNYIGFSQRLPLVVLTGYPFWGALIFILTGYLTVTDKKSKLLGQGVTGMNVISSLVAITGITFTILSYRHQDKYCQMPSFEEICVFSRTLFIVSGLILHEESLKSSLNCVHDVMIH

SEQ ID NO: 8964 - protein, 214 aa, Homo Sapiens
MASHEVDNAELGSASAHGTPGSEAGPEELNTSVYQPIDGSPDYQKAKLQVLGAIQILNAAMILALGVFLGSLQYPYHFQKHFFFFTFYTGYPIWGAVFFCSSGTLSVVAGIKPTRTWIQNSFGMNIASATIALVGTAFLSLNIAVNIQSLRSCHSSSESPDLCNYMGSISNGMVSLLLILTLLELCVTISTIAMWCNANCCNSREEISSPPNSV

SEQ ID NO: 8965 - protein, 168 aa, Homo Sapiens
MASHEVDNAELGSASAHGTPGSEAGPEELNTSVYQPIDGSPDYQKAKLQVLGFCSSGTLSVVAGIKPTRTWIQNSFGMNIASATIALVGTAFLSLNIAVNIQSLRSCHSSSESPDLCNYMGSISNGMVSLLLILTLLELCVTISTIAMWCNANCCNSREEISSPPNSV

SEQ ID NO: 8966 - protein, 168 aa, Homo Sapiens; identical to SEQ ID NO: 8965

SEQ ID NO: 8967 - protein, 83 aa, Homo Sapiens
MASHEVDNAELGSASAHGTPGSEAGPEELNTSVYQPIDGSPDYQKAKLQVLGSIQREEDEDEDLYDNLLPLNEYSVVQEPCLL

SEQ ID NO: 8968 - protein, 91 aa, Homo Sapiens
MNIASATIALVGTAFLSLNIAVNIQSLRSCHSSSESPDLCNYMGSISNGMVSLLLILTLLELCVTISTIAMWCNANCCNSREEISSPPNSV

SEQ ID NO: 8969 - protein, 1137 aa, Homo Sapiens
MSRRKPASGGLAASSSAPARQAVLSRFFQSTGSLKSTSSSTGAADQVDPGAAAAAAAAAAAAPPAPPAPAFPPQLPPHIATEIDRRKKRPLENDGPVKKKVKKVQQKEGGSDLGMSGNSEPKKCLRTRNVSKSLEKLKEFCCDSALPQSRVQTESLQERFAVLPKCTDFDDISLLHAKNAVSSEDSKRQINQKDTTLFDLSQFGSSNTSHENLQKTASKSANKRSKSIYTPLELQYIEMKQQHKDAVLCVECGYKYRFFGEDAEIAARELNIYCHLDHNFMTASIPTHRLFVHVRRLVAKGYKVGVVKQTETAALKAIGDNRSSLFSRKLTALYTKSTLIGEDVNPLIKLDDAVNVDEIMTDTSTSYLLCISENKENVRDKKKGNIFIGIVGVQPATGEVVFDSFQDSASRSELETRMSSLQPVELLLPSALSEQTEALIHRATSVSVQDDRIRVERMDNIYFEYSHAFQAVTEFYAKDTVDIKGSQIISGIVNLEKPVICSLAAIIKYLKEFNLEKMLSKPENFKQLSSKMEFMTINGTTLRNLEILQNQTDMKTKGSLLWVLDHTKTSFGRRKLKKWVTQPLLKLREINARLDAVSEVLHSESSVFGQIENHLRKLPDIERGLCSIYHKKCSTQEFFLIVKTLYHLKSEFQAIIPAVNSHIQSDLLRTVILEIPELLSPVEHYLKILNEQAAKVGDKTELFKDLSDFPLIKKRKDEIQGVIDEIRMHLQEIRKILKNPSAQYVTVSGQEFMIEIKNSAVSCIPTDWVKVGSTKAVSRFHSPFIVENYRHLNQLREQLVLDCSAEWLDFLEKFSEHYHSLCKAVHHLATVDCIFSLAKVAKQGDYCRPTVQEERKIVIKNGRHPVIDVLLGEQDQYVPNNTDLSEDSERVMIITGPNMGGKSSYIKQVALITIMAQIGSYVPAEEATIGIVDGIFTRMGAADNIYKGQSTFMEELTDTAEIIRKATSQSLVILDELGRGTSTHDGIAIAYATLEYFIRDVKSLTLFVTHYPPVCELEKNYSHQVGNYHMGFLVSEDESKLDPGAAEQVPDFVTFLYQITRGIAARSYGLNVAKLADVPGEILKKAAHKSKELEGLINTKRKRLKYFAKLWTMHNAQDLQKWTEEFNMEETQTSLLH

SEQ ID NO: 8970 - protein, 166 aa, Homo Sapiens
GYSRPRYSPQVLGVRIQNGRHPLMELCARTFVPNSTECGGDKGRVKVITGPNSSGKSIYLKQVAKAVNNATAQSLVLIDEFGKGTNTVDGLALLAAVLRHWLARGPTCPHIFVATNFLSLVQLQLLPQGPLVQYLDWPRVSGQEGGLRRCCEGQPCLPHSCPGWAS

SEQ ID NO: 8971 - protein, 333 aa, Homo Sapiens
KILFLSSIIPFDCLLTVRALGGLLKFLGRRRIGVELEDYNVSVPILGFKKFMLTHLVNIDQDTYSVLQIFKSESHPSVYKVASGLKEGLSLFGILNRCHCKWGEKLLRLWFTRPTHDLGELSSRLDVIQFFLLPQNLDMAQMLHRLLGHIKNVPLILKRMKLSHTKVSDWQVLYKTVYSALGLRDACRSLPQSIQLFRDIAQEFSDDLHHIASLIGKVYLSPQVDFEGSLAENRFTVLPNIDPEIDEKKRRLMGLPSFLTEVARKELENLDSRIPSCSVIYIPLIGFLLSIPRLPSMVEASDFEINGLDFMFLSEEKLHYRSARTKELDALLG

SEQ ID NO: 8972 - protein, 822 aa, Homo Sapiens
MASLGANPRRTPQGPRPGAASSGFPSPAPVPGPREAEEEEVEEEEELAEIHLCVLWNSGYLGIAYYDTSDSTIHFMPDAPDHESLKLLQRVLDEINPQSVVTSAKQDENMTRFLGKLASQEHREPKRPEIIFLPSVDFGLEISKQRLLSGNYSFIPDAMTATEKILFLSSIIPFDCLLTPPGDLRFTPIPLLIPSQVRALGGLLKFLGRRRIGVELEDYNVSVPILGFKKFMLTHLVNIDQDTYSVLQIFKSESHPSVYKVASGLKEGLSLFGILNRCHCKWGEKLLRLWFTRPTHDLGELSSRLDVIQFFLLPQNLDMAQMLHRLLGHIKNVPLILKRMKLSHTKVSDWQVLYKTVYSALGLRDACRSLPQSIQLFRDIAQEFSDDLHHIASLIGKVVDFEGSLAENRFTVLPNIDPEIDEKKRRLMGLPSFLTEVARKELENLDSRIPSCSVIYIPLIGFLLSIPRLPSMVEASDFEINGLDFMFLSEEKLHYRSARTKELDALLGDLHCEIRDQETLLMYQLQCQVLARAAVLTRVLDLASRLDVLLALASAARDYGYSRPRYSPQVLGVRIQNGRHPLMELCARTFVPNSTECGGDKGRVKVITGPNSSGKSIYLKQVGLITFMALVGSFVPAEEAEIGAVDAIFTRIHSCESISLGLSTFMIDLNQQVAKAVNNATAQSLVLIDEFGKGTNTVDGLALLAAVLRHWLARGPTCPHIFVATNFLSLVQLQLLPQGPLVQYLTMETCEDGNDLVFFYQVSDLIRSGKPIKPVKDLLKKNQMENCQTLVDKFMKLDLEDPNLDLNVFMSQEVLPAATSIL

SEQ ID NO: 8973 - protein, 194 aa, Homo Sapiens
MASLGANPRRTPQGPRPGAASSGFPSPAPVPGPREAEEEEVEEEEELAEIHLCVLWNSGYLGIAYYDTSDSTIHFMPDAPDHESLKLLQRVLDEINPQSVVTSAKQDENMTRFLGKLASQEHREPKRPEIIFLPSVDFGLEISKQRLLSGNYSFIPDAMTATEKILFLSSIIPFDCLLTVRALGGLLKFLGRRR

SEQ ID NO: 8974 - protein, 834 aa, Homo Sapiens
MASLGANPRRTPQGPRPGAASSGFPSPAPVPGPREAEEEEVEEEEELAEIHLCVLWNSGYLGIAYYDTSDSTIHFMPDAPDHESLKLLQRVLDEINPQSVVTSAKQDENMTRFLGKLASQEHREPKRPEIIFLPSVDFGLEISKQRLLSGNYSFIPDAMTATEKILFLSSIIPFDCLLTVRALGGLLKFLGRRRIGVELEDYNVSVPILGFKKFMLTHLVNIDQDTYSVLQIFKSESHPSVYKVASGLKEGLSLFGILNRCHCKWGEKLLRLWFTRPTHDLGELSSRLDVIQFFLLPQNLDMAQMLHRLLGHIKNVPLILKRMKLSHTKVSDWQVLYKTVYSALGLRDACRSLPQSIQLFRDIAQEFSDDLHHIASLIGKVVDFEGSLAENRFTVLPNIDPEIDEKKRRLMGLPSFLTEVARKELENLDSRIPSCSVIYIPLIGFLLSIPRLPSMVEASDFEINGLDFMFLSEEKLHYRSARTKELDALLGDLHCEIRDQETLLMYQLQCQVLARAAVLTRVLDLASRLDVLLALASAARDYGYSRPRYSPQVLGVRIQNGRHPLMELCARTFVPNSTECGGDKGRVKVITGPNSSGKSIYLKQVGLITFMALVGSFVPAEEAEIGAVDAIFTRIHSCESISLGLSTFMIDLNQVAKAVNNATAQSLVLIDEFGKGTNTVDGLALLAAVLRHWLARGPTCPHIFVATNFLSLVQLQLLPQGPLVQYLTMETCEDGNDLVFFYQVCEGVAKASHASHTAAQAGLPDKLVARGKEVSDLIRSGKPIKPVKDLLKKNQMENCQTLVDKFMKLDLEDPNLDLNVFMSQEVLPAATSIL

SEQ ID NO: 8975 - protein, 835 aa, Homo Sapiens
MASLGANPRRTPQGPRPGAASSGFPSPAPVPGPREAEEEEVEEEEELAEIHLCVLWNSGYLGIAYYDTSDSTIHFMPDAPDHESLKLLQRVLDEINPQSVVTSAKQDENMTRFLGKLASQEHREPKRPEIIFLPSVDFGLEISKQRLLSGNYSFIPDAMTATEKILFLSSIIPFDCLLTVRALGGLLKFLGRRRIGVELEDYNVSVPILGFKKFMLTHLVNIDQDTYSVLQIFKSESHPSVYKVASGLKEGLSLFGILNRCHCKWGEKLLRLWFTRPTHDLGELSSRLDVIQFFLLPQNLDMAQMLHRLLGHIKNVPLILKRMKLSHTKVSDWQVLYKTVYSALGLRDACRSLPQSIQLFRDIAQEFSDDLHHIASLIGKVVDFEGSLAENRFTVLPNIDPEIDEKKRRLMGLPSFLTEVARKELENLDSRIPSCSVIYIPLIGFLLSIPRLPSMVEASDFEINGLDFMFLSEEKLHYRSARTKELDALLGDLHCEIRDQETLLMYQLQCQVLARAAVLTRVLDLASRLDVLLALASAARDYGYSRPRYSPQVLGVRIQNGRHPLMELCARTFVPNSTECGGDKGRVKVITGPNSSGKSIYLKQVGLITFMALVGSFVPAEEAEIGAVDAIFTRIHSCESISLGLSTFMIDLNQQVAKAVNNATAQSLVLIDEFGKGTNTVDGLALLAAVLRHWLARGPTCPHIFVATNFLSLVQLQLLPQGPLVQYLTMETCEDGNDLVFFYQVCEGVAKASHASHTAAQAGLPDKLVARGKEVSDLIRSGKPIKPVKDLLKKNQMENCQTLVDKFMKLDLEDPNLDLNVFMSQEVLPAATSIL

SEQ ID NO: 8976 - protein, 834 aa, Homo Sapiens; identical to SEQ ID NO: 8974

SEQ ID NO: 8977 - protein, 637 aa, Homo Sapiens
MASLGANPRRTPQGPRPGAASSGFPSPAPVPGPREAEEEEVEEEEELAEIHLCVLWNSGYLGIAYYDTSDSTIHFMPDAPDHESLKLLQRVLDEINPQSVVTSAKQDENMTRFLGKLASQEHREPKRPEIIFLPSVDFGLEISKQRLLSGNYSFIPDAMTATEKILFLSSIIPFDCLLTVRALGGLLKFLGRRRIGVELEDYNVSVPILGFKKFMLTHLVNIDQDTYSVLQIFKSESHPSVYKVASGLKEGLSLFGILNRCHCKWGEKLLRLWFTRPTHDLGELSSRLDVIQFFLLPQNLDMAQMLHRLLGHIKNVPLILKRMKLSHTKVSDWQVLYKTVYSALGLRDACRSLPQSIQLFRDIAQEFSDDLHHIASLIGKVVDFEGSLAENRFTVLPNIDPEIDEKKRRLMGLPSFLTEVARKELENLDSRIPSCSVIYIPLIGFLLSIPRLPSMVEASDFEINGLDFMFLSEEKLHYRSARTKELDALLGDLHCEIRDQETLLMYQLQCQVLARAAVLTRVLDLASRLDVLLALASAARDYGYSRPRYSPQVLGVRIQNGRHPLMELCARTFVPNSTECGGDKGRVKVITGPNSSGKSIYLKQLRIHLPWPLHLHDRPQPGGESSEQCHCTVAGPY

SEQ ID NO: 8978 - protein, 508 aa, Homo Sapiens
MWPVLLFVFLSQTVYSALGLRDACRSLPQSIQLFRDIAQEFSDDLHHIASLIGKVVDFEGSLAENRFTVLPNIDPEIDEKKRRLMGLPSFLTEVARKELENLDSRIPSCSVIYIPLIGFLLSIPRLPSMVEASDFEINGLDFMFLSEEKLHYRSARTKELDALLGDLHCEIRDQETLLMYQLQCQVLARAAVLTRVLDLASRLDVLLALASAARDYGYSRPRYSPQVLGVRIQNGRHPLMELCARTFVPNSTECGGDKGRVKVITGPNSSGKSIYLKQVGLITFMALVGSFVPAEEAEIGAVDAIFTRIHSCESISLGLSTFMIDLNQVAKAVNNATAQSLVLIDEFGKGTNTVDGLALLAAVLRHWLARGPTCPHIFVATNFLSLVQLQLLPQGPLVQYLTMETCEDGNDLVFFYQVCEGVAKASHASHTAAQAGLPDKLVARGKEVSDLIRSGKPIKPVKDLLKKNQMENCQTLVDKFMKLDLEDPNLDLNVFMSQEVLPAATSIL

SEQ ID NO: 8979 - protein, 156 aa, Homo Sapiens
TAQSLVLIDEFGKGTNTVDGLALLAAVLRHWLARGPTCPHIFVATNFLSLVQLQLLPQGPLVQYLVCEGVAKASHASHTAAQAGLPDKLVARGKEVSDLIRSGKPIKPVKDLLKKNQMENCQTLVDKFMKLDLEDPNLDLNVFMSQEVLPAATSIL

SEQ ID NO: 8980 - protein, 159 aa, Homo Sapiens
  misc_feature (1)..(1): Xaa can be any naturally occurring amino acid
XDAPDHESLKLLQRVLDEINPQSVVTSAKQDENMTRFLGKLASQEHREPKRPEIIFLPSVDFGLEISKQRLLSGNYSFIPDAMTATEKILFLSSIIPFDCLLTVRALGGLLKFLGRRRIGVELEDYNVSVPILGFKKFMLTHLVNIDQDTYRNPQQMPL

SEQ ID NO: 8981 - protein, 43 aa, Homo Sapiens
  misc_feature (1)..(1): Xaa can be any naturally occurring amino acid
XRIGVELEDYNVSVPILGFKKFMLTHLVNIDQDTYRNPQQMPL

SEQ ID NO: 8982 - protein, 170 aa, Homo Sapiens
MALPTARPLLGSCGTPALGSLLFLLFSLGWVQPSRTLAGETGQEAAPLDGVLANPPNISSLSPRQLLGFPCAEVSGLSTERVRELAVALAQKNVKLSTEQLRCLAHRLSEPPEDLDALPLDLLLFLNPDAFSGPQACTRFFSRITKANVDLLPRGAPERQRLLPAALACW

SEQ ID NO: 8983 - protein, 333 aa, Homo Sapiens [sequence omitted]

SEQ ID NO: 8984 - protein, 630 aa, Homo Sapiens
MALPTARPLLGSCGTPALGSLLFLLFSLGWVQPSRTLAGETGQEAAPLDGVLANPPNISSLSPRQLLGFPCAEVSGLSTERVRELAVALAQKNVKLSTEQLRCLAHRLSEPPEDLDALPLDLLLFLNPDAFSGPQACTRFFSRITKANVDLLPRGAPERQRLLPAALACWGVRGSLLSEADVRALGGLACDLPGRFVAESAEVLLPRLVSCPGPLDQDQQEAARAALQGGGPPYGPPSTWSVSTMDALRGLLPVLGQPIIRSIPQGIVAAWRQRSSRDPSWRQPERTILRPRFRREVEKTACPSGKKAREIDESLIFYKKWELEACVDAALLATQMDRVNAIPFTYEQLDVLKHKLDELYPQGYPESVIQHLGYLFLKMSPEDIRKWNVTSLETLKALLEVNKGHEMSPQAPRRPLPQVATLIDRFVKGRGQLDKDTLDTLTAFYPGYLCSLSPEELSSVPPSSIWAVRPQDLDTCDPRQLDVLYPKARLAFQNMNGSEYFVKIQSFLGGAPTEDLKALSQQNVSMDLATFMKLRTDAVLPLTVAEVQKLLGPHVEGLKAEERHRPVRDWILRQRQDDLDTLGLGLQGGIPNGYLVLDLSMQEALSGTPCLLGPGPVLTVLALLLASTLA

SEQ ID NO: 8985 - protein, 622 aa, Homo Sapiens
MALPTARPLLGSCGTPALGSLLFLLFSLGWVQPSRTLAGETGQEAAPLDGVLANPPNISSLSPRQLLGFPCAEVSGLSTERVRELAVALAQKNVKLSTEQLRCLAHRLSEPPEDLDALPLDLLLFLNPDAFSGPQACTRFFSRITKANVDLLPRGAPERQRLLPAALACWGVRGSLLSEADVRALGGLACDLPGRFVAESAEVLLPRLVSCPGPLDQDQQEAARAALQGGGPPYGPPSTWSVSTMDALRGLLPVLGQPIIRSIPQGIVAAWRQRSSRDPSWRQPERTILRPRFRREVEKTACPSGKKAREIDESLIFYKKWELEACVDAALLATQMDRVNAIPFTYEQLDVLKHKLDELYPQGYPESVIQHLGYLFLKMSPEDIRKWNVTSLETLKALLEVNKGHEMSPQVATLIDRFVKGRGQLDKDTLDTLTAFYPGYLCSLSPEELSSVPPSSIWAVRPQDLDTCDPRQLDVLYPKARLAFQNMNGSEYFVKIQSFLGGAPTEDLKALSQQNVSMDLATFMKLRTDAVLPLTVAEVQKLLGPHVEGLKAEERHRPVRDWILRQRQDDLDTLGLGLQGGIPNGYLVLDLSMQEALSGTPCLLGPGPVLTVLALLLASTLA

SEQ ID NO: 8986 - protein, 622 aa, Homo Sapiens; identical to SEQ ID NO: 8985

SEQ ID NO: 8987 - protein, 622 aa, Homo Sapiens; identical to SEQ ID NO: 8985

SEQ ID NO: 8988 - protein, 398 aa, Homo Sapiens
VEKTACPSGKKAREIDESLIFYKKWELEACVDAALLATQMDRVNAIPFTYEQLDVLKHKLDELYPQGYPESVIQHLGYLFLKMSPEDIRKWNVTSLETLKALLEVNKGHEMSPQVATLIDRFVKGRGQLDKDTLDTLTAFYPGYLCSLSPEELSSVPPSSIWAVRPQDLDTCDPRQLDVLYPKARLAFQNMNGSEYFVKIQSFLGGAPTEDLKALSQQNVSMDLATFMKLRTDAVLPLTVAEVQKLLGPHVEGLKAEERHRPVRDWILRQRQDDLDTLGLGLQGGIPNGYLVLDLSMQGGRGGQARAGGRAGGVEVGALSHPSLCRGPLGDALPPRTWTCSHRPGTAPSLHPGLRAPLPCWPQPCWGSPPGQEQARVVPVPPQENSRSVNGNMPPADT

SEQ ID NO: 8989 - protein, 334 aa, Homo Sapiens
  misc_feature (1)..(1): Xaa can be any naturally occurring amino acid
XSWRQPERTILRPRFRREVEKTACPSGKKAREIDESLIFYKKWELEACVDAALLATQMDRVNAIPFTYEQLDVLKHKLDELYPQGYPESVIQHLGYLFLKMSPEDIRKWNVTSLETLKALLEVNKGHEMSPQVATLIDRFVKGRGQLDKDTLDTLTAFYPGYLCSLSPEELSSVPPSSIWAVRPQDLDTCDPRQLDVLYPKARLAFQNMNGSEYFVKIQSFLGGAPTEDLKALSQQNVSMDLATFMKLRTDAVLPLTVAEVQKLLGPHVEGLKAEERHRPVRDWILRQRQDDLDTLGLGLQGGIPNGYLVLDLSMQGPGPVLTVLALLLASTLA

SEQ ID NO: 8990 - protein, 114 aa, Homo Sapiens
MNVLLGSVVIFATFVTLCNASCYFIPNEGVPGDSTRKCMDLKGNKHPINSEWQTDNCETCTCYETEISCCTLVSTPVGYDKDNCQRIFKKEDCKYIVVEKKDPKKTCSVSEWII

SEQ ID NO: 8991 - protein, 77 aa, Homo Sapiens
MNVLLGSVVIFATFVTLCNASCYFIPNEGVPGDSTRMFLHLWVMTKTTAKESSRRRTASISWWRRRTQKRPVLSVNG

SEQ ID NO: 8992 - protein, 59 aa, Homo Sapiens
MAVFGMGCFWGAERKFWVLKGVYSTQVGFAGGYTSNPTYKEVCSDVQNNSMFISLFKSF

SEQ ID NO: 8993 - protein, 82 aa, Homo Sapiens
MAVFGMGCFWGAERKFWVLKGVYSTQVGFAGGYTSNPTYKEVCSEKTGHAEVVRVVYQPEHMSFEELLKVFWENHDPTQGMR

SEQ ID NO: 8994 - protein, 169 aa, Homo Sapiens
MAVFGMGCFWGAERKFWVLKGVYSTQVGFAGGYTSNPTYKEVCSEKTGHAEVVRVVYQPEHMSFEELLKVFWENHDPTQGMRQGNDHGTQYRSAIYPTSAKQMEAALSSKENYQKVLSEHGFGPITTDIREGQTFYYAEDYHQQYLSKNPNGYCGLGGTGVSCPVGIKK

SEQ ID NO: 8995 - protein, 192 aa, Homo Sapiens
MCSEPKHHVNGNRTVEPFPEGTQMAVFGMGCFWGAERKFWVLKGVYSTQVGFAGGYTSNPTYKEVCSEKTGHAEVVRVVYQPEHMSFEELLKVFWENHDPTQGMRQGNDHGTQYRSAIYPTSAKQMEAALSSKENYQKVLSEHGFGPITTDIREGQTFYYAEDYHQQYLSKNPNGYCGLGGTGVSCPVGIKK

SEQ ID NO: 8996 - protein, 195 aa, Homo Sapiens
MLSATRRACQLLLLHSLFPVPRMGNSASNIVSPQEALPGRKEQTPVAAKHHVNGNRTVEPFPEGTQMAVFEKTGHAEVVRVVYQPEHMSFEELLKVFWENHDPTQGMRQGNDHGTQYRSAIYPTSAKQMEAALSSKENYQKVLSEHGFGPITTDIREGQTFYYAEDYHQQYLSKNPNGYCGLGGTGVSCPVGIKK

SEQ ID NO: 8997 - protein, 213 aa, Homo Sapiens
MLSATRRACQLLLLHSLFPVPRMGNSASNIVSPQEALPGRKEQTPVAAKHHVNGNRTVEPFPEGTQMAVFGMGCFWGAERKFWVLKGVYSTQVGFAGGYTSNPTYKEVCSEKTGHAEVVRVVYQPEHMSFEELLKVFWENHDPTQGMRQGNDHGTQYRSAIYPTSAKQMEAALSSKENYQKLVLPCSSSAMLGLTAASSAQLAWVQPSSRKHY

SEQ ID NO: 8998 - protein, 235 aa, Homo Sapiens
MLSATRRACQLLLLHSLFPVPRMGNSASNIVSPQEALPGRKEQTPVAAKHHVNGNRTVEPFPEGTQMAVFGMGCFWGAERKFWVLKGVYSTQVGFAGGYTSNPTYKEVCSEKTGHAEVVRVVYQPEHMSFEELLKVFWENHDPTQGMRQGNDHGTQYRSAIYPTSAKQMEAALSSKENYQKVLSEHGFGPITTDIREGQTFYYAEDYHQQYLSKNPNGYCGLGGTGVSCPVGIKK

SEQ ID NO: 8999 - protein, 91 aa, Homo Sapiens
  misc_feature (1)..(1): Xaa can be any naturally occurring amino acid
XKTGHAEVVRVVYQPEHMSFEELLKVFWENHDPTQGMRQGNDHGTQYRSAIYPTSAKQMEAALSSKENYQKVPKHVHWKKRTQTGLQTEGR

SEQ ID NO: 9000 - protein, 182 aa, Homo Sapiens
MARLLWLLRGLTLGTAPRRAVRGQAGGGGPGTGPGLGEAGSLATCELPLAKSEWQKKLTPEQFYVTREKGTEPPFSGIYLNNKEAGMYHCVCCDSPLFSSEKKYCSGTGWPSFSEAHGTSGSDESHTGILRRLDTSLGSARTEVVCKQCEAHLGHVFPDGPGPNGQRFCINSVALKFKPRKH

SEQ ID NO: 9001 - protein, 120 aa, Homo Sapiens
  misc_feature (1)..(1): Xaa can be any naturally occurring amino acid
XSLATCELPLAKSEWQKKLTPEQFYVTREKGTEPPFSGIYLNNKEAGMYHCVCCDSPLFRSLLDIQKEVFSIKGSRSPSTSRGNGFDSEVLRKSTALALGGLRFPRLMVRLALMKATQGS

SEQ ID NO: 9002 - protein, 84 aa, Homo Sapiens
GEYTHHKDPGIYKCVVCGTPLFKSETKFDSGSGWPSFHDVINSEAITFTDDFSYGMHRVETSCSQQEGPHQMLPLNLGFPGLQN

SEQ ID NO: 9003 - protein, 117 aa, Homo Sapiens
MSAFNLLHLVTKSQPVALRACGLPSGSCRDKKNCKVVFSQQELRKRLTPLQYHVTQEKGTESAFEGEYTHHKDPGIYKCVVCGTPLFKSETKFDSGSGWPSFHDVINSEAITFTDDF

SEQ ID NO: 9004 - protein, 164 aa, Homo Sapiens
MSAFNLLHLVTKSQPVALRACGLPSGSCRDKKNCKVVFSQQELRKRLTPLQYHVTQEKGTESAFEGEYTHHKDPGIYKCVVCGTPLFKSETKFDSGSGWPSFHDVINSEAITFTDDFSYGMHRVETSCSQCGAHLGHIFDDGPRPTGKRYCINSAALSFTPADS

SEQ ID NO: 9005 - protein, 185 aa, Homo Sapiens
MSAFNLLHLVTKSQPVALRACGLPSGSCRDKKNCKVVFSQQELRKRLTPLQYHVTQEKGTESAFEGEYTHHKDPGIYKCVVCGTPLFKSETKFDSGSGWPSFHDVINSEAITFTDDFSYGMHRVETSCSQCGAHLGHIFDDGPRPTGKRYCINSAALSFTPADSSGTAEGGSGVASPAQADKAEL

SEQ ID NO: 9006 - protein, 185 aa, Homo Sapiens; identical to SEQ ID NO: 9005

SEQ ID NO: 9007 - protein, 185 aa, Homo Sapiens; identical to SEQ ID NO: 9005

SEQ ID NO: 9008 - protein, 185 aa, Homo Sapiens; identical to SEQ ID NO: 9005

SEQ ID NO: 9009 - protein, 185 aa, Homo Sapiens; identical to SEQ ID NO: 9005

SEQ ID NO: 9010 - protein, 185 aa, Homo Sapiens; identical to SEQ ID NO: 9005

SEQ ID NO: 9011 - protein, 44 aa, Homo Sapiens
MSPRRTLPRPLSLCLSLCLCLCLAAALGSAQSALAPVLCFSFCW

SEQ ID NO: 9012 - protein, 192 aa, Homo Sapiens
MSPRRTLPRPLSLCLSLCLCLCLAAALGSAQSGSCRDKKNCKVVFSQQELRKRLTPLQYHVTQEKGTESAFEGEYTHHKDPGIYKCVVCGTPLFKSETKFDSGSGWPSFHDVINSEAITFTDDFSYGMHRVETSCSQCGAHLGHIFDDGPRPTGKRYCINSAALSFTPADSSGTAEGGSGVASPAQADKAEL

SEQ ID NO: 9013 - protein, 160 aa, Homo Sapiens
MSPRRTLPRPLSLCLSLCLCLCLAAALGSAQSGSCRDKKNCKVVFSQQELRKRLTPLQYHVTQEKGTESAFEGEYTHHKDPGIYKCVVCGTPLFKSETKFDSGSGWPSFHDVINSEAITFTDDFSYGMHRVETSCSQVSSSFLKTQYIAFRTPGCAKYSN

SEQ ID NO: 9014 - protein, 117 aa, Homo Sapiens
  misc_feature (1)..(1): Xaa can be any naturally occurring amino acid
XLRKRLTPLQYHVTQEKGTESAFEGEYTHHKDPGIYKCVVCGTPLFKSETKFDSGSGWPSFHDVINSEAITFTDDFSYGMHRVETSCSQQEGPHQMLPLNLGFPGLQNCEPINFYSF

SEQ ID NO: 9015 - protein, 174 aa, Homo Sapiens
  misc_feature (1)..(1): Xaa can be any naturally occurring amino acid
XRRRLPGLSMSPRRTLPRPLSLCLSLCLCLCLAAALGSAQSGSCRDKKNCKVVFSQQELRKRLTPLQYHVTQEKGTESAFEGEYTHHKDPGIYKCVVCGTPLFKSETKFDSGSGWPSFHDVINSEAITFTDDFSYGMHRVETSCSQQEGPHQMLPLNLGFPGLQNCEPINFYSF

SEQ ID NO: 9016 - protein, 725 aa, Homo Sapiens
MGLWWVTVQPPARRMGWLPLLLLLTQCLGVPGQRSPLNDFQVLRGTELQHLLHAVVPGPWQEDVADAEECAGRCGPLMDCRAFHYNVSSHGCQLLPWTQHSPHTRLRRSGRCDLFQKKDYVRTCIMNNGVGYRGTMATTVGGLPCQAWSHKFPNDHKYTPTLRNGLEENFCRNPDGDPGGPWCYTTDPAVRFQSCGIKSCREAACVWCNGEEYRGAVDRTESGRECQRWDLQHPHQHPFEPGKFLDQGLDDNYCRNPDGSERPWCYTTDPQIEREFCDLPRCGSEAQPRQEATTVSCFRGKGEGYRGTANTTTAGVPCQRWDAQIPHQHRFTPEKYACKDLRENFCRNPDGSEAPWCFTLRPGMRAAFCYQIRRCTDDVRPQDCYHGAGEQYRGTVSKTRKGVQCQRWSAETPHKPQFTFTSEPHAQLEENFCRNPDGDSHGPWCYTMDPRTPFDYCALRRCADDQPPSILDPPDQVQFEKCGKRVDRLDQRRSKLRVVGGHPGNSPWTVSLRNRQGQHFCGGSLVKEQWILTARQCFSSCHMPLTGYEVWLGTLFQNPQHGEPSLQRVPVAKMVCGPSGSQLVLLKLERSVTLNQRVALICLPPEWYVVPPGTKCEIAGWGETKGTGNDTVLNVALLNVISNQECNIKHRGRVRESEMCTEGLLAPVGACEGDYGGPLACFTHNCWVLEGIIIPNRVCARSRWPAVFTRVSVFVDWIHKVMRLG

SEQ ID NO: 9017 - protein, 195 aa, Homo Sapiens
  misc_feature (1)..(1): Xaa can be any naturally occurring amino acid
XAGPAFLRGVSSEGAVDTDCPAVLLLLNPQHGEPSLQRVPVAKMVCGPSGSQLVLLKLERSVTLNQRVALICLPPEWYVVPPGTKCEIAGWGETKGTGNDTVLNVALLNVISNQECNIKHRGRVRESEMCTEGLLAPVGACEGDYGGPLACFTHNCWVLEGIIIPNRVCARSRWPAVFTRVSVFVDWIHKVMRLG

SEQ ID NO: 9018 - protein, 375 aa, Homo Sapiens
MQKLQLCVYIYLFMLIVAGPVDLNENSEQKENVEKEGLCNACTWRQNTKSSRIEAIKIQILSKLRLETAPNISKDVIRQLLPKAPPLRELIDQYDVQRDDSSDGSLEDDDYHATTETIITMPTESDFLMQVDGKPKCCFFKFSSKIQYNKVVKAQLWIYLRPVETPTTVFVQILRLIKPMKDGTRYTGIRSLKLDMNPGTGIWQSIDVKTVLQNWLKQPESNLGIEIKALDENGHDLAVTFPGPGEDGLNPFLEVKVTDTPKRSRRDFGLDCDEHSTESRCCRYPLTVDFEAFGWDWIIAPKRYKANYCSGECEFVFLQKYPHTHLVHQANPRGSAGPCCTPTKMSPINMLYFNGKEQIIYGKIPAMVVDRCGCS

SEQ ID NO: 9019 - protein, 62 aa, Homo Sapiens
MDPNCSCAAAGVSCTCASSCKCKECKCTSCKKSCCSCCPVGCAKCAQGCICKGASEKCSCCA

SEQ ID NO: 9020 - protein, 39 aa, Homo Sapiens
MDPNCSCAAGCCSCCPVGCAKCAQGCICKGASEKCSCCA

SEQ ID NO: 9021 - protein, 61 aa, Homo Sapiens
MDPNCSCAAGVSCTCASSCKCKECKCTSCKKSCCSCCPVGCAKCAQGCICKGASEKCSCCA

SEQ ID NO: 9022 - protein, 68 aa, Homo Sapiens
MDPNCSCAAGVSCTCASSCKCKECKCTSCKKSECGAISRNLGLWLRLGGNPRLSLSACFWGTGLPLSL

SEQ ID NO: 9023 - protein, 36 aa, Homo Sapiens
MAATSLMSALAARLLQPAHSCSLRLRPFHLAAVRAY

SEQ ID NO: 9024 - protein, 267 aa, Homo Sapiens
MAATSLMSALAARLLQPAHSCSLRLRPFHLAAVRNEAVVISGRKLAQQIKQEVRQEVEEWVASGNKRPHLSVILVGENPASHSYVLNKTRAAAVVEHIDERRICNAVSPDKDVDGFHVINVGRMCLDQYSMLPATPWGVWEIIKRTGIPTLGKNVVVAGRSKNVGMPIAMLLHTDGAHERPGGDATVTISHRYTPKEQLKKHTILADIVISAAGVRQKAGYITPVPGGVGPMTVAMLMKNTIIAAKKVLRLEEREVLKSKELGVATN

SEQ ID NO: 9025 - protein, 222 aa, Homo Sapiens
MAATSLMSALAARLLQPAHSCSLRLRPFHLAAVRNEAVVISGRKLAQQIKQEVRQEVEEWVASGNKRPHLSVILVGENPASHSYVLNKTRAAAVVGDATVTISHRYTPKEQLKKHTILADIVISAAGIPNLITADMIKEGAAVIDVGINRVHDPVTAKPKLVGDVDFEGVRQKAGYITPVPGGVGPMTVAMLMKNTIIAAKKVLRLEEREVLKSKELGVATN

SEQ ID NO: 9026 - protein, 350 aa, Homo Sapiens
MAATSLMSALAARLLQPAHSCSLRLRPFHLAAVRNEAVVISGRKLAQQIKQEVRQEVEEWVASGNKRPHLSVILVGENPASHSYVLNKTRAAAVVGINSETIMKPASISEEELLNLINKLNNDDNVDGLLVQLPLPEHIDERRICNAVSPDKDVDGFHVINVGRMCLDQYSMLPATPWGVWEIIKRTGIPTLGKNVVVAGRSKNVGMPIAMLLHTDGAHERPGGDATVTISHRYTPKEQLKKHTILADIVISAAGIPNLITADMIKEGAAVIDVGINRVHDPVTAKPKLVGDVDFEGVRQKAGYITPVPGGVGPMTVAMLMKNTIIAAKKVLRLEEREVLKSKELGVATN

SEQ ID NO: 9027 - protein, 37 aa, Homo Sapiens
MAATSLMSALAARLLQPAHSCSLRLRPFHLAAVRNQQ

SEQ ID NO: 9028 - protein, 292 aa, Homo Sapiens
MAGARAAAAAASAGSSASSGNQPPQELGLGELLEEFSRTQYRAKDGSGTGGSKCWDLVQQTQNYLKLLLSLVNSDDDSGLLVHCISGWDRTPLFISLLRLSLWADGLIHTSLKPTEILYLTVAYDWFLFGHMLVDRLSKGEEIFFFCFNFLKHITSEEFSALKTQRRKSLPARDGGFTLEDICMLRRKDRGSTTSLGSDFSLVMESSPGATGSFTYEAVELVPAGAPTQAAWLAALSDRETRLQEVRSAFLAAYSSTVGLRAVAPSPSGAIGGLLEQFARGVGLRSISSNAL

SEQ ID NO: 9029 - protein, 71 aa, Homo Sapiens
MAGARAAAAAASAGSSASSGNQPPQELGLGELLEEFSRTQYRAKDGSGTGGSKSSYRQTWRASCQLRPSPP

SEQ ID NO: 9030 - protein, 158 aa, Homo Sapiens
MAGARAAAAAASAGSSASSGNQPPQELGLGELLEEFSRTQYRAKDGSGTGGSKVERIEKRCLELFGRDYCFSVIPNTNGDICGHYPRHIVFLEYESSEKEKDTFESTVQGVQMMPGQMWRTSRRRTVLFEVVTRIFLIRSEAMTSSCFDTCQSNTSVT

SEQ ID NO: 9031 - protein, 188 aa, Homo Sapiens
MAGARAAAAAASAGSSASSGNQPPQELGLGELLEEFSRTQYRAKDGSGTGGSKVERIEKRCLELFGRDYCFSVIPNTNGDICGHYPRHIVFLEYESSEKEKDTFESTVQVSKLQDLIHRSKMARCRGRFVCPVILFKGKGVQMMPGQMWRTSRRRTVLFEVVTRIFLIRSEAMTSSCFDTCQSNTSVT

SEQ ID NO: 9032 - protein, 650 aa, Homo Sapiens
MAGARAAAAAASAGSSASSGNQPPQELGLGELLEEFSRTQYRAKDGSGTGGSKVERIEKRCLELFGRDYCFSVIPNTNGDICGHYPRHIVFLEYESSEKEKDTFESTVQVSKLQDLIHRSKMARCRGRFVCPVILFKGKHICRSATLAGWGELYGRSGYNYFFSGGADDAWADVEDVTEEDCALRSGDTHLFDKVRGYDIKLLRYLSVKYICDLMVENKKVKFGMNVTSSEKVDKAQRYADFTLLSIPYPGCEFFKEYKDRDYMAEGLIFNWKQDYVDAPLSIPDFLTHSLNIDWSQYQCWDLVQQTQNYLKLLLSLVNSDDDSGLLVHCISGWDRTPLFISLLRLSLWADGLIHTSLKPTEILYLTVAYDWFLFGHMLVDRLSKGEEIFFFCFNFLKHITSEEFSALKTQRRKSLPARDGGFTLEDICMLRRKDRGSTTSLGSDFSLVMESSPGATGSFTYEAVELVPAGAPTQAAWRKSHSSSPQSVLWNRPQPSEDRLPSQQGLAEARSSSSSSSNHSDNFFRMGSSPLEVPKPRSVDHPLPGSSLSTDYGSWQMVTGCGSIQERAVLHTDSSLPFSFPDELPNSCLLAALSDRETRLQEVRSAFLAAYSSTVGLRAVAPSPSGAIGGLLEQFARGVGLRSISSNAL

SEQ ID NO: 9033 - protein, 598 aa, Homo Sapiens
MAGARAAAAAASAGSSASSGNQPPQELGLGELLEEFSRTQYRAKDGSGTGGSKVERIEKRCLELFGRDYCFSVIPNTNGDICGHYPRHIVFLEYESSEKEKDTFESTVQVSKLQDLIHRSKMARCRGRFVCPVILFKGKHICRSATLAGWGELYGRSGYNYFFSGGADDAWADVEDVTEEDCALRSGDTHLFDKVRGYDIKLLRYLSVKYICDLMVENKKVKFGMNVTSSEKVDKAQRYADFTLLSIPYPGCEFFKEYKDRDYMAEGLIFNWKQDYVDAPLSIPDFLTHSLNIDWSQYQCWDLVQQTQNYLKLLLSLVNSDDDSGLLVHCISGWDRTPLFISLLRLSLWADGLIHTSLKPTEILYLTVAYDWFLFGHMLVDRLSKGEEIFFFCFNFLKHITSEEFSALKTQRRKSLPARDGGFTLEDICMLRRKDRGSTTSLGSDFSLVMESSPGATGSFTYEAVELVPAGAPTQAAWRKSHSSSPQSVLWNRPQPSEDRLPSQQGLAEARSSSSSSSNHSDNFFRMGSSPLEVPKPRLAALSDRETRLQEVRSAFLAAYSSTVGLRAVAPSPSGAIGGLLEQFARGVGLRSISSNAL

SEQ ID NO: 9034 - protein, 538 aa, Homo Sapiens
MAGARAAAAAASAGSSASSGNQPPQELGLGELLEEFSRTQYRAKDGSGTGGSKVERIEKRCLELFGRDYCFSVIPNTNGDICGHYPRHIVFLEYESSEKEKDTFESTVQVSKLQDLIHRSKMARCRGRFVCPVILFKGKHICRSATLAGWGELYGRSGYNYFFSGGADDAWADVEDVTEEDCALRSGDTHLFDKVRGYDIKLLRYLSVKYICDLMVENKKVKFGMNVTSSEKVDKAQRYADFTLLSIPYPGCEFFKEYKDRDYMAEGLIFNWKQDYVDAPLSIPDFLTHSLNIDWSQYQCWDLVQQTQNYLKLLLSLVNSDDDSGLLVHCISGWDRTPLFISLLRLSLWADGLIHTSLKPTEILYLTVAYDWFLFGHMLVDRLSKGEEIFFFCFNFLKHITSEEFSALKTQRRKSLPARDGGFTLEDICMLRRKDRGSTTSLGSDFSLVMESSPGATGSFTYEAVELVPAGAPTQAAWLAALSDRETRLQEVRSAFLAAYSSTVGLRAVAPSPSGAIGGLLEQFARGVGLRSISSNAL

SEQ ID NO: 9035 - protein, 187 aa, Homo Sapiens
MAGARAAAAAASAGSSASSGNQPPQELGLGELLEEFSRTQYRAKDGSGTGGSKVERIEKRCLELFGRDYCFSVIPNTNGDICGHYPRHIVFLEYESSEKEKDTSGDTHLFDKVRGYDIKLLRYLSVKYICDLMVENKKVKFGMNVTSSEKVDKAQRYADFTLLSIPYPVLGSGATNTKLPEAAAFLS

SEQ ID NO: 9036 - protein, 154 aa, Homo Sapiens
MALLILLLVPLLLPDSGSEAYSGCEFFKEYKDRDYMAEGLIFNWKQDYVDAPLSIPDFLTHSLNIDWSQYQCWDLVQQTQNYLKLLLSLVNSDDDSGLLVHCISGWDRTPLFISLLRLSLWADGLIHTSLKPTEILYLTVAYDWFLFGHMLVDR

SEQ ID NO: 9037 - protein, 60 aa, Homo Sapiens
MDAQATTIFSQGVQMMPGQMWRTSRRRTVLFEVVTRIFLIRSEAMTSSCFDTCQSNTSVT

SEQ ID NO: 9038 - protein, 36 aa, Homo Sapiens
MSHCAWPETELELDVGEPVKEPLADLTRKGLRVPYR

SEQ ID NO: 9039 - protein, 24 aa, Homo Sapiens
MATRGFSCLLLVISEIDLSVKRWV

SEQ ID NO: 9040 - protein, 725 aa, Homo Sapiens
MGAASVRAGARLVEVALCSFTVTCLEVMRRFLLLYATQQGQAKAIAEEICEQAVVHGFSADLHCISESDKYDLKTETAPLVVVVSTTGTGDPPDTARKFVKEIQNQTLPVDFFAHLRYGLLGLGDSEYTYFCNGGKIIDKRLQELGARHFYDTGHADDCVGLELVVEPWIAGLWPALRKHFRSSRGQEEISGALPVASPASSRTDLVKSELLHIESQVELLRFDDSGRKDSEVLKQNAVNSNQSNVVIEDFESSLTRSVPPLSQASLNIPGLPPEYLQVHLQESLGQEESQVSVTSADPVFQVPISKAVQLTTNDAIKTTLLVELDISNTDFSYQPGDAFSVICPNSDSEVQSLLQRLQLEDKREHCVLLKIKADTKKKGATLPQHIPAGCSLQFIFTWCLEIRAIPKKAFLRALVDYTSDSAEKRRLQELCSKQGAADYSRFVRDACACLLDLLLAFPSCQPPLSLLLEHLPKLQPRPYSCASSSLFHPGKLHFVFNIVEFLSTATTEVLRKGVCTGWLALLVASVLQPNIHASHEDSGKALAPKISISPRTTNSFHLPDDPSIPIIMVGPGTGIAPFIGFLQHREKLQEQHPDGNFGAMWLFFGCRHKDRDYLFRKELRHFLKHGILTHLKVSFSRDAPVGEEEAPAKYVQDNIQLHGQQVARILLQENGHIYVCGDAKNMAKDVHDALVQIISKEVGVEKLEAMKTLATLKEEKRYLQDIWS

SEQ ID NO: 9041 - protein, 41 aa, Homo Sapiens
MRRFLLLYATQQGQAKAIAEEICEQAVVHGFSADLHCISES

SEQ ID NO: 9042 - protein, 46 aa, Homo Sapiens
MRRFLLLYATQQGQAKAIAEEICEQAVVHGFSADLHCISESDKCEK

SEQ ID NO: 9043 - protein, 58 aa, Homo Sapiens
MRRFLLLYATQQGQAKAIAEEICEQAVVHGFSADLHCISESDKVSVIQNTPTFAMGGR

SEQ ID NO: 9044 - protein, 58 aa, Homo Sapiens; identical to SEQ ID NO: 9043

SEQ ID NO: 9045 - protein, 92 aa, Homo Sapiens
MRRFLLLYATQQGQAKAIAEEICEQAVVHGFSADLHCISESDKYDLKTETAPLVVVVSTTGTGDPPDTARKFVKEIQNQTLPVDFFAHLRSR

SEQ ID NO: 9046 - protein, 112 aa, Homo Sapiens
MRRFLLLYATQQGQAKAIAEEICEQAVVHGFSADLHCISESDKYDLKTETAPLVVVVSTTGTGDPPDTARKFVKEIQNQTLPVDFFAHLRYGLLGLGDSEYTYFCNGGKIID

SEQ ID NO: 9047 - protein, 156 aa, Homo Sapiens
MRRFLLLYATQQGQAKAIAEEICEQAVVHGFSADLHCISESDKYDLKTETAPLVVVVSTTGTGDPPDTARKFVKEIQNQTLPVDFFAHLRYGLLGLGDSEYTYFCNGGKIIDKRLQELGARHFYDTGHADDCVGLELVVEPWIAGLWPALRKHFRS

SEQ ID NO: 9048 - protein, 698 aa, Homo Sapiens
MRRFLLLYATQQGQAKAIAEEICEQAVVHGFSADLHCISESDKYDLKTETAPLVVVVSTTGTGDPPDTARKFVKEIQNQTLPVDFFAHLRYGLLGLGDSEYTYFCNGGKIIDKRLQELGARHFYDTGHADDCVGLELVVEPWIAGLWPALRKHFRSSRGQEEISGALPVASPASSRTDLVKSELLHIESQVELLRFDDSGRKDSEVLKQNAVNSNQSNVVIEDFESSLTRSVPPLSQASLNIPGLPPEYLQVHLQESLGQEESQVSVTSADPVFQVPISKAVQLTTNDAIKTTLLVELDISNTDFSYQPGDAFSVICPNSDSEVQSLLQRLQLEDKREHCVLLKIKADTKKKGATLPQHIPAGCSLQFIFTWCLEIRAIPKKAFLRALVDYTSDSAEKRRLQELCSKQGAADYSRFVRDACACLLDLLLAFPSCQPPLSLLLEHLPKLQPRPYSCASSSLFHPGKLHFVFNIVEFLSTATTEVLRKGVCTGWLALLVASVLQPNIHASHEDSGKALAPKISISPRTTNSFHLPDDPSIPIIMVGPGTGIAPFIGFLQHREKLQEQHPDGNFGAMWLFFGCRHKDRDYLFRKELRHFLKHGILTHLKVSFSRDAPVGEEEAPAKYVQDNIQLHGQQVARILLQENGHIYVCGDAKNMAKDVHDALVQIISKEVGVEKLEAMKTLATLKEEKRYLQDIWS

SEQ ID NO: 9049 - protein, 372 aa, Homo Sapiens
  misc_feature (1)..(1): Xaa can be any naturally occurring amino acid
XFTVTCLEVMRRFLLLYATQQGQAKAIAEEICEQAVVHGFSADLHCISESDKYDLKTETAPLVVVVSTTGTGDPPDTARKFVKEIQNQTLPVDFFAHLRYGLLGLGDSEYTYFCNGGKIIDKRLQELGARHFYDTGHADDCVGLELVVEPWIAGLWPALRKHFRSSRGQEEISGALPVASPASSRTDLVKSELLHIESQVELLRFDDSGRKDSEVLKQNAVNSNQSNVVIEDFESSLTRSVPPLSQASLNIPGLPPEYLQVHLQESLGQEESQVSVTSADPVFQVPISKAVQLTTNDAIKTTLLVELDISNTDFSYQPGDAFSVICPNSDSEVQSLLQRLQLEDKREHCVLLKIKADTKKKGIFASPCGLYQ

SEQ ID NO: 9050 - protein, 160 aa, Homo Sapiens
  misc_feature (1)..(1): Xaa can be any naturally occurring amino acid
XVRAGARLVEVALCRFVPGWRGVGLGDSEYTYFCNGGKIIDKRLQELGARHFYDTGHADDCVGLELVVEPWIAGLWPALRKHFRSSRGQEEISGALPVASPASSRTDLVKSELLHIESQVELLRFDDSGRKDSEVLKQNAVNSNQSNVVIEDFESSLTRS

SEQ ID NO: 9051 - protein, 81 aa, Homo Sapiens
  misc_feature (1)..(1): Xaa can be any naturally occurring amino acid
XVRAGARLVEVALCSFTVTCLEVMRRFLLLYATQQGQAKAIAEEICEQAVVHGFSADLHCISESDKVSVIQNTPTFAMGGR

SEQ ID NO: 9052 - protein, 115 aa, Homo Sapiens
  misc_feature (1)..(1): Xaa can be any naturally occurring amino acid
XVRAGARLVEVALCSFTVTCLEVMRRFLLLYATQQGQAKAIAEEICEQAVVHGFSADLHCISESDKYDLKTETAPLVVVVSTTGTGDPPDTARKFVKEIQNQTLPVDFFAHLRSR

SEQ ID NO: 9053 - protein, 178 aa, Homo Sapiens
MARAPLRPENTIVRGSANQCQDTYRAEELTGHTTGLSLNNDRLYKLTYSTEVLLDRGKGKLQDSVGYRISSNVDVALLWRNPDGDDDQLIQITMKDVNVENVNQQRGEKSIFKGKSPSKIMGKENLEALQRPTLLHLIHGKVKEFYSYQNEAVAIENIKRGLASLFQTQLSSGTTNEV

SEQ ID NO: 9054 - protein, 55 aa, Homo Sapiens
MARAPLRPENTIVRGSANQCQDTYRAEELTGRPSIITRIHKTEEGDRRDGQSDMK

SEQ ID NO: 9055 - protein, 42 aa, Homo Sapiens
MARAPLRPENTIVRGSANQCQDTYRAEELTGSEEGHSLTGCH

SEQ ID NO: 9056 - protein, 56 aa, Homo Sapiens
MEERGGVYAGRGLELVFWEWEVVTVMSVFSRSRIKCVPADVYSFIYSCEYWMKELR

SEQ ID NO: 9057 - protein, 921 aa, Homo Sapiens
MEERGGVYAGRGLELVFWEWEVVTVMSVFSRSRIKCVPADVYSFIYSCHTTGLSLNNDRLYKLTYSTEVLLDRGKGKLQDSVGYRISSNVDVALLWRNPDGDDDQLIQITMKDVNVENVNQQRGEKSIFKGKSPSKIMGKENLEALQRPTLLHLIHGKVKEFYSYQNEAVAIENIKRGLASLFQTQLSSGTTNEVDISGNCKVTYQAHQDKVIKIKALDSCKIARSGFTTPNQVLGVSSKATSVTTYKIEDSFVIAVLAEETHNFGLNFLQTIKGKIVSKQKLELKTTEAGPRLMSGKQAAAIIKAVDSKYTAIPIVGQVFQSHCKGCPSLSELWRSTRKYLQPDNLSKAEAVRNFLAFIQHLRTAKKEEILQILKMENKEVLPQLVDAVTSAQTSDSLEAILDFLDFKSDSSIILQERFLYACGFASHPNEELLRALISKFKGSIGSSDIRETVMIITGTLVRKLCQNEGCKLKAVVEAKKLILGGLEKAEKKEDTRMYLLALKNALLPEGIPSLLKYAEAGEGPISHLATTALQRYDLPFITDEVKKTLNRIYHQNRKVHEKTVRTAAAAIILNNNPSYMDVKNILLSIGELPQEMNKYMLAIVQDILRFEMPASKIVRRVLKEMVAHNYDRFSRSGSSSAYTGYIERSPRSASTYSLDILYSGSGILRRSNLNIFQYIGKAGLHGSQVVIEAQGLEALIAATPDEGEENLDSYAGMSAILFDVQLRPVTFFNGYSDLMSKMLSASGDPISVVKGLILLIDHSQELQLQSGLKANIEVQGGLAIDISGAMEFSLWYRESKTRVKNRVTVVITTDITVDSSFVKAGLETSTETEAGLEFISTVQFSQYPFLVCMQMDKDEAPFRQFEKKYERLSTGRGYVSQKRKESVLAGCEFPLHQENSEMCKVVFAPQPDSTSSGWF

SEQ ID NO: 9058 - protein, 50 aa, Homo Sapiens
MEERGGVYAGRGLELVFWEWEVVTVMSVFSRSRIKCVPADVYSFIYSCPV

SEQ ID NO: 9059 - protein, 72 aa, Homo Sapiens
MEERGGVYAGRGLELVFWEWEVVTVMSVFSRSRIKCVPADVYSFIYSCRPSIITRIHKTEEGDRRDGQSDMK

SEQ ID NO: 9060 - protein, 59 aa, Homo Sapiens
MEERGGVYAGRGLELVFWEWEVVTVMSVFSRSRIKCVPADVYSFIYSCSEEGHSLTGCH

SEQ ID NO: 9061 - protein, 894 aa, Homo Sapiens
MILLAVLFLCFISSYSASVKGHTTGLSLNNDRLYKLTYSTEVLLDRGKGKLQDSVGYRISSNVDVALLWRNPDGDDDQLIQITMKDVNVENVNQQRGEKSIFKGKSPSKIMGKENLEALQRPTLLHLIHGKVKEFYSYQNEAVAIENIKRGLASLFQTQLSSGTTNEVDISGNCKVTYQAHQDKVIKIKALDSCKIARSGFTTPNQVLGVSSKATSVTTYKIEDSFVIAVLAEETHNFGLNFLQTIKGKIVSKQKLELKTTEAGPRLMSGKQAAAIIKAVDSKYTAIPIVGQVFQSHCKGCPSLSELWRSTRKYLQPDNLSKAEAVRNFLAFIQHLRTAKKEEILQILKMENKEVLPQLVDAVTSAQTSDSLEAILDFLDFKSDSSIILQERFLYACGFASHPNEELLRALISKFKGSIGSSDIRETVMIITGTLVRKLCQNEGCKLKAVVEAKKLILGGLEKAEKKEDTRMYLLALKNALLPEGIPSLLKYAEAGEGPISHLATTALQRYDLPFITDEVKKTLNRIYHQNRKVHEKTVRTAAAAIILNNNPSYMDVKNILLSIGELPQEMNKYMLAIVQDILRFEMPASKIVRRVLKEMVAHNYDRFSRSGSSSAYTGYIERSPRSASTYSLDILYSGSGILRRSNLNIFQYIGKAGLHGSQVVIEAQGLEALIAATPDEGEENLDSYAGMSAILFDVQLRPVTFFNGYSDLMSKMLSASGDPISVVKGLILLIDHSQELQLQSGLKANIEVQGGLAIDISGAMEFSLWYRESKTRVKNRVTVVITTDITVDSSFVKAGLETSTETEAGLEFISTVQFSQYPFLVCMQMDKDEAPFRQFEKKYERLSTGRGYVSQKRKESVLAGCEFPLHQENSEMCKVVFAPQPDSTSSGWF

SEQ ID NO: 9062 - protein, 894 aa, Homo Sapiens; identical to SEQ ID NO: 9061

SEQ ID NO: 9063 - protein, 151 aa, Homo Sapiens
MILLAVLFLCFISSYSASVKGHTTGLSLNNDRLYKLTYSTEVLLDRGKGKLQDSVGYRISSNVDVALLWRNPDGDDDQLIQITMKDVNVENVNQQRGEKSIFKGKSPSKIMGKENLEALQRPTLLHLIHGKVKGRLDSTTFSPTSYFSSLQ

SEQ ID NO: 9064 - protein, 45 aa, Homo Sapiens
MSLVAEAFVSQIAAAEPWPENATLYQQLKGEQILLSDNAASLAVQ

SEQ ID NO: 9065 - protein, 263 aa, Homo Sapiens
MSLVAEAFVSQIAAAEPWPENATLYQQLKGEQILLSDNAASLAVQAFLQMCNLPIKVVCRANAEYMSPSGKVPFIHVGNQVVSELGPIVQFVKAKGHSLSDGLEEVQKAEMKAYMELVNNMLLTAELYLQWCDEATVGEITHARYGSPYPWPLNHILAYQKQWEVKRKMKAIGWGKKTLDQVLEDVDQCCQALSQRLGTQPYFFNKQPTELDALVFGHLYTILTTQLTNDELSEKVKNYSNLLAFCRRIEQHYFEDRGKGRLS

SEQ ID NO: 9066 - protein, 229 aa, Homo Sapiens
MSLVAEAFVSQIAAAEPWPENATLYQQLKGEQILLSDNAASLAVQAFLQMCNLPIKVVCRANAEYMSPSGKVPFIHVGNQVVSELGPIVQFVKAKGHSLSDGLEEVQKAEMKAYMELVNNMLLTAELYLQWCDEATVGEWEVKRKMKAIGWGKKTLDQVLEDVDQCCQALSQRLGTQPYFFNKQPTELDALVFGHLYTILTTQLTNDELSEKVKNYSNLLAFCRRIEQH

SEQ ID NO: 9067 - protein, 207 aa, Homo Sapiens
MSLVAEAFVSQIAGKVPFIHVGNQVVSELGPIVQFVKAKGHSLSDGLEEVQKAEMKAYMELVNNMLLTAELYLQWCDEATVGEITHARYGSPYPWPLNHILAYQKQWEVKRKMKAIGWGKKTLDQVLEDVDQCCQALSQRLGTQPYFFNKQPTELDALVFGHLYTILTTQLTNDELSEKVKNYSNLLAFCRRIEQHYFEDRGKGRLS

SEQ ID NO: 9068 - protein, 37 aa, Homo Sapiens
MSLVAEAFVSQIAGWSAVAQPGLTATSASRVQAILLP

SEQ ID NO: 9069 - protein, 228 aa, Homo Sapiens
ASSTHHSTVPPLTSSNHSTSPQLSTGVSFFFLSFHISNLQFNSSLEDPSTDYYQELQRDISEMFLQIYKQGGFLGLSNIKFRPGSVVVQLTLAFREGTINVHDVETQFNQYKTEAASRYNLTISDVSVSDVPFPFSAQSGAGVPGWGIALLVLVCVLVALAIVYLIALAVCQCRRKNYGQLDIFPARDTYHPMSEYPTYHTHGRYVPPSSTDRSPYEKEWRVDRERLA

SEQ ID NO: 9070 - protein, 135 aa, Homo Sapiens
MTPGTQSPFFLLLLLTVLTATTAPKPATVVTGSGHASSTPGGEKETSATQRSSVPSSTEKNAALHQAQLLLWCTTAPLPGLPQPQPARALHSQFPATTLILLPPLPAIAPRLMPVALTIARSQHRLLPRAAERHF

SEQ ID NO: 9071 - protein, 241 aa, Homo Sapiens
MTPGTQSPFFLLLLLTVLTATTAPKPATVVTGSGHASSTPGGEKETSATQRSSVPSSTEKNAFLQIYKQGGFLGLSNIKFRPGSVVVQLTLAFREGTINVHDVETQFNQYKTEAASRYNLTISDVSVSDVPFPFSAQSGAGVPGWGIALLVLVCVLVALAIVYLIALAVCQCRRKNYGQLDIFPARDTYHPMSEYPTYHTHGRYVPPSSTDRSPYEKVSAGNGGSSLSYTNPAVAATSANL

SEQ ID NO: 9072 - protein, 159 aa, Homo Sapiens
MTPGTQSPFFLLLLLTVLTATTAPKPATVVTGSGHASSTPGGEKETSATQRSSVPSSTEKNAFNSSLEDPSTDYYQELQRDISEMAVCQCRRKNYGQLDIFPARDTYHPMSEYPTYHTHGRYVPPSSTDRSPYEKVSAGNGGSSLSYTNPAVAATSANL

SEQ ID NO: 9073 - protein, 264 aa, Homo Sapiens
MTPGTQSPFFLLLLLTVLTATTAPKPATVVTGSGHASSTPGGEKETSATQRSSVPSSTEKNAFNSSLEDPSTDYYQELQRDISEMFLQIYKQGGFLGLSNIKFRPGSVVVQLTLAFREGTINVHDVETQFNQYKTEAASRYNLTISDVSVSDVPFPFSAQSGAGVPGWGIALLVLVCVLVALAIVYLIALAVCQCRRKNYGQLDIFPARDTYHPMSEYPTYHTHGRYVPPSSTDRSPYEKVSAGNGGSSLSYTNPAVAATSANL

SEQ ID NO: 9074 - protein, 189 aa, Homo Sapiens
MTPGTQSPFFLLLLLTVLTATTAPKPATVVTGSGHASSTPGGEKETSATQRSSVPSSTEKNAFNSSLEDPSTDYYQELQRDISEMSGAGVPGWGIALLVLVCVLVALAIVYLIALAVCQCRRKNYGQLDIFPARDTYHPMSEYPTYHTHGRYVPPSSTDRSPYEKVSAGNGGSSLSYTNPAVAATSANL

SEQ ID NO: 9075 - protein, 80 aa, Homo Sapiens
MTPGTQSPFFLLLLLTVLTATTAPKPATVVTGSGHASSTPGGEKETSATQRSSVPSSTEKNAIPAPTTTKSCRETFLKCE

SEQ ID NO: 9076 - protein, 239 aa, Homo Sapiens
MTPGTQSPFFLLLLLTVLTATTAPKPATVVTGSGHASSTPGGEKETSATQRSSVPSSTEKNAIPAPTTTKSCRETFLKWPGSVVVQLTLAFREGTINVHDVETQFNQYKTEAASRYNLTISDVSVSDVPFPFSAQSGAGVPGWGIALLVLVCVLVALAIVYLIALAVCQCRRKNYGQLDIFPARDTYHPMSEYPTYHTHGRYVPPSSTDRSPYEKVSAGNGGSSLSYTNPAVAATSANL

SEQ ID NO: 9077 - protein, 268 aa, Homo Sapiens
MTPGTQSPFFLLLLLTVLTATTAPKPATVVTGSGHASSTPGGEKETSATQRSSVPSSTEKNALSTGVSFFFLSFHISNLQFNSSLEDPSTDYYQELQRDISEMFLQIYKQGGFLGLSNIKFRPGSVVVQLTLAFREGTINVHDVETQFNQYKTEAASRYNLTISDVSVSDVPFPFSAQSGAGVPGWGIALLVLVCVLVALAIVYLIALAVCQCRRKNYGQLDIFPARDTYHPMSEYPTYHTHGRYVPPSSTDRSPYEKEWRVDRERLA

SEQ ID NO: 9078 - protein, 123 aa, Homo Sapiens
MTPGTQSPFFLLLLLTVLTATTAPKPATVVTGSGHASSTPGGEKETSATQRSSVPSSTEKNALSTGVSFFFLSFHISNLQFNSSLEDPSTDYYQELQRDISEMFLQIYKQGGFLGLSNIKFSE

SEQ ID NO: 9079 - protein, 166 aa, Homo Sapiens
MTPGTQSPFFLLLLLTVLTATTAPKPATVVTGSGHASSTPGGEKETSATQRSSVPSSTEKNASGAGVPGWGIALLVLVCVLVALAIVYLIALAVCQCRRKNYGQLDIFPARDTYHPMSEYPTYHTHGRYVPPSSTDRSPYEKVSAGNGGSSLSYTNPAVAATSANL

SEQ ID NO: 9080 - protein, 484 aa, Homo Sapiens
MTPGTQSPFFLLLLLTVLTATTAPKPATVVTGSGHASSTPGGEKETSATQRSSVPSSTEKNAVSMTSSVLSSHSPGSGSSTTQGQDVTLAPATEPASGSAATWGQDVTSVPVTRPALGSTTPPAHDVTSAPDNKPAPGSTAPPAHGVTSAPDTRPAPGSTAPPAHGVTSAPDNRPALGSTAPPVHNVTSASGSASGSASTLVHNGTSARATTTPASKSTPFSIPSHHSDTPTTLASHSTKTDASSTHHSTVPPLTSSNHSTSPQLSTGVSFFFLSFHISNLQFNSSLEDPSTDYYQELQRDISEMFLQIYKQGGFLGLSNIKFRPGSVVVQLTLAFREGTINVHDVETQFNQYKTEAASRYNLTISDVSVSDVPFPFSAQSGAGVPGWGIALLVLVCVLVALAIVYLIALAVCQCRRKNYGQLDIFPARDTYHPMSEYPTYHTHGRYVPPSSTDRSPYEKVSAGNGGSSLSYTNPAVAATSANL

SEQ ID NO: 9081 - protein, 213 aa, Homo Sapiens
MTPGTQSPFFLLLLLTVLTGSGHASSTPGGEKETSATQRSSVPSSTEKNAVSMTSSVLSSHSPGSGSSTTQGQDVTLAPATEPASGSAATWGQDVTSVPVTRPALGSTTPPAGVPGWGIALLVLVCVLVALAIVYLIALAVCQCRRKNYGQLDIFPARDTYHPMSEYPTYHTHGRYVPPSSTDRSPYEKVSAGNGGSSLSYTNPAVAATSANL

SEQ ID NO: 9082 - protein, 126 aa, Homo Sapiens
MTPGTQSPFFLLLLLTVLTVVTGSGHASSTPGGEKETSATQRSSVPSSTEKNAALHQAQLLLWCTTAPLPGLPQPQPARALHSQFPATTLILLPPLPAIAPRLMPVALTIARSQHRLLPRAAERHF

SEQ ID NO: 9083 - protein, 255 aa, Homo Sapiens
MTPGTQSPFFLLLLLTVLTVVTGSGHASSTPGGEKETSATQRSSVPSSTEKNAFNSSLEDPSTDYYQELQRDISEMFLQIYKQGGFLGLSNIKFRPGSVVVQLTLAFREGTINVHDVETQFNQYKTEAASRYNLTISDVSVSDVPFPFSAQSGAGVPGWGIALLVLVCVLVALAIVYLIALAVCQCRRKNYGQLDIFPARDTYHPMSEYPTYHTHGRYVPPSSTDRSPYEKVSAGNGGSSLSYTNPAVAATSANL

SEQ ID NO: 9084 - protein, 96 aa, Homo Sapiens
MTPGTQSPFFLLLLLTVLTVVTGSGHASSTPGGEKETSATQRSSVPSSTEKNAFNSSLEDPSTDYYQELQRDISEMFLQIYKQGGFLGLSNIKFSE

SEQ ID NO: 9085 - protein, 149 aa, Homo Sapiens
MTPGTQSPFFLLLLLTVLTVVTGSGHASSTPGGEKETSATQRSSVPSSTEKNAFNSSLEDPSTDYYQELQRDISEMFLQIYKQGGFLGLSNIKFSLGLGCQAGASRCWCWSVFWLRWPLSISLPWLSVSAAERTTGSWTSFQPGIPTIL

SEQ ID NO: 9086 - protein, 203 aa, Homo Sapiens
MTPGTQSPFFLLLLLTVLTVVTGSGHASSTPGGEKETSATQRSSVPSSTEKNAIPAPTTTKSCRETFLKCFCRFINKGVFWASPILSSVSDVPFPFSAQSGAGVPGWGIALLVLVCVLVALAIVYLIALAVCQCRRKNYGQLDIFPARDTYHPMSEYPTYHTHGRYVPPSSTDRSPYEKVSAGNGGSSLSYTNPAVAATSANL

SEQ ID NO: 9087 - protein, 230 aa, Homo Sapiens
MTPGTQSPFFLLLLLTVLTVVTGSGHASSTPGGEKETSATQRSSVPSSTEKNAIPAPTTTKSCRETFLKWPGSVVVQLTLAFREGTINVHDVETQFNQYKTEAASRYNLTISDVSVSDVPFPFSAQSGAGVPGWGIALLVLVCVLVALAIVYLIALAVCQCRRKNYGQLDIFPARDTYHPMSEYPTYHTHGRYVPPSSTDRSPYEKVSAGNGGSSLSYTNPAVAATSANL

SEQ ID NO: 9088 - protein, 229 aa, Homo Sapiens
MTPGTQSPFFLLLLLTVLTVVTGSGHASSTPGGEKETSATQRSSVPSSTEKNAIYKQGGFLGLSNIKFRPGSVVVQLTLAFREGTINVHDVETQFNQYKTEAASRYNLTISDVSVSDVPFPFSAQSGAGVPGWGIALLVLVCVLVALAIVYLIALAVCQCRRKNYGQLDIFPARDTYHPMSEYPTYHTHGRYVPPSSTDRSPYEKVSAGNGGSSLSYTNPAVAATSANL

SEQ ID NO: 9089 - protein, 168 aa, Homo Sapiens
MTPGTQSPFFLLLLLTVLTVVTGSGHASSTPGGEKETSATQRSSVPSSTEKNALSTGVSFFFLSFHISNLQFNSSLEDPSTDYYQELQRDISEMAVCQCRRKNYGQLDIFPARDTYHPMSEYPTYHTHGRYVPPSSTDRSPYEKVSAGNGGSSLSYTNPAVAATSANL

SEQ ID NO: 9090 - protein, 198 aa, Homo Sapiens
MTPGTQSPFFLLLLLTVLTVVTGSGHASSTPGGEKETSATQRSSVPSSTEKNALSTGVSFFFLSFHISNLQFNSSLEDPSTDYYQELQRDISEMFLQIYKQGGFLGLSNIKFRPGSVVVQLTLAFREGTINVHDVETQFNQYKTEAASRYNLTISDVSGCLSVPPKELRAAGHLSSPGYLPSYERVPHLPHPWALCAP

SEQ ID NO: 9091 - protein, 273 aa, Homo Sapiens
MTPGTQSPFFLLLLLTVLTVVTGSGHASSTPGGEKETSATQRSSVPSSTEKNALSTGVSFFFLSFHISNLQFNSSLEDPSTDYYQELQRDISEMFLQIYKQGGFLGLSNIKFRPGSVVVQLTLAFREGTINVHDVETQFNQYKTEAASRYNLTISDVSVSDVPFPFSAQSGAGVPGWGIALLVLVCVLVALAIVYLIALAVCQCRRKNYGQLDIFPARDTYHPMSEYPTYHTHGRYVPPSSTDRSPYEKVSAGNGGSSLSYTNPAVAATSANL

SEQ ID NO: 9092 - protein, 475 aa, Homo Sapiens
MTPGTQSPFFLLLLLTVLTVVTGSGHASSTPGGEKETSATQRSSVPSSTEKNAVSMTSSVLSSHSPGSGSSTTQGQDVTLAPATEPASGSAATWGQDVTSVPVTRPALGSTTPPAHDVTSAPDNKPAPGSTAPPAHGVTSAPDTRPAPGSTAPPAHGVTSAPDNRPALGSTAPPVHNVTSASGSASGSASTLVHNGTSARATTTPASKSTPFSIPSHHSDTPTTLASHSTKTDASSTHHSTVPPLTSSNHSTSPQLSTGVSFFFLSFHISNLQFNSSLEDPSTDYYQELQRDISEMFLQIYKQGGFLGLSNIKFRPGSVVVQLTLAFREGTINVHDVETQFNQYKTEAASRYNLTISDVSVSDVPFPFSAQSGAGVPGWGIALLVLVCVLVALAIVYLIALAVCQCRRKNYGQLDIFPARDTYHPMSEYPTYHTHGRYVPPSSTDRSPYEKVSAGNGGSSLSYTNPAVAATSANL

SEQ ID NO: 9093 - protein, 1262 aa, Homo Sapiens
MTPGTQSPFFLLLLLTVLTVVTGSGHASSTPGGEKETSATQRSSVPSSTEKNAVSMTSSVLSSHSPGSGSSTTQGQDVTLAPATEPASGSAATWGQDVTSVPVTRPALGSTTPPAHDVTSAPDNKPAPGSTAPPAHGVTSAPDTRPAPGSTAPQAHGVTSAPDTRPAPGSTAPPAHGVTSAPDTRPAPGSTAPPAHGVTSAPDTRSAPGSTAPAAHGVTSAPDTRSVPGSTAPQAHGVTSAPDTRPAPGSTAPPAHGVTSAPDTRPVPGSTAPPAHGVTSAPDTRPAPGSTAPPAHGVTSAPDTRPAPGSTAPQAHGVTSAPDTRPAPGSTAPPAHGVTSAPDTRPAPGSTAPPAHGVTSAPDTRPAPGSTAPAAHGVTSAPDTRPAPGSTAPQAHGVTSAPDTRPAPGSTAPPAHGVTSAPDTRPAPGSTAPPAHGVTSAPDTRPAPGSTAPPAHGVTSAPDTRPAPGSTAPAAHGVTSAPDTRPAPGSTAPQAHGVTSAPDTRPAPGSTAPPAHGVTSAPDTRPAPGSTAPPAHGVTSAPDTRPAPGSTAPPTHGVTSAPDTSPAPGSTAPPAHGVTSAPDTRPAPGYTAPAAHGVTSAPDTRPAPGSTAPQAHGVTSAPDTRPAPGSTAPPAHGVTSAPDTRPAPGSTAPPAHGVTSAPDTRPAPGSTAPPAHGVTSAPESRPAPGSTARAAHGVTSAPESRPAPGSTAPPAHGVTSAPDTRPAPGSTAPPAHGVTSAPDTRPAPGSTAPPAHGVTSAPDTRPAPGSTAPPAHGVTSAPDTRPAPGSTAPPAHGVTSAPDTRPSPPGSTAPPAHGVTSAPDTRPAPGSTAPPVHGVTSAPDTRPAPGSTAPPAHGVTSAPDTRPAPGSTAPPAHGVTSAPDTRPAPGSTAPPAHGVTSAPDTRRAPGSTPAPGSTAPPAHGVTSAPDTRPAPGSTAPPAHGVTSAPDNRPALGSTAPPVHNVTSASGSASGSASTLVHNGTSARATTTPASKSTPFSIPSHHSDTPTTLASHSTKTDASSTHHSTVPPLTSSNHSTSPQLSTGVSFFFLSFHISNLQFNSSLEDPSTDYYQELQRDISEMFLQIYKQGGFLGLSNIKFRPGSVVVQLTLAFREGTINVHDVETQFNQYKTEAASRYNLTISDVSVSDVPFPFSAQSGAGVPGWGIALLVLVCVLVALAIVYLIALAVCQCRRKNYGQLDIFPARDTYHPMSEYPTYHTHGRYVPPSSTDRSPYEKVSAGNGGSSLSYTNPAVAATSANL

SEQ ID NO: 9094 - protein, 85 aa, Homo Sapiens
TEAASRYNLTISDVSVWGWGARLGHRAAGAGLCSGCAGHCLSHCLGCLSVPPKELRAAGHLSSPGYLPSYERVPHLPHPWALCAP

SEQ ID NO: 9095 - protein, 512 aa, Homo Sapiens
MKAIIHLTLLALLSVNTATNQGNSADAVTTTETATSGPTVAAADTTETNFPETASTTANTPSFPTATSPAPPIISTHSSSTIPTPAPPIISTHSSSTIPIPTAADSESTTNVNSLATSDIITASSPNDGLITMVPSETQSNNEMSPTTEDNQSSGPPTGTALLETSTLNSTGPSNPCQDDPCADNSLCVKLHNTSFCLCLEGYYYNSSTCKKGKVFPGKISVTVSETFDPEEKHSMAYQDLHSEITSLFKDVFGTSVYGQTVILTVSTSLSPRSEMRADDKFVNVTIVTILAETTSDNEKTVTEKINKAIRSSSSNFLNYDLTLRCDYYGCNQTADDCLNGLACDCKSDLQRPNPQSPFCVASSLKCPDACNAQHKQCLIKKSGGAPECACVPGYQEDANGNCQKCAFGYSGLDCKDKFQLILTIVGTIAGIVILSMIIALIVTARSNNKTKHIEEENLIDEDFQNLKLRSTGFTNLGAEGSVFPKVRITASRDSQMQNPYSRHSSMPRPDY

SEQ ID NO: 9096 - protein, 184 aa, Homo Sapiens
MKAIIHLTLLALLSVNTEDNQSSGPPTGTALLETSTLNSTGPSNPCQDDPCADNSLCVKLHNTSFCLCLEGYYYNSSTCKKGKVFPGKISVTVSETFDPEEKHSMAYQDLHSEITSLFKDVFGTSVYGQTVILTVSTSLSPRSEMRADDKFVNVTIVTILAETTSDNEKTVTEKINKAIRSSSS

SEQ ID NO: 9097 - protein, 709 aa, Homo Sapiens
MGCLWGLALPLFFFCWEVGVSGSSAGPSTRRADTAMTTDDTEVPAMTLAPGHAALETQTLSAETSSRASTPAGPIPEAETRGAKRISPARETRSFTKTSPNFMVLIATSVETSAASGSPEGAGMTTVQTITGSDPREAIFDTLCTDDSSEEAKTLTMDILTLAHTSTEAKGLSSESSASSDSPHPVITPSRASESSASSDGPHPVITPSRASESSASSDGPHPVITPSRASESSASSDGPHPVITPSRASESSASSDGPHPVITPSRASESSASSDGPHPVITPSRASESSASSDGPHPVITPSRASESSASSDGPHPVITPSRASESSASSDGPHPVITPSRASESSASSDGLHPVITPSRASESSASSDGPHPVITPSRASESSASSDGPHPVITPSWSPGSDVTLLAEALVTVTNIEVINCSITEIETTTSSIPGASDTDLIPTEGVKASSTSDPPALPDSTEAKPHITEVTASAETLSTAGTTESAAPDATVGTPLPTNSATEREVTAPGATTLSGALVTVSRNPLEETSALSVETPSYVKVSGAAPVSIEAGSAVGKTTSFAGSSASSYSPSEAALKNFTPSETPTMDIATKGPFPTSRDPLPSVPPTTTNSSRGTNSTLAKITTSAKTTMKPPTATPTTARTRPTTDVSAGENGGFLLLRLSVASPEDLTDPRVAERLMQQLHRELHAHAPHFQVSLLRVRRG

SEQ ID NO: 9098 - protein, 723 aa, Homo Sapiens
MGCLWGLALPLFFFCWEVGVSGSSAGPSTRRADTAMTTDDTEVPAMTLAPGHAALETQTLSAETSSRASTPAGPIPEAETRGAKRISPARETRSFTKTSPNFMVLIATSVETSAASGSPEGAGMTTVQTITGSDPREAIFDTLCTDDSSEEAKTLTMDILTLAHTSTEAKGLSSESSASSDSPHPVITPSRASESSASSDGPHPVITPSRASESSASSDGPHPVITPSRASESSASSDGPHPVITPSRASESSASSDGPHPVITPSRASESSASSDGPHPVITPSRASESSASSDGPHPVITPSRASESSASSDGPHPVITPSRASESSASSDGPHPVITPSRASESSASSDGLHPVITPSRASESSASSDGPHPVITPSRASESSASSDGPHPVITPSWSPGSDVTLLAEALVTVTNIEVINCSITEIETTTSSIPGASDTDLIPTEGVKASSTSDPPALPDSTEAKPHITEVTASAETLSTAGTTESAAPDATVGTPLPTNSATEREVTAPGATTLSGALVTVSRNPLEETSALSVETPSYVKVSGAAPVSIEAGSAVGKTTSFAGSSASSYSPSEAALKNFTPSETPTMDIATKGPFPTSRDPLPSVPPTTTNSSRGTNSTLAKITTSAKTTMKPPTATPTTARTRPTTDVSAGENGGFLLLRLSVASPEDLTDPRVAERLMQQMERSLALSPRLECSGVISAHCKLHLLGSRDSPASAS

SEQ ID NO: 9099 - protein, 538 aa, Homo Sapiens
MGCLWGLALPLFFFCWEVGVSGSSAGPSTRRADTAMTTDDTEVPAMTLAPGHAALETQTLSAETSSRASTPAGPIPEAETRGAKRISPARETRSFTKTSPNFMVLIATSVETSAASGSPEGAGMTTVQTITGSDPREAIFDTLCTDDSSEEAKTLTMDILTLAHTSTEAKGLSSESSASSDSPHPVITPSRASESSASSDGPHPVITPSRASESSASSDGPHPVITPSWSPGSDVTLLAEALVTVTNIEVINCSITEIETTTSSIPGASDTDLIPTEGVKASSTSDPPALPDSTEAKPHITEVTASAETLSTAGTTESAAPDATVGTPLPTNSATEREVTAPGATTLSGALVTVSRNPLEETSALSVETPSYVKVSGAAPVSIEAGSAVGKTTSFAGSSASSYSPSEAALKNFTPSETPTMDIATKGPFPTSRDPLPSVPPTTTNSSRGTNSTLAKITTSAKTTMKPPTATPTTARTRPTTDVSAGENGGFLLLRLSVASPEDLTDPRVAERLMQQLHRELHAHAPHFQVSLLRVRRG

SEQ ID NO: 9100 - protein, 674 aa, Homo Sapiens
MTTDDTEVPAMTLAPGHAALETQTLSAETSSRASTPAGPIPEAETRGAKRISPARETRSFTKTSPNFMVLIATSVETSAASGSPEGAGMTTVQTITGSDPREAIFDTLCTDDSSEEAKTLTMDILTLAHTSTEAKGLSSESSASSDSPHPVITPSRASESSASSDGPHPVITPSRASESSASSDGPHPVITPSRASESSASSDGPHPVITPSRASESSASSDGPHPVITPSRASESSASSDGPHPVITPSRASESSASSDGPHPVITPSRASESSASSDGPHPVITPSRASESSASSDGPHPVITPSRASESSASSDGLHPVITPSRASESSASSDGPHPVITPSRASESSASSDGPHPVITPSWSPGSDVTLLAEALVTVTNIEVINCSITEIETTTSSIPGASDTDLIPTEGVKASSTSDPPALPDSTEAKPHITEVTASAETLSTAGTTESAAPDATVGTPLPTNSATEREVTAPGATTLSGALVTVSRNPLEETSALSVETPSYVKVSGAAPVSIEAGSAVGKTTSFAGSSASSYSPSEAALKNFTPSETPTMDIATKGPFPTSRDPLPSVPPTTTNSSRGTNSTLAKITTSAKTTMKPPTATPTTARTRPTTDVSAGENGGFLLLRLSVASPEDLTDPRVAERLMQQLHRELHAHAPHFQVSLLRVRRG

SEQ ID NO: 9101 - protein, 128 aa, Homo Sapiens
  misc_feature (1)..(1): Xaa can be any naturally occurring amino acid
XPTMDIATKGPFPTSRDPLPSVPPTTTNSSRGTNSTLAKITTSAKTTMKPPTATPTTARTRPTTDVSAGENGGFLLLRLSVASPEDLTDPRVAERLMQQLMTQGTHSAHVPSMVGVNPLPIVPGGFQH

SEQ ID NO: 9102 - protein, 3323 aa, Homo Sapiens
MQLLGLLGLLWMLKASPWATGTLSTATSISQVPFPRAEAASAVLSNSPHSRDLAGWPLGVPQLASPAPGHRENAPMTLTTSPHDTLISETLLNSPVSSNTSTTPTSKFAFKVETTPPTVLVYSATTECVYPTSFIITISHPTSICVTTTQVAFTSSYTSTPVTQKPVTTVTSTYSMTTTEKGTSAMTSSPSTTTARETPIVTVTPSSVSATDTTFHTTISSTTRTTERTPLPTGSIHTTTSPTPVFTTLKTAVTSTSPITSSITSTNTVTSMTTTASQPTATNTLSSPTRTILSSTPVLSTETITSGITNTTPLSTLVTTLPTTISRSTPTSETTYTTSPTSTVTDSTTKIAYSTSMTGTLSTETSLPPTSSSLPTTETATTPMTNLVTTTTEISSHSTPSFSSSTIYSTVSTSTTAISSLPPTSGTMVTSTTMTPSSLSTDIPFTTPTTITHHSVGSTGFLTTATDLTSTFTVSSSSAMSTSVIPSSPSIQNTETSSLVSMTSATTPNVRPTFVSTLSTPTSSLLTTFPATYSFSSSMSASSAGTTHTESISSPPASTSTLHTTAESTLAPTTTTSFTTSTTMEPPSTTAATTGTGQTTFTSSTATFPETTTPTPTTDMSTESLTTAMTSPPITSSVTSTNTVTSMTTTTSPPTTTNSFTSLTSMPLSSTPVPSTEVVTSGTINTIPPSILVTTLPTPNASSMTTSETTYPNSPTGPGTNSTTEITYPTTMTETSSTATSLPPTSPLVSTAKTAKTPTTNLVTTTTKTTSHSTTSFTSSTVYSTASTYTTAITSVPTTLGTMVTSTSMISSTVSTGIPTSQPTTITPSSVGISGSLPMMTDLTSVYTVSNMSARPTTVIPSSPTVQNTEISISVSMTSATTPSGGPTFTSTENTPTRSLLTSFPMTHSFSSSMSESSAGTTHTESISSPRGTTSTLHTTVESTPSPTTTTSFTTSTMMEPPSSTVSTTGRGQTTFPSSTATFPETTTLTPTTDISTVSLTTAMTSPPPVSSSITPTNTMTSMRTTTYWPTATNTLSPLTSSILSSTPVPSTEMITSHTTNTTPLSTLVTTLLTTITRSTPTSETTYPTSPTSIVSDSTTEITYSTSITGTLSTATTLPPTSSSLPTTETATMTPTTTLITTTPNTTSLSTPSFTSSTIYSTVSTSTTAISSASPTSGTMVTSTTMTPSSLSTDTPSTTPTTITYPSVGSTGFLTTATDLTSTFTVSSSSAMSTSVIPSSPSIQNTETSSLVSMTSATTPSLRPTITSTDSTLTSSLLTTFPSTYSFSSSMSASSAGTTHTETISSLPASTNTIHTTAESALAPTTTTSFTTSPTMEPPSTTVATTGTGQTTFPSSTATFLETTTLTPTTDFSTESLTTAMTSTPPITSSITPTDTMTSMRTTTSWPTATNTLSPLTSSILSSTPVPSTEVTTSHTTNTNPVSTLVTTLPITITRSTLTSETAYPSSPTSTVTESTTEITYPTTMTETSSTATSLPPTSSLVSTAETAKTPTTNLVTTTTKTTSHSTTSFTSSTIYSTASTPTTAITSVPTTLGTMVTSTSMIPSTVSTGIPTSQPTTITPSSVGISGSLPMMTDLTSVYTVSSMSARPTSVIPSSPTVQNTETSIFVSMMSATTPSGGPTFTSTENTPTRSLLTSFPVTHSFSSSMSASSVGTTHTQSISSPPAITSTLHTTAESTPSPTTTMSFTTFTKMETPSSTVATTGTGQTTFTSSTATSPKTTTLTPTSDISTGSFKTAVSSTPPITSSITSTYTVTSMTTTTPLGPTATNTLPSFTSSVSSSTPVPSTEAITSGTTNTTPLSTLVTTFSNSDTSSTPTSETTYPTSLTSALTDSTTRTTYSTNMTGTLSTVTSLRPTSSSLLTTVTATVPTTNLVTTTTKITSHSTPSFTSSIATTETPSHSTPRFTSSITTTETPSHSTPRFTSSITNTKTTSHSSPSFTSSITTTETTSHNTPSLTSSITTTKTTSHSTPSYTSLITTTTTTSHSTPSFTSSITTTETTSHNTPSLTSSITTTETTSHSTPSFTSSITTETTSHSTPSFTSLITITEITSHSTLSYTTSITTTETPSHSTLSFTSSITTTETTSHSTPSFTSSITTSEMPSHSTPSFTSSITTTENATHSTPNFTSSITTTETTSHSTPSFTSLITTTETTSHRWGTTETTSYSTPSFTSSNTITETTSHSTPSYITSITTTETPSSSTPSFSSSITTTETTSHSTPGFTSSITTTETTSHSTPSFTSSITTTETTSHDTPSFTSSITTSETPSHSTPSSTSLITTTKTTSHSTPSFTSSITTTETTSHSAHSFTSSITTTETTSHNTRSFTSSITTTETNSHSTTSFTSSITTTETTSHSTPSFSSSITTTETPLHSTPGLTSWVTTTKTTSHITPGLTSSITTTETTSHSTPGFTSSITTTETTSESTPSLSSSTIYSTVSTSTTAITSHFTTSETAVTPTPVTPSSLSTDIPTTSLRTLTPSSVGTSTSLTTTTDFPSIPTDISTLPTRTHIISSSPSIQSTETSSLVGTTSPTMSTVRMTLRITENTPISSFSTSIVVIPETPTQTPPVLTSATGTQTSPAPTTVTFGSTDSSTSTLHTLTPSTALSTIVSTSQVPIPSTHSSTLQTTPSTPSLQTSLTSTSEFTTESFTRGSTSTNAILTSFSTIIWSSTPTIIMSSSPSSASITPVFSTTIHSVPSSPYIFSTENVGSASITGFPSLSSSATTSTSSTSSSLTTALTEITPFSYISLPSTTPCPGTITITIVPASPTDPCVEMDPSTEATSPPTTPLTVFPFTTEMVTCPTSISIQTTLTTYMDTSSMMPESESSISPNASSSTGTGTVPTNTVFTSTRLPTSETWLSNSSVIPLPLPGVSTIPLTMKPSSSLPTILRTSSKSTHPSPPTTRTSETPVATTQTPTTLTSRRTTRITSQMTTQSTLTTTAGTCDNGGTWEQGQCACLPGFSGDRCQLQTRCQNGGQWDGLKCQCPSTFYGSSCEFAVEQVDLDVVETEVGMEVSVDQQFSPDLNDNTSQAYRDFNKTFWNQMQKIFADMQGFTFKGVEILSLRNGSIVVDYLVLLEMPFSPQLESEYEQVKTTLKEGLQNASQDVNSCQDSQTLCFKPDSIKVNNNSKTELTPAAICRRAAPTGYEEFYFPLVEATRLRCVTKCTSGVDNAIDCHQGQCVLETSGPTCRCYSTDTHWFSGPRCEVAVHWRALVGGLTAGAALLVLLLLALGVRAVRSGWWGGQRRGRSWDQDRKWFETWDEEVVGTFSNWGFEDDGTDKDTNFYVALENVDTTMKVHIKRPEMTSSSV

SEQ ID NO: 9103 - protein, 3265 aa, Homo Sapiens
MQLLGLLGLLWMLKASPWATGTLSTATSISQVPFPRAEAASAVLSNSPHSRDLAGWPLGVPQLASPAPGHRENAPMTLTTSPHDTLISETLLNSPVSSNTSTTPTSKFAFKVETTPPTVLVYSATTECVYPTSFIITISHPTSICVTTTQVAFTSSYTSTPVTQKPVTTVTSTYSMTTTEKGTSAMTSSPSTTTARETPIVTVTPSSVSATDTTFHTTISSTTRTTERTPLPTGSIHTTTSPTPVFTTLKTAVTSTSPITSSITSTNTVTSMTTTASQPTATNTLSSPTRTILSSTPVLSTETITSGITNTTPLSTLVTTLPTTISRSTPTSETTYTTSPTSTVTDSTTKIAYSTSMTGTLSTETSLPPTSSSLPTTETATTPMTNLVTTTTEISSHSTPSFSSSTIYSTVSTSTTAISSLPPTSGTMVTSTTMTPSSLSTDIPFTTPTTITHHSVGSTGFLTTATDLTSTFTVSSSSAMSTSVIPSSPSIQNTETSSLVSMTSATTPNVRPTFVSTLSTPTSSLLTTFPATYSFSSSMSASSAGTTHTESISSPPASTSTLHTTAESTLAPTTTTSFTTSTTMEPPSTTAATTGTGQTTFTSSTATFPETTTPTPTTDMSTESLTTAMTSPPITSSVTSTNTVTSMTTTTSPPTTTNSFTSLTSMPLSSTPVPSTEVVTSGTINTIPPSILVTTLPTPNASSMTTSETTYPNSPTGPGTNSTTEITYPTTMTETSSTATSLPPTSPLVSTAKTAKTPTTNLVTTTTKTTSHSTTSFTSSTVYSTASTYTTAITSVPTTLGTMVTSTSMISSTVSTGIPTSQPTTITPSSVGISGSLPMMTDLTSVYTVSNMSARPTTVIPSSPTVQNTEISISVSMTSATTPSGGPTFTSTENTPTRSLLTSFPMTHSFSSSMSESSAGTTHTESISSPRGTTSTLHTTVESTPSPTTTTSFTTSTMMEPPSSTVSTTGRGQTTFPSSTATFPETTTLTPTTDISTVSLTTAMTSPPPVSSSITPTNTMTSMRTTTYWPTATNTLSPLTSSILSSTPVPSTEMITSHTTNTTPLSTLVTTLLTTITRSTPTSETTYPTSPTSIVSDSTTEITYSTSITGTLSTATTLPPTSSSLPTTETATMTPTTTLITTTPNTTSLSTPSFTSSTIYSTVSTSTTAISSASPTSGTMVTSTTMTPSSLSTDTPSTTPTTITYPSVGSTGFLTTATDLTSTFTVSSSSAMSTSVIPSSPSIQNTETSSLVSMTSATTPSLRPTITSTDSTLTSSLLTTFPSTYSFSSSMSASSAGTTHTETISSLPASTNTIHTTAESALAPTTTTSFTTSPTMEPPSTTVATTGTGQTTFPSSTATFLETTTLTPTTDFSTESLTTAMTSTPPITSSITPTDTMTSMRTTTSWPTATNTLSPLTSSILSSTPVPSTEVTTSHTTNTNPVSTLVTTLPITITRSTLTSETAYPSSPTSTVTESTTEITYPTTMTETSSTATSLPPTSSLVSTAETAKTPTTNLVTTTTKTTSHSTTSFTSSTIYSTASTPTTAITSVPTTLGTMVTSTSMIPSTVSTGIPTSQPTTITPSSVGISGSLPMMTDLTSVYTVSSMSARPTSVIPSSPTVQNTETSIFVSMMSATTPSGGPTFTSTENTPTRSLLTSFPVTHSFSSSMSASSVGTTHTQSISSPPAITSTLHTTAESTPSPTTTMSFTTFTKMETPSSTVATTGTGQTTFTSSTATSPKTTTLTPTSDISTGSFKTAVSSTPPITSSITSTYTVTSMTTTTPLGPTATNTLPSFTSSVSSSTPVPSTEAITSGTTNTTPLSTLVTTFSNSDTSSTPTSETTYPTSLTSALTDSTTRTTYSTNMTGTLSTVTSLRPTSSSLLTTVTATVPTTNLVTTTTKITSHSTPSFTSSIATTETPSHSTPRFTSSITTTETPSHSTPRFTSSITNTKTTSHSSPSFTSSITTTETTSHNTPSLTSSITTTKTTSHSTPSYTSLITTTTTTSHSTPSFTSSITTTETTSHNTPSLTSSITTTETTSHSTPSFTSSITTETTSHSTPSFTSLITITEITSHSTLSYTTSITTTETPSHSTLSFTSSITTTETTSHSTPSFTSSITTSEMPSHSTPSFTSSITTTENATHSTPNFTSSITTTETTSHSTPSFTSLITTTETTSHRWGTTETTSYSTPSFTSSNTITETTSHSTPSYITSITTTETPSSSTPSFSSSITTTETTSHSTPGFTSSITTTETTSHSTPSFTSSITTTETTSHDTPSFTSSITTSETPSHSTPSSTSLITTTKTTSHSTPSFTSSITTTETTSHSAHSFTSSITTTETTSHNTRSFTSSITTTETNSHSTTSFTSSITTTETTSHSTPSFSSSITTTETPLHSTPGLTSWVTTTKTTSHITPGLTSSITTTETTSHSTPGFTSSITTTETTSESTPSLSSSTIYSTVSTSTTAITSHFTTSETAVTPTPVTPSSLSTDIPTTSLRTLTPSSVGTSTSLTTTTDFPSIPTDISTLPTRTHIISSSPSIQSTETSSLVGTTSPTMSTVRMTLRITENTPISSFSTSIVVIPETPTQTPPVLTSATGTQTSPAPTTVTFGSTDSSTSTLHTLTPSTALSTIVSTSQVPIPSTHSSTLQTTPSTPSLQTSLTSTSEFTTESFTRGSTSTNAILTSFSTIIWSSTPTIIMSSSPSSASITPVFSTTIHSVPSSPYIFSTENVGSASITGFPSLSSSATTSTSSTSSSLTTALTEITPFSYISLPSTTPCPGTITITIVPASPTDPCVEMDPSTEATSPPTTPLTVFPFTTEMVTCPTSISIQTTLTTYMDTSSMMPESESSISPNASSSTGTGTVPTNTVFTSTRLPTSETWLSNSSVIPLPLPGVSTIPLTMKPSSSLPTILRTSSKSTHPSPPTTRTSETPVATTQTPTTLTSRRTTRITSQMTTQSTLTTTAGTCDNGGTWEQGQCACLPGFSGDRCQLQTRCQNGGQWDGLKCQCPSTFYGSSCEFAVEQVDLDVVETEVGMEVSVDQQFSPDLNDNTSQAYRDFNKTFWNQMQKIFADMQGFTFKGVEILSLRNGSIVVDYLVLLEMPFSPQLESEYEQVKTTLKEGLQNASQDVNSCQDSQTLCFKPDSIKVNNNSKTELTPAAICRRAAPTGYEEFYFPLVEATRLRCVTKCTSGVDNAIDCHQGQCVLETSGPTCRSWDQDRKWFETWDEEVVGTFSNWGFEDDGTDKDTNFYVALENVDTTMKVHIKRPEMTSSSV

SEQ ID NO: 9104 - protein, 1002 aa, Homo Sapiens
  misc_feature (1)..(1): Xaa can be any naturally occurring amino acid
XITITEITSHSTLSYTTSITTTETPSHSTLSFTSSITTTETTSHSTPSFTSSITTSEMPSHSTPSFTSSITTTENATHSTPNFTSSITTTETTSHSTPSFTSLITTTETTSHRWGTTETTSYSTPSFTSSNTITETTSHSTPSYITSITTTETPSSSTPSFSSSITTTETTSHSTPGFTSSITTTETTSHSTPSFTSSITTTETTSHDTPSFTSSITTSETPSHSTPSSTSLITTTKTTSHSTPSFTSSITTTETTSHSAHSFTSSITTTETTSHNTRSFTSSITTTETNSHSTTSFTSSITTTETTSHSTPSFSSSITTTETPLHSTPGLTSWVTTTKTTSHITPGLTSSITTTETTSHSTPGFTSSITTTETTSESTPSLSSSTIYSTVSTSTTAITSHFTTSETAVTPTPVTPSSLSTDIPTTSLRTLTPSSVGTSTSLTTTTDFPSIPTDISTLPTRTHIISSSPSIQSTETSSLVGTTSPTMSTVRMTLRITENTPISSFSTSIVVIPETPTQTPPVLTSATGTQTSPAPTTVTFGSTDSSTSTLHTLTPSTALSTIVSTSQVPIPSTHSSTLQTTPSTPSLQTSLTSTSEFTTESFTRGSTSTNAILTSFSTIIWSSTPTIIMSSSPSSASITPVFSTTIHSVPSSPYIFSTENVGSASITGFPSLSSSATTSTSSTSSSLTTALTEITPFSYISLPSTTPCPGTITITIVPASPTDPCVEMDPSTEATSPPTTPLTVFPFTTEMVTCPTSISIQTTLTTYMDTSSMMPESESSISPNASSSTGTGTVPTNTVFTSTRLPTSETWLSNSSVIPLPLPGVSTIPLTMKPSSSLPTILRTSSKSTHPSPPTTRTSETPVATTQTPTTLTSRRTTRITSQMTTQSTLTTTAGTCDNGGTWEQGQCACLPGFSGDRCQLQTRCQNGGQWDGLKCQCPSTFYGSSCEFAVEQVDLDAEDFCRHAGLHLQGCGDPVPEEWQHRGGLPGPAGDALQPPAGERV

SEQ ID NO: 9105 - protein, 5654 aa, Homo Sapiens
MSVGRRKLALLWALALALACTRHTGHAQDGSSESSYKHHPALSPIARGPSGVPLRGATVFPSLRTIPVVRASNPAHNGRVCSTWGSFHYKTFDGDVFRFPGLCNYVFSEHCGAAYEDFNIQLRRSQESAAPTLSRVLMKVDGVVIQLTKGSVLVNGHPVLLPFSQSGVLIQQSSSYTKVEARLGLVLMWNHDDSLLLELDTKYANKTCGLCGDFNGMPVVSELLSHNTKLTPMEFGNLQKMDDPTDQCQDPVPEPPRNCSTGFGICEELLHGQLFSGCVALVDVGSYLEACRQDLCFCEDTDLLSCVCHTLAEYSRQCTHAGGLPQDWRGPDFCPQKCPNNMQYHECRSPCADTCSNQEHSRACEDHCVAGCFCPEGTVLDDIGQTGCVPVSKCACVYNGAAYAPGATYSTDCTNCTCSGGRWSCQEVPCPGTCSVLGGAHFSTFDGKQYTVHGDCSYVLTKPCDSSAFTVLAELRRCGLTDSETCLKSVTLSLDGAQTVVVIKASGEVFLNQIYTQLPISAANVTIFRPSTFFIIAQTSLGLQLNLQLVPTMQLFMQLAPKLRGQTCGLCGNFNSIQADDFRTLSGVVEATAAAFFNTFKTQAACPNIRNSFEDPCSLSVENEKYAQHWCSQLTDADGPFGRCHAAVKPGTYYSNCMFDTCNCERSEDCLCAALSSYVHACAAKGVQLGGWRDGVCTKPMTTCPKSMTYHYHVSTCQPTCRSLSEGDITCSVGFIPVDGCICPKGTFLDDTGKCVQASNCPCYHRGSMIPNGESVHDSGAICTCTHGKLSCIGGQAPAPVCAAPMVFFDCRNATPGDTGAGCQKSCHTLDMTCYSPQCVPGCVCPDGLVADGEGGCITAEDCPCVHNEASYRAGQTIRVGCNTCTCDSRMWRCTDDPCLATCAVYGDGHYLTFDGQSYSFNGDCEYTLVQNHCGGKDSTQDSFRVVTENVPCGTTGTTCSKAIKIFLGGFELKLSHGKVEVIGTDESQEVPYTIRQMGIYLVVDTDIGLVLLWDKKTSIFINLSPEFKGRVCGLCGNFDDIAVNDFATRSRSVVGDVLEFGNSWKLSPSCPDALAPKDPCTANPFRKSWAQKQCSILHGPTFAACHAHVEPARYYEACVNDACACDSGGDCECFCTAVAAYAQACHEVGLCVSWRTPSICPLFCDYYNPEGQCEWHYQPCGVPCLRTCRNPRGDCLRDVRGLEGCYPKCPPEAPIFDEDKMQCVATCPTPPLPPRCHVHGKSYRPGAVVPSDKNCQSCLCTERGVECTYKAEACVCTYNGQRFHPGDVIYHTTDGTGGCISARCGANGTIERRVYPCSPTTPVPPTTFSFSTPPLVVSSTHTPSNGPSSAHTGPPSSAWPTTAGTSPRTRLPTASASLPPVCGEKCLWSPWMDVSRPGRGTDSGDFDTLENLRAHGYRVCESPRSVECRAEDAPGVPLRALGQRVQCSPDVGLTCRNREQASGLCYNYQIRVQCCTPLPCSTSSSPAQTTPPTTSKTTETRASGSSAPSSTPGTVSLSTARTTPAPGTATSVKKTFSTPSPPPVPATSTSSMSTTAPGTSVVSSKPTPTEPSTSSCLQELCTWTEWIDGSYPAPGINGGDFDTFQNLRDEGYTFCESPRSVQCRAESFPNTPLADLGQDVICSHTEGLICLNKNQLPPICYNYEIRIQCCETVNVCRDITRLPKTVATTRPTPHPTGAQTQTTFTTHMPSASTEQPTATSRGGPTATSVTQGTHTTLVTRNCHPRCTWTKWFDVDFPSPGPHGGDKETYNNIIRSGEKICRRPEEITRLQCRAKSHPEVSIEHLGQVVQCSREEGLVCRNQDQQGPFKMCLNYEVRVLCCETPRGCHMTSTPGSTSSSPAQTTPSTTSKTTETQASGSSAPSSTPGTVSLSTARTTPAPGTATSVKKTFSTPSPPPVPATSTSSMSTTAPGTSVVSSKPTPTEPSTSSCLQELCTWTEWIDGSYPAPGINGGDFDTFQNLRDEGYTFCESPRSVQCRAESFPNTPLADLGQDVICSHTEGLICLNKNQLPPICYNYEIRIQCCETVNVCRDITRPPKTVATTRPTPHPTGAQTQTTFTTHMPSASTEQPTATSRGGPTATSVTQGTHTTPVTRNCHPRCTWTTWFDVDFPSPGPHGGDKETYNNIIRSGEKICRRPEEITRLQCRAKSHPEVSIEHLGQVVQCSREEGLVCRNQDQQGPFKMCLNYEVRVLCCETPKGCPVTSTPVTAPSTPSGRATSPTQSTSSWQKSRTTTLVTTSTTSTPQTSTTYAHTTSTTSAPTARTTSAPTTRTTSASPASTTSGPGNTPSPVPTTSTISAPTTSITSAPTTSTTSAPTSSTTSGPGTTPSPVPTTSITSAPTTSTTSAPTTSTTSARTSSTTSATTTSRISGPETTPSPVPTTSTTSATTTSTTSAPTTSTTSAPTSSTTSSPQTSTTSAPTTSTTSGPGTTPSPVPTTSTTSAPTTRTTSAPKSSTTSAATTSTTSGPETTPRPVPTTSTTSSPTTSTTSAPTTSTTSASTTSTTSGAGTTPSPVPTTSTTSAPTTSTTSAPISSTTSATTTSTTSGPGTTPSPVPTTSTTSAPTTSTTSGPGTTPSAVPTTSITSAPTTSTNSAPISSTTSATTTSRISGPETTPSPVPTASTTSASTTSTTSGPGTTPSPVPTTSTISVPTTSTTSASTTSTTSASTTSTTSGPGTTPSPVPTTSTTSAPTTSTTSAPTTSTISAPTTSTTSATTTSTTSAPTPRRTSAPTTSTISASTTSTTSATTTSTTSATTTSTISAPTTSTTLSPTTSTTSTTITSTTSAPISSTTSTPQTSTTSAPTTSTTSGPGTTSSPVPTTSTTSAPTTSTTSAPTTRTTSVPTSSTTSTATTSTTSGPGTTPSPVPTTSTTSAPTTRTTSAPTTSTTSAPTTSTTSAPTSSTTSATTTSTISVPTTSTTSVPGTTPSPVPTTSTISVPTTSTTSASTTSTTSGPGTTPSPVPTTSTTSAPTTSTTSAPTTSTISAPTTSTPSAPTTSTTLAPTTSTTSAPTTSTTSTPTSSTTSSPQTSTTSASTTSITSGPGTTPSPVPTTSTTSAPTTSTTSAATTSTISAPTTSTTSAPTTSTTSASTASKTSGLGTTPSPIPTTSTTSPPTTSTTSASTASKTSGPGTTPSPVPTTSTIFAPRTSTTSASTTSTTPGPGTTPSPVPTTSTASVSKTSTSHVSISKTTHSQPVTRDCHLRCTWTKWFDIDFPSPGPHGGDKETYNNIIRSGEKICRRPEEITRLQCRAESHPEVSIEHLGQVVQCSREEGLVCRNQDQQGPFKMCLNYEVRVLCCETPKGCPVTSTPVTAPSTPSGRATSPTQSTSSWQKSRTTTLVTTSTTSTPQTSTTSAPTTSTTSAPTTSTTSAPTTSTTSTPQTSISSAPTSSTTSAPTSSTISARTTSIISAPTTSTTSSPTTSTTSATTTSTTSAPTSSTTSTPQTSKTSAATSSTTSGSGTTPSPVTTTSTASVSKTSTSHVSVSKTTHSQPVTRDCHPRCTWTKWFDVDFPSPGPHGGDKETYNNIIRSGEKICRRPEEITRLQCRAKSHPEVSIEHLGQVVQCSREEGLVCRNQDQQGPFKMCLNYEVRVLCCETPKGCPVTSTSVTAPSTPSGRATSPTQSTSSWQKSRTTTLVTSSITSTTQTSTTSAPTTSTTPASIPSTTSAPTTSTTSAPTTSTTSAPTTSTTSTPQTTTSSAPTSSTTSAPTTSTISAPTTSTISAPTTSTTSAPTASTTSAPTSTSSAPTTNTTSAPTTSTTSAPITSTISAPTTSTTSTPQTSTISSPTTSTTSTPQTSTTSSPTTSTTSAPTTSTTSAPTTSTTSTPQTSISSAPTSSTTSAPTASTISAPTTSTTSFHTTSTTSPPTSSTSSTPQTSKTSAATSSTTSGSGTTPSPVPTTSTASVSKTSTSHVSVSKTTHSQPVTRDCHPRCTWTKWFDVDFPSPGPHGGDKETYNNIIRSGEKICRRPEEITRLQCRAESHPEVSIEHLGQVVQCSREEGLVCRNQDQQGPFKMCLNYEVRVLCCETPKGCPVTSTPVTAPSTPSGRATSPTQSTSSWQKSRTTTLVTTSTTSTPQTSTTSAPTTSTIPASTPSTTSAPTTSTTSAPTTSTTSAPTHRTTSGPTTSTTLAPTTSTTSAPTTSTNSAPTTSTISASTTSTISAPTTSTISSPTSSTTSTPQTSKTSAATSSTTSGSGTTPSPVPTTSTTSASTTSTTSAPTTSTTSGPGTTPSPVPSTSTTSAATTSTTSAPTTRTTSAPTSSMTSGPGTTPSPVPTTSTTSAPTTSTTSGPGTTPSPVPTTSTTSAPITSTTSGPGSTPSPVPTTSTTSAPTTSTTSASTASTTSGPGTTPSPVPTTSTTSAPTTRTTSASTASTTSGPGSTPSPVPTTSTTSAPTTRTTPASTASTTSGPGTTPSPVPTTSTTSASTTSTISLPTTSTTSAPITSMTSGPGTTPSPVPTTSTTSAPTTSTTSASTASTTSGPGTTPSPVPTTSTTSAPTTSTTSASTASTTSGPGTSLSPVPTTSTTSAPTTSTTSGPGTTPSPVPTTSTTSAPTTSTTSGPGTTPSPVPTTSTTPVSKTSTSHLSVSKTTHSQPVTSDCHPLCAWTKWFDVDFPSPGPHGGDKETYNNIIRSGEKICRRPEEITRLQCRAESHPEVNIEHLGQVVQCSREEGLVCRNQDQQGPFKMCLNYEVRVLCCETPRGCPVTSVTPYGTSPTNALYPSLSTSMVSASVASTSVASSSVASSSVAYSTQTCFCNVADRLYPAGSTIYRHRDLAGHCYYALCSQDCQVVRGVDSDCPSTTLPPAPATSPSISTSEPVTELGCPNAVPPRKKGETWATPNCSEATCEGNNVISLRPRTCPRVEKPTCANGYPAVKVADQDGCCHHYQCQCVCSGWGDPHYITFDGTYYTFLDNCTYVLVQQIVPVYGHFRVLVDNYFCGAEDGLSCPRSIILEYHQDRVVLTRKPVHGVMTNEIIFNNKVVSPGFRKNGIVVSRIGVKMYATIPELGVQVMFSGLIFSVEVPFSKFANNTEGQCGTCTNDRKDECRTPRGTVVASCSEMSGLWNVSIPDQPACHRPHPTPTTVGPTTVGSTTVGPTTVGSTTVGPTTPPAPCLPSPICQLILSKVFEPCHTVIPPLLFYEGCVFDRCHMTDLDVVCSSLELYAALCASHDICIDWRGRTGHMCPFTCPADKVYQPCGPSNPSYCYGNDSASLGALPEAGPITEGCFCPEGMTLFSTSAQVCVPTGCPRCLGPHGEPVKVGHTVGMDCQECTCEAATWTLTCRPKLCPLPPACPLPGFVPVPAAPQAGQCCPQYSCACNTSRCPAPVGCPEGARAIPTYQEGACCPVQNCSWTVCSINGTLYQPGAVVSSSLCETCRCELPGGPPSDAFVVSCETQICNTHCPVGFEYQEQSGQCCGTCVQVACVTNTSKSPAHLFYPGETWSDAGNHCVTHQCEKHQDGLVVVTTKKACPPLSCSLDEARMSKDGCCRFCPPPPPPYQNQSTCAVYHRSLIIQQQGCSSSEPVRLAYCRGNCGDSSSMYSLEGNTVEHRCQCCQELRTSLRNVTLHCTDGSSRAFSYTEVEECGCMGRRCPAPGDTQHSEEAEPEPSQEAESGSWERGVPVSPMH

SEQ ID NO: 9106 - protein, 5762 aa, Homo Sapiens
MGAPSACRTLVLALAAMLVVPQAETQGPVEPSWENAGHTMDGGAPTSSPTRRVSFVPPVTVFPSLSPLNPAHNGRVCSTWGDFHYKTFDGDVFRFPGLCNYVFSEHCRAAYEDFNVQLRRGLVGSRPVVTRVVIKAQGLVLEASNGSVLINGQREELPYSRTGLLVEQSGDYIKVSIRLVLTFLWNGEDSALLELDPKYANQTCGLCGDFNGLPAFNEFYAHNARLTPLQFGNLQKLDGPTEQCPDPLPLPAGNCTDEEGICHRTLLGPAFAECHALVDSTAYLAACAQDLCRCPTCPCATFVEYSRQCAHAGGQPRNWRCPELCPRTCPLNMQHQECGSPCTDTCSNPQRAQLCEDHCVDGCFCPPGTVLDDITHSGCLPLGQCPCTHGGRTYSPGTSFNTTCSSCTCSGGLWQCQDLPCPGTCSVQGGAHISTYDEKLYDLHGDCSYVLSKKCADSSFTVLAELRKCGLTDNENCLKAVTLSLDGGDTAIRVQADGGVFLNSIYTQLPLSAANITLFTPSSFFIVVQTGLGLQLLVQLVPLMQVFVRLDPAHQGQMCGLCGNFNQNQADDFTALSGVVEATGAAFANTWKAQAACANARNSFEDPCSLSVENENYARHWCSRLTDPNSAFSRCHSIINPKPFHSNCMFDTCNCERSEDCLCAALSSYVHACAAKGVQLSDWRDGVCTKYMQNCPKSQRYAYVVDACQPTCRGLSEADVTCSVSFVPVDGCTCPAGTFLNDAGACVPAQECPCYAHGTVLAPGEVVHDEGAVCSCTGGKLSCLGASLQKSTGCAAPMVYLDCSNSSAGTPGAECLRSCHTLDVGCFSTHCVSGCVCPPGLVSDGSGGCIAEEDCPCVHNEATYKPGETIRVDCNTCTCRNRRWECSHRLCLGTCVAYGDGHFITFDGDRYSFEGSCEYILAQDYCGDNTTHGTFRIVTENIPCGTTGTTCSKAIKLFVESYELILQEGTFKAVARGPGGDPPYKIRYMGIFLVIETHGMAVSWDRKTSVFIRLHQDYKGRVCGLCGNFDDNAINDFATRSRSVVGDALEFGNSWKLSPSCPDALAPKDPCTANPFRKSWAQKQCSILHGPTFAACRSQVDSTKYYEACVNDACACDSGGDCECFCTAVAAYAQACHDAGLCVSWRTPDTCPLFCDFYNPHGGCEWHYQPCGAPCLKTCRNPSGHCLVDLPGLEGCYPKCPPSQPFFNEDQMKCVAQCGCYDKDGNYYDVGARVPTAENCQSCNCTPSGIQCAHSLEACTCTYEDRTYSYQDVIYNTTDGLGACLIAICGSNGTIIRKAVACPGTPATTPFTFTTAWVPHSTTSPALPVSTVCVREVCRWSSWYNGHRPEPGLGGGDFETFENLRQRGYQVCPVLADIECRAAQLPDMPLEELGQQVDCDRMRGLMCANSQQSPPLCHDYELRVLCCEYVPCGPSPAPGTSPQPSLSASTEPAVPTPTQTTATEKTTLWVTPSIRSTAALTSQTGSSSGPVTVTPSAPGTTTCQPRCQWTEWFDEDYPKSEQLGGDVESYDKIRAAGGHLCQQPKDIECQAESFPNWTLAQVGQKVHCDVHFGLVCRNWEQEGVFKMCYNYRIRVLCCSDDHCRGRATTPPPTTELETATTTTTQALFSTPQPTSSPGLTRAPPASTTAVPTLSEGLTSPRYTSTLGTATTGGPTTPAGSTEPTVPGVATSTLPTRSALPGTTGSLGTWRPSQPPTLAPTTMATSRARPTGTASTASKEPLTTSLAPTLTSELSTSQAETSTPRTETTMSPLTNTTTSQGTTRCQPKCEWTEWFDVDFPTSGVAGGDMETFENIRAAGGKMCWAPKSIECRAENYPEVSIDQVGQVLTCSLETGLTCKNEDQTGRFNMCFNYNVRVLCCDDYSHCPSTPATSSTATPSSTPGTTWILTKPTTTATTTASTGSTATPTSTLRTAPPPKVLTTTATTPTVTSSKATPSSSPGTATALPALRSTATTPTATSVTPIPSSSLGTTWTRLSQTTTPTATMSTATPSSTPETAHTSTVLTATATTTGATGSVATPSSTPGTAHTTKVPTTTTTGFTATPSSSPGTALTPPVWISTTTTPTTRGSTVTPSSIPGTTHTATVLTTTTTTVATGSMATPSSSTQTSGTPPSLTTTATTITATGSTTNPSSTPGTTPIPPVLTTTATTPAATSNTVTPSSALGTTHTPPVPNTMATTHGRSLPPSSPHTVRTAWTSATSGILGTTHITEPSTVTSHTLAATTGTTQHSTPALSSPHPSSRTTESPPSPGTTTPGHTTATSRTTATATPSKTRTSTLLPSSPTSAPITTVVTMGCEPQCAWSEWLDYSYPMPGPSGGDFDTYSNIRAAGGAVCEQPLGLECRAQAQPGVPLRELGQVVECSLDFGLVCRNREQVGKFKMCFNYEIRVFCCNYGHCPSTPATSSTAMPSSTPGTTWILTELTTTATTTESTGSTATPSSTPGTTWILTEPSTTATVTVPTGSTATASSTQATAGTPHVSTTATTPTVTSSKATPFSSPGTATALPALRSTATTPTATSFTAIPSSSLGTTWTRLSQTTTPTATMSTATPSSTPETVHTSTVLTTTATTTGATGSVATPSSTPGTAHTTKVLTTTTTGFTATPSSSPGTARTLPVWISTTTTPTTRGSTVTPSSIPGTTHTPTVLTTTTTTVATGSMATPSSSTQTSGTPPSLTTTATTITATGSTTNPSSTPGTTPIPPVLTTTATTPAATSSTVTPSSALGTTHTPPVPNTTATTHGRSLSPSSPHTVRTAWTSATSGTLGTTHITEPSTGTSHTPAATTGTTQHSTPALSSPHPSSRTTESPPSPGTTTPGHTRATSRTTATATPSKTRTSTLLPSSPTSAPITTVVTMGCEPQCAWSEWLDYSYPMPGPSGGDFDTYSNIRAAGGAVCEQPLGLECRAQAQPGVPLRELGQVVECSLDFGLVCRNREQVGKFKMCFNYEIRVFCCNYGHCPSTPATSSTATPSSTPGTTWILTEQTTAATTTATTGSTAIPSSTPGTAPPPKVLTSTATTPTATSSKATSSSSPRTATTLPVLTSTATKSTATSFTPIPSFTLGTTGTLPEQTTTPMATMSTIHPSSTPETTHTSTVLTTKATTTRATSSMSTPSSTPGTTWILTELTTAATTTAATGPTATPSSTPGTTWILTEPSTTATVTVPTGSTATASSTRATAGTLKVLTSTATTPTVISSRATPSSSPGTATALPALRSTATTPTATSVTAIPSSSLGTAWTRLSQTTTPTATMSTATPSSTPETVHTSTVLTTTTTTTRATGSVATPSSTPGTAHTTKVPTTTTTGFTATPSSSPGTALTPPVWISTTTTPTTRGSTVTPSSIPGTTHTATVLTTTTTTVATGSMATPSSSTQTSGTPPSLTTTATTITATGSTTNPSSTPGTTPIPPVLTTTATTPAATSSTVTPSSALGTTHTPPVPNTTATTHGRSLPPSSPHTVRTAWTSATSGILGTTHITEPSTVTSHTPAATTSTTQHSTPALSSPHPSSRTTESPPSPGTTTPGHTRGTSRTTATATPSKTRTSTLLPSSPTSAPITTVVTTGCEPQCAWSEWLDYSYPMPGPSGGDFDTYSNIRAAGGAVCEQPLGLECRAQAQPGVPLRELGQVVECSLDFGLVCRNREQVGKFKMCFNYEIRVFCCNYGHCPSTPATSSTATPSSTPGTTWILTKLTTTATTTESTGSTATPSSTPGTTWILTEPSTTATVTVPTGSTATASSTQATAGTPHVSTTATTPTVTSSKATPFSSPGTATALPALRSTATTPTATSFTAIPSSSLGTTWTRLSQTTTPTATMSTATPSSTPETAHTSTVLTTTATTTRATGSVATPSSTPGTAHTTKVPTTTTTGFTVTPSSSPGTARTPPVWISTTTTPTTSGSTVTPSSVPGTTHTPTVLTTTTTTVATGSMATPSSSTQTSGTPPSLITTATTITATGSTTNPSSTPGTTPIPPVLTTTATTPAATSSTVTPSSALGTTHTPPVPNTTATTHGRSLSPSSPHTVRTAWTSATSGTLGTTHITEPSTGTSHTPAATTGTTQHSTPALSSPHPSSRTTESPPSPGTTTPGHTTATSRTTATATPSKTRTSTLLPSSPTSAPITTVVTTGCEPQCAWSEWLDYSYPMPGPSGGDFDTYSNIRAAGGAVCEQPLGLECRAQAQPGVPLGELGQVVECSLDFGLVCRNREQVGKFKMCFNYEIRVFCCNYGHCPSTPATSSTAMPSSTPGTTWILTELTTTATTTASTGSTATPSSTPGTAPPPKVLTSPATTPTATSSKATSSSSPRTATTLPVLTSTATKSTATSVTPIPSSTLGTTGTLPEQTTTPVATMSTIHPSSTPETTHTSTVLTTKATTTRATSSTSTPSSTPGTTWILTELTTAATTTAATGPTATPSSTPGTTWILTELTTTATTTASTGSTATPSSTPGTTWILTEPSTTATVTVPTGSTATASSTQATAGTPHVSTTATTPTVTSSKATPSSSPGTATALPALRSTATTPTATSFTAIPSSSLGTTWTRLSQTTTPTATMSTATPSSTPETVHTSTVLTATATTTGATGSVATPSSTPGTAHTTKVPTTTTTGFTATPSSSPGTALTPPVWISTTTTPTTTTPTTSGSTVTPSSIPGTTHTARVLTTTTTTVATGSMATPSSSTQTSGTPPSLTTTATTITATGSTTNPSSTPGTTPITPVLTSTATTPAATSSKATSSSSPRTATTLPVLTSTATKSTATSFTPIPSSTLWTTWTVPAQTTTPMSTMSTIHTSSTPETTHTSTVLTTTATMTRATNSTATPSSTLGTTRILTELTTTATTTAATGSTATLSSTPGTTWILTEPSTIATVMVPTGSTATASSTLGTAHTPKVVTTMATMPTATASTVPSSSTVGTTRTPAVLPSSLPTFSVSTVSSSVLTTLRPTGFPSSHFSTPCFCRAFGQFFSPGEVIYNKTDRAGCHFYAVCNQHCDIDRFQGACPTSPPPVSSAPLSSPSPAPGCDNAIPLRQVNETWTLENCTVARCVGDNRVVLLDPKPVANVTCVNKHLPIKVSDPSQPCDFHYECECICSMWGGSHYSTFDGTSYTFRGNCTYVLMREIHARFGNLSLYLDNHYCTASATAAAARCPRALSIHYKSMDIVLTVTMVHGKEEGLILFDQIPVSSGFSKNGVLVSVLGTTTMRVDIPALGVSVTFNGQVFQARLPYSLFHNNTEGQCGTCTNNQRDDCLQRDGTTAASCKDMAKTWLVPDSRKDGCWAPTGTPPTASPAAPVSSTPTPTPCPPQPLCDLMLSQVFAECHNLVPPGPFFNACISDHCRGRLEVPCQSLEAYAELCRARGVCSDWRGATGGLCDLTCPPTKVYKPCGPIQPATCNSRNQSPQLEGMAEGCFCPEDQILFNAHMGICVQACPCVGPDGFPKFPGERWVSNCQSCVCDEGSVSVQCKPLPCDAQGQPPPCNRPGFVTVTRPRAENPCCPETVCVCNTTTCPQSLPVCPPGQESICTQEEGDCCPTFRCRPQLCSYNGTFYGVGATFPGALPCHMCTCLSGDTQDPTVQCQEDACNNTTCPQGFEYKRVAGQCCGECVQTACLTPDGQPVQLNETWVNSHVDNCTVYLCEAEGGVHLLTPQPASCPDVSSCRGSLRKTGCCYSCEEDSCQVRINTTILWHQGCETEVNITFCEGSCPGASKYSAEAQAMQHQCTCCQERRVHEETVPLHCPNGSAILHTYTHVDECGCTPFCVPAPMAPPHTRGFPAQEATAV

SEQ ID NO: 9107 - protein, 154 aa, Homo Sapiens [sequence omitted]

SEQ ID NO: 9108 - protein, 181 aa, Homo Sapiens
MDTSRTPSVCRETGGAALSRGERRPQGRRGSPTPTAGPVHTGLANTSYTSPGLQRLKDSPQTAPDKGQCSTWGAGHFSTFDHHVYDFSGTCNYIFAATCKDAFPTFSVQLRRGPDGSISRIIVELGASVVTVSEAIISVKDIGVISLPYTSNGLQITPFGQSVRLVAKQLELELEVVWGPD

SEQ ID NO: 9109 - protein, 2439 aa, Homo Sapiens
MVQRWLLLSCCGALLSAGLANTSYTSPGLQRLKDSPQTAPDKGQCSTWGAGHFSTFDHHVYDFSGTCNYIFAATCKDAFPTFSVQLRRGPDGSISRIIVELGASVVTVSEAIISVKDIGVISLPYTSNGLQITPFGQSVRLVAKQLELELEVVWGPDSHLMVLVERKYMGQMCGLCGNFDGKVTNEFVSEEGKFLEPHKFAALQKLDDPGEICTFQDIPSTHVRQAQHARICTQLLTLVAPECSVSKEPFVLSCQADVAAAPQPGPQNSSCATLSEYSRQCSMVGQPVRRWRSPGLCSVGQCPANQVYQECGSACVKTCSNPQHSCSSSCTFGCFCPEGTVLNDLSNNHTCVPVTQCPCVLHGAMYAPGEVTIAACQTCRCTLGRWVCTERPCPGHCSLEGGSFVTTFDARPYRFHGTCTYILLQSPQLPEDGALMAVYDKSGVSHSETSLVAVVYLSRQDKIVISQDEVVTNNGEAKWLPYKTRNITVFRQTSTHLQMATSFGLELVVQLRPIFQAYVTVGPQFRGQTRGLCGNFNGDTTDDFTTSMGIAEGTASLFVDSWRAGNCPAALERETDPCSMSQLNKVCAETHCSMLLRTGTVFERCHATVNPAPFYKRCVYQACNYEETFPHICAALGDYVHACSLRGVLLWGWRSSVDNCTIPCTGNTTFSYNSQACERTCLSLSDRATECHHSAVPVDGCNCPDGTYLNQKGECVRKAQCPCILEGYKFILAEQSTVINGITCHCINGRLSCPQRPQMFLASCQAPKTFKSCSQSSENKFGAACAPTCQMLATGVACVPTKCEPGCVCAEGLYENADGQCVPPEECPCEFSGVSYPGGAELHTDCRTCSCSRGRWACQQGTHCPSTCTLYGEGHVITFDGQRFVFDGNCEYILATDVCGVNDSQPTFKILTENVICGNSGVTCSRAIKIFLGGLSVVLADRNYTVTGEEPHVQLGVTPGALSLVVDISIPGRYNLTLIWNRHMTILIRIARASQDPLCGLCGNFNGNMKDDFETRSRYVASSELELVNSWKESPLCGDVSFVTDPCSLNAFRRSWAERKCSVINSQTFATCHSKVYHLPYYEACVRDACGCDSGGDCECLCDAVAAYAQACLDKGVCVDWRTPAFCPIYCGFYNTHTQDGHGEYQYTQEANCTWHYQPCLCPSQPQSVPGSNIEGCYNCSQDEYFDHEEGVCVPCMPPTTPQPPTTPQLPTTGSRPTQVWPMTGTSTTIGLLSSTGPSPSSNHTPASPTQTPLLPATLTSSKPTASSGEPPRPTTAVTPQATSGLPPTATLRSTATKPTVTQATTRATASTASPATTSTAQSTTRTTMTLPTPATSGTSPTLPKSTNQELPGTTATQTTGPRPTPASTTGPTTPQPGQPTRPTATETTQTRTTTEYTTPQTPHTTHSPPTAGSPVPSTGPVTATSFHATTTYPTPSHPETTLPTHVPPFSTSLVTPSTHTVITPTHAQMATSASNHSAPTGTIPPPTTLKATGSTHTAPPITPTTSGTSQAHSSFSTNKTPTSLHSHTSSTHHPEVTPTSTTTITPNPTSTRTRTPVAHTNSATSSRPPPPFTTHSPPTGSSPFSSTGPMTATSFKTTTTYPTPSHPQTTLPTHVPPFSTSLVTPSTHTVITPTHAQMATSASIHSMPTGTIPPPTTLKATGSTHTAPTMTLTTSGTSQALSSLNTAKTSTSLHSHTSSTHHAEATSTSTTNITPNPTSTGTPPMTVTTSGTSQSRSSFSTAKTSTSLHSHTSSTHHPEVTSTSTTSITPNHTSTGTRTPVAHTTSATSSRLPTPFTTHSPPTGTTPISSTGPVTATSFQTTTTYPTPSHPHTTLPTHVPSFSTSLVTPSTHTVIIPTHTQMATSASIHSMPTGTIPPPTTIKATGSTHTAPPMTPTTSGTSQSPSSFSTAKTSTSLPYHTSSTHHPEVTPTSTTNITPKHTSTGTRTPVAHTTSASSSRLPTPFTTHSPPTGSSPFSSTGPMTATSFQTTTTYPTPSHPQTTLPTHVPPFSTSLVTPSTHTVIITTHTQMATSASIHSTPTGTVPPPTTLKATGSTHTAPPMTVTTSGTSQTHSSFSTATASSSFISSSSWLPQNSSSRPPSSPITTQLPHLSSATTPVSTTNQLSSSFSPSPSAPSTVSSYVPSSHSSPQTSSPSVGTSSSFVSAPVHSTTLSSGSHSSLSTHPTTASVSASPLFPSSPAASTTIRATLPHTISSPFTLSALLPISTVTVSPTPSSHLASSTIAFPSTPRTTASTHTAPAFSSQSTTSRSTSLTTRVPTSGFVSLTSGVTGIPTSPVTNLTTRHPGPTLSPTTRFLTSSLTAHGSTPASAPVSSLGTPTPTSPGVCSVREQQEEITFKGCMANVTVTRCEGACISAASFNIITQQVDARCSCCRPLHSYEQQLELPCPDPSTPGRRLVLTLQVFSHCVCSSVACGD

SEQ ID NO: 9110 - protein, 115 aa, Homo Sapiens
  misc_feature (1)..(1): Xaa can be any naturally occurring amino acid
XPPTTPQPPTTPQLPTTGSRPTQVWPMTGTSTTIGLLSSTGPSPSSNHTPASPTQTPLLPATLTSSKPTASSGGKEPPAEPMERAAAGGPRYTSGVGLGMALLPGSHLPLSRFPA

SEQ ID NO: 9111 - protein, 219 aa, Homo Sapiens
  misc_feature (1)..(1): Xaa can be any naturally occurring amino acid
XSSPFTLSALLPISTVTVSPTPSSHLASSTIAFPSTPRTTASTHTAPAFSSQSTTSRSTSLTTRVPTSGFVSLTSGVTGIPTSPVTNLTTRHPGPTLSPTTRFLTSSLTAHGSTPASAPVSSLGTPTPTSPGESTGGRPAPRPPRCSQPHPREVRAPHPGACCPISFNIITQQVDARCSCCRPLHSYEQQLELPCPDPSTPGRRLVLTLQVFSHCVCSS

SEQ ID NO: 9112 - protein, 136 aa, Homo Sapiens
MKTLPLFVCICALSACFSFSEGRERDHELRHRRHHHQSPKSHFELPHYPGLLAHQKPFIRKSYKCLHKRCRPKLPPSPNNPPKFPNPHQPPKHPDKNSSVVNPTLVATTQIPSVTFPSASTKITTLPNVTFLPQNA

SEQ ID NO: 9113 - protein, 377 aa, Homo Sapiens
MKTLPLFVCICALSACFSFSEGRERDHELRHRRHHHQSPKSHFELPHYPGLLAHQKPFIRKSYKCLHKRCRPKLPPSPNNPPKFPNPHQPPKHPDKNSSVVNPTLVATTQIPSVTFPSASTKITTLPNVTFLPQNATTISSRENVNTSSSVATLAPVNSPAPQDTTAAPPTPSATTPAPPSSSAPPETTAAPPTPSATTQAPPSSSAPPETTAAPPTPPATTPAPPSSSAPPETTAAPPTPSATTPAPLSSSAPPETTAVPPTPSATTLDPSSASAPPETTAAPPTPSATTPAPPSSPAPQETTAAPITTPNSSPTTLAPDTSETSAAPTHQTTTSVTTQTTTTKQPTSAPGQNKISRFLLYMKNLLNRIIDDMVEQ

SEQ ID NO: 9114 - protein, 377 aa, Homo Sapiens; identical to SEQ ID NO: 9113

SEQ ID NO: 9115 - protein, 377 aa, Homo Sapiens; identical to SEQ ID NO: 9113

SEQ ID NO: 9116 - protein, 85 aa, Homo Sapiens
MGGDHGYQLAVTKAENPTTAAPADTYPATGPADDEAPDAETTAAATTATTAAPTTATTAASTTARKDIPVLPKWVGDLPNGRVCP

SEQ ID NO: 9117 - protein, 90 aa, Homo Sapiens
MKFLAVLVLLGVSIFLVSAQNPTTAAPADTYPATGPADDEAPDAETTAAATTATTAAPTTATTAASTTARKDIPVLPKWVGDLPNGRVCP

SEQ ID NO: 9118 - protein, 80 aa, Homo Sapiens
MKFLAVLVLLGVSIFLVSAQNPTTAAPADTYPATGPADDEAPDAETTPTTATTAASTTARKDIPVLPKWVGDLPNGRVCP

SEQ ID NO: 9119 - protein, 2828 aa, Homo Sapiens
MPKRAHWGALSVVLILLWGHPRVALACPHPCACYVPSEVHCTFRSLASVPAGIAKHVERINLGFNSIQALSETSFAGLTKLELLMIHGNEIPSIPDGALRDLSSLQVFKFSYNKLRVITGQTLQGLSNLMRLHIDHNKIEFIHPQAFNGLTSLRLLHLEGNLLHQLHPSTFSTFTFLDYFRLSTIRHLYLAENMVRTLPASMLRNMPLLENLYLQGNPWTCDCEMRWFLEWDAKSRGILKCKKDKAYEGGQLCAMCFSPKKLYKHEIHKLKDMTCLKPSIESPLRQNRSRSIEEEQEQEEDGGSQLILEKFQLPQWSISLNMTDEHGNMVNLVCDIKKPMDVYKIHLNQTDPPDIDINATVALDFECPMTRENYEKLWKLIAYYSEVPVKLHRELMLSKDPRVSYQYRQDADEEALYYTGVRAQILAEPEWVMQPSIDIQLNRRQSTAKKVLLSYYTQYSQTISTKDTRQARGRSWVMIEPSGAVQRDQTVLEGGPCQLSCNVKASESPSIFWVLPDGSILKAPMDDPDSKFSILSSGWLRIKSMEPSDSGLYQCIAQVRDEMDRMVYRVLVQSPSTQPAEKDTVTIGKNPGESVTLPCNALAIPEAHLSWILPNRRIINDLANTSHVYMLPNGTLSIPKVQVSDSGYYRCVAVNQQGADHFTVGITVTKKGSGLPSKRGRRPGAKALSRVREDIVEDEGGSGMGDEENTSRRLLHPKDQEVFLKTKDDAINGDKKAKKGRRKLKLWKHSEKEPETNVAEGRRVFESRRRINMANKQINPERWADILAKVRGKNLPKGTEVPPLIKTTSPPSLSLEVTPPFPAISPPSASPVQTVTSAEESSADVPLLGEEEHVLGTISSASMGLEHNHNGVILVEPEVTSTPLEEVVDDLSEKTEEITSTEGDLKGTAAPTLISEPYEPSPTLHTLDTVYEKPTHEETATEGWSAADVGSSPEPTSSEYEPPLDAVSLAESEPMQYFDPDLETKSQPDEDKMKEDTFAHLTPTPTIWVNDSSTSQLFEDSTIGEPGVPGQSHLQGLTDNIHLVKSSLSTQDTLLIKKGMKEMSQTLQGGNMLEGDPTHSRSSESEGQESKSITLPDSTLGIMSSMSPVKKPAETTVGTLLDKDTTTATTTPRQKVAPSSTMSTHPSRRRPNGRRRLRPNKFRHRHKQTPPTTFAPSETFSTQPTQAPDIKISSQVESSLVPTAWVDNTVNTPKQLEMEKNAEPTSKGTPRRKHGKRPNKHRYTPSTVSSRASGSKPSPSPENKHRNIVTPSSETILLPRTVSLKTEGPYDSLDYMTTTRKIYSSYPKVQETLPVTYKPTSDGKEIKDDVATNVDKHKSDILVTGESITNAIPTSRSLVSTMGEFKEESSPVGFPGTPTWNPSRTAQPGRLQTGIPVTTSGENLTDPPLLKELEDVDFTSEFLSSLTVSTPFHQEEAGSSTTLSSIKVEVASSQAETTTLDQDHLETTVAILLSETRPQNHTPTAARMKEPASSSPSTILMSLGQTTTTKPALPSPRISQASRDSKENVFLNYVGNPETEATPVNNEGTQHMSGPNELSTPSSDQDAFNLSTKLELEKQVFGSRSLPRGPDSQRQDGRVHASHQLTRVPAKPILPTATVRLPEMSTQSASRYFVTSQSPRHWTNKPEITTYPSGALPENKQFTTPRLSSTTIPLPLHMSKPSIPSKFTDRRTDQFNGYSKVFGNNNIPEARNPVGKPPSPRIPHYSNGRLPFFTNKTLSFPQLGVTRRPQIPTSPAPVMRERKVIPGSYNRIHSHSTFHLDFGPPAPPLLHTPQTTGSPSTNLQNIPMVSSTQSSISFITSSVQSSGSFHQSSSKFFAGGPPASKFWSLGEKPQILTKSPQTVSVTAETDTVFPCEATGKPKPFVTWTKVSTGALMTPNTRIQRFEVLKNGTLVIRKVQVQDRGQYMCTASNLHGLDRMVVLLSVTVQQPQILASHYQDVTVYLGDTIAMECLAKGTPAPQISWIFPDRRVWQTVSPVEGRITLHENRTLSIKEASFSDRGVYKCVASNAAGADSLAIRLHVAALPPVIHQEKLENISLPPGLSIHIHCTAKAAPLPSVRWVLGDGTQIRPSQFLHGNLFVFPNGTLYIRNLAPKDSGRYECVAANLVGSARRTVQLNVQRAAANARITGTSPRRTDVRYGGTLKLDCSASGDPWPRILWRLPSKRMIDALFSFDSRIKVFANGTLVVKSVTDKDAGDYLCVARNKVGDDYVVLKVDVVMKPAKIEHKEENDHKVFYGGDLKVDCVATGLPNPEISWSLPDGSLVNSFMQSDDSGGRTKRYVVFNNGTLYFNEVGMREEGDYTCFAENQVGKDEMRVRVKVVTAPATIRNKTYLAVQVPYGDVVTVACEAKGEPMPKVTWLSPTNKVIPTSSEKYQIYQDGTLLIQKAQRSDSGNYTCLVRNSAGEDRKTVWIHVNVQPPKINGNPNPITTVREIAAGGSRKLIDCKAEGIPTPRVLWAFPEGVVLPAPYYGNRITVHGNGSLDIRSLRKSDSVQLVCMARNEGGEARLILQLTVLEPMEKPIFHDPISEKITAMAGHTISLNCSAAGTPTPSLVWVLPNGTDLQSGQQLQRFYHKADGMLHISGLSSVDAGAYRCVARNAAGHTERLVSLKVGLKPEANKQYHNLVSIINGETLKLPCTPPGAGQGRFSWTLPNGMHLEGPQTLGRVSLLDNGTLTVREASVFDRGTYVCRMETEYGPSVTSIPVIVIAYPPRITSEPTPVIYTRPGNTVKLNCMAMGIPKADITWELPDKSHLKAGVQARLYGNRFLHPQGSLTIQHATQRDAGFYKCMAKNILGSDSKTTYIHVF

SEQ ID NO: 9120 - protein, 213 aa, Homo Sapiens
MDTERVGDGKQHRRKQSQRLRWPCCLALVPDRHPSQLSSCTLCLLAAASQWESWAHFSKWHTEASTGTHLGKAKAEGLGCTVKNTPQLSICEPSHFGPSFVHSPHLLVDHDHRAGAATGRGQAGPSRASSVSPTFCPPTTSHHPVCAKGTDPVLVLQEEEQDLDGEKGPSSEGPEEEDGEGFSFKYSPGKLRGNQYKKMMTKEELEEEQRTEE

SEQ ID NO: 9121 - protein, 177 aa, Homo Sapiens
MEAPAELLAALPALATALALLLAWLLVRRGAAASPEPARAPPEPAPPAEATGAPAPSRPCAPEPAASPAGPEEPGEPAGLGELGEPAGPGEPEGPGDPAAAPAEAEEQAVEARQEEEQDLDGEKGPSSEGPEEEDGEGFSFKYSPGKLRGNQYKKMMTKEELEEEQRIELTSDLTSL

SEQ ID NO: 9122 - protein, 170 aa, Homo Sapiens
MEAPAELLAALPALATALALLLAWLLVRRGAAASPEPARAPPEPAPPAEATGAPAPSRPCAPEPAASPAGPEEPGEPAGLGELGEPAGPGEPEGPGDPAAAPAEAEEQAVEARQEEEQDLDGEKGPSSEGPEEEDGEGFSFKYSPGKLRGNQYKKMMTKEELEEEQRTEE

SEQ ID NO: 9123 - protein, 204 aa, Homo Sapiens
MEAPAELLAALPALATALALLLAWLLVRRGAAASPEPARAPPEPAPPAEATGAPAPSRPCAPEPAASPAGPEEPGEPAGLGELGEPAGPGEPEGPGDPAAAPAEAEEQAVEARQEEEQDLDGEKGPSSEGPEEEDGEGFSFKYSPGKLRGNQYKKMMTKEELEEEQRVQKEQLAAIFKLMKDNKETFGEMSDGDVQEQLRLYDM

SEQ ID NO: 9124 - protein, 22 aa, Homo Sapiens
MMTKEELEEEQRIELTSDLTSL

SEQ ID NO: 9125 - protein, 15 aa, Homo Sapiens
MMTKEELEEEQRTEE

SEQ ID NO: 9126 - protein, 15 aa, Homo Sapiens
MMTKEELEEEQRTEE

SEQ ID NO: 9127 - protein, 189 aa, Homo Sapiens
MAAPSGGWNGVGASLWAALLLGAVALRPAEAVSEPTTVAFDVRPGGVVHSFSHNVGPGDKYTCMFTYASQGGTNEQWQMSLGTSEDHQHFTCTIWRPQGKSYLYFTQFKAEVRGAEIEYAMAYSKAAFERESDVPLKTEEFEVTKTAGTERWGWGRGDATPIQGWAIGAVWRGGSAIGVLETVDQASTN

SEQ ID NO: 9128 - protein, 173 aa, Homo Sapiens
MAAPSGGWNGVGASLWAALLLGAVALRPAEAVSEPTTVAFDVRPGGVVHSFSHNVGPGDKYTCMFTYASQGGTNEQWQMSLGTSEDHQHFTCTIWRPQGKSYLYFTQFKAEVRGAEIEYAMAYSKAAFERESDVPLKTEEFEVTKTAVAHRPGAFKAELSKLVIVAKASRTEL

SEQ ID NO: 9129 - protein, 84 aa, Homo Sapiens
  misc_feature (1)..(1): Xaa can be any naturally occurring amino acid
XHQHFTCTIWRPQGKSYLYFTQFKAEVRGAEIEYAMAYSKAAFERESDVPLKTEEFEVTKTAVISAPQEKGDDQPHWTDGETEA

SEQ ID NO: 9130 - protein, 194 aa, Homo Sapiens
MAPKKDVKKPVAAAAAAPAPAPAPAPAPAPAKPKEEKIDLSAIKIEFSKEQQDEFKEAFLLFDRTGDSKITLSQVGDVLRALGTNPTNAEVRKVLGNPSNEELNAKKIEFEQFLPMMQAISNNKDQATYEDFVEGLRVFDKEGNGTVMGAELRHVLATLGEKMKEEEVEALMAGQEDSNGCINYEAFVKHIMSI

SEQ ID NO: 9131 - protein, 150 aa, Homo Sapiens
MSFSADQIAEFKEAFLLFDRTGDSKITLSQVGDVLRALGTNPTNAEVRKVLGNPSNEELNAKKIEFEQFLPMMQAISNNKDQATYEDFVEGLRVFDKEGNGTVMGAELRHVLATLGEKMKEEEVEALMAGQEDSNGCINYEAFVKHIMSI

SEQ ID NO: 9132 - protein, 63 aa, Homo Sapiens
MRFFCARCCSFGPEMPAVQLLLLACLVWDVGARTAQLRKANDQRSFYVEFGHFGLPGTEVRAN

SEQ ID NO: 9133 - protein, 504 aa, Homo Sapiens
MRFFCARCCSFGPEMPAVQLLLLACLVWDVGARTAQLRKANDQSGRCQYTFSVASPNESSCPEQSQAMSVIHNLQRDSSTQRLDLEATKARLSSLESLLHQLTLDQAARPQETQEGLQRELGTLRRERDQLETQTRELETAYSNLLRDKSVLEEEKKRLRQENENLARRLESSSQEVARLRRGQCPQTRDTARAVPPGSREVSTWNLDTLAFQELKSELTEVPASRILKESPSGYLRSGEGDTGCGELVWVGEPLTLRTAETITGKYGVWMRDPKPTYPYTQETTWRIDTVGTDVRQVFEYDLISQFMQGYPSKVHILPRPLESTGAVVYSGSLYFQGAESRTVIRYELNTETVKAEKEIPGAGYHGQFPYSWGGYTDIDLAVDEAGLWVIYSTDEAKGAIVLSKLNPENLELEQTWETNIRKQSVANAFIICGTLYTVSSYTSADATVNFAYDTGTGISKTLTIPFKNRYKYSSMIDYNPLEKKLFAWDNLNMVTYDIKLSKM

SEQ ID NO: 9134 - protein, 250 aa, Homo Sapiens
MAFCALTIVALYILSLKDQDRRVPNLPPSNITSSQEPALLPTASSSAPNTSLVTTPASLQVPEITFCEILPCQETYCCPIRGMKEVSSSPVQRQSEEKEFHQRRWSEDKSKSVLARNALSGPDWESDWIDTTISSIQIMEIQQIIDHQYCIQSLQCGTTEPLIVFQCKFTLGNICFHSKRGTKGLESHREISQEMTQGYQHIWSLPVAPFSDSMFHFRVAAPDLADCSTDPYFAGIFFTDYFFYFYRRCA

SEQ ID NO: 9135 - protein, 898 aa, Homo Sapiens
MDVVGENEALQQFFEAQGANGTLENPALDTSLLEEFLGNDFDLGALQRQLPDTPPYSASDSCSPPQVKGACYPTLRPTAGRTPAPFLHPTAAPAMPPMHPLQSTSGMGDSCQIHGGFHSCHSNASHLATPLDQSVSSHLGIGCSYPQQPLCHSPGASLPPTKKRKCTQALEDSGECRVWACHCRPMTSRSRSSEVQDPDSEGQNRMPTDQCSPALKWQPCHSVPWHSLLNSHYEKLPDVGYRVVTDKGFNFSPADEAFVCQKKNHFQITIHIQVWGSPKFVETEMGLKPIEMFYLKVFGTKVEATNQIIAIEQSQADRSKKIFNPVKIDLLADQVTKVTLGRLHFSETTANNMRKKGKPNPDQRYFMLVVGLYAANQDQFYLLSAHISERIIVRASNPGQFENDSDALWQRGQVPESIVCHGRVGINTDAPDEALVVCGNMKVMGTIMHPSDSRAKQNIQEVDTNEQLKRIAQMRIVEYDYKPEFASAMGINTAHQTGMIAQEVQEILPRAVREVGDVTCGNGETLENFLMVDKDQIFMENVGAVKQLCKLTNNLEERIEELEIWNRKLARLKRLSSWKSSASEASTISKSSRAVSASSPRRAVHKKNNKVYFSGKRQACPNWVFQTLVITLIAVMAFCLKDQDRRVPNLPPSNITSSQEPALLPTASSSAPNTSLVTTPASLQVPEITFCEILPCQETYCCPIRGMKEVSSSPVQRQSEEKEFHQRRWSDKSKSVLARNALSGPDWESDWIDTTISSIQIMEIQQIIDHQYCIQSLQCGSGNYNYNIPVNKHTPTNVKFSLEINTTEPLIVFQCKFTLGNICFHSKRGTKGLESHREISQEMTQGYQHIWSLPVAPFSDSMFHFRVAAPDLADCSTDPYFAGIFFTDYFFYFYRRCA

SEQ ID NO: 9136 - protein, 910 aa, Homo Sapiens
MDVVGENEALQQFFEAQGANGTLENPALDTSLLEEFLGNDFDLGALQRQLPDTPPYSASDSCSPPQVKGACYPTLRPTAGRTPAPFLHPTAAPAMPPMHPLQSTSGMGDSCQIHGGFHSCHSNASHLATPLDQSVSSHLGIGCSYPQQPLCHSPGASLPPTKKRKCTQALEDSGECRVWACHCRPMTSRSRSSEVQDPDSEGQNRMPTDQCSPALKWQPCHSVPWHSLLNSHYEKLPDVGYRVVTDKGFNFSPADEAFVCQKKNHFQITIHIQVWGSPKFVETEMGLKPIEMFYLKVFGTKVEATNQIIAIEQSQADRSKKIFNPVKIDLLADQVTKVTLGRLHFSETTANNMRKKGKPNPDQRYFMLVVGLYAANQDQFYLLSAHISERIIVRASNPGQFENDSDALWQRGQVPESIVCHGRVGINTDAPDEALVVCGNMKVMGTIMHPSDSRAKQNIQEVDTNEQLKRIAQMRIVEYDYKPEFASAMGINTAHQTGMIAQEVQEILPRAVREVGDVTCGNGETLENFLMVDKDQIFMENVGAVKQLCKLTNNLEERIEELEIWNRKLARLKRLSSWKSSASEASTISKSSRAVSASSPRRAVHKKNNKVYFSGKRQACPNWVFQTLVITLIAVMAFCALTIVALYILSLKDQDRRVPNLPPSNITSSQEPALLPTASSSAPNTSLVTTPASLQVPEITFCEILPCQETYCCPIRGMKEVSSSPVQRQSEEKEFHQRRWSEDKSKSVLARNALSGPDWESDWIDTTISSIQIMEIQQIIDHQYCIQSLQCGSGNYNYNIPVNKHTPTNVKFSLEINTTEPLIVFQCKFTLGNICFHSKRGTKGLESHREISQEMTQGYQHIWSLPVAPFSDSMFHFRVAAPDLADCSTDPYFAGIFFTDYFFYFYRRCA

SEQ ID NO: 9137 - protein, 250 aa, Homo Sapiens
MVFLALTIVALYILSLKDQDRRVPNLPPSNITSSQEPALLPTASSSAPNTSLVTTPASLQVPEITFCEILPCQETYCCPIRGMKEVSSSPVQRQSEEKEFHQRRWSEDKSKSVLARNALSGPDWESDWIDTTISSIQIMEIQQIIDHQYCIQSLQCGTTEPLIVFQCKFTLGNICFHSKRGTKGLESHREISQEMTQGYQHIWSLPVAPFSDSMFHFRVAAPDLADCSTDPYFAGIFFTDYFFYFYRRCA

SEQ ID NO: 9138 - protein, 375 aa, Homo Sapiens
  misc_feature (1)..(1): Xaa can be any naturally occurring amino acid
XIFMENVGAVKQLCKLTNNLEERIEELEIWNRKLARLKRLSSWKSSASEASTISKSSRAVSASSPRRAVHKKNNKVYFSGKRQACPNWVFQTLVITLIAVMAFCALTIVALYILSLKDQDRRVPNLPPSNITSSQEPALLPTASSSAPNTSLVTTPASLQVPEITFCEILPCQETYCCPIRGMKEVSSSPVQRQSEEKEFHQRRWSEDKSKSVLARNALSGPDWESDWIDTTISSIQIMEIQQIIDHQYCIQSLQCGSGNYNYNIPVNKHTPTNVKFSLEINTTEPLIVFQCKFTLGNICFHSKRGTKGLESHREISQEMTQGYQHIWSLPVAPFSDSMFHFRVAAPDLADCSTDPYFAGIFFTDYFFYFYRRCA

SEQ ID NO: 9139 - protein, 76 aa, Homo Sapiens
MRLSLPLLLLLLGAWAIPGGLGDRAPLTATAPQLDDEEMYSAHMPAHLRCDACRAVAYQLRSSRSGPSETSHRPRT

SEQ ID NO: 9140 - protein, 189 aa, Homo Sapiens
MRLSLPLLLLLLGAWAIPGGLGDRAPLTATAPQLDDEEMYSAHMPAHLRCDACRAVAYQMWQNLAKAETKLHTSNSGGRRELSELVYTDVLDRSCSRNWQDYGVREVDQVKRLTGPGLSEGPEPSISVMVTGGPWPTRLSRTCLHYLGEFGEDQIYEAHQQGRGALEALLCGGPQGACSEKVSATREEL

SEQ ID NO: 9141 - protein, 75 aa, Homo Sapiens
MRLSLPLLLLLLGAWAIPGGLGDRAPLTATAPQLDDEEMYSAHMPAHLRCDACRAVAYQRLCSYPPHLPLTEQQS

SEQ ID NO: 9142 - protein, 123 aa, Homo Sapiens
MRLSLPLLLLLLGAWAIPGGLGDRAPLTATAPQLDDEEMYSAHMPAHLRCDACRAVAYQSLLVPDVAKSGKGRDQTSYLKLWGAAGAERVGLHGCPGPELLPELAGLRSSRSGPSETSHRPRT

SEQ ID NO: 9143 - protein, 60 aa, Homo Sapiens
  misc_feature (1)..(1): Xaa can be any naturally occurring amino acid
XSLPLLLLLLGAWAIPGGLGDRAPLTATAPQLDDEEMYSAHMPAHLRCDACRAVAYQAHP

SEQ ID NO: 9144 - protein, 737 aa, Homo Sapiens
MALCSALMTIFTIKMGTAKQAIDQGRSPVIIDNTNIQAWEMKPYVEVAIGKGYRVEFHEPETWWKFDPEELEKRNKHGVSRKKIAQMLDRYEYQMSISIVMNSVEPSHKSTQRPPPPQGRQRERVLKKTGHRLSKTKQKRNRKRNKKQNSQNRIMEENSLEFLSDLTPGDQDPSQSEEEDIEKTRRESEYPFIDGLQNEVGDFVTGYKEKRWKNKDPKDSFQNVMSIVELDNTPKNYLSKEGDNLFVSLLLRPNEISVTCPILTQNLSCVTTDDCSGMKVEKHIRNRHTIALDTQDLSAETSCLFMKKREIVDKNLSHEPILCHQHGIRMSDKVLREEQVYTTKINHWAFFTTNLSDEDLQLGSDRQPYFGSWPAGPHKFICEQRPKKDRACKLAGPDSRGQWIQMIFTSVAASEPGNNPEILTDKLLIGNEDFSPPPETMDSFIETNLFRSCLPQPDIPKNALESTKNKKRRKKRIFNLVPNFDLLGQSRIGVKEREKCDLLTKNHGLKITLGEEKDRISERNSEEENKQKLMTFDHHPLWFYLDIIKATPLNIDGQRYSHCLSFNRLRCSASLYKNYIPSFVLHNLSSIWKPSFTNKKLFLTFESQTRVGNKLNDAGFISPEILHSHPDTSCSLGVTSDFHFLNERFDRKLKRWEEPKELPAEDSQDLTSTDYRSLELPLSQGFAFQLVKLFGSPGVPMESLLPDDYVVPLDWKTLKMIYLQWKMSVEKRQKKIG

SEQ ID NO: 9145 - protein, 737 aa, Homo Sapiens; identical to SEQ ID NO: 9144

SEQ ID NO: 9146 - protein, 752 aa, Homo Sapiens
MSYGEIEEFCLVRIVMALCSALMTIFTIKMGTAKQAIDQGRSPVIIDNTNIQAWEMKPYVEVAIGKGYRVEFHEPETWWKFDPEELEKRNKHGVSRKKIAQMLDRYEYQMSISIVMNSVEPSHKSTQRPPPPQGRQRERVLKKTGHRLSKTKQKRNRKRNKKQNSQNRIMEENSLEFLSDLTPGDQDPSQSEEEDIEKTRRESEYPFIDGLQNEVGDFVTGYKEKRWKNKDPKDSFQNVMSIVELDNTPKNYLSKEGDNLFVSLLLRPNEISVTCPILTQNLSCVTTDDCSGMKVEKHIRNRHTIALDTQDLSAETSCLFMKKREIVDKNLSHEPILCHQHGIRMSDKVLREEQVYTTKINHWAFFTTNLSDEDLQLGSDRQPYFGSWPAGPHKFICEQRPKKDRACKLAGPDSRGQWIQMIFTSVAASEPGNNPEILTDKLLIGNEDFSPPPETMDSFIETNLFRSCLPQPDIPKNALESTKNKKRRKKRIFNLVPNFDLLGQSRIGVKEREKCDLLTKNHGLKITLGEEKDRISERNSEEENKQKLMTFDHHPLWFYLDIIKATPLNIDGQRYSHCLSFNRLRCSASLYKNYIPSFVLHNLSSIWKPSFTNKKLFLTFESQTRVGNKLNDAGFISPEILHSHPDTSCSLGVTSDFHFLNERFDRKLKRWEEPKELPAEDSQDLTSTDYRSLELPLSQGFAFQLVKLFGSPGVPMESLLPDDYVVPLDWKTLKMIYLQWKMSVEKRQKKIG

SEQ ID NO: 9147 - protein, 583 aa, Homo Sapiens
MSYGEIEGKFLGPREEVTSEPRCKKLKSTTESYVFHNHSNADFHRIQEKTGNDWVPVTIIDVRGHSYLQENKIKTTDLHRPLHDEMPGNRPDVIESIDSQVLQEARPPLVSADDEIYSTSKAFIGPIYKPPEKKKRNEGRNEAHVLNGINDRGGQKEKQKFNSEKSEIDNELFQFYKEIEELEKEKDGFENSCKESEPSQEQFVPFYEGHNNGLLKPDEEKKDLSNKAMPSHCDYQQNLGNEPDKYPCNGQVIPTFCDTSFTSFRPEWQSVYPFIVPYGPPLPSLNYHLNIQRFSGPPNPPSNIFQAQDDSQIQNGYYVNNCHVNWNCMTFDQNNEYTDCSENRSSVHPSGNGCSMQDRYVSNGFCEVRERCWKDHCMDKHNGTDRFVNQQFQEEKLNKLQKLLILLRGLPGSGKTTLSRILLGQNRDGIVFSTDDYFHHQDGYRYNVNQLGDAHDWNQNRAKQAIDQGRSPVIIDNTNIQAWEMKPYVEVAIGKGYRVEFHEPETWWKFDPEELEKRNKHGVSRKKIAQMLDRYEYQMSISIVMNSVEPSHKSTQRPPPPQGRQRWGGSLGSHNRVCVTNNH

SEQ ID NO: 9148 - protein, 655 aa, Homo Sapiens
MSYGEIEGKFLGPREEVTSEPRCKKLKSTTESYVFHNHSNADFHRIQEKTGNDWVPVTIIDVRGHSYLQENKIKTTDLHRPLHDEMPGNRPDVIESIDSQVLQEARPPLVSADDEIYSTSKAFIGPIYKPPEKKKRNEGRNEAHVLNGINDRGGQKEKQKFNSEKSEIDNELFQFYKEIEELEKEKDGFENSCKESEPSQEQFVPFYEGHNNGLLKPDEEKKDLSNKAMPSHCDYQQNLGNEPDKYPCNGQVIPTFCDTSFTSFRPEWQSVYPFIVPYGPPLPSLNYHLNIQRFSGPPNPPSNIFQAQDDSQIQNGYYVNNCHVNWNCMTFDQNNEYTDCSENRSSVHPSGNGCSMQDRYVSNGFCEVRERCWKDHCMDKHNGTDRFVNQQFQEEKLNKLQKLLILLRGLPGSGKTTLSRILLGQNRDGIVFSTDDYFHHQDGYRYNVNQLGDAHDWNQNRAKQAIDQGRSPVIIDNTNIQAWEMKPYVEVAIGKGYRVEFHEPETWWKFDPEELEKRNKHGVSRKKIAQMLDRYEYQMSISIVMNSVEPSHKSTQRPPPPQGRQRFDRKLKRWEEPKELPAEDSQDLTSTDYRSLELPLSQGFAFQLVKLFGSPGVPMESLLPDDYVVPLDWKTLKMIYLQWKMSVEKRQKKIG

SEQ ID NO: 9149 - protein, 709 aa, Homo Sapiens
MSYGEIEGKFLGPREEVTSEPRCKKLKSTTESYVFHNHSNADFHRIQEKTGNDWVPVTIIDVRGHSYLQENKIKTTDLHRPLHDEMPGNRPDVIESIDSQVLQEARPPLVSADDEIYSTSKAFIGPIYKPPEKKKRNEGRNEAHVLNGINDRGGQKEKQKFNSEKSEIDNELFQFYKEIEELEKEKDGFENSCKESEPSQEQFVPFYEGHNNGLLKPDEEKKDLSNKAMPSHCDYQQNLGNEPDKYPCNGQVIPTFCDTSFTSFRPEWQSVYPFIVPYGPPLPSLNYHLNIQRFSGPPNPPSNIFQAQDDSQIQNGYYVNNCHVNWNCMTFDQNNEYTDCSENRSSVHPSGNGCSMQDRYVSNGFCEVRERCWKDHCMDKHNGTDRFVNQQFQEEKLNKLQKLLILLRGLPGSGKTTLSRILLGQNRDGIVFSTDDYFHHQDGYRYNVNQLGDAHDWNQNRAKQAIDQGRSPVIIDNTNIQAWEMKPYVEVAIGKGYRVEFHEPETWWKFDPEELEKRNKHGVSRKKIAQMLDRYEYQMSISIVMNSVEPSHKSTQRPPPPQGRQRERVLKKTGHRLSKTKQKRNRKRNKKQNSQNRIMEENSLEFLSDLTPGDQDPSQSEEEDIEKTRRESEYPFIDGLQNEVGDFVTGYKEKRWKNKDPKDSFQNVMSIVELDNTPKNYLSKEGDNLFVSLLLRPNEISVTCPILTQ

SEQ ID NO: 9150 - protein, 125 aa, Homo Sapiens
MAGAGPTMLLREENGCCSRRQSSSSAGDSDGEREDSAAERARQQLEALLNKTMRIRMTDGRTLVGCFLCTDRDCNVILGSAQEFLKPSDSFSAGEPRVLGLAMVPGHHIVSIEVQRESLTGPPYL

SEQ ID NO: 9151 - protein, 135 aa, Homo Sapiens
MAGAGPTMLLREENGCCSRRQSSSSAGDSDGEREDSAAERARQQLEALLNKTMRIRMTDGRTLVGCFLCTDRDCNVILGSAQEFLKPSGQCPGNAHPPDSFSAGEPRVLGLAMVPGHHIVSIEVQRESLTGPPYL

SEQ ID NO: 9152 - protein, 173 aa, Homo Sapiens
MAVAVGVRAAPVLGLARALVLGLRGSQAARWRGWGTAAPGSLWALCECPAGCRELWFRGRAAWAARSERLLHPAQDSDGEREDSAAERARQQLEALLNKTMRIRMTDGRTLVGCFLCTDRDCNVILGSAQEFLKPSDSFSAGEPRVLGLAMVPGHHIVSIEVQRESLTGPPYL

SEQ ID NO: 9153 - protein, 99 aa, Homo Sapiens
MDSDGEREDSAAERARQQLEALLNKTMRIRMTDGRTLVGCFLCTDRDCNVILGSAQEFLKPSDSFSAGEPRVLGLAMVPGHHIVSIEVQRESLTGPPYL

SEQ ID NO: 9154 - protein, 73 aa, Homo Sapiens
MRIRMTDGRTLVGCFLCTDRDCNVILGSAQEFLKPSDSFSAGEPRVLGLAMVPGHHIVSIEVQRESLTGPPYL

SEQ ID NO: 9155 - protein, 83 aa, Homo Sapiens
MRIRMTDGRTLVGCFLCTDRDCNVILGSAQEFLKPSGQCPGNAHPPDSFSAGEPRVLGLAMVPGHHIVSIEVQRESLTGPPYL

SEQ ID NO: 9156 - protein, 252 aa, Homo Sapiens
MCDFMNLSLADCLLVNLAYESSVFCTSIVAQDSRGHIYHGRNLDYPFGNVLRKLTVDVQFLKNGQIAFTGTTFIGYVGLWTGQSPHKFTVSGDERDKGWWWENAIAALFRRHIPVSWLIRATLSESENFEAAVGKLAKTPLIADVYYIVGGTSPREGVVITRNRDGPADIWPLDPLNGAWFRVETNYDHWKPAPKEDDRRTSAIKALNATGQANLSLEALFQVTCVTVSCIPRMFGVLLIVNMKNSVKSSGR

SEQ ID NO: 9157 - protein, 359 aa, Homo Sapiens
MRTADREARPGLPSLLLLLLAGAGLSAASPPAAPRFNVSLDSVPELRWLPVLRHYDLDLVRAAMAQVIGDRVPKWVHVLIGKVVLELERFLPQPFTGEIRGMCDFMNLSLADCLLVNLAYESSVFCTSIVAQDSRGHIYHGRNLDYPFGNVLRKLTVDVQFLKNGQIAFTGTTFIGYVGLWTGQSPHKFTVSGDERDKGWWWENAIAALFRRHIPVSWLIRATLSESENFEAAVGKLAKTPLIADVYYIVGGTSPREGVVITRNRDGPADIWPLDPLNGAWFRVETNYDHWKPAPKEDDRRTSAIKALNATGQANLSLEALFQILSVVPVYNNFTIYTTVMSAGSPDKYMTRIRNPSRK

SEQ ID NO: 9158 - protein, 323 aa, Homo Sapiens
MRTADREARPGLPSLLLLLLAGAGLSAASPPAAPRFNVSLDSVPELRWLPVLRHYDLDLVRAAMAQVIGDRVPKWVHVLIGKVVLELERFLPQPFTGEIRGMCDFMNLSLADCLLVNLAYESSVFCTSIVAQDSRGHIYHGRNLDYPFGNVLRKLTVDVQFLKNGQIAFTGTTFIGYVGLWTGQSPHKFTVSGDERDKGWWWENAIAALFRRHIPVSWLIRATLSESENFEAAVGKLAKTPLIADVYYIVGGTSPREGVVITRNRDGPADIWPLDPLNGAWFRVETNYDHWKPAPKEDDRRTSAIKALNATGQANLSLEALFQ

SEQ ID NO: 9159 - protein, 167 aa, Homo Sapiens
MRTADREARPGLPSLLLLLLAGAGLSAASPPAAPRFNVSLDSVPELRWLPVLRHYDLDLVRAAMAQVIGDRVPKWVHVLIGKVVLELERFLPQPFTGEIRGMCDFMNLSLADCLLVNLAYESSVFCTSIVAQDSRGHIYHGRNLDYPFGNVLRKLTVDVQFLKNGQV

SEQ ID NO: 9160 - protein, 139 aa, Homo Sapiens
  misc_feature (1)..(1): Xaa can be any naturally occurring amino acid
XDKGWWWENAIAALFRRHIPVSWLIRATLSESENFEAAVGKLAKTPLIADVYYIVGGTSPREGVVITRNRDGPADIWPLDPLNGAWFRVETNYDHWKPAPKEDDRRTSAIKALNATGQANLSLEALFQLHNLYYGNERR

SEQ ID NO: 9161 - protein, 222 aa, Homo Sapiens
  misc_feature (1)..(1): Xaa can be any naturally occurring amino acid
XTSIVAQDSRGHIYHGRNLDYPFGNVLRKLTVDVQFLKNGQIAFTGTTFIGYVGLWTGQSPHKFTVSGDERDKGWWWENAIAALFRRHIPVSWLIRATLSESENFEAAVGKLAKTPLIADVYYIVGGTSPREGVVITRNRDGPADIWPLDPLNGAWFRVETNYDHWKPAPKEDDRRTSAIKALNATGQANLSLEALFQILSVVPVYNKLFPLAEFPEVGLLS

SEQ ID NO: 9162 - protein, 411 aa, Homo Sapiens
MLLKTVLLLGHVAQVLMLDNGLLQTPPMGWLAWERFRCNINCDEDPKNCISEQLFMEMADRMAQDGWRDMGYTYLNIDDCWIGGRDASGRLMPDPKRFPHGIPFLADYVHSLGLKLGIYADMGNFTCMGYPGTTLDKVVQDAQTFAEWKVDMLKLDGCFSTPEERAQGYPKMAAALNATGRPIAFSCSWPAYEGGLPPRVNYSLLADICNLWRNYDDIQDSWWSVLSILNWFVEHQDILQPVAGPGHWNDPDMLLIGNFGLSLEQSRAQMALWTVLAAPLLMSTDLRTISAQNMDILQNPLMIKINQDPLGIQGRRIHKEKSLIEVYMRPLSNKASALVFFSCRTDMPYRYHSSLGQLNFTGSVIYEAQDVYSGDIISGLRDETNFTVIINPSGVVMWYLYPIKNLEMSQQ

SEQ ID NO: 9163 - protein, 411 aa, Homo Sapiens; identical to SEQ ID NO: 9162

SEQ ID NO: 9164 - protein, 411 aa, Homo Sapiens; identical to SEQ ID NO: 9162

SEQ ID NO: 9165 - protein, 743 aa, Homo Sapiens
MEAVAVAAAVGVLLLAGAGGAAGDEAREAAAVRALVARLLGPGPAADFSVSVERALAAKPGLDTYSLGGGGAARVRVRGSTGVAAAAGLHRYLRDFCGCHVAWSGSQLRLPRPLPAVPGELTEATPNRYRYYQNVCTQSYSFVWWDWARWEREIDWMALNGINLALAWSGQEAIWQRVYLALGLTQAEINEFFTGPAFLAWGRMGNLHTWDGPLPPSWHIKQLYLQHRVLDQMRSFGMTPVLPAFAGHVPEAVTRVFPQVNVTKMGSWGHFNCSYSCSFLLAPEDPIFPIIGSLFLRELIKEFGTDHIYGADTFNEMQPPSSEPSYLAAATTAVYEAMTAVDTEAVWLLQGWLFQHQPQFWGPAQIRAVLGAVPRGRLLVLDLFAESQPVYTRTASFQGQPFIWCMLHNFGGNHGLFGALEAVNGGPEAARLFPNSTMVGTGMAPEGISQNEVVYSLMAELGWRKDPVPDLAAWVTSFAARRYGVSHPDAGAAWRLLLRSVYNCSGEACRGHNRSPLVRRPSLQMNTSIWYNRSDVFEAWRLLLTSAPSLATSPAFRYDLLDLTRQAVQELVSLYYEEARSAYLSKELASLLRAGGVLAYELLPALDEVLASDSRFLLGSWLEQARAAAVSEAEADFYEQNSRYQLTLWGPEGNILDYANKQLAGLVANYYTPRWRLFLEALVDSVAQGIPFQQHQFDKNVFQLEQAFVLSKQRYPSQPRGDTVDLAKKIFLKYYPRWVAGSW

SEQ ID NO: 9166 - protein, 81 aa, Homo Sapiens
MGDLFQGRGPSRVGCAPAHDTARRYRYYQNVCTQSYSFVWWDWARWEREIDWMALNGINLALAWSGQEAIWQRVYLALGLT

SEQ ID NO: 9167 - protein, 122 aa, Homo Sapiens
RGAAPLPARLLWLPRGLVRLSAAPAAATASRAGGADRGHAQQVYLALGLTQAEINEFFTGPAFLAWGRMGNLHTWDGPLPPSWHIKQLYLQHRVLDQMRSFGMTPVLPAFAGHVPEAVTSGY

SEQ ID NO: 9168 - protein, 65 aa, Homo Sapiens
  misc_feature (1)..(1): Xaa can be any naturally occurring amino acid
XFGTDHIYGADTFNEMQPPSSEPSYLAAATTAVYEAMTAVLGARPDQGCAGSCAPWPPPGSGPVC

SEQ ID NO: 9169 - protein, 170 aa, Homo Sapiens
  misc_feature (1)..(1): Xaa can be any naturally occurring amino acid
XGRRGAAPLPARLLWLPRGLVRLSAAPAAATASRAGGADRGHAQQVYLALGLTQAEINEFFTGPAFLAWGRMGNLHTWDGPLPPSWHIKQLYLQHRVLDQMRSFGMTPVLPAFAGHVPEAVTRVFPQVNVTKMGSWGHFNCSYSCSFLLAPEDPIFPIIGSLFLRELIKE

SEQ ID NO: 9170 - protein, 534 aa, Homo Sapiens
MATALMAVVLRAAAVAPRLRGRGGTGGARRLSCGARRRAARGTSPGRRLSTAWSQPQPPPEEYAGADDVSQSPVAEEPSWVPSPRPPVPHESPEPPSGRSLVQRDIQAFLNQCGASPGEARHWLTQFQTCHHSADKPFAVIEVDEEVLKCQQGVSSLAFALAFLQRMDMKPLVVLGLPAPTAPSGCLSFWEAKAQLAKSCKVLVDALRHNAAAAVPFFGGGSVLRAAEPAPHASYGGIVSVETDLLQWCLESGSIPILCPIGETAARRSVLLDSLEVTASLAKALRPTKIIFLNNTGGLRDSSHKVLSNVNLPADLDLVCNAEWVSTKERQQMRLIVDVLSRLPHHSSAVITAASTLLTELFSNKGSGTLFKNAERMLRVRSLDKLDQGRLVDLVNASFGKKLRDDYLASLRPRLHSIYVSEGYNAAAILTMEPVLGGTPYLDKFVVSSSRQGQGSGQMLWECLRRDLQTLFWRSRVTNPINPWYFKHSDGSFSNKQWIFFWFGLADIRDSYELVNHAKGLPDSFHKPASDPGS

SEQ ID NO: 9171 - protein, 511 aa, Homo Sapiens
SCGARRRAARGTSPGRRLSTAWSQPQPPPEEYAGADDVSQSPVAEEPSWVPSPRPPVPHESPEPPSGRSLVQRDIQAFLNQCGASPGEARHWLTQFQTCHHSADKPFAVIEVDEEVLKCQQGVSSLAFALAFLQRMDMKPLVVLGLPAPTAPSGCLSFWEAKAQLAKSCKVLVDALRHNAAAAVPFFGGGSVLRAAEPAPHASYGGIVSVETDLLQWCLESGSIPILCPIGETAARRSVLLDSLEVTASLAKALRPTKIIFLNNTGGLRDSSHKVLSNVNLPADLDLVCNAEWVSTKERQQMRLIVDVLSRLPHHSSAVITAASTLLTELFSNKGSGTLFKNAERMLRVRSLDKLDQGRLVDLVNASFGKKLRDDYLASLRPRLHSIYVSEGLPLSRCARYNAAAILTMEPVLGGTPYLDKFVVSSSRQGQGSGQMLWECLRRDLQTLFWRSRVTNPINPWYFKHSDGSFSNKQWIFFWFGLADIRDSYELVNHAKGLPDSFHKPASDPGS

SEQ ID NO: 9172 - protein, 104 aa, Homo Sapiens
MSPPPLLQPLLLLLPLLNVEPSGATLIRIPLHRVQPGRRILNLLRGWREPAELPKLGAPSPGDKPIFVPLSNYRDGYTTDLIPKPLAPSRPMGPSLPFNMELGG

SEQ ID NO: 9173 - protein, 268 aa, Homo Sapiens
MSPPPLLQPLLLLLPLLNVEPSGATLIRIPLHRVQPGRRILNLLRGWREPAELPKLGAPSPGDKPIFVPLSNYRDVQYFGEIGLGTPPQNFTVAFDTGSSNLWVPSRRCHFFSVPCSSSSFQANGTKFAIQYGTGRVDGILSEDKLTIGGIKGASVIFGEALWEPSLVFAFAHFDGILGLGFPILSVEGVRPPMDVLVEQGLLDKPVFSFYLNRDPEEPDGGELVLGGSDPAHYIPPLTFVPVTVPAYWQIHMERVKVGPGLTLCAKG

SEQ ID NO: 9174 - protein, 420 aa, Homo Sapiens
MSPPPLLQPLLLLLPLLNVEPSGATLIRIPLHRVQPGRRILNLLRGWREPAELPKLGAPSPGDKPIFVPLSNYRDVQYFGEIGLGTPPQNFTVAFDTGSSNLWVPSRRCHFFSVPCWLHHRFDPKASSSFQANGTKFAIQYGTGRVDGILSEDKLTIGGIKGASVIFGEALWEPSLVFAFAHFDGILGLGFPILSVEGVRPPMDVLVEQGLLDKPVFSFYLNRDPEEPDGGELVLGGSDPAHYIPPLTFVPVTVPAYWQIHMERVKVGPGLTLCAKGCAAILDTGTSLITGPTEEIRALHAAIGGIPLLAGEYIILCSEIPKLPAVSFLLGGVWFNLTAHDYVIQTTRNGVRLCLSGFQALDVPPPAGPFWILGDVFLGTYVAVFDRGDMKSSARVGLARARTRGADLGWGETAQAQFPG

SEQ ID NO: 9175 - protein, 237 aa, Homo Sapiens
MLPDGPGSSLWGNPGLQTSDSPNAVHEVEKWLPRLHALVVGPGLGRDDALLRNVQGILEVSKARDIPVVIDADGLWLVAQQPALIHGYRKAVLTPNHVEFSRLYDAVLRGPMDSDDSHGSVLRLSQALGNVTVVQKGERDILSNGQQVLVCSQEGSSRRCGGQGDLLSGSLGVLVHWALLAGPQKTNGSSPLLVAAFGACSLTRQCNHQAFQKHGRSTTTSDMIAEVGAAFSKLFET

SEQ ID NO: 9176 - protein, 390 aa, Homo Sapiens
MVTRAGAGTAVAGAVVVALLSAALALYGPPLDAVLERAFSLRKAHSIKDMENTLQLVRNIIPPLSSTKHKGQDGRIGVVGGCQEYTGAPYFAAISALKVGADLSHVFCASAAAPVIKAYSPELIVHPVLDSPNAVHEVEKWLPRLHALVVGPGLGRDDALLRNVQGILEVSKARDIPVVIDADGLWLVAQQPALIHGYRKAVLTPNHVEFSRLYDAVLRGPMDSDDSHGSVLRLSQALGNVTVVQKGERDILSNGQQVLVCSQEGSSRRCGGQGDLLSGSLGVLVHWALLAGPQKTNGGISDLKLTIWGPEIETGVKTRAQGSCGPRTTTPTSPHLLLSPSPQVQPSPGGRVWRLLSHQAVQPPSLPEARSLHHHLRHDRRGGGRLQQAL

SEQ ID NO: 9177 - protein, 260 aa, Homo Sapiens
MSRLRALLGLGLLVAGSRVPRIKSQTIACRSGPTWWGPQRLNSGGRWDSEVMASTVVKYLSQEEAQAVDQELFNEYQFSVDQLMELAGLSCATAIAKAYPPTSMSRSPPTVLVICGPGNNGGDGLVCARHLKLFGYEPTIYYPKRPNKPLFTALVTQCQKMDIPFLGEMPAELQGRCSGTVPQHPECPEGTHCAHCQHRHSLRMGRGEGKCWRDPARLAHIPHSPQKICNPVYRSLPLPGGSFCATCSGEEVPAEPATLP

SEQ ID NO: 9178 - protein, 245 aa, Homo Sapiens
MSRLRALLGLGLLVAGSRVPRIKSQTIACRSGPTWWGPQRLNSGGRWDSEVMASTVVKYLSQEEAQAVDQELFNEYQFSVDQLMELAGLSCATAIAKAYPPTSMSRSPPTVLVICGPGNNGGDGLVCARHLKLFGYEPTIYYPKRPNKPLFTALVTQCQKMDIPFLGEMPAEPMTIDELYELVVDAIFGFSFKGDVREPFHSILSVLKGLTVPIASIDIPSGAGIQKVGWGRLGPYPPDSCPHQV

SEQ ID NO: 9179 - protein, 288 aa, Homo Sapiens
MSRLRALLGLGLLVAGSRVPRIKSQTIACRSGPTWWGPQRLNSGGRWDSEVMASTVVKYLSQEEAQAVDQELFNEYQFSVDQLMELAGLSCATAIAKAYPPTSMSRSPPTVLVICGPGNNGGDGLVCARHLKLFGYEPTIYYPKRPNKPLFTALVTQCQKMDIPFLGEMPAEPMTIDELYELVVDAIFGFSFKGDVREPFHSILSVLKGLTVPIASIDIPSGWDVEKGNAGGIQPDLLISLTAPKKSATQFTGRYHYLGGRFVPPALEKKYQLNLPPYPDTECVYRLQ

SEQ ID NO: 9180 - protein, 128 aa, Homo Sapiens
MCSLALQQLISMDLFWRLFFVCGQEGLRALEATGMMLRVLVGAVLPAMLLAAPPPINKLALFPDKSAWCEAKNITQIVGHSGCEAKSIQNRACLGQCFSYSVPNTFPQSTESLVHCDSCMPAQSMWEI

SEQ ID NO: 9181 - protein, 215 aa, Homo Sapiens
MCSLALQQLISMDLFWRLFFVCGQEGLRALEATGMMLRVLVGAVLPAMLLAAPPPINKLALFPDKSAWCEAKNITQIVGHSGCEAKSIQNRACLGQCFSYSVPNTFPQSTESLVHCDSCMPAQSMWEIVTLECPGHEEVPRVDKLVEKILHCSCQACGKEPSHEGLSVYVQGEDGPGSQPGTHPHPHPHPHPGGQTPEPEDPPGAPHTEEEGAED

SEQ ID NO: 9182 - protein, 163 aa, Homo Sapiens
MLRVLVGAVLPAMLLAAPPPINKLALFPDKSAWCEAKNITQIVGHSGCEAKSIQNRACLGQCFSYSVPNTFPQSTESLVHCDSCMPAQSMWEIVTLECPGHEEVPRVDKLVEKILHCSCQACGKEPSHEGLSVYVQGEDGPGSQPGTHPHPHPHPHPGGQTPE

SEQ ID NO: 9183 - protein, 109 aa, Homo Sapiens
MMLRVLVGAVLPAMLLAAPPPINKLALFPDKSAWCEAKNITQIVGHSGCEAKSIQNRACLGQCFSYSVPNTFPQSTESLVHCDSCMPAQSMWEIVTLECPGHEEVPRVD

SEQ ID NO: 9184 - protein, 116 aa, Homo Sapiens
MMLRVLVGAVLPAMLLAAPPPINKLALFPDKSAWCEAKNITQIVGHSGCEAKSIQNRACLGQCFSYSVPNTFPQSTESLVHCDSCMPAQSMWEIVTLECPGHEEVPRVDKLVEKIL

SEQ ID NO: 9185 - protein, 117 aa, Homo Sapiens
MMLRVLVGAVLPAMLLAAPPPINKLALFPDKSAWCEAKNITQIVGHSGCEAKSIQNRACLGQCFSYSVPNTFPQSTESLVHCDSCMPAQSMWEIVTLECPGHEEVPRVDKLVEKILH

SEQ ID NO: 9186 - protein, 128 aa, Homo Sapiens
MMLRVLVGAVLPAMLLAAPPPINKLALFPDKSAWCEAKNITQIVGHSGCEAKSIQNRACLGQCFSYSVPNTFPQSTESLVHCDSCMPAQSMWEIVTLECPGHEEVPRVDKLVEKILHCSCQACGKEPS

SEQ ID NO: 9187 - protein, 181 aa, Homo Sapiens
MMLRVLVGAVLPAMLLAAPPPINKLALFPDKSAWCEAKNITQIVGHSGCEAKSIQNRACLGQCFSYSVPNTFPQSTESLVHCDSCMPAQSMWEIVTLECPGHEEVPRVDKLVEKILHCSCQACGKEPSHEGLSVYVQGEDGPGSQPGTHPHPHPHPHPGGQTPEPEDPPGAPHTEEEGAED

SEQ ID NO: 9188 - protein, 181 aa, Homo Sapiens; identical to SEQ ID NO: 9187

SEQ ID NO: 9189 - protein, 181 aa, Homo Sapiens; identical to SEQ ID NO: 9187

SEQ ID NO: 9190 - protein, 181 aa, Homo Sapiens; identical to SEQ ID NO: 9187

SEQ ID NO: 9191 - protein, 181 aa, Homo Sapiens; identical to SEQ ID NO: 9187

SEQ ID NO: 9192 - protein, 181 aa, Homo Sapiens; identical to SEQ ID NO: 9187

SEQ ID NO: 9193 - protein, 216 aa, Homo Sapiens
MPGNLMSQTSRAVSIWKFPAKLGKTHGHRALEATGMMLRVLVGAVLPAMLLAAPPPINKLALFPDKSAWCEAKNITQIVGHSGCEAKSIQNRACLGQCFSYSVPNTFPQSTESLVHCDSCMPAQSMWEIVTLECPGHEEVPRVDKLVEKILHCSCQACGKEPSHEGLSVYVQGEDGPGSQPGTHPHPHPHPHPGGQTPEPEDPPGAPHTEEEGAED

SEQ ID NO: 9194 - protein, 165 aa, Homo Sapiens
EFILVQADTPSSPSIDQVEPYSSTAQVQFDEPEATGGVPILKYKAEWRAVGEEVWHSKWYDAKEASMEGIVTIVGLKPETTYAVRLAALNGKGLGEISAASEFKTQPVHSPPPPASASSSTPVPLSPPDTTWPLPALATTEPAKNIAQNHCCNMFQAGLHNALMK

SEQ ID NO: 9195 - protein, 133 aa, Homo Sapiens
MLQTKDLIWTLFFLGTAAKPKITYVENQTAMELEEQVTLTCEASGDPIPSITWRTSTRNISSEEKTLDGHMVVRSHARVSSLTLKSIQYTDAGEYICTASNTIGQDSQSMYLEVQYAPKLQGPVAVYTWEGNQ

SEQ ID NO: 9196 - protein, 136 aa, Homo Sapiens [sequence omitted]

SEQ ID NO: 9197 - protein, 858 aa, Homo Sapiens
MLQTKDLIWTLFFLGTAVSLQVDIVPSQGEISVGESKFFLCQVAGDAKDKDISWFSPNGEKLTPNQQRISVVWNDDSSSTLTIYNANIDDAGIYKCVVTGEDGSESEATVNVKIFQKLMFKNAPTPQEFREGEDAVIVCDVVSSLPPTIIWKHKGRDVILKKDVRFIVLSNNYLQIRGIKKTDEGTYRCEGRILARGEINFKDIQVIVNVPPTIQARQNIVNATANLGQSVTLVCDAEGFPEPTMSWTKDGEQIEQEEDDEKYIFSDDSSQLTIKKVDKNDEAEYICIAENKAGEQDATIHLKVFAKPKITYVENQTAMELEEQVTLTCEASGDPIPSITWRTSTRNISSEEKASWTRPEKQETLDGHMVVRSHARVSSLTLKSIQYTDAGEYICTASNTIGQDSQSMYLEVQYAPKLQGPVAVYTWEGNQVNITCEVFAYPSATISWFRDGQLLPSSNYSNIKIYNTPSASYLEVTPDSENDFGNYNCTAVNRIGQESLEFILVQADTPSSPSIDQVEPYSSTAQVQFDEPEATGGVPILKYKAEWRAVGEEVWHSKWYDAKEASMEGIVTIVGLKPETTYAVRLAALNGKGLGEISAASEFKTQPVQGEPSAPKLEGQMGEDGNSIKVNLIKQDDGGSPIRHYLVRYRALSSEWKPEIRLPSGSDHVMLKSLDWNAEYEVYVVAENQQGKSKAAHFVFRTSAQPTAIPANGSPTSGLSTGAIVGILIVIFVLLLVVVDITCYFLNKCGLFMCIAVNLCGKAGPGAKGKDMEEGKAAFSKDESKEPIVEVRTEEERTPNHDGGKHTEPNETTPLTEPEKGPVEAKPECQETETKPAPAEVKTVPNDATQTKENESKA

SEQ ID NO: 9198 - protein, 725 aa, Homo Sapiens
MLQTKDLIWTLFFLGTAVSLQVDIVPSQGEISVGESKFFLCQVAGDAKDKDISWFSPNGEKLTPNQQRISVVWNDDSSSTLTIYNANIDDAGIYKCVVTGEDGSESEATVNVKIFQKLMFKNAPTPQEFREGEDAVIVCDVVSSLPPTIIWKHKGRDVILKKDVRFIVLSNNYLQIRGIKKTDEGTYRCEGRILARGEINFKDIQVIVNVPPTIQARQNIVNATANLGQSVTLVCDAEGFPEPTMSWTKDGEQIEQEEDDEKYIFSDDSSQLTIKKVDKNDEAEYICIAENKAGEQDATIHLKVFAKPKITYVENQTAMELEEQVTLTCEASGDPIPSITWRTSTRNISSEEKTLDGHMVVRSHARVSSLTLKSIQYTDAGEYICTASNTIGQDSQSMYLEVQYAPKLQGPVAVYTWEGNQVNITCEVFAYPSATISWFRDGQLLPSSNYSNIKIYNTPSASYLEVTPDSENDFGNYNCTAVNRIGQESLEFILVQADTPSSPSIDQVEPYSSTAQVQFDEPEATGGVPILKYKAEWRAVGEEVWHSKWYDAKEASMEGIVTIVGLKPETTYAVRLAALNGKGLGEISAASEFKTQPVREPSAPKLEGQMGEDGNSIKVNLIKQDDGGSPIRHYLVRYRALSSEWKPEIRLPSGSDHVMLKSLDWNAEYEVYVVAENQQGKSKAAHFVFRTSAQPTAIPATLGGNSASYTFVSLLFSAVTLLLLC

SEQ ID NO: 9199 - protein, 364 aa, Homo Sapiens
MLQTKDLIWTLFFLGTAVSLQVDIVPSQGEISVGESKFFLCQVAGDAKDKDISWFSPNGEKLTPNQQRISVVWNDDSSSTLTIYNANIDDAGIYKCVVTGEDGSESEATVNVKIFQKLMFKNAPTPQEFREGEDAVIVCDVVSSLPPTIIWKHKGRDVILKKDVRFIVLSNNYLQIRGIKKTDEGTYRCEGRILARGEINFKDIQVIVNVPPTIQARQNIVNATANLGQSVTLVCDAEGFPEPTMSWTKDGEQIEQEEDDEKYIFSDDSSQLTIKKVDKNDEAEYICIAENKAGEQDATIHLKVFAKPKITYVENQTAMELEEQVTLTCEASGDPIPSITWRTSTRNISSEEKASWTRPEKQEV

SEQ ID NO: 9200 - protein, 761 aa, Homo Sapiens
MLQTKDLIWTLFFLGTAVSLQVDIVPSQGEISVGESKFFLCQVAGDAKDKDISWFSPNGEKLTPNQQRISVVWNDDSSSTLTIYNANIDDAGIYKCVVTGEDGSESEATVNVKIFQKLMFKNAPTPQEFREGEDAVIVCDVVSSLPPTIIWKHKGRDVILKKDVRFIVLSNNYLQIRGIKKTDEGTYRCEGRILARGEINFKDIQVIVNVPPTIQARQNIVNATANLGQSVTLVCDAEGFPEPTMSWTKDGEQIEQEEDDEKYIFSDDSSQLTIKKVDKNDEAEYICIAENKAGEQDATIHLKVFAKPKITYVENQTAMELEEQVTLTCEASGDPIPSITWRTSTRNISSEEKTLDGHMVVRSHARVSSLTLKSIQYTDAGEYICTASNTIGQDSQSMYLEVQYAPKLQGPVAVYTWEGNQVNITCEVFAYPSATISWFRDGQLLPSSNYSNIKIYNTPSASYLEVTPDSENDFGNYNCTAVNRIGQESLEFILVQADTPSSPSIDQVEPYSSTAQVQFDEPEATGGVPILKYKAEWRAVGEEVWHSKWYDAKEASMEGIVTIVGLKPETTYAVRLAALNGKGLGEISAASEFKTQPVHSPPPPASASSSTPVPLSPPDTTWPLPALATTEPAKGEPSAPKLEGQMGEDGNSIKVNLIKQDDGGSPIRHYLVRYRALSSEWKPEIRLPSGSDHVMLKSLDWNAEYEVYVVAENQQGKSKAAHFVFRTSAQPTAIPATLGGNSASYTFVSLLFSAVTLLLLC

SEQ ID NO: 9201 - protein, 848 aa, Homo Sapiens [sequence omitted]

SEQ ID NO: 9202 - protein, 761 aa, Homo Sapiens [sequence omitted]

SEQ ID NO: 9203 - protein, 726 aa, Homo Sapiens
MLQTKDLIWTLFFLGTAVSLQVDIVPSQGEISVGESKFFLCQVAGDAKDKDISWFSPNGEKLTPNQQRISVVWNDDSSSTLTIYNANIDDAGIYKCVVTGEDGSESEATVNVKIFQKLMFKNAPTPQEFREGEDAVIVCDVVSSLPPTIIWKHKGRDVILKKDVRFIVLSNNYLQIRGIKKTDEGTYRCEGRILARGEINFKDIQVIVNVPPTIQARQNIVNATANLGQSVTLVCDAEGFPEPTMSWTKDGEQIEQEEDDEKYIFSDDSSQLTIKKVDKNDEAEYICIAENKAGEQDATIHLKVFAKPKITYVENQTAMELEEQVTLTCEASGDPIPSITWRTSTRNISSEEKTLDGHMVVRSHARVSSLTLKSIQYTDAGEYICTASNTIGQDSQSMYLEVQYAPKLQGPVAVYTWEGNQVNITCEVFAYPSATISWFRDGQLLPSSNYSNIKIYNTPSASYLEVTPDSENDFGNYNCTAVNRIGQESLEFILVQADTPSSPSIDQVEPYSSTAQVQFDEPEATGGVPILKYKAEWRAVGEEVWHSKWYDAKEASMEGIVTIVGLKPETTYAVRLAALNGKGLGEISAASEFKTQPVQGEPSAPKLEGQMGEDGNSIKVNLIKQDDGGSPIRHYLVRYRALSSEWKPEIRLPSGSDHVMLKSLDWNAEYEVYVVAENQQGKSKAAHFVFRTSAQPTAIPATLGGNSASYTFVSLLFSAVTLLLLC

SEQ ID NO: 9204 - protein, 884 aa, Homo Sapiens [sequence omitted]

SEQ ID NO: 9205 - protein, 884 aa, Homo Sapiens
MLQTKDLIWTLFFLGTAVSLQVDIVPSQGEISVGESKFFLCQVAGDAKDKDISWFSPNGEKLTPNQQRISVVWNDDSSSTLTIYNANIDDAGIYKCVVTGEDGSESEATVNVKIFQKLMFKNAPTPQEFREGEDAVIVCDVVSSLPPTIIWKHKGRDVILKKDVRFIVLSNNYLQIRGIKKTDEGTYRCEGRILARGEINFKDIQVIVNVPPTIQARQNIVNATANLGQSVTLVCDAEGFPEPTMSWTKDGEQIEQEEDDEKYIFSDDSSQLTIKKVDKNDEAEYICIAENKAGEQDATIHLKVFAKPKITYVENQTAMELEEQVTLTCEASGDPIPSITWRTSTRNISSEEKASWTRPEKQEVHAPWNWQVGRQKGQAGSAGFPGSHETLDGHMVVRSHARVSSLTLKSIQYTDAGEYICTASNTIGQDSQSMYLEVQYAPKLQGPVAVYTWEGNQVNITCEVFAYPSATISWFRDGQLLPSSNYSNIKIYNTPSASYLEVTPDSENDFGNYNCTAVNRIGQESLEFILVQADTPSSPSIDQVEPYSSTAQVQFDEPEATGGVPILKYKAEWRAVGEEVWHSKWYDAKEASMEGIVTIVGLKPETTYAVRLAALNGKGLGEISAASEFKTQPVQGEPSAPKLEGQMGEDGNSIKVNLIKQDDGGSPIRHYLVRYRALSSEWKPEIRLPSGSDHVMLKSLDWNAEYEVYVVAENQQGKSKAAHFVFRTSAQPTAIPANGSPTSGLSTGAIVGILIVIFVLLLVVVDITCYFLNKCGLFMCIAVNLCGKAGPGAKGKDMEEGKAAFSKDESKEPIVEVRTEEERTPNHDGGKHTEPNETTPLTEPEKGPVEAKPECQETETKPAPAEVKTVPNDATQTKENESKA

SEQ ID NO: 9206 - protein, 858 aa, Homo Sapiens [sequence omitted]

SEQ ID NO: 9207 - protein, 848 aa, Homo Sapiens
MLQTKDLIWTLFFLGTAVSLQVDIVPSQGEISVGESKFFLCQVAGDAKDKDISWFSPNGEKLTPNQQRISVVWNDDSSSTLTIYNANIDDAGIYKCVVTGEDGSESEATVNVKIFQKLMFKNAPTPQEFREGEDAVIVCDVVSSLPPTIIWKHKGRDVILKKDVRFIVLSNNYLQIRGIKKTDEGTYRCEGRILARGEINFKDIQVIVNVPPTIQARQNIVNATANLGQSVTLVCDAEGFPEPTMSWTKDGEQIEQEEDDEKYIFSDDSSQLTIKKVDKNDEAEYICIAENKAGEQDATIHLKVFAKPKITYVENQTAMELEEQVTLTCEASGDPIPSITWRTSTRNISSEEKTLDGHMVVRSHARVSSLTLKSIQYTDAGEYICTASNTIGQDSQSMYLEVQYAPKLQGPVAVYTWEGNQVNITCEVFAYPSATISWFRDGQLLPSSNYSNIKIYNTPSASYLEVTPDSENDFGNYNCTAVNRIGQESLEFILVQADTPSSPSIDQVEPYSSTAQVQFDEPEATGGVPILKYKAEWRAVGEEVWHSKWYDAKEASMEGIVTIVGLKPETTYAVRLAALNGKGLGEISAASEFKTQPVQGEPSAPKLEGQMGEDGNSIKVNLIKQDDGGSPIRHYLVRYRALSSEWKPEIRLPSGSDHVMLKSLDWNAEYEVYVVAENQQGKSKAAHFVFRTSAQPTAIPANGSPTSGLSTGAIVGILIVIFVLLLVVVDITCYFLNKCGLFMCIAVNLCGKAGPGAKGKDMEEGKAAFSKDESKEPIVEVRTEEERTPNHDGGKHTEPNETTPLTEPEKGPVEAKPECQETETKPAPAEVKTVPNDATQTKENESKA

SEQ ID NO: 9208 - protein, 229 aa, Homo Sapiens
TISWFRDGQLLPSSNYSNIKIYNTPSASYLEVTPDSENDFGNYNCTAVNRIGQESLEFILVQADTPSSPSIDQVEPYSSTAQVQFDEPEATGGVPILKYKAEWRAVGEEVWHSKWYDAKEASMEGIVTIVGLKPETTYAVRLAALNGKGLGEISAASEFKTQPVHSPPPREPSAPKLEGQMGEDGNSIKVNLIKQDDGGSPIRHYLVRYRALSSEWKPEIRLPSGSDHV

SEQ ID NO: 9209 - protein, 357 aa, Homo Sapiens
  misc_feature (1)..(1): Xaa can be any naturally occurring amino acid
XFILVQADTPSSPSIDQVEPYSSTAQVQFDEPEATGGVPILKYKAEWRAVGEEVWHSKWYDAKEASMEGIVTIVGLKPETTYAVRLAALNGKGLGEISAASEFKTQPVREPSAPKLEGQMGEDGNSIKVNLIKQDDGGSPIRHYLVRYRALSSEWKPEIRLPSGSDHVMLKSLDWNAEYEVYVVAENQQGKSKAAHFVFRTSAQPTAIPANGSPTSGLSTGAIVGILIVIFVLLLVVVDITCYFLNKCGLFMCIAVNLCGKAGPGAKGKDMEEGKAAFSKDESKEPIVEVRTEEERTPNHDGGKHTEPNETTPLTEPEKGPVEAKPECQETETKPAPAEVKTVPNDATQTKENESKA

SEQ ID NO: 9210 - protein, 84 aa, Homo Sapiens
  misc_feature (1)..(1): Xaa can be any naturally occurring amino acid
XQDDGGSPIRHYLVRYRALSSEWKPEIRLPSGSDHVMLKSLDWNAEYEVYVVAENQQGKSKAAHFVFRTSAQPTAIPVTLLLLC

SEQ ID NO: 9211 - protein, 468 aa, Homo Sapiens
  misc_feature (1)..(1): Xaa can be any naturally occurring amino acid
XSGSDHVMLKSLDWNAEYEVYVVAENQQGKSKAAHFVFRTSAQPTAIPANGSPTSGLSTGAIVGILIVIFVLLLVVVDITCYFLNKCGLFMCIAVNLCGKAGPGAKGKDMEEGKAAFSKDESKEPIVEVRTEEERTPNHDGGKHTEPNETTPLTEPELPADTTATVEDMLPSVTTVTTNSDTITETFATAQNSPTSETTTLTSSIAPPATATPDSNSVPAGQATPSKGPSASAPSPAPASAPKVAPLVDLSDTPTSTPAASNLSSSVLANQGAVLSPSAPAGVGEASKAPPASKPTPAPVPTPTGAASPLAAAAAPATEAPQAKQEAPSTKGPDPEPTQPGAAKSPAEAATALASPKSEAASVSTTNPSQGEDFKMDEGNFKTPDIDLAKDVFAALGSPAPAAGASGQAPELAPSTADSSVSPAPAKTEKGPVEAKPECQETETKPAPAEVKTVPNDATQTKENESKA

SEQ ID NO: 9212 - protein, 372 aa, Homo Sapiens
  misc_feature (1)..(1): Xaa can be any naturally occurring amino acid
XTPSSPSIDQVEPYSSTAQVQFDEPEATGGVPILKYKAEWRAVGEEVWHSKWYDAKEASMEGIVTIVGLKPETTYAVRLAALNGKGLGEISAASEFKTQPVHSPPPPASASSSTPVPLSPPDKGEPSAPKLEGQMGEDGNSIKVNLIKQDDGGSPIRHYLVRYRALSSEWKPEIRLPSGSDHVMLKSLDWNAEYEVYVVAENQQGKSKAAHFVFRTSAQPTAIPANGSPTSGLSTGAIVGILIVIFVLLLVVVDITCYFLNKCGLFMCIAVNLCGKAGPGAKGKDMEEGKAAFSKDESKEPIVEVRTEEERTPNHDGGKHTEPNETTPLTEPEKGPVEAKPECQETETKPAPAEVKTVPNDATQTKENESKA

SEQ ID NO: 9213 - protein, 305 aa, Homo Sapiens
YNTPSASYLEVTPDSENDFGNYNCTAVNRIGQESLEFILVQADTPSSPSIDQVEPYSSTAQVQFDEPEATGGVPILKYKAEWRAVGEEVWHSKWYDAKEASMEGIVTIVGLKPETTYAVRLAALNGKGLGEISAASEFKTQPVHSPPPPASASSSTPVPLSPPDTTWPLPALATTEPAREPSAPKLEGQMGEDGNSIKVNLIKQDDGGSPIRHYLVRYRALSSEWKPEIRLPSGSDHVMLKSLDWNAEYEVYVVAENQQGKSKAAHFVFRTSAQPTAIPATLGGNSASYTFVSLLFSAVTLLLLC

SEQ ID NO: 9214 - protein, 1321 aa, Homo Sapiens
MGAPFVWALGLLMLQMLLFVAGEQGTQDITDASERGLHMQKLGSGSVQAALAELVALPCLFTLQPRPSAARDAPRIKWTKVRTASGQRQDLPILVAKDNVVRVAKSWQGRVSLPSYPRRRANATLLLGPLRASDSGLYRCQVVRGIEDEQDLVPLEVTGVVFHYRSARDRYALTFAEAQEACRLSSAIIAAPRHLQAAFEDGFDNCDAGWLSDRTVRYPITQSRPGCYGDRSSLPGVRSYGRRNPQELYDVYCFARELGGEVFYVGPARRLTLAGARAQCRRQGAALASVGQLHLAWHEGLDQCDPGWLADGSVRYPIQTPRRRCGGPAPGVRTVYRFANRTGFPSPAERFDAYCFRAHHPTSQHGDLETPSSGDEGEILSAEGPPVRELEPTLEEEEVVTPDFQEPLVSSGEEETLILEEKQESQQTLSPTPGDPMLASWPTGEVWLSTVAPSPSDMGAGTAASSHTEVAPTDPMPRRRGRFKGLNGRYFQQQEPEPGLQGGMEASAQPPTSEAAVNQMEPPLAMAVTEMLGSGQSRSPWADLTNEVDMPGAGSAGGKSSPEPWLWPPTMVPPSISGHSRAPVLELEKAEGPSARPATPDLFWSPLEATVSAPSPAPWEAFPVATSPDLPMMAMLRGPKEWMLPHPTPISTEANRVEAHGEATATAPPSPAAETKVYSLPLSLTPTGQGGEAMPTTPESPRADFRETGETSPAQVNKAEHSSSSPWPSVNRNVAVGFVPTETATEPTGLRGIPGSESGVFDTAESPTSGLQATVDEVQDPWPSVYSKGLDASSPSAPLGSPGVFLVPKVTPNLEPWVATDEGPTVNPMDSTVTPAPSDASGIWEPGSQVFEEAESTTLSPQVALDTSIVTPLTTLEQGDKVGVPAMSTLGSSSSQPHPEPEDQVETQGTSGASVPPHQSSPLGKPAVPPGTPTAASVGESASVSSGEPTVPWDPSSTLLPVTLGIEDFELEVLAGSPGVESFWEEVASGEEPALPGTPMNAGAEEVHSDPCENNPCLHGGTCNANGTMYGCSCDQGFAGENCEIDIDDCLCSPCENGGTCIDEVNGFVCLCLPSYGGSFCEKDTEGCDRGWHKFQGHCYRYFAHRRAWEDAEKDCRRRSGHLTSVHSPEEHSFINSFGHENTWIGLNDRIVERDFQWTDNTGLQFENWRENQPDNFFAGGEDCVVMVAHESGRWNDVPCNYNLPYVCKKGTVLCGPPPAVENASLIGARKAKYNVHATVRYQCNEGFAQHHVATIRCRSNGKWDRPQIVCTKPRRSHRMRRHHHHHQHHHQHHHHKSRKERRKHKKHPTEDWEKDEGNFC

SEQ ID NO: 9215 - protein, 175 aa, Homo Sapiens
  misc_feature (1)..(1): Xaa can be any naturally occurring amino acid
XGCDRGWHKFQGHCYRYFAHRRAWEDAEKDCRRRSGHLTSVHSPEEHSFINSFGHENTWIGLNDRIVERDFQWTDNTGLQFENWRENQPDNFFAGGEDCVVMVAHESGRWNDVPCNYNLPYVCKKGTARRSHRMRRHHHHHQHHHQHHHHKSRKERRKHKKHPTEDWEKDEGNFC

SEQ ID NO: 9216 - protein, 99 aa, Homo Sapiens
MVLRRLLAALLHSPQLVERLSESRPIRRAAQLTAFALLQAQLRGQDAARRLQDLAAGPVGSLCRRAERFRDAFTQELRRGLRGRSGPPPGSQRGPGANI

SEQ ID NO: 9217 - protein, 709 aa, Homo Sapiens
MATAGGGSGADPGSRGLLRLLSFCVLLAGLCRGNSVERKIYIPLNKTAPCVRLLNATHQIGCQSSISGDTGVIHVVEKEEDLQWVLTDGPNPPYMVLLESKHFTRDLMEKLKGRTSRIAGLAVSLTKPSPASGFSPSVQCPNDGFGVYSNSYGPEFAHCREIQWNSLGNGLAYEDFSFPIFLLEDENETKVIKQCYQDHNLSQNGSAPTFPLCAMQLFSHMHAVISTATCMRRSSIQSTFSINPEIVCDPLSDYNVWSMLKPINTTGTLKPDDRVVVAATRLDSRSFFWNVAPGAESAVASFVTQLAAAEALQKAPDVTTLPRNVMFVFFQGETFDYIGSSRMVYDMEKGKFPVQLENVDSFVELGQVALRTSLELWMHTDPVSQKNESVRNQVEDLLATLEKSGAGVPAVILRRPNQSQPLPPSSLQRFLRARNISGVVLADHSGAFHNKYYQSIYDTAENINVSYPEWLSPEEDLNFVTDTAKALADVATVLGRALYELAGGTNFSDTVQADPQTVTRLLYGFLIKANNSWFQSILRQDLRSYLGDGPLQHYIAVSSPTNTTYVVQYALANLTGTVVNLTREQCQDPSKVPSENKDLYEYSWVQGPLHSNETDRLPRCVRSTARLARALSPAFELSQWSSTEYSTWTESRWKDIRARIFLIASKELELITLTVGFGILIFSLIVTYCINAKADVLFIAPREPGAVSY

SEQ ID NO: 9218 - protein, 255 aa, Homo Sapiens
MATAGGGSGADPGSRGLLRLLSFCVLLAGLCRGNSVERKIYIPLNKTAPCVRLLNATHQIGCQSSISGDTGVIHVVEKEEDLQWVLTDGPNPPYMVLLESKHFTRDLMEKLKGRTSRIAGLAVSLTKPSPASGFSPSVQCPNDGFGVYSNSYGPEFAHCREIQWNSLGNGLAYEDFSFPIFLLEDENETKVIKQETFDYIGSSRMVYDMEKGKFPVQLENVDSFVELGQVALRTSLELWMHTDPVSQKNESVRNQ

SEQ ID NO: 9219 - protein, 134 aa, Homo Sapiens
MATAGGGSGADPGSRGLLRLLSFCVLLAGLCRGNSVERKIYIPLNKTAPCVRLLNATHQIGCQSSISGDTGVIHVVEKEEDLQWVLTDGPNPPYMVLLESKHFTRQNVRLSDTFLCSFMEFLSYSRDLMEKLKG

SEQ ID NO: 9220 - protein, 232 aa, Homo Sapiens
MATAGGGSGADPGSRGLLRLLSFCVLLAGLFLDFEPDPLPLCPDVSFFPQPQPPTPQSKGTGLCRGNSVERKIYIPLNKTAPCVRLLNATHQIGCQSSISGDTGVIHVVEKEEDLQWVLTDGPNPPYMVLLESKHFTRDLMEKLKGRTSRIAGLAVSLTKPSPASGFSPSVQCPNDGFGVYSNSYGPEFAHCREIQWNSLGNGLAYEDFSFPIFLLEDENETKVIKQCYQDH

SEQ ID NO: 9221 - protein, 71 aa, Homo Sapiens
MATAGGGSGADPGSRGLLRLLSFCVLLAGLFLDFEPDPLPLCPDVSFFPQPQPPTPQSKGTGVKVSFLPRV

SEQ ID NO: 9222 - protein, 69 aa, Homo Sapiens
MATAGGGSGADPGSRGLLRLLSFCVLLAVSLSMALHGLCNNPLRHIAGCHVEHVSVTISVCPRNQKNGL

SEQ ID NO: 9223 - protein, 219 aa, Homo Sapiens
RSSIQSTFSINPEIVCDPLSDYNVWSMLKPINTTGTLKPDDRVVVAATRLAAAEALQKAPDVTTLPRNVMFVFFQGETFDYIGSSRMVYDMEKGKFPVQLENVDSFVELGQVALRTSLELWMHTDPVSQKNESVRNQVEDLLATLEKSGAGVPAVILRRPNQSQPLPPSSLQRFLRARNISGVVLADHSGAFHNKYYQSIYDTAENINVSYPEWLSPEE

SEQ ID NO: 9224 - protein, 69 aa, Homo Sapiens
  misc_feature (1)..(1): Xaa can be any naturally occurring amino acid
XNDGFGVYSNSYGPEFAHCREIQWNSLGNGLAYEDFSFPIFLLEDENETKVIKQKSSVTPCLITMCGAC

SEQ ID NO: 9225 - protein, 275 aa, Homo Sapiens
  misc_feature (1)..(1): Xaa can be any naturally occurring amino acid
XNVAPGAESAVASFVTQLAAAEALQKAPDVTTLPRNVMFVFFQGVALRTSLELWMHTDPVSQKNESVRNQVEDLLATLEKSGAGVPAVILRRPNQSQPLPPSSLQRFLRARNISGVVLADHSGAFHNKYYQSIYDTAENINVSYPEWLSPEEDLNFVTDTAKALADVATVLGRALYELAGGTNFSDTVQADPQTVTRLLYGFLIKANNSWFQSILRQDLRSYLGDGPLQHYIAVSSPTNTTYVVQYALANLTGTVVNLTREQCQDPSKVPSENKD

SEQ ID NO: 9226 - protein, 317 aa, Homo Sapiens
  misc_feature (1)..(1): Xaa can be any naturally occurring amino acid
XVYSNSYGPEFAHCREIQWNSLGNGLAYEDFSFPIFLLEDENETKVIKQLFSHMHAVISTATCMRRSSIQSTFSINPEIVCDPLSDYNVWSMLKPINTTGTLKPDDRVVVAATRLDSRSFFWNVAPGAESAVASFVTQLAAAEALQKAPDVTTLPRNVMFVFFQGETFDYIGSSRMVYDMEKGKFPVQLENVDSFVELGQVALRTSLELWMHTDPVSQKNESVRNQVEDLLATLEKSGAGVPAVILRRPNQSQPLPPSSLQRFLRARNISGVVLADHSGAFHNKYYQSIYDTAENINVSYPEWLSPEEDLNFVTDTA

SEQ ID NO: 9227 - protein, 116 aa, Homo Sapiens
MVLLHWCLLWLLFPLSSRTQKLPTRDEELFQMQIRDKAFFHDSSVIPDGAEISSYLFRDTPKRYFFVVEEDNTPLSVTVTPCDAPLEWKLSLQELPEDRSGEGSGDLEPLEQQKQQ

SEQ ID NO: 9228 - protein, 145 aa, Homo Sapiens
MVLLHWCLLWLLFPLSSRTQKLPTRDEELFQMQIRDKAFFHDSSVIPDGAEISSYLFRDTPKRYFFVVEEDNTPLSVTVTPCDAPLEWKLSLQELPEDRSGEGSGDLEPLEQQKQQIINEEGTELFSYKGNDVEYFISSSSPSGL

SEQ ID NO: 9229 - protein, 568 aa, Homo Sapiens
MVLLHWCLLWLLFPLSSRTQKLPTRDEELFQMQIRDKAFFHDSSVIPDGAEISSYLFRDTPKRYFFVVEEDNTPLSVTVTPCDAPLEWKLSLQELPEDRSGEGSGDLEPLEQQKQQIINEEGTELFSYKGNDVEYFISSSSPSGLYQLDLLSTEKDTHFKVYATTTPESDQPYPELPYDPRVDVTSLGRTTVTLAWKPSPTASLLKQPIQYCVVINKEHNFKSLCAVEAKLSADDAFMMAPKPGLDFSPFDFAHFGFPSDNSGKERSFQAKPSPKLGRHVYSRPKVDIQKICIGNKNIFTVSDLKPDTQYYFDVFVVNINSNMSTAYVGTFARTKEEAKQKTVELKDGKITDVFVKRKGAKFLRFAPVSSHQKVTFFIHSCLDAVQIQVRRDGKLLLSQNVEGIQQFQLRGKPKAKYLVRLKGNKKGASMLKILATTRPTKQSFPSLPEDTRIKAFDKLRTCSSATVAWLGTQERNKFCIYKKEVDDNYNEDQKKREQNQCLGPDIRKKSEKVLCKYFHSQNLQKAVTTETIKGLQPGKSYLLDVYVIGHGGHSVKYQSKVVKTRKFC

SEQ ID NO: 9230 - protein, 133 aa, Homo Sapiens
MRKHVLAASFSMLSLLVIMGDTDSKTDSSFIMDSDPRRCMRHHYVDSISHPLYKCSSKMVLLARCEGHCSQASRSEPLVSFSTVLKQPFRSSCHCCRPQTSKLKALRLRCSGGMRLTATYRYILSCHCEECNS

SEQ ID NO: 9231 - protein, 133 aa, Homo Sapiens; identical to SEQ ID NO: 9230

SEQ ID NO: 9232 - protein, 133 aa, Homo Sapiens; identical to SEQ ID NO: 9230

SEQ ID NO: 9233 - protein, 129 aa, Homo Sapiens
DIENAYKKTFLPEMSEKCEVLQYSAREAQDSKKVVEDIEYLKFDKGPWLKQDNRTLYHLRLLVQDKFEVLNYTSIPIFLPEVTIGAHQTDRVLHQFREVPADQEHRWVSLLSSPLGSLFSEWSVCGEDS

SEQ ID NO: 9234 - protein, 138 aa, Homo Sapiens
ENAYKKTFLPEMSEKCEVLQYSAREAQDSKKVVEDIEYLKFDKGPWLKQDNRTLYHLRLLVQDKFEVLNYTSIPIFLPEVTIGAHQTDRVLHQFREFSLFNGRKPDAVKILCSLLEADRSLLEADRSLLEADRVQDSC

SEQ ID NO: 9235 - protein, 94 aa, Homo Sapiens
MALRLLKLAATSASARVVAAGAQRVASSTFLKRGFIIQTVPQEMGSPSPPTIMATVVWRNFTMIREAMMATVTACSPGCTAVACCSTQMPWSTC

SEQ ID NO: 9236 - protein, 429 aa, Homo Sapiens
MALRLLKLAATSASARVVAAGAQRVRGIHSSVQCKLRYGMWHFLLGDKASKRLTERSRVITVDGNICTGKGKLAKEIAEKLGFKHFPEAGIHYPDSTTGDGKPLATDYNGNCSLEKFYDDPRSNDGNSYRLQSWLYSSRLLQYSDALEHLLTTGQGVVLERSIFSDFVFLEAMYNQGFIRKQCESALQTHFWTGVAGASGKLESGSSEEVLLINERGGRSKPGVDHYNEVKSVTICDYLPPHLVIYIDVPVPEPHEMKITSAYLQDIENAYKKTFLPEMSEKCEVLQYSAREAQDSKKVVEDIEYLKFDKGPWLKQDNRTLYHLRLLVQDKFEVLNYTSIPIFLPEVTIGAHQTDRVLHQFRERLDWTVCFGEESTEVKHQGHLLSVQPGTVALTVGSWLRSCLLGLHWKLLFLFPESPMHTTAFMFLC

SEQ ID NO: 9237 - protein, 201 aa, Homo Sapiens
MALRLLKLAATSASARVVAAGAQRVRGIHSSVQCKLRYGMWHFLLGDKASKRLTERSRVITVDGNICTGKGKLAKEIAEKLGFKHFPEAGIHYPDSTTGDGKPLATDYNGNCSLEKFYDDPRSNDGNSYRLQSWLYSSRLLQYSDALEHLLTTGQGVVLERSIFSDFVFLEAMYNQGFIRKQCESALQTHFWVCGATLQGL

SEQ ID NO: 9238 - protein, 355 aa, Homo Sapiens
MALRLLKLAATSASARVVAAGAQRVRGIHSSVQCKLRYGMWHFLLGDKASKRLTERSRVITVDGNICTGKGKLAKEIAEKLGFKHFPEAGIHYPDSTTGDGKPLATDYNGNCSLEKFYDDPRSNDGNSYRLQSWLYSSRLLQYSDALEHLLTTGQGVVLERSIFSDFVFLEAMYNQGFIRKQCVDHYNEVKSVTICDYLPPHLVIYIDVPVPEVQRRIQKKGDPHEMKITSAYLQDIENAYKKTFLPEMSEKCEVLQYSAREAQDSKKVVEDIEYLKFDKGPWLKQDNRTLYHLRLLVQDKFEVLNYTSIPIFLPEVTIGAHQTDRVLHQFRELPGRKYSPGYNTEVGDKWIWLK

SEQ ID NO: 9239 - protein, 390 aa, Homo Sapiens
MALRLLKLAATSASARVVAAGAQRVRGIHSSVQCKLRYGMWHFLLGDKASKRLTERSRVITVDGNICTGKGKLAKEIAEKLGFKHFPEAGIHYPDSTTGDGKPLATDYNGNCSLEKFYDDPRSNDGNSYRLQSWLYSSRLLQYSDALEHLLTTGQGVVLERSIFSDFVFLEAMYNQGFIRKQCVDHYNEVKSVTICDYLPPHLVIYIDVPVPEVQRRIQKKGDPHEMKITSAYLQDIENAYKKTFLPEMSEKCEVLQYSAREAQDSKKVVEDIEYLKFDKGPWLKQDNRTLYHLRLLVQDKFEVLNYTSIPIFLPEVTIGAHQTDRVLHQFRELGIPYPQRAVQSTREGPEVLLTGLWRWEDLLIGLQLPGRKYSPGYNTEVGDKWIWLK

SEQ ID NO: 9240 - protein, 245 aa, Homo Sapiens [sequence omitted]

SEQ ID NO: 9241 - protein, 355 aa, Homo Sapiens
MALRLLKLAATSASARVVARAPSAWRGIHSSVQCKLRYGMWHFLLGDKASKRLTERSRVITVDGNICTGKGKLAKEIAEKLGFKHFPEAGIHYPDSTTGDGKPLATDYNGNCSLEKFYDDPRSNDGNSYRLQSWLYSSRLLQYSDALEHLLTTGQGVVLERSIFSDFVFLEAMYNQGFIRKQCVDHYNEVKSVTICDYLPPHLVIYIDVPVPEVQRRIQKKGDPHEMKITSAYLQDIENAYKKTFLPEMSEKCEVLQYSAREAQDSKKVVEDIEYLKFDKGPWLKQDNRTLYHLRLLVQDKFEVLNYTSIPIFLPEVTIGAHQTDRVLHQFRELPGRKYSPGYNTEVGDKWIWLK

SEQ ID NO: 9242 - protein, 133 aa, Homo Sapiens
  misc_feature (1)..(1): Xaa can be any naturally occurring amino acid
XSAYLQDIENAYKKTFLPEMSEKCEVLQYSAREAQDSKKVVEDIEYLKFDKGPWLKQDNRTLYHLRLLVQDKFEVLNYTSIPIFLPEVTIGAHQTDRVLHQFREVFQESEAKRLDVEEVCWKKTPLKDRGEEV

SEQ ID NO: 9243 - protein, 100 aa, Homo Sapiens
GFRLLRWQLCLAGPLALASDLGASSLVAFRRLLGNSIFPAPVRHSGDHGKRLFVIRPSRFYDRRFLKLLRFYIALTGIPVAIFITLVNVFIASHIKMDCP

SEQ ID NO: 9244 - protein, 56 aa, Homo Sapiens
IPVAIFITLVNVFIGQAELAEIPEGYVPEHWEYYKGKGAGSAKIDACERRWTLVLL

SEQ ID NO: 9245 - protein, 177 aa, Homo Sapiens
MAAMSLLRRVSVTAVAALSGRPLGTRLGFGGFLTRGFPKAAAPGNHHSAVFMILTTLFLIFYIALTGIPVAIFITLVNVFIGQAELAEIPEGYVPEHWEYYKHPISRWIARNFYDSPEKIYERTMAVLQIEAEKAELRVKELEVRKLMHVRGDGPWYYYETIDKELIDHSPKATPDN

SEQ ID NO: 9246 - protein, 135 aa, Homo Sapiens
MAAMSLLRRVSVTAVAALSGRPLGTRLGFGGFLTRGFPKAAAPVRHSGDHGKRLFVIRPSRFYDRRFLKLLRFYIALTGIPVAIFITLVNVFIGQAELAEIPEGYVPEHWEYYKGKGAGSAKIDACERRWTLVLL

SEQ ID NO: 9247 - protein, 189 aa, Homo Sapiens
MAAMSLLRRVSVTAVAALSGRPLGTRLGFGGFLTRGFPKAAAPVRHSGDHGKRLFVIRPSRFYDRRFLKLLRFYIALTGIPVAIFITLVNVFIGQAELAEIPEGYVPEHWEYYKHPISRWIARNFYDSPEKIYERTMAVLQIEAEKAELRVKELEVRKLMHVRGDGPWYYYETIDKELIDHSPKATPDN

SEQ ID NO: 9248 - protein, 66 aa, Homo Sapiens
MAAMSLLRRVSVTAVAALSGRPLGTRLGFGGFLTRGFPKAAEILHCIDWDSSSNFHNSGECIHWSS

SEQ ID NO: 9249 - protein, 42 aa, Homo Sapiens
MAAMSLLRRVSVTAVAALSGRPLGTRLGFGGFLTRGFPKAAG

SEQ ID NO: 9250 - protein, 137 aa, Homo Sapiens
MAAMSLLRRVSVTAVAALSGRPLGTRLGFGGFLTRGFPKAAGQAELAEIPEGYVPEHWEYYKHPISRWIARNFYDSPEKIYERTMAVLQIEAEKAELRVKELEVRKLMHVRGDGPWYYYETIDKELIDHSPKATPDN

SEQ ID NO: 9251 - protein, 206 aa, Homo Sapiens
  misc_feature (1)..(1): Xaa can be any naturally occurring amino acid
XSLLRRVSVTAVAALSGRPLGTRLGFGGFLTRGFPKAAAPVRHSGDHGKRLFVIRPSRFYDRRFLKLLALYEQSRGLENGRLSGPSATRFYIALTGIPVAIFITLVNVFIGQAELAEIPEGYVPEHWEYYKHPISRWIARNFYDSPEKIYERTMAVLQIEAEKAELRVKELEVRKLMHVRGDGPWYYYETIDKELIDHSPKATPDN

SEQ ID NO: 9252 - protein, 40 aa, Homo Sapiens
LTTPMLLRALAQAARAGPPGGRSLHSSAVAATYSEYLGGL

SEQ ID NO: 9253 - protein, 110 aa, Homo Sapiens
MRCLTTPMLLRALAQAARAGPPGGRSLHSSAVAATYKYVNMQDPEMDMKSVTDRAARTLLWTELFRGLGMTLSYLFREPATINYPFEKGPLSPRFRGEHALRRYPSGEER

SEQ ID NO: 9254 - protein, 124 aa, Homo Sapiens
MRCLTTPMLLRALAQAARAGPPGGRSLHSSAVAATYKYVNMQDPEMDMKSVTDRAARTLLWTELFRGLGMTLSYLFREPATINYPFEKGPLSPRFRGEHALRRYPSGEERCIACKLCEAICPAQ

SEQ ID NO: 9255 - protein, 184 aa, Homo Sapiens
MRCLTTPMLLRALAQAARAGPPGGRSLHSSAVAATYKYVNMQDPEMDMKSVTDRAARTLLWTELFRGLGMTLSYLFREPATINYPFEKGPLSPRFRGEHALRRYPSGEERCIACKLCEAICPAQAITIEAEPRADGSRRTTRYDIDMTKCIYCGFCQEACPVDAIVEGPNFEFSTETHEELLYN

SEQ ID NO: 9256 - protein, 210 aa, Homo Sapiens
MRCLTTPMLLRALAQAARAGPPGGRSLHSSAVAATYKYVNMQDPEMDMKSVTDRAARTLLWTELFRGLGMTLSYLFREPATINYPFEKGPLSPRFRGEHALRRYPSGEERCIACKLCEAICPAQAITIEAEPRADGSRRTTRYDIDMTKCIYCGFCQEACPVDAIVEGPNFEFSTETHEELLYNKEKLLNNGDKWEAEIAANIQADYLYR

SEQ ID NO: 9257 - protein, 43 aa, Homo Sapiens
MRCLTTPMLLRALAQAARAGPPGGRSLHSSAVAATYSEYLGGL

SEQ ID NO: 9258 - protein, 70 aa, Homo Sapiens
MRRPLCATGLVRVGDHWEDALPDHAYAAAGPGPGCTCRTSWWPEPPQQCSGSHLQVCEHAGSRDGHEVSD

SEQ ID NO: 9259 - protein, 138 aa, Homo Sapiens
MRRPLCATGLVRVGDHWEEYVNMQDPEMDMKSVTDRAARTLLWTELFRGLGMTLSYLFREPATINYPFEKGPLSPRFRGEHALRRYPSGEERCIACKLCEAICPAQAITIEAEPRADGSRRTTRYDIDMTKCIYCGFC

SEQ ID NO: 9260 - protein, 64 aa, Homo Sapiens
MTKCIYCGFCQEACPVDAIVEGPNFEFSTETHEELLYNKEKLLNNGDKWEAEIAANIQADYLYR

SEQ ID NO: 9261 - protein, 93 aa, Homo Sapiens
  misc_feature (1)..(1): Xaa can be any naturally occurring amino acid
XEPATINYPFEKGPLSPRFRGEHALRRYPSGEERCIACKLCEAICPAQGETLRAAGATLNKAVNSPLVRGGSWQMTPAADKQARQAGHGGSRL

SEQ ID NO: 9262 - protein, 127 aa, Homo Sapiens
CPTTVANVETVAVSPTICRRGGTWFAGFGRERNSGTKLFNISGHVNHPCTVEEEMSVPLKELIEKHAGGVTGGWDNLLAVIPGGSSTPLIPKSVCETVLMDFDALVQAQTGLGTAAVIVMDRSVWTG

SEQ ID NO: 9263 - protein, 133 aa, Homo Sapiens
EAYEAGLIGKNACGSGYDFDVFVVRGAGAYICGEETALIESIEGKQGKPRLKPPFPADVGVFGCPTTVANVETVAVSPTICRRGGTWFAGFGRERNSGTKLFNISGHVNHPCTVEEEMSVPLKELIEKHAVCV

SEQ ID NO: 9264 - protein, 75 aa, Homo Sapiens
MGIPSPSAAPKKTSFGSLKDEDRIFTNLYGRHDWRLKGSLSRGDWYKTKEILLKGPDWILGEIKTSGLRGRGGAG

SEQ ID NO: 9265 - protein, 144 aa, Homo Sapiens
MKTGFSPTCTAAMTGGSLSRGDWYKTKEILLKGPDWILGEIKTSGLRGRGGAGFPTGLKWSFMNKPSDGRPKYLVVNADEGEPGTCKDREILRHDPHKLLEGCLVGGRAMGARAAYIYIRGEFYNEASNLQVAIREAYEAGLIG

SEQ ID NO: 9266 - protein, 455 aa, Homo Sapiens
MLATRRLLGWSLPARTAPKKTSFGSLKDEDRIFTNLYGRHDWRLKGSLSRGDWYKTKEILLKGPDWILGEIKTSGLRGRGGAGFPTGLKWSFMNKPSDGRPKYLVVNADEGEPGTCKDREILRHDPHKLLEGCLVGGRAMGARAAYIYIRGEFYNEASNLQVAIREAYEAGLIGKNACGSGYDFDVFVVRGAGAYICGEETALIESIEGKQGKPRLKPPFPADVGVFGCPTTVANVETVAVSPTICRRGGTWFAGFGRERNSGTKLFNISGHVNHPCTVEEEMSVPLKELIEKHAGGVTGGWDNLLAVIPGGSSTPLIPKSVCETVLMDFDALVQAQTGLGTAAVIVMDRSTDIVKAIARLIEFYKHESCGQCTPCREGVDWMNKVMARFVRGDARPAEIDSLWEISKQIEGHTICALGDGAAWPVQGLIRHFRPELEERMQRFAQQHQARQAAS

SEQ ID NO: 9267 - protein, 457 aa, Homo Sapiens
MLATRRLLGWSLPARVSTAPKKTSFGSLKDEDRIFTNLYGRHDWRLKGSLSRGDWYKTKEILLKGPDWILGEIKTSGLRGRGGAGFPTGLKWSFMNKPSDGRPKYLVVNADEGEPGTCKDREILRHDPHKLLEGCLVGGRAMGARAAYIYIRGEFYNEASNLQVAIREAYEAGLIGKNACGSGYDFDVFVVRGAGAYICGEETALIESIEGKQGKPRLKPPFPADVGVFGCPTTVANVETVAVSPTICRRGGTWFAGFGRERNSGTKLFNISGHVNHPCTVEEEMSVPLKELIEKHAGGVTGGWDNLLAVIPGGSSTPLIPKSVCETVLMDFDALVQAQTGLGTAAVIVMDRSTDIVKAIARLIEFYKHESCGQCTPCREGVDWMNKVMARFVRGDARPAEIDSLWEISKQIEGHTICALGDGAAWPVQGLIRHFRPELEERMQRFAQQHQARQAAS

SEQ ID NO: 9268 - protein, 178 aa, Homo Sapiens
MLATRRLLGWSLPARVSVRFSGDTDEDRIFTNLYGRHDWRLKGSLSRGDWYKTKEILLKGPDWILGEIKTSGLRGRGGAGFPTGLKWSFMNKPSDGRPKYLVVNADEGEPGTCKDREILRHDPHKLLEGCLVGGRAMGARAAYIYIRGEFYNEASNLQVAIREAYEAGLIGKNACGSG

SEQ ID NO: 9269 - protein, 43 aa, Homo Sapiens
MLATRRLLGWSLPARVSVRFSGDTSSAWRKFCRQHPRKPHLAR

SEQ ID NO: 9270 - protein, 178 aa, Homo Sapiens
MLATRRLLGWSLPARVSVRFSGDTTAPKKTSFGSLKDEDRIFTNLLKGSLSRGDWYKTKEILLKGPDWILGEIKTSGLRGRGGAGFPTGLKWSFMNKPSDGRPKYLVVNADEGEPGTCKDREILRHDPHKLLEGCLVGGRAMGARAAYIYIRGEFYNEASNLQVAIREAYEAGLIGKN

SEQ ID NO: 9271 - protein, 464 aa, Homo Sapiens
MLATRRLLGWSLPARVSVRFSGDTTAPKKTSFGSLKDEDRIFTNLYGRHDWRLKGSLSRGDWYKTKEILLKGPDWILGEIKTSGLRGRGGAGFPTGLKWSFMNKPSDGRPKYLVVNADEGEPGTCKDREILRHDPHKLLEGCLVGGRAMGARAAYIYIRGEFYNEASNLQVAIREAYEAGLIGKNACGSGYDFDVFVVRGAGAYICGEETALIESIEGKQGKPRLKPPFPADVGVFGCPTTVANVETVAVSPTICRRGGTWFAGFGRERNSGTKLFNISGHVNHPCTVEEEMSVPLKELIEKHAGGVTGGWDNLLAVIPGGSSTPLIPKSVCETVLMDFDALVQAQTGLGTAAVIVMDRSTDIVKAIARLIEFYKHESCGQCTPCREGVDWMNKVMARFVRGDARPAEIDSLWEISKQIEGHTICALGDGAAWPVQGLIRHFRPELEERMQRFAQQHQARQAAS

SEQ ID NO: 9272 - protein, 53 aa, Homo Sapiens
MNKPSDGRPKYLVVNADEGEPGTCKDREILRHDPHKLLEGCLVGGRAMGARAA

SEQ ID NO: 9273 - protein, 96 aa, Homo Sapiens
MNKPSDGRPKYLVVNADEGEPGTCKDREILRHDPHKLLEGCLVGGRAMGARAAYIYIRGEFYNEASNLQVAIREAYEAGLIGKNACGSGYDFDVFV

SEQ ID NO: 9274 - protein, 136 aa, Homo Sapiens
MNKPSDGRPKYLVVNADEGEPGTCKDREILRHDPHKLLEGCLVGGRAMGARAAYIYIRGEFYNEASNLQVAIREAYEAGLIGKNACGSGYDFDVFVVRGAGAYICGEETALIESIEGKQGKPRLKPPFPADVGKAW

SEQ ID NO: 9275 - protein, 363 aa, Homo Sapiens
MNKPSDGRPKYLVVNADEGEPGTCKDREILRHDPHKLLEGCLVGGRAMGARAAYIYIRGEFYNEASNLQVAIREAYEAGLIGKNACGSGYDFDVFVVRGAGAYICGEETALIESIEGKQGKPRLKPPFPADVGVFGCPTTVANVETVAVSPTICRRGGTWFAGFGRERNSGTKLFNISGHVNHPCTVEEEMSVPLKELIEKHAGGVTGGWDNLLAVIPGGSSTPLIPKSVCETVLMDFDALVQAQTGLGTAAVIVMDRSTDIVKAIARLIEFYKHESCGQCTPCREGVDWMNKVMARFVRGDARPAEIDSLWEISKQIEGHTICALGDGAAWPVQGLIRHFRPELEERMQRFAQQHQARQAAS

SEQ ID NO: 9276 - protein, 54 aa, Homo Sapiens
MACAGLLTVCLLRPPAPQPQPQTPRHPQLAPDPGPAGHTLFQDVFRRADKNALI

SEQ ID NO: 9277 - protein, 210 aa, Homo Sapiens
MACAGLLTVCLLRPPAPQPQPQTPRHPQLAPDPGPAGHTLFQDVFRRADKNDDGKLSFEEFQNYFADGVLSLGELQELFSGIDGHLTDNLETEKLCDYFSEHLGVYRPVLAALESLNRAVLAAMDATKLEYERASKVDQFVTRFLLRETVSQLQALQSSLEGASDTLEAQAHGWRCRERGGAEQALRQPAGRTPSPEECQPVIHLVPRLF

SEQ ID NO: 9278 - protein, 192 aa, Homo Sapiens
MACAGLLTVCLLRPPAPQPQPQTPRHPQLAPDPGPAGHTLFQDVFRRADKNDDGKLSFEEFQNYFADGVLSLGELQELFSGIDGHLTDNLETEKLCDYFSEHLGVYRPVLAALESLNRAVLAAMDATKLEYERASKVDQFVTRFLLRETVSQLQALQSSLEGASDTLEAQAHGWRLIPSWGPSPRPCEPHFL

SEQ ID NO: 9279 - protein, 362 aa, Homo Sapiens
MACAGLLTVCLLRPPAPQPQPQTPRHPQLAPDPGPAGHTLFQDVFRRADKNDDGKLSFEEFQNYFADGVLSLGELQELFSGIDGHLTDNLETEKLCDYFSEHLGVYRPVLAALESLNRAVLAAMDATKLEYERASKVDQFVTRFLLRETVSQLQALQSSLEGASDTLEAQAHGWRSDAESVEAQSRLCGSRRAGRRALRSVSRSSTWSPGSSDTGRSSEAEMQWRLQVNRLQELIDQLECKAPRLEPLREEDLAKGPDLHILMAQRQVQVAEEGLQDFHRALRCYVDFTGAQSHCLHVSAQKMLDGASFTLYEFWQDEASWRRHQQSPGSKAFQRILIDHLRAPDTLTTVFFPASWWIMNNN

SEQ ID NO: 9280 - protein, 289 aa, Homo Sapiens
MACAGLLTVCLLRPPAPQPQPQTPRHPQLAPDPGPAGHTLFQDVFRRADKNDDGKLSFEEFQNYFADGVLSLGELQELFSGIDGHLTDNLETEKLCDYFSEHLGVYRPVLAALESLNRAVLAAMDATKLEYERASKVDQFVTRFLLRETVSQLQALQSSLEGASDTLEAQAHGWRSDAESVEAQSRLCGSRRAGRRALRSVSRSSTWSPGSSDTGRSSEAEMQWRLQVNRLQELIDQLECKHILMAQRQVQVAEEGLQDFHRALRCYVDFTGAQSHCLHVSAQKMLDGA

SEQ ID NO: 9281 - protein, 297 aa, Homo Sapiens
MACAGLLTVCLLRPPAPQPQPQTPRHPQLAPDPGPAGHTLFQDVFRRADKNDDGKLSFEEFQNYFADGVLSLGELQELFSGIDGHLTDNLETEKLCDYFSEHLGVYRPVLAALESLNRAVLAAMDATKLEYERASKVDQFVTRFLLRETVSQLQALQSSLEGASDTLEAQAHGWRSDAESVEAQSRLCGSRRAGRRALRSVSRSSTWSPGSSDTGRSSEAEMQWRLQVNRLQELIDQLECKRQVQVAEEGLQDFHRALRCYVDFTGAQSHCLHVSAQKMLDGASFTLYEFWQDEASW

SEQ ID NO: 9282 - protein, 396 aa, Homo Sapiens
MACAGLLTVCLLRPPAPQPQPQTPRHPQLAPDPGPAGHTLFQDVFRRADKNDDGKLSFEEFQNYFADGVLSLGELQELFSGIDGHLTDNLETEKLCDYFSEHLGVYRPVLAALESLNRAVLAAMDATKLEYERASKVDQFVTRFLLRETVSQLQALQSSLEGASDTLEAQAHGWRSDAESVEAQSRLCGSRRAGRRALRSVSRSSTWSPGSSDTGRSSEAEMQWRLQVNRLQELIDQLECKVRAVGPGPHKGGPSWYPPEPGPCWRPGPHSVPSQAPRLEPLREEDLAKGPDLHILMAQRQVQVAEEGLQDFHRALRCYVDFTGAQSHCLHVSAQKMLDGASFTLYEFWQDEASWRRHQQSPGSKAFQRILIDHLRAPDTLTTVFFPASWWIMNNN

SEQ ID NO: 9283 - protein, 71 aa, Homo Sapiens
MACAGLLTVCLLRPPAPQPQPQTPRHPQLAPDPGPAGHTLFQDVFRRADKNELLCRWGSQPGGAAGTVQRH

SEQ ID NO: 9284 - protein, 126 aa, Homo Sapiens
MQWRLQVNRLQELIDQLECKAPRLEPLREEDLAKGPDLHILMAQRQVQVAEEGLQDFHRALRCYVDFTGAQSHCLHVSAQKMLDGASFTLYEFWQDEASWRRHQQSPGSKAFQRILIDHLRAPDTL

SEQ ID NO: 9285 - protein, 95 aa, Homo Sapiens
  misc_feature (1)..(1): Xaa can be any naturally occurring amino acid
XQNYFADGVLSLGELQELFSGIDGHLTDNLETEKLCDYFSEHLGVYRPVLAALESLNRAVLAAMDATKLVSGVADGGGSTVRQWASAVLWDPPQS

SEQ ID NO: 9286 - protein, 517 aa, Homo Sapiens
MARMGLAGAAGRWWGLALGLTAFFLPGVHSQVVQVNDSMYGFIGTDVVLHCSFANPLPSVKITQVTWQKSTNGSKQNVAIYNPSMGVSVLAPYRERVEFLRPSFTDGTIRLSRLELEDEGVYICEFATFPTGNRESQLNLTVMAKPTNWIEGTQAVLRAKKGQDDKVLVATCTSANGKPPSVVSWETRLKGEAEYQEIRNPNGTVTVISRYRLVPSREAHQQSLACIVNYHMDRFKESLTLNVQYEPEVTIEGFDGNWYLQRMDVKLTCKADANPPATEYHWTTLNGSLPKGVEAQNRTLFFKGPINYSLAGTYICEATNPIGTRSGQVEVNITEFPYTPSPPEHGRRAGPVPTAIIGGVAGSILLVLIVVGGIVVALRRRRHTFKGDYSTKKHVYGNGYSKAGIPQHHPPMAQNLQYPDDSDDEKKAGPLGGSSYEEEEEEEEGGGGGERKVGGPHPKYDEDAKRPYFTVDEAEARQDGYGDRTLGYQYDPEQLDLAENMVSQNDGSFISKKEWYV

SEQ ID NO: 9287 - protein, 458 aa, Homo Sapiens
MARMGLAGAAGRWWGLALGLTAFFLPGVHSQVVQVNDSMYGFIGTDVVLHCSFANPLPSVKITQVTWQKSTNGSKQNVAIYNPSMGVSVLAPYRERVEFLRPSFTDGTIRLSRLELEDEGVYICEFATFPTGNRESQLNLTVMAKPTNWIEGTQAVLRAKKGQDDKVLVATCTSANGKPPSVVSWETRLKGEAEYQEIRNPNGTVTVISRYRLVPSREAHQQSLACIVNYHMDRFKESLTLNVQYEPEVTIEGFDGNWYLQRMDVKLTCKADANPPATEYHWTTLNGSLPKGVEAQNRTLFFKGPINYSLAGTYICEATNPIGTRSGQVEVNITEKPRPQRGLGSAARLLAGTVAVFLILVAVLTVFFLYNRQQKSPPETDGAGTDQPLSQKPEPSPSRQSSLVPEDIQVVHLDPGRQQQQEEEDLQKLSLQPPYYDLGVSPSYHPSVRTTEPRGECP

SEQ ID NO: 9288 - protein, 352 aa, Homo Sapiens
MARMGLAGAAGRWWGLALGLTAFFLPGVHSQVVQVNDSMYGFIGTDVVLHCSFANPLPSVKITQVTWQKSTNGSKQNVAIYNPSMGVSVLAPYRERVEFLRPSFTDGTIRLSRLELEDEGVYICEFATFPTGNRESQLNLTVMAKPTNWIEGTQAVLRAKKGQDDKVLVATCTSANGKPPSVVSWETRLKGEAEYQEIRNPNGTVTVISRYRLVPSREAHQQSLACIVNYHMDRFKESLTLNVQYEPEVTIEGFDGNWYLQRMDVKLTCKADANPPATEYHWTTLNGSLPKGVEAQNRTLFFKGPINYSLAGTYICEATNPIGTRSGQVEVNITAFCQLIYPGKGRTRARMF

SEQ ID NO: 9289 - protein, 838 aa, Homo Sapiens
MPMDLILVVWFCVCTARTAEDMKPPVLSLIWRTRVLKSLLQQSLQGVVGFGMDPDLQMDIVTELDLVNTTLGVAQVSGMHNASKAFLFQDIEREIHAAPHVSEKLIQLFRNKSEFTILATVQQKPSTSGVILSIRELEHSYFELESSGLRDEIRYHYIHNGKPRTEALPYRMADGQWHKVALSVSASHLLLHVDCNRIYERVIDPPDTNLPPGINLWLGQRNQKHGLFKGIIQDGKIIFMPNGYITQCPNLNHTCPTCSDFLSLVQGIMDLQELLAKMTAKLNYAETRLSQLENCHCEKTCQVSGLLYRDQDSWVDGDHCRNCTCKSGAVECRRMSCPPLNCSPDSLPVHIAGQCCKVCRPKCIYGGKVLAEGQRILTKSCRECRGGVLVKITEMCPPLNCSEKDHILPENQCCRVCRGHNFCAEGPKCGENSECKNWNTKATCECKSGYISVQGDSAYCEDIDECAAKMHYCHANTVCVNLPGLYRCDCVPGYIRVDDFSCTEHDECGSGQHNCDENAICTNTVQGHSCTCKPGYVGNGTICRAFCEEGCRYGGTCVAPNKCVCPSGFTGSHCEKDIDECSEGIIECHNHSRCVNLPGWYHCECRSGFHDDGTYSLSGESCIDIDECALRTHTCWNDSACINLAGGFDCLCPSGPSCSGDCPHEGGLKHNGQVWTLKEDRCSVCSCKDGKIFCRRTACDCQNPSADLFCCPECDTRVTSQCLDQNGHKLYRSGDNWTHSCQQCRCLEGEVDCWPLTCPNLSCEYTAILEGECCPRCVSDPCLADNITYDIRKTCLDSYGVSRLSGSVWTMAGSPCTTCKCKNGRVCCSVDFECLQNN

SEQ ID NO: 9290 - protein, 753 aa, Homo Sapiens
MPMDLILVVWFCVCTARTVVGFGMDPDLQMDIVTELDLVNTTLGVAQVSGMHNASKAFLFQDIEREIHAAPHVSEKLIQLFRNKSEFTILATVQQKPSTSGVILSIRELEHRIYERVIDPPDTNLPPGINLWLGQRNQKHGLFKGIIQDGKIIFMPNGYITQCPNLNHTCPTCSDFLSLVQGIMDLQELLAKMTAKLNYAETRLSQLENCHCEKTCQVSGLLYRDQDSWVDGDHCRNCTCKSGAVECRRMSCPPLNCSPDSLPVHIAGQCCKVCRPKCIYGGKVLAEGQRILTKSCRECRGGVLVKITEMCPPLNCSEKDHILPENQCCRVCRGHNFCAEGPKCGENSECKNWNTKATCECKSGYISVQGDSAYCEDIDECAAKMHYCHANTVCVNLPGLYRCDCVPGYIRVDDFSCTEHDECGSGQHNCDENAICTNTVQGHSCTCKPGYVGNGTICRAFCEEGCRYGGTCVAPNKCVCPSGFTGSHCEKDIDECSEGIIECHNHSRCVNLPGWYHCECRSGFHDDGTYSLSGESCIDIDECALRTHTCWNDSACINLAGGFDCLCPSGPSCSGDCPHEGGLKHNGQVWTLKEDRCSVCSCKDGKIFCRRTACDCQNPSADLFCCPECDTRVTSQCLDQNGHKLYRSGDNWTHSCQQCRCLEGEVDCWPLTCPNLSCEYTAILEGECCPRCVSDPCLADNITYDIRKTCLDSYGVSRLSGSVWTMAGSPCTTCKCKNGRVCCSVDFECLQNN

SEQ ID NO: 9291 - protein, 810 aa, Homo Sapiens
MPMDLILVVWFCVCTARTVVGFGMDPDLQMDIVTELDLVNTTLGVAQVSGMHNASKAFLFQDIEREIHAAPHVSEKLIQLFRNKSEFTILATVQQKPSTSGVILSIRELEHSYFELESSGLRDEIRYHYIHNGKPRTEALPYRMADGQWHKVALSVSASHLLLHVDCNRIYERVIDPPDTNLPPGINLWLGQRNQKHGLFKGIIQDGKIIFMPNGYITQCPNLNHTCPTCSDFLSLVQGIMDLQELLAKMTAKLNYAETRLSQLENCHCEKTCQVSGLLYRDQDSWVDGDHCRNCTCKSGAVECRRMSCPPLNCSPDSLPVHIAGQCCKVCRPKCIYGGKVLAEGQRILTKSCRECRGGVLVKITEMCPPLNCSEKDHILPENQCCRVCRGHNFCAEGPKCGENSECKNWNTKATCECKSGYISVQGDSAYCEDIDECAAKMHYCHANTVCVNLPGLYRCDCVPGYIRVDDFSCTEHDECGSGQHNCDENAICTNTVQGHSCTCKPGYVGNGTICRAFCEEGCRYGGTCVAPNKCVCPSGFTGSHCEKDIDECSEGIIECHNHSRCVNLPGWYHCECRSGFHDDGTYSLSGESCIDIDECALRTHTCWNDSACINLAGGFDCLCPSGPSCSGDCPHEGGLKHNGQVWTLKEDRCSVCSCKDGKIFCRRTACDCQNPSADLFCCPECDTRVTSQCLDQNGHKLYRSGDNWTHSCQQCRCLEGEVDCWPLTCPNLSCEYTAILEGECCPRCVSDPCLADNITYDIRKTCLDSYGVSRLSGSVWTMAGSPCTTCKCKNGRVCCSVDFECLQNN

SEQ ID NO: 9292 - protein, 763 aa, Homo Sapiens
MPMDLILVVWFCVCTARTVVGFGMDPDLQMDIVTELDLVNTTLGVAQVSGMHNASKAFLFQDIEREIHAAPHVSEKLIQLFRNKSEFTILATVQQKPSTSGVILSIRELEHSYFELESSGLRDEIRYHYIHNGKPRTEALPYRMADGQWHKVALSVSASHLLLHVDCNRIYERVIDPPDTNLPPGINLWLGQRNQKHGLFKGIIQDGKIIFMPNGYITQCPNLNHTCPTCSDFLSLVQGIMDLQELLAKMTAKLNYAETRLSQLENCHCEKTCQVSGLLYRDQDSWVDGDHCRNCTCKSGAVECRRMSCPPLNCSPDSLPVHIAGQCCKVCRPKCIYGGKVLAEGQRILTKSCRECRGGVLVKITEMCPPLNCSEKDHILPENQCCRVCRGHNFCAEGPKCGENSECKNWNTKATCECKSGYISVQGDSAYCEDIDECAAKMHYCHANTVCVNLPGLYRCDCVPGYIRVDDFSCTEHDECGSGQHNCDENAICTNTVQGHSCTCKPGYVGNGTICRAFCEEGCRYGGTCVAPNKCVCPSGFTGSHCEKDIDECALRTHTCWNDSACINLAGGFDCLCPSGPSCSGDCPHEGGLKHNGQVWTLKEDRCSVCSCKDGKIFCRRTACDCQNPSADLFCCPECDTRVTSQCLDQNGHKLYRSGDNWTHSCQQCRCLEGEVDCWPLTCPNLSCEYTAILEGECCPRCVSDPCLADNITYDIRKTCLDSYGVSRLSGSVWTMAGSPCTTCKCKNGRVCCSVDFECLQNN

SEQ ID NO: 9293 - protein, 122 aa, Homo Sapiens
CPTCNDFHGLVQKIMELQDILAKTSAKLSRAEQRMNRLDQCYCERTCTMKGTTYREFESWIDGCKNCTCLNGTIQCETLICPNPDCPLKSALAYVDGKCCKECKCEHNFYDEYFLWKNKALY

SEQ ID NO: 9294 - protein, 166 aa, Homo Sapiens
MELFLFLSPTSYPSPVWGLGVDPSLQIDVLTELELGESTTGVRQVPGLHNGTKAFLFQDTPRSIKASTATAEQFFQKLRNKHEFTILVTLKQTHLNSGVILSIHHLDHRYLELESSGHRNEVRLHYRSGSHRPHTEVFPYILADDKWHKLSLAISASHLILHIDCN

SEQ ID NO: 9295 - protein, 22 aa, Homo Sapiens
MESRVLLRTFCLIFGLGAVWGL

SEQ ID NO: 9296 - protein, 112 aa, Homo Sapiens
MESRVLLRTFCLIFGLGAVWGLGVDPSLQIDVLTELELGESTTGVRQVPGLHNGTKAFLFQDTPRSIKASTATAEQFFQKLRNKHEFTILVTLKQTHLNSGVILSIHHLDHR

SEQ ID NO: 9297 - protein, 816 aa, Homo Sapiens
MESRVLLRTFCLIFGLGAVWGLGVDPSLQIDVLTELELGESTTGVRQVPGLHNGTKAFLFQDTPRSIKASTATAEQFFQKLRNKHEFTILVTLKQTHLNSGVILSIHHLDHRYLELESSGHRNEVRLHYRSGSHRPHTEVFPYILADDKWHKLSLAISASHLILHIDCNKIYERVVEKPSTDLPLGTTFWLGQRNNAHGYFKGIMQDVQLLVMPQGFIAQCPDLNRTCPTCNDFHGLVQKIMELQDILAKTSAKLSRAEQRMNRLDQCYCERTCTMKGTTYREFESWIDGCKNCTCLNGTIQCETLICPNPDCPLKSALAYVDGKCCKECKSICQFQGRTYFEGERNTVYSSSGVCVLYECKDQTMKLVESSGCPALDCPESHQITLSHSCCKVCKGYDFCSERHNCMENSICRNLNDRAVCSCRDGFRALREDNAYCEDIDECAEGRHYCRENTMCVNTPGSFMCICKTGYIRIDDYSCTEHDECITNQHNCDENALCFNTVGGHNCVCKPGYTGNGTTCKAFCKDGCRNGGACIAANVCACPQGFTGPSCETDIDECSDGFVQCDSRANCINLPGWYHCECRDGYHDNGMFSPSGESCEDIDECGTGRHSCANDTICFNLDGGYDCRCPHGKNCTGDCIHDGKVKHNGQIWVLENDRCSVCSCQNGFVMCRRMVCDCENPTVDLFCCPECDPRLSSQCLHQNGETLYNSGDTWVQNCQQCRCLQGEVDCWPLPCPDVECEFSILPENECCPRCVTDPCQADTIRNDITKTCLDEMNVVRFTGSSWIKHGTECTLCQCKNGHICCSVDPQCLQEL

SEQ ID NO: 9298 - protein, 816 aa, Homo Sapiens; identical to SEQ ID NO: 9297

SEQ ID NO: 9299 - protein, 321 aa, Homo Sapiens
MESRVLLRTFCLIFGLGAVWGLGVDPSLQIDVLTELELGESTTGVRQVPGLHNGTKAFLFQDTPRSIKASTATAEQFFQKLRNKHEFTILVTLKQTHLNSGVILSIHHLDHRYLELESSGHRNEVRLHYRSGSHRPHTEVFPYILADDKWHKLSLAISASHLILHIDCNKIYERVVEKPSTDLPLGTTFWLGQRNNAHGYFKGIMQDVQLLVMPQGFIAQCPDLNRTCPTCNDFHGLVQKIMELQDILAKTSAKLSRAEQRMNRLDQCYCERTCTMKGTTYREFESWIDGCKNCTCLNGTIQCETLICPNPDCPLKSALAY

SEQ ID NO: 9300 - protein, 110 aa, Homo Sapiens
METGLGAPLFKAWLLISVWGLGVDPSLQIDVLTELELGESTTGVRQVPGLHNGTKAFLFQDTPRSIKASTATAEQFFQKLRNKHEFTILVTLKQTHLNSGVILSIHHLDH

SEQ ID NO: 9301 - protein, 815 aa, Homo Sapiens
METGLGAPLFKAWLLISVWGLGVDPSLQIDVLTELELGESTTGVRQVPGLHNGTKAFLFQDTPRSIKASTATAEQFFQKLRNKHEFTILVTLKQTHLNSGVILSIHHLDHRYLELESSGHRNEVRLHYRSGSHRPHTEVFPYILADDKWHKLSLAISASHLILHIDCNKIYERVVEKPSTDLPLGTTFWLGQRNNAHGYFKGIMQDVQLLVMPQGFIAQCPDLNRTCPTCNDFHGLVQKIMELQDILAKTSAKLSRAEQRMNRLDQCYCERTCTMKGTTYREFESWIDGCKNCTCLNGTIQCETLICPNPDCPLKSALAYVDGKCCKECKSICQFQGRTYFEGERNTVYSSSGVCVLYECKDQTMKLVESSGCPALDCPESHQITLSHSCCKVCKGYDFCSERHNCMENSICRNLNDRAVCSCRDGFRALREDNAYCEDIDECAEGRHYCRENTMCVNTPGSFMCICKTGYIRIDDYSCTEHDECITNQHNCDENALCFNTVGGHNCVCKPGYTGNGTTCKAFCKDGCRNGGACIAANVCACPQGFTGPSCETDIDECSDGFVQCDSRANCINLPGWYHCECRDGYHDNGMFSPSGESCEDIDECGTGRHSCANDTICFNLDGGYDCRCPHGKNCTGDCIHDGKVKHNGQIWVLENDRCSVCSCQNGFVMCRRMVCDCENPTVDLFCCPECDPRLSSQCLHQNGETLYNSGDTWVQNCQQCRCLQGEVDCWPLPCPDVECEFSILPENECCPRCVTDPCQADTIRNDITKTCLDEMNVVRFTGSSWIKHGTECTLCQCKNGHICCSVDPQCLQEL

SEQ ID NO: 9302 - protein, 768 aa, Homo Sapiens
METGLGAPLFKAWLLISVWGLGVDPSLQIDVLTELELGESTTGVRQVPGLHNGTKAFLFQDTPRSIKASTATAEQFFQKLRNKHEFTILVTLKQTHLNSGVILSIHHLDHRYLELESSGHRNEVRLHYRSGSHRPHTEVFPYILADDKWHKLSLAISASHLILHIDCNKIYERVVEKPSTDLPLGTTFWLGQRNNAHGYFKGIMQDVQLLVMPQGFIAQCPDLNRTCPTCNDFHGLVQKIMELQDILAKTSAKLSRAEQRMNRLDQCYCERTCTMKGTTYREFESWIDGCKNCTCLNGTIQCETLICPNPDCPLKSALAYVDGKCCKECKSICQFQGRTYFEGERNTVYSSSGVCVLYECKDQTMKLVESSGCPALDCPESHQITLSHSCCKVCKGYDFCSERHNCMENSICRNLNDRAVCSCRDGFRALREDNAYCEDIDECAEGRHYCRENTMCVNTPGSFMCICKTGYIRIDDYSCTEHDECITNQHNCDENALCFNTVGGHNCVCKPGYTGNGTTCKAFCKDGCRNGGACIAANVCACPQGFTGPSCETDIDECGTGRHSCANDTICFNLDGGYDCRCPHGKNCTGDCIHDGKVKHNGQIWVLENDRCSVCSCQNGFVMCRRMVCDCENPTVDLFCCPECDPRLSSQCLHQNGETLYNSGDTWVQNCQQCRCLQGEVDCWPLPCPDVECEFSILPENECCPRCVTDPCQADTIRNDITKTCLDEMNVVRFTGSSWIKHGTECTLCQCKNGHICCSVDPQCLQEL

SEQ ID NO: 9303 - protein, 815 aa, Homo Sapiens; identical to SEQ ID NO: 9301

SEQ ID NO: 9304 - protein, 866 aa, Homo Sapiens
MGFPPLLKGQASATRSSLASCSWVVFFLSCLSRHAPEIEGGRRWTELIRTMESRVLLRTFCLIFGLGAVWGLGVDPSLQIDVLTELELGESTTGVRQVPGLHNGTKAFLFQDTPRSIKASTATAEQFFQKLRNKHEFTILVTLKQTHLNSGVILSIHHLDHRYLELESSGHRNEVRLHYRSGSHRPHTEVFPYILADDKWHKLSLAISASHLILHIDCNKIYERVVEKPSTDLPLGTTFWLGQRNNAHGYFKGIMQDVQLLVMPQGFIAQCPDLNRTCPTCNDFHGLVQKIMELQDILAKTSAKLSRAEQRMNRLDQCYCERTCTMKGTTYREFESWIDGCKNCTCLNGTIQCETLICPNPDCPLKSALAYVDGKCCKECKSICQFQGRTYFEGERNTVYSSSGVCVLYECKDQTMKLVESSGCPALDCPESHQITLSHSCCKVCKGYDFCSERHNCMENSICRNLNDRAVCSCRDGFRALREDNAYCEDIDECAEGRHYCRENTMCVNTPGSFMCICKTGYIRIDDYSCTEHDECITNQHNCDENALCFNTVGGHNCVCKPGYTGNGTTCKAFCKDGCRNGGACIAANVCACPQGFTGPSCETDIDECSDGFVQCDSRANCINLPGWYHCECRDGYHDNGMFSPSGESCEDIDECGTGRHSCANDTICFNLDGGYDCRCPHGKNCTGDCIHDGKVKHNGQIWVLENDRCSVCSCQNGFVMCRRMVCDCENPTVDLFCCPECDPRLSSQCLHQNGETLYNSGDTWVQNCQQCRCLQGEVDCWPLPCPDVECEFSILPENECCPRCVTDPCQADTIRNDITKTCLDEMNVVRFTGSSWIKHGTECTLCQCKNGHICCSVDPQCLQEL

SEQ ID NO: 9305 - protein, 839 aa, Homo Sapiens
MSIRRLLILILKIGRRWTELIRTMESRVLLRTFCLIFGLGAVWGLGVDPSLQIDVLTELELGESTTGVRQVPGLHNGTKAFLFQDTPRSIKASTATAEQFFQKLRNKHEFTILVTLKQTHLNSGVILSIHHLDHRYLELESSGHRNEVRLHYRSGSHRPHTEVFPYILADDKWHKLSLAISASHLILHIDCNKIYERVVEKPSTDLPLGTTFWLGQRNNAHGYFKGIMQDVQLLVMPQGFIAQCPDLNRTCPTCNDFHGLVQKIMELQDILAKTSAKLSRAEQRMNRLDQCYCERTCTMKGTTYREFESWIDGCKNCTCLNGTIQCETLICPNPDCPLKSALAYVDGKCCKECKSICQFQGRTYFEGERNTVYSSSGVCVLYECKDQTMKLVESSGCPALDCPESHQITLSHSCCKVCKGYDFCSERHNCMENSICRNLNDRAVCSCRDGFRALREDNAYCEDIDECAEGRHYCRENTMCVNTPGSFMCICKTGYIRIDDYSCTEHDECITNQHNCDENALCFNTVGGHNCVCKPGYTGNGTTCKAFCKDGCRNGGACIAANVCACPQGFTGPSCETDIDECSDGFVQCDSRANCINLPGWYHCECRDGYHDNGMFSPSGESCEDIDECGTGRHSCANDTICFNLDGGYDCRCPHGKNCTGDCIHDGKVKHNGQIWVLENDRCSVCSCQNGFVMCRRMVCDCENPTVDLFCCPECDPRLSSQCLHQNGETLYNSGDTWVQNCQQCRCLQGEVDCWPLPCPDVECEFSILPENECCPRCVTDPCQADTIRNDITKTCLDEMNVVRFTGSSWIKHGTECTLCQCKNGHICCSVDPQCLQEL

SEQ ID NO: 9306 - protein, 246 aa, Homo Sapiens
  misc_feature (1)..(1): Xaa can be any naturally occurring amino acid
XAKLSRAEQRMNRLDQCYCERTCTMKGTTYREFESWIDGCKNCTCLNGTIQCETLICPNPDCPLKSALAYVDGKCSICQFQGRTYFEGERNTVYSSSGVCVLYECKDQTMKLVESSGCPALDCPESHQITLSHSCCKVCKGYDFCSERHNCMENSICRNLNDRAVCSCRDGFRALREDNAYCEDIDECAEGRHYCRENTMCVNTPGSFMCICKTGYIRIDDYSCTEHDECITNQHNCDENALCFNT

SEQ ID NO: 9307 - protein, 86 aa, Homo Sapiens
  misc_feature (1)..(1): Xaa can be any naturally occurring amino acid
XDNGMFSPSGESCEDIDECGTGRHSCANDTICFNLDGGYDCRCPHGKNCTGDCIHDGKVKHNGQIWVLENDRCSVCSCQVGINEKL

SEQ ID NO: 9308 - protein, 172 aa, Homo Sapiens
MVGPAPRRRLRPLAALALVLALAPGLPTARAGQTPRPAERGPPVRLFTEEELARYGGEEEDQPIYLAVKGVVFDVTSGKEFYGRGAPYNALTGKDSTRGVAKMSLDPADLTHDTTGLTAKELEALDEVFTKVYKAKYPIVGYTARRILNEDGSPNLDFKPEDQPHFDIKDEF

SEQ ID NO: 9309 - protein, 533 aa, Homo Sapiens
MIHGRSVLHIVASLIILHLSGATKKGTEKQTTSETQKSVQCGTWTKHAEGGIFTSPNYPSKYPPDRECIYIIEAAPRQCIELYFDEKYSIEPSWECKFDHIEVRDGPFGFSPIIGRFCGQQNPPVIKSSGRFLWIKFFADGELESMGFSARYNFTPDPDFKDLGALKPLPACEFEMGGSEGIVESIQIMKEGKATASEAVDCKWYIRAPPRSKIYLRFLDYEMQNSNECKRNFVAVYDGSSSVEDLKAKFCSTVANDVMLRTGLGVIRMWADEGSRNSRFQMLFTSFQEPPCEGNTFFCHSNMCINNTLVCNGLQNCVYPWDENHCKEKRKTSLLDQLTNTSGTVIGVTSCIVIILIIISVIVQIKQPRKKYVQRKSDFDQTVFQEVFEPPHYELCTLRGTGATADFADVADDFENYHKLRRSSSKCIHDHHCGSQLSSTKGSRSNLSTRDASILTEMPTQPGKPLIPPMNRRNILVMKHSYSQDAADACDIDEIEEVPTTSHRLSRHDKAVQRFCLIGSLSKHESEYNTTRV

SEQ ID NO: 9310 - protein, 533 aa, Homo Sapiens; identical to SEQ ID NO: 9309

SEQ ID NO: 9311 - protein, 156 aa, Homo Sapiens
MLAEPFPKVVASLIILHLSGATKKGTEKQTTSETQKSVQCGTWTKHAEGGIFTSPNYPSKYPPDRECIYIIEAAPRQCIELYFDEKYSIEPSWECKFDHIEVRDGPFGFSPIIGRFCGQQNPPVIKSSGRFLWIKFFADGELESMGFSARYNFTPE

SEQ ID NO: 9312 - protein, 101 aa, Homo Sapiens
MSLYGFVASLIILHLSGATKKGTEKQTTSETQKSVQCGTWTKHAEGGIFTSPNYPSKYPPDRECIYIIEAAPRQCIELYFDEKYSIEPSWECKFDHIEVRD

SEQ ID NO: 9313 - protein, 1165 aa, Homo Sapiens
IEIPMDLTQPPTITKQSAKDHIVDPRDNILIECEAKGNPAPSFHWTRNSRFFNIAKDPRVSMRRRSGTLVIDFRSGGRPEEYEGEYQCFARNKFGTALSNRIRLQVSKSPLWPKENLDPVVVQEGAPLTLQCNPPPGLPSPVIFWMSSSMEPITQDKRVSQGHNGDLYFSNVMLQDMQTDYSCNARFHFTHTIQQKNPFTLKVLTNHPYNDSSLRNHPDMYSARGVAERTPSFMYPQGTASSQMVLRGMDLLLECIASGVPTPDIAWYKKGGDLPSDKAKFENFNKALRITNVSEEDSGEYFCLASNKMGSIRHTISVRVKAAPYWLDEPKNLILAPGEDGRLVCRANGNPKPTVQWMVNGEPLQSAPPNPNREVAGDTIIFRDTQISSRAVYQCNTSNEHGYLLANAFVSVLDVPPRMLSPRNQLIRVILYNRTRLDCPFFGSPIPTLRWFKNGQGSNLDGGNYHVYENGSLEIKMIRKEDQGIYTCVATNILGKAENQVRLEVKDPTRIYRMPEDQVARRGTTVQLECRVKHDPSLKLTVSWLKDDEPLYIGNRMKKEDDSLTIFGVAERDQGSYTCVASTELDQDLAKAYLTVLADQATPTNRLAALPKGRPDRPRDLELTDLAERSVRLTWIPGDANNSPITDYVVQFEEDQFQPGVWHDHSKYPGSVNSAVLRLSPYVNYQFRVIAINEVGSSHPSLPSERYRTSGAPPESNPGDVKGEGTRKNNMEITWTPMNATSAFGPNLRYIVKWRRRETREAWNNVTVWGSRYVVGQTPVYVPYEIRVQAENDFGKGPEPESVIGYSGEDYPRAAPTEVKVRVMNSTAISLQWNRVYSDTVQGQLREYRAYYWRESSLLKNLWVSQKRQQASFPGDRLRGVVSRLFPYSNYKLEMVVVNGRGDGPRSETKEFTTPEGVPSAPRRFRVRQPNLETINLEWDHPEHPNGIMIGYTLKYVAFNGTKVGKQIVENFSPNQTKFTVQRTDPVSRYRFTLSARTQVGSGEAVTEESPAPPNEATPTAAYTNNQADIATQGWFIGLMCAIALLVLILLIVCFIKRSRGGKYPVREKKDVPLGPEDPKEEDGSFDYSDEDNKPLQGSQTSLDGTIKQQESDDSLVDYGEGGEGQFNEDGSFIGQYTVKKDKEETEGNESSEATSPVNAIYSLA

SEQ ID NO: 9314 - protein, 1169 aa, Homo Sapiens
MARQPPPPWVHAAFLLCLLSLGGAIEIPMDLTQPPTITKQSAKDHIVDPRDNILIECEAKGNPAPSFHWTRNSRFFNIAKDPRVSMRRRSGTLVIDFRSGGRPEEYEGEYQCFARNKFGTALSNRIRLQVSKSPLWPKENLDPVVVQEGAPLTLQCNPPPGLPSPVIFWMSSSMEPITQDKRVSQGHNGDLYFSNVMLQDMQTDYSCNARFHFTHTIQQKNPFTLKVLTNHPYNDSSLRNHPDMYSARGVAERTPSFMYPQGTASSQMVLRGMDLLLECIASGVPTPDIAWYKKGGDLPSDKAKFENFNKALRITNVSEEDSGEYFCLASNKMGSIRHTISVRVKAAPYWLDEPKNLILAPGEDGRLVCRANGNPKPTVQWMVNGEPLQSAPPNPNREVAGDTIIFRDTQISSRAVYQCNTSNEHGYLLANAFVSVLDVPPRMLSPRNQLIRVILYNRTRLDCPFFGSPIPTLRWFKNGQGSNLDGGNYHVYENGSLEIKMIRKEDQGIYTCVATNILGKAENQVRLEVKDPTRIYRMPEDQVARRGTTVQLECRVKHDPSLKLTVSWLKDDEPLYIGNRMKKEDDSLTIFGVAERDQGSYTCVASTELDQDLAKAYLTVLGRPDRPRDLELTDLAERSVRLTWIPGDANNSPITDYVVQFEEDQFQPGVWHDHSKYPGSVNSAVLRLSPYVNYQFRVIAINEVGSSHPSLPSERYRTSGAPPESNPGDVKGEGTRKNNMEITWTPMNATSAFGPNLRYIVKWRRRETREAWNNVTVWGSRYVVGQTPVYVPYEIRVQAENDFGKGPEPESVIGYSGEDYPRAAPTEVKVRVMNSTAISLQWNRVYSDTVQGQLREYRAYYWRESSLLKNLWVSQKRQQASFPGDRLRGVVSRLFPYSNYKLEMVVVNGRGDGPRSETKEFTTPEGVPSAPRRFRVRQPNLETINLEWDHPEHPNGIMIGYTLKYVAFNGTKVGKQIVENFSPNQTKFTVQRTDPVSRYRFTLSARTQVGSGEAVTEESPAPPNEAYTNNQADIATQGWFIGLMCAIALLVLILLIVCFIKRSRGGKYPVREKKDVPLGPEDPKEEDGSFDYSDEDNKPLQGSQTSLDGTIKQQESDDSLVDYGEGGEGQFNEDGSFIGQYTVKKDKEETEGNESSEATSPVNAIYSLA

SEQ ID NO: 9315 - protein, 1174 aa, Homo Sapiens
MARQPPPPWVHAAFLLCLLSLGGAIEIPMDLTQPPTITKQSAKDHIVDPRDNILIECEAKGNPAPSFHWTRNSRFFNIAKDPRVSMRRRSGTLVIDFRSGGRPEEYEGEYQCFARNKFGTALSNRIRLQVSKSPLWPKENLDPVVVQEGAPLTLQCNPPPGLPSPVIFWMSSSMEPITQDKRVSQGHNGDLYFSNVMLQDMQTDYSCNARFHFTHTIQQKNPFTLKVLTNHPYNDSSLRNHPDMYSARGVAERTPSFMYPQGTASSQMVLRGMDLLLECIASGVPTPDIAWYKKGGDLPSDKAKFENFNKALRITNVSEEDSGEYFCLASNKMGSIRHTISVRVKAAPYWLDEPKNLILAPGEDGRLVCRANGNPKPTVQWMVNGEPLQSAPPNPNREVAGDTIIFRDTQISSRAVYQCNTSNEHGYLLANAFVSVLDVPPRMLSPRNQLIRVILYNRTRLDCPFFGSPIPTLRWFKNGQGSNLDGGNYHVYENGSLEIKMIRKEDQGIYTCVATNILGKAENQVRLEVKDPTRIYRMPEDQVARRGTTVQLECRVKHDPSLKLTVSWLKDDEPLYIGNRMKKEDDSLTIFGVAERDQGSYTCVASTELDQDLAKAYLTVLGRPDRPRDLELTDLAERSVRLTWIPGDANNSPITDYVVQFEEDQFQPGVWHDHSKYPGSVNSAVLRLSPYVNYQFRVIAINEVGSSHPSLPSERYRTSGAPPESNPGDVKGEGTRKNNMEITWTPMNATSAFGPNLRYIVKWRRRETREAWNNVTVWGSRYVVGQTPVYVPYEIRVQAENDFGKGPEPESVIGYSGEDYPRAAPTEVKVRVMNSTAISLQWNRVYSDTVQGQLREYRAYYWRESSLLKNLWVSQKRQQASFPGDRLRGVVSRLFPYSNYKLEMVVVNGRGDGPRSETKEFTTPEGVPSAPRRFRVRQPNLETINLEWDHPEHPNGIMIGYTLKYVAFNGTKVGKQIVENFSPNQTKFTVQRTDPVSRYRFTLSARTQVGSGEAVTEESPAPPNEATPTAAYTNNQADIATQGWFIGLMCAIALLVLILLIVCFIKRSRGGKYPVREKKDVPLGPEDPKEEDGSFDYSDEDNKPLQGSQTSLDGTIKQQESDDSLVDYGEGGEGQFNEDGSFIGQYTVKKDKEETEGNESSEATSPVNAIYSLA

SEQ ID NO: 9316 - protein, 1174 aa, Homo Sapiens; identical to SEQ ID NO: 9315

SEQ ID NO: 9317 - protein, 1169 aa, Homo Sapiens; identical to SEQ ID NO: 9314

SEQ ID NO: 9318 - protein, 1157 aa, Homo Sapiens
MARQPPPPWVHAAFLLCLLSLGGAIEIPMDLTQPPTITKQSAKDHIVDPRDNILIECEAKGNPAPSFHWTRNSRFFNIAKDPRVSMRRRSGTLVIDFRSGGRPEEYEGEYQCFARNKFGTALSNRIRLQVSKSPLWPKENLDPVVVQEGAPLTLQCNPPPGLPSPVIFWMSSSMEPITQDKRVSQGHNGDLYFSNVMLQDMQTDYSCNARFHFTHTIQQKNPFTLKVLTTRGVAERTPSFMYPQGTASSQMVLRGMDLLLECIASGVPTPDIAWYKKGGDLPSDKAKFENFNKALRITNVSEEDSGEYFCLASNKMGSIRHTISVRVKAAPYWLDEPKNLILAPGEDGRLVCRANGNPKPTVQWMVNGEPLQSAPPNPNREVAGDTIIFRDTQISSRAVYQCNTSNEHGYLLANAFVSVLDVPPRMLSPRNQLIRVILYNRTRLDCPFFGSPIPTLRWFKNGQGSNLDGGNYHVYENGSLEIKMIRKEDQGIYTCVATNILGKAENQVRLEVKDPTRIYRMPEDQVARRGTTVQLECRVKHDPSLKLTVSWLKDDEPLYIGNRMKKEDDSLTIFGVAERDQGSYTCVASTELDQDLAKAYLTVLGRPDRPRDLELTDLAERSVRLTWIPGDANNSPITDYVVQFEEDQFQPGVWHDHSKYPGSVNSAVLRLSPYVNYQFRVIAINEVGSSHPSLPSERYRTSGAPPESNPGDVKGEGTRKNNMEITWTPMNATSAFGPNLRYIVKWRRRETREAWNNVTVWGSRYVVGQTPVYVPYEIRVQAENDFGKGPEPESVIGYSGEDYPRAAPTEVKVRVMNSTAISLQWNRVYSDTVQGQLREYRAYYWRESSLLKNLWVSQKRQQASFPGDRLRGVVSRLFPYSNYKLEMVVVNGRGDGPRSETKEFTTPEGVPSAPRRFRVRQPNLETINLEWDHPEHPNGIMIGYTLKYVAFNGTKVGKQIVENFSPNQTKFTVQRTDPVSRYRFTLSARTQVGSGEAVTEESPAPPNEATPTAAYTNNQADIATQGWFIGLMCAIALLVLILLIVCFIKRSRGGKYPVREKKDVPLGPEDPKEEDGSFDYSDEDNKPLQGSQTSLDGTIKQQESDDSLVDYGEGGEGQFNEDGSFIGQYTVKKDKEETEGNESSEATSPVNAIYSLA

SEQ ID NO: 9319 - protein, 129 aa, Homo Sapiens
MARQPPPPWVHAAFLLCLLSLGGAIEIPMDPSIQNELTQPPTITKQSAKDHIVDPRDNILIECEAKGNPAPSFHWTRNSRFFNIAKDPRVSMRRRSGTLVIDFRSGGRPEEYEGEYQCFARNKFGTALS

SEQ ID NO: 9320 - protein, 486 aa, Homo Sapiens
MARQPPPPWVHAAFLLCLLSLGGAIEIPMDPSIQNELTQPPTITKQSAKDHIVDPRDNILIECEAKGNPAPSFHWTRNSRFFNIAKDPRVSMRRRSGTLVIDFRSGGRPEEYEGEYQCFARNKFGTALSNRIRLQVSKSPLWPKENLDPVVVQEGAPLTLQCNPPPGLPSPVIFWMSSSMEPITQDKRVSQGHNGDLYFSNVMLQDMQTDYSCNARFHFTHTIQQKNPFTLKVLTNHPYNDSSLRNHPDMYSARGVAERTPSFMYPQGTASSQMVLRGMDLLLECIASGVPTPDIAWYKKGGDLPSDKAKFENFNKALRITNVSEEDSGEYFCLASNKMGSIRHTISVRVKAAPYWLDEPKNLILAPGEDGRLVCRANGNPKPTVQWMVNGEPLQSAPPNPNREVAGDTIIFRDTQISSRAVYQCNTSNEHGYLLANAFVSVLDVPPRMLSPRNQLIRVILYNRTRLDCPFFGSPIPTLRCPHGLS

SEQ ID NO: 9321 - protein, 1240 aa, Homo Sapiens
MARQPPPPWVHAAFLLCLLSLGGAIEIPMDPSIQNELTQPPTITKQSAKDHIVDPRDNILIECEAKGNPAPSFHWTRNSRFFNIAKDPRVSMRRRSGTLVIDFRSGGRPEEYEGEYQCFARNKFGTALSNRIRLQVSKSPLWPKENLDPVVVQEGAPLTLQCNPPPGLPSPVIFWMSSSMEPITQDKRVSQGHNGDLYFSNVMLQDMQTDYSCNARFHFTHTIQQKNPFTLKVLTTRGVAERTPSFMYPQGTASSQMVLRGMDLLLECIASGVPTPDIAWYKKGGDLPSDKAKFENFNKALRITNVSEEDSGEYFCLASNKMGSIRHTISVRVKAAPYWLDEPKNLILAPGEDGRLVCRANGNPKPTVQWMVNGEPLQSAPPNPNREVAGDTIIFRDTQISSRAVYQCNTSNEHGYLLANAFVSVLDVPPRMLSPRNQLIRVILYNRTRLDCPFFGSPIPTLRWFKNGQGSNLDGGNYHVYENGSLEIKMIRKEDQGIYTCVATNILGKAENQVRLEVKDPTRIYRMPEDQVARRGTTVQLECRVKHDPSLKLTVSWLKDDEPLYIGNRMKKEDDSLTIFGVAERDQGSYTCVASTELDQDLAKAYLTVLADQATPTNRLAALPKGRPDRPRDLELTDLAERSVRLTWIPGDANNSPITDYVVQFEEDQFQPGVWHDHSKYPGSVNSAVLRLSPYVNYQFRVIAINEVGSSHPSLPSERYRTSGAPPESNPGDVKGEGTRKNNMEITWTPMNATSAFGPNLRYIVKWRRRETREAWNNVTVWGSRYVVGQTPVYVPYEIRVQAENDFGKGPEPESVIGYSGEDLPSAPRRFRVRQPNLETINLEWDHPEHPNGIMIGYTLKYVAFNGTKVGKQIVENFSPNQTKFTVQRTDPVSRYRFTLSARTQVGSGEAVTEESPAPPNEATPTAAPPTLPPTTVGATGAVSSTDATAIAATTEATTVPIIPTVAPTTIATTTTVATTTTTTAAATTTTESPPTTTSGTKIHESAPDEQSIWNVTVLPNSKWANITWKHNFGPGTDFVVEYIDSNHTKKTVPVKAQAQPIQLTDLYPGMTYTLRVYSRDNEGISSTVITFMTSTAYTNNQADIATQGWFIGLMCAIALLVLILLIVCFIKRSRGGKYPVREKKDVPLGPEDPKEEDGSFDYSDEDNKPLQGSQTSLDGTIKQQESDDSLVDYGEGGEGQFNEDGSFIGQYTVKKDKEETEGNESSEATSPVNAIYSLA

SEQ ID NO: 9322 - protein, 1240 aa, Homo Sapiens; identical to SEQ ID NO: 9321

SEQ ID NO: 9323 - protein, 619 aa, Homo Sapiens
MARQPPPPWVHAAFLLCLLSLGGAIEIPMDPSIQNELTQPPTITKQSAKDHIVDPRDNILIECEAKGNPAPSFHWTRNSRFFNIAKDPRVSMRRRSGTLVIDFRSGGRPEEYEGEYQCFARNKFGTALSNRIRLQVSKSPLWPKENLDPVVVQEGAPLTLQCNPPPGLPSPVIFWMSSSMEPITQDKRVSQGHNGDLYFSNVMLQDMQTDYSCNARFHFTHTIQQKNPFTLKVLTTRGVAERTPSFMYPQGTASSQMVLRGMDLLLECIASGVPTPDIAWYKKGGDLPSDKAKFENFNKALRITNVSEEDSGEYFCLASNKMGSIRHTISVRVKAAPYWLDEPKNLILAPGEDGRLVCRANGNPKPTVQWMVNGEPLQSAPPNPNREVAGDTIIFRDTQISSRAVYQCNTSNEHGYLLANAFVSVLDVPPRMLSPRNQLIRVILYNRTRLDCPFFGSPIPTLRWFKNGQGSNLDGGNYHVYENGSLEIKMIRKEDQGIYTCVATNILGKAENQVRLEVKDPTRIYRMPEDQVARRGTTVQLECRVKHDPSLKLTVSWLKDDEPLYIGNRMKKEDDSLTIFGVAERDQGSYTCVASTELDQDLAKAYLTVLGNCPCSPWH

SEQ ID NO: 9324 - protein, 218 aa, Homo Sapiens
PPTTVGATGAVSSTDATAIAATTEATTVPIIPTVAPTTIATTTTVATTTTTTAAATTTTESPPTTTSGTKIHESAYTNNQADIATQGWFIGLMCAIALLVLILLIVCFIKRSRGGKYPVREKKDVPLGPEDPKEEDGSFDYSDEDNKPLQGSQTSLDGTIKQQESDDSLVDYGEGGEGQFNEDGSFIGQYTVKKDKEETEGNESSEATSPVNAIYSLA

SEQ ID NO: 9325 - protein, 237 aa, Homo Sapiens
  misc_feature (1)..(1): Xaa can be any naturally occurring amino acid
XENFSPNQTKFTVQRTDPVSRYRFTLSARTQVGSGEAVTEESPAPPNEATPTAAPDEQSIWNVTVLPNSKWANITWKHNFGPGTDFVVEYIDSNHTKKTVPVKAQAQPIQLTDLYPGMTYTLRVYSRDNEGISSTVITFMTSTAYTNNQADIATQGWFIGLMCAIALLVLILLIVCFIKRSRGGKYPVREKKDVPLGPEDPKEEDGSFDYSDEDNKPLQGSQTSLDGTIKQQESDDS

SEQ ID NO: 9326 - protein, 298 aa, Homo Sapiens
  misc_feature (1)..(1): Xaa can be any naturally occurring amino acid
XRETREAWNNVTVWGSRYVVGQTPVYVPYEIRVQAENDFGKGPEPESVIGYSGEDLPSAPRRFRVRQPNLETINLEWDHPEHPNGIMIGYTLKYVAFNGTKVGKQIVENFSPNQTKFTVQRTDPVSRYRFTLSARTQVGSGEAVTEESPAPPNEAYTNNQADIATQGWFIGLMCAIALLVLILLIVCFIKRSRGGKYPVREKKDVPLGPEDPKEEDGSFDYSDEDNKPLQGSQTSLDGTIKQQESDDSLVDYGEGGEGQFNEDGSFIGQYTVKKDKEETEGNESSEATSPVNAIYSLA

SEQ ID NO: 9327 - protein, 1041 aa, Homo Sapiens
  misc_feature (1)..(1): Xaa can be any naturally occurring amino acid
XSIQNELTQPPTITKQSAKDHIVDPRDNILIECEAKGNPAPSFHWTRNSRFFNIAKDPRVSMRRRSGTLVIDFRSGGRPEEYEGEYQCFARNKFGTALSNRIRLQVSKSPLWPKENLDPVVVQEGAPLTLQCNPPPGLPSPVIFWMSSSMEPITQDKRVSQGHNGDLYFSNVMLQDMQTDYSCNARFHFTHTIQQKNPFTLKVLTTRGVAERTPSFMYPQGTASSQMVLRGMDLLLECIASGVPTPDIAWYKKGGDLPSDKAKFENFNKALRITNVSEEDSGEYFCLASNKMGSIRHTISVRVKAAPYWLDEPKNLILAPGEDGRLVCRANGNPKPTVQWMVNGEPLQSAPPNPNREVAGDTIIFRDTQISSRAVYQCNTSNEHGYLLANAFVSVLDVPPRMLSPRNQLIRVILYNRTRLDCPFFGSPIPTLRWFKNGQGSNLDGGNYHVYENGSLEIKMIRKEDQGIYTCVATNILGKAENQVRLEVKDPTRIYRMPEDQVARRGTTVQLECRVKHDPSLKLTVSWLKDDEPLYIGNRMKKEDDSLTIFGVAERDQGSYTCVASTELDQDLAKAYLTVLADQATPTNRLAALPKGRPDRPRDLELTDLAERSVRLTWIPGDANNSPITDYVVQFEEDQFQPGVWHDHSKYPGSVNSAVLRLSPYVNYQFRVIAINEVGSSHPSLPSERYRTSGAPPESNPGDVKGEGTRKNNMEITWTPMNATSAFGPNLRYIVKWRRRETREAWNNVTVWGSRYVVGQTPVYVPYEIRVQAENDFGKGPEPESVIGYSGEDLPSAPRRFRVRQPNLETINLEWDHPEHPNGIMIGYTLKYVAFNGTKVGKQIVENFSPNQTKFTVQRTDPVSRYRFTLSARTQVGSGEAVTEESPAPPNEATPTAAYTNNQADIATQGWFIGLMCAIALLVLILLIVCFIKRSRGGKYPVREKKDVPLGPEDPKEEDGSFDYSDEDNKPLQGSQTSLDGTIKQQESDDSLVDYGEGGEGQFNEDGSFIGQYTVKKDKEETEGNESSEATSPVNAIYSLA

SEQ ID NO: 9328 - protein, 573 aa, Homo Sapiens
MGWESHLTAASADIDLGAGREVFDYSHRQKEQDVEKELRDGGEQDTWAGEGAEALARNLLVDGETGESFPAQFPADISSITEAVPSESEPPALQNNLLSPLLTGTESPFDLEQQWQDLMSIMEMQAMEVNTSASEILYSAPPGDPLSTNYSLAPNTPINQNVSLHQASLGGCSQDFLLFSPEVESLPVASSSTLLPLAPSNSTSLNSTFGSTNLTGLFFPPQLNGTANDTAGPELPDPLGGLLDEAMLDEISLMDLAIEEGFNPVQASQLEEEFDSDSGLSLDSSHSPSSLSSSEGSSSSSSSSSSSSSSASSSASSSFSEEGAVGYSSDSETLDLEEAEGAVGYQPEYSKFCRMSYQDPAQLSCLPYLEHVGHNHTYNMAPSALDSADLPPPSALKKGSKEKQADFLDKQMSRDEHRARAMKIPFTNDKIINLPVEEFNELLSKYQLSEAQLSLIRDIRRRGKNKMAAQNCRKRKLDTILNLERDVEDLQRDKARLLREKVEFLRSLRQMKQKVQSLYQEVFGRLRDENGRPYSPSQYALQYAGDGSVLLIPRTMADQQARRQERKPKDRRK

SEQ ID NO: 9329 - protein, 584 aa, Homo Sapiens
MGWESHLTAASADIDLIDILWRQDIDLGAGREVFDYSHRQKEQDVEKELRDGGEQDTWAGEGAEALARNLLVDGETGESFPAQFPADISSITEAVPSESEPPALQNNLLSPLLTGTESPFDLEQQWQDLMSIMEMQAMEVNTSASEILYSAPPGDPLSTNYSLAPNTPINQNVSLHQASLGGCSQDFLLFSPEVESLPVASSSTLLPLAPSNSTSLNSTFGSTNLTGLFFPPQLNGTANDTAGPELPDPLGGLLDEAMLDEISLMDLAIEEGFNPVQASQLEEEFDSDSGLSLDSSHSPSSLSSSEGSSSSSSSSSSSSSSASSSASSSFSEEGAVGYSSDSETLDLEEAEGAVGYQPEYSKFCRMSYQDPAQLSCLPYLEHVGHNHTYNMAPSALDSADLPPPSALKKGSKEKQADFLDKQMSRDEHRARAMKIPFTNDKIINLPVEEFNELLSKYQLSEAQLSLIRDIRRRGKNKMAAQNCRKRKLDTILNLERDVEDLQRDKARLLREKVEFLRSLRQMKQKVQSLYQEVFGRLRDENGRPYSPSQYALQYAGDGSVLLIPRTMADQQARRQERKPKDRRK

SEQ ID NO: 9330 - protein, 4 aa, Homo Sapiens
MLSL

SEQ ID NO: 9331 - protein, 9 aa, Homo Sapiens
MLSLKKYLT

SEQ ID NO: 9332 - protein, 83 aa, Homo Sapiens
MLSLKKYLTEGLLQFTILLSLIGVRVDVDTYLTSQLPPLREIILGPSSAYTQTQFHNLRNTLDGYGIHPKSIDLDNYFTARRL

SEQ ID NO: 9333 - protein, 99 aa, Homo Sapiens
MLSLKKYLTEGLLQFTILLSLIGVRVDVDTYLTSQLPPLREIILGPSSAYTQTQFHNLRNTLDGYGIHPKSIDLDNYFTARRLLSQVRALDRFQVPTTE

SEQ ID NO: 9334 - protein, 761 aa, Homo Sapiens
MLSLKKYLTEGLLQFTILLSLIGVRVDVDTYLTSQLPPLREIILGPSSAYTQTQFHNLRNTLDGYGIHPKSIDLDNYFTARRLLSQVRALDRFQVPTTEVNAWLVHRDPEGSVSGSQPNSGLALESSSGLQDVTGPDNGVRESETEQGFGEDLEDLGAVAPPVSGDLTKEDIDLGAGREVFDYSHRQKEQDVEKELRDGGEQDTWAGEGAEALARNLLVDGETGESFPAQVPSGEDQTALSLEECLRLLEATCPFGENAEFPADISSITEAVPSESEPPALQNNLLSPLLTGTESPFDLEQQWQDLMSIMEMQAMEVNTSASEILYSAPPGDPLSTNYSLAPNTPINQNVSLHQASLGGCSQDFLLFSPEVESLPVASSSTLLPLAPSNSTSLNSTFGSTNLTGLFFPPQLNGTANDTAGPELPDPLGGLLDEAMLDEISLMDLAIEEGFNPVQASQLEEEFDSDSGLSLDSSHSPSSLSSSEGSSSSSSSSSSSSSSASSSASSSFSEEGAVGYSSDSETLDLEEAEGAVGYQPEYSKFCRMSYQDPAQLSCLPYLEHVGHNHTYNMAPSALDSADLPPPSALKKGSKEKQADFLDKQMSRDEHRARAMKIPFTNDKIINLPVEEFNELLSKYQLSEAQLSLIRDIRRRGKNKMAAQNCRKRKLDTILNLERDVEDLQRDKARLLREKVEFLRSLRQMKQKVQSLYQEVFGRLRDENGRPYSPSQYALQYAGDGSVLLIPRTMADQQARRQERKPKDRRK

SEQ ID NO: 9335 - protein, 742 aa, Homo Sapiens
MLSLKKYLTEGLLQFTILLSLIGVRVDVDTYLTSQLPPLREIILGPSSAYTQTQFHNLRNTLDGYGIHPKSIDLDNYFTARRLLSQVRALDRFQVPTTEVNAWLVHRDPEGSVSGSQPNSGLALESSSGLQDVTGPDNGVRESETEQGFGEDLEDLGAVAPPVSGDLTKEDIDLIDILWRQDIDLGAGREVFDYSHRQKEQDVEKELRDGGEQDTWAGEGAEALARNLLVDGETGESFPAQFPADISSITEAVPSESEPPALQNNLLSPLLTGTESPFDLEQQWQDLMSIMEMQAMEVNTSASEILYSAPPGDPLSTNYSLAPNTPINQNVSLHQASLGGCSQDFLLFSPEVESLPVASSSTLLPLAPSNSTSLNSTFGSTNLTGLFFPPQLNGTANDTAGPELPDPLGGLLDEAMLDEISLMDLAIEEGFNPVQASQLEEEFDSDSGLSLDSSHSPSSLSSSEGSSSSSSSSSSSSSSASSSASSSFSEEGAVGYSSDSETLDLEEAEGAVGYQPEYSKFCRMSYQDPAQLSCLPYLEHVGHNHTYNMAPSALDSADLPPPSALKKGSKEKQADFLDKQMSRDEHRARAMKIPFTNDKIINLPVEEFNELLSKYQLSEAQLSLIRDIRRRGKNKMAAQNCRKRKLDTILNLERDVEDLQRDKARLLREKVEFLRSLRQMKQKVQSLYQEVFGRLRDENGRPYSPSQYALQYAGDGSVLLIPRTMADQQARRQERKPKDRRK

SEQ ID NO: 9336 - protein, 742 aa, Homo Sapiens; identical to SEQ ID NO: 9335

SEQ ID NO: 9337 - protein, 772 aa, Homo Sapiens
MLSLKKYLTEGLLQFTILLSLIGVRVDVDTYLTSQLPPLREIILGPSSAYTQTQFHNLRNTLDGYGIHPKSIDLDNYFTARRLLSQVRALDRFQVPTTEVNAWLVHRDPEGSVSGSQPNSGLALESSSGLQDVTGPDNGVRESETEQGFGEDLEDLGAVAPPVSGDLTKEDIDLIDILWRQDIDLGAGREVFDYSHRQKEQDVEKELRDGGEQDTWAGEGAEALARNLLVDGETGESFPAQVPSGEDQTALSLEECLRLLEATCPFGENAEFPADISSITEAVPSESEPPALQNNLLSPLLTGTESPFDLEQQWQDLMSIMEMQAMEVNTSASEILYSAPPGDPLSTNYSLAPNTPINQNVSLHQASLGGCSQDFLLFSPEVESLPVASSSTLLPLAPSNSTSLNSTFGSTNLTGLFFPPQLNGTANDTAGPELPDPLGGLLDEAMLDEISLMDLAIEEGFNPVQASQLEEEFDSDSGLSLDSSHSPSSLSSSEGSSSSSSSSSSSSSSASSSASSSFSEEGAVGYSSDSETLDLEEAEGAVGYQPEYSKFCRMSYQDPAQLSCLPYLEHVGHNHTYNMAPSALDSADLPPPSALKKGSKEKQADFLDKQMSRDEHRARAMKIPFTNDKIINLPVEEFNELLSKYQLSEAQLSLIRDIRRRGKNKMAAQNCRKRKLDTILNLERDVEDLQRDKARLLREKVEFLRSLRQMKQKVQSLYQEVFGRLRDENGRPYSPSQYALQYAGDGSVLLIPRTMADQQARRQERKPKDRRK

SEQ ID NO: 9338 - protein, 19 aa, Homo Sapiens
MSIMEMQAMEVNTSASEIL

SEQ ID NO: 9339 - protein, 23 aa, Homo Sapiens
MSIMEMQAMEVNTSASEILYSAP

SEQ ID NO: 9340 - protein, 47 aa, Homo Sapiens
MSIMEMQAMEVNTSASEILYSAPPGDPLSTNYSLAPNTPINQNVSLH

SEQ ID NO: 9341 - protein, 63 aa, Homo Sapiens
MSIMEMQAMEVNTSASEILYSAPPGDPLSTNYSLAPNTPINQNVSLHQASLGGCSQDFLLFSP

SEQ ID NO: 9342 - protein, 161 aa, Homo Sapiens
MTRLDRSSHSGGGHAKGSRPLNSLLAGHRVAQPASAPGSRASVQDIDLGAGREVFDYSHRQKEQDVEKELRDGGEQDTWAGEGAEALARNLLVDGETGESFPAQFPADISSITEAVPSESEPPALQNNLLSPLLTGTESPFDLEQQWQDLMSIMEMQAMEV

SEQ ID NO: 9343 - protein, 63 aa, Homo Sapiens
MTRLDRSSHSGGGHAKGSRPLNSLLAGHRVAQPASAPGSRASVQDIDLIDILWRQDIDLGAGR

SEQ ID NO: 9344 - protein, 111 aa, Homo Sapiens
MTRLDRSSHSGGGHAKGSRPLNSLLAGHRVAQPASAPGSRASVQDIDLIDILWRQDIDLGAGREVFDYSHRQKEQDVEKELRDGGEQDTWAGEGAEALARNLLVDGETGES

SEQ ID NO: 9345 - protein, 616 aa, Homo Sapiens
MTRLDRSSHSGGGHAKGSRPLNSLLAGHRVAQPASAPGSRASVQDIDLIDILWRQDIDLGAGREVFDYSHRQKEQDVEKELRDGGEQDTWAGEGAEALARNLLVDGETGESFPAQFPADISSITEAVPSESEPPALQNNLLSPLLTGTESPFDLEQQWQDLMSIMEMQAMEVNTSASEILYSAPPGDPLSTNYSLAPNTPINQNVSLHQASLGGCSQDFLLFSPEVESLPVASSSTLLPLAPSNSTSLNSTFGSTNLTGLFFPPQLNGTANDTAGPELPDPLGGLLDEAMLDEISLMDLAIEEGFNPVQASQLEEEFDSDSGLSLDSSHSPSSLSSSEGSSSSSSSSSSSSSSASSSASSSFSEEGAVGYSSDSETLDLEEAEGAVGYQPEYSKFCRMSYQDPAQLSCLPYLEHVGHNHTYNMAPSALDSADLPPPSALKKGSKEKQADFLDKQMSRDEHRARAMKIPFTNDKIINLPVEEFNELLSKYQLSEAQLSLIRDIRRRGKNKMAAQNCRKRKLDTILNLERDVEDLQRDKARLLREKVEFLRSLRQMKQKVQSLYQEVFGRLRDENGRPYSPSQYALQYAGDGSVLLIPRTMADQQARRQERKPKDRRK

SEQ ID NO: 9346 - protein, 133 aa, Homo Sapiens
SEEGAVGYSSDSETLDLEEAEGAVGYQPEYSKFCRMSYQDPAQLSCLPYLEHVGHNHTYNMAPSALDSADLPPPSALKKGSKEKQADFLDKQMSRDEHRARAMKIPFTNDKIINLPVEELCGAKADRGEGMDL

SEQ ID NO: 9347 - protein, 694 aa, Homo Sapiens
MKHLKRWWSAGGGLLHLTLLLSLAGLRVDLDLYLLLPPPTLLQDELLFLGGPASSAYALSPFSASGGWGRAGHLHPKGRELDPAAPPEGQLLREVRALGVPFVPRTSVDAWLVHSVAAGSADEAHGLLGAAAASSTGGAGASVDGGSQAVQGGGGDPRAARSGPLDAGEEEKAPAEPTAQVPDAGGCASEENGVLREKHEAVDHSSQHEENEERVSAQKENSLQQNDDDENKIAEKPDWEAEKTTESRNERHLNGTDTSFSLEDLFQLLSSQPENSLEGISLGDIPLPGSISDGMNSSAHYHVNFSQAISQDVNLHEAILLCPNNTFRRDPTARTSQSQEPFLQLNSHTTNPEQTLPGTNLTGFLSPVDNHMRNLTSQDLLYDLDINIFDEINLMSLATEDNFDPIDVSQLFDEPDSDSGLSLDSSHNNTSVIKSNSSHSVCDEGAIGYCTDHESSSHHDLEGAVGGYYPEPSKLCHLDQSDSDFHGDLTFQHVFHNHTYHLQPTAPESTSEPFPWPGKSQKIRSRYLEDTDRNLSRDEQRAKALHIPFSVDEIVGMPVDSFNSMLSRYYLTDLQVSLIRDIRRRGKNKVAAQNCRKRKLDIILNLEDDVCNLQAKKETLKREQAQCNKAINIMKQKLHDLYHDIFSRLRDDQGRPVNPNHYALQCTHDGSILIVPKELVASGHKKETQKGKRK

SEQ ID NO: 9348 - protein, 83 aa, Homo Sapiens
NEERVSAQKENSLQQNDDDENKIAEKPDWEAEKTTESRNERHLNGTDTSFSLEDLFQLLSSQPENSLEVIGTLAFILAGTYLH

SEQ ID NO: 9349 - protein, 238 aa, Homo Sapiens
MELLAAAFSAACAVDHDSSTSESDARDSAAGHLPGSESSSTPGNGATPEEWPALADSPTTLTEALRMIHPIPADSWRNLIEQIGLLYQEYRDKSTLQEIETRRQQDAEIEDNTNGSPASEDTPEEEEEEEEEEEPASPPERKTLPQICLLSNPHSRFNLWQDLPEIRSSGVLEILQPEEIKLQEAMFELVTSEASYYKSLNLLVSHFMENERIRKILHPSEAHILFSNVLDVLAVSER

SEQ ID NO: 9350 - protein, 618 aa, Homo Sapiens
MELLAAAFSAACAVDHDSSTSESDARDSAAGHLPGSESSSTPGNGATPEEWPALADSPTTLTEALRMIHPIPADSWRNLIEQIGLLYQEYRDKSTLQEIETRRQQDAEIEDNTNGSPASEDTPEEEEEEEEEEEPASPPERKTLPQICLLSNPHSRFNLWQDLPEIRSSGVLEILQPEEIKLQEAMFELVTSEASYYKSLNLLVSHFMENERIRKILHPSEAHILFSNVLDVLAVSERFLLELEHRMEENIVISDVCDIVYRYAADHFSVYITYVSNQTYQERTYKQLLQEKAAFRELIAQLELDPKCRGLPFSSFLILPFQRITRLKLLVQNILKRVEERSERECTALDAHKELEMVVKACNEGVRKMSRTEQMISIQKKMEFKIKSVPIISHSRWLLKQGELQQMSGPKTSRTLRTKKLFHEIYLFLFNDLLVICRQIPGDKYQVFDSAPRGLLRVEELEDQGQTLANVFILRLLENADDREATYMLKASSQSEMKRWMTSLAPNRRTKFVSFTSRLLDCPQVQCVHPYVAQQPDELTLELADILNILDKTDDGWIFGERLHDQERGWFPSSMTEEILNPKIRSQNLKECFRVHKMDDPQRSQNKDRRKLGSRNRQ

SEQ ID NO: 9351 - protein, 710 aa, Homo Sapiens
METRESEDLEKTRRKSASDQWNTDNEPAKVKPELLPEKEETSQADQDIQDKEPHCHIPIKRNSIFNRSIRRKSKAKARDNPERNASCLADSQDNGKSVNEPLTLNIPWSRMPPCRTAMQTDPGAQEMSESSSTPGNGATPEEWPALADSPTTLTEALRMIHPIPADSWRNLIEQIGLLYQEYRDKSTLQEIETRRQQDAEIEDNTNGSPASEDTPEEEEEEEEEEEPASPPERKTLPQICLLSNPHSRFNLWQDLPEIRSSGVLEILQPEEIKLQEAMFELVTSEASYYKSLNLLVSHFMENERIRKILHPSEAHILFSNVLDVLAVSERFLLELEHRMEENIVISDVCDIVYRYAADHFSVYITYVSNQTYQERTYKQLLQEKAAFRELIAQLELDPKCRGLPFSSFLILPFQRITRLKLLVQNILKRVEERSERECTALDAHKELEMVVKACNEGVRKMSRTEQMISIQKKMEFKIKSVPIISHSRWLLKQGELQQMSGPKTSRTLRTKKLFHEIYLFLFNDLLVICRQIPGDKYQVFDSAPRGLLRVEELEDQGQTLANVFILRLLENADDREATYMLKASSQSEMKRWMTSLAPNRRTKFVSFTSRLLDCPQVQCVHPYVAQQPDELTLELADILNILDKTDDGWIFGERLHDQERGWFPSSMTEEILNPKIRSQNLKECFRVHKMDDPQRSQNKDRRKLGSRNRQ

SEQ ID NO: 9352 - protein, 187 aa, Homo Sapiens
MFELVTSEASYYKSLNLLVSHFMENERIRKILHPSEAHILFSNVLDVLAVSERFLLELEHRMEENIVISDVCDIVYRYAADHFSVYITYVSNQTYQERTYKQLLQEKAAFRELIAQLELDPKCRGLPFSSFLILPFQRITRLKLLVQNILKRVEERSERECTALDAHKELEMVVKACNEGVRKMSRT

SEQ ID NO: 9353 - protein, 150 aa, Homo Sapiens
MVVKACNEGVRKMSRTEQMISIQKKMEFKIKSVPIISHSRWLLKQGELQQMSGPKTSRTLRTKKLFHEIYLFLFNDLLVICRQIPGDKYQVFDSAPRGLLRVEELEDQGQTLANVFILRLLENADDREATYMLKASSQSEMKRWMTSLAP

SEQ ID NO: 9354 - protein, 97 aa, Homo Sapiens
  misc_feature (1)..(1): Xaa can be any naturally occurring amino acid
XELLPEKEETSQADQDIQDKEPHCHIPIKRNSIFNRSIRRKSKAKARDNPERNASCLADSQDNGKSVNEPLTLNIPWSRMPPCRTAMQTDPGAQEMR

SEQ ID NO: 9355 - protein, 241 aa, Homo Sapiens
MSMLFYTLITAFLIGIQAEPHSESNVPAGHTIPQAHWTKLQHSLDTALRRARSAPAAAIAARVAGQTRNITVDPRLFKKRRLRSPRVLFSTQPPREAADTQDLDFEVGGAAPFNRTHRSKRSSSHPIFHRGEFSVCDSVSVWVGDKTTATDIKGKEVMVLGEVNINNSVFKQYFFETKCRDPNPVDSGCRGIDSKHWNSYCTTTHTFVKALTMDGKQAAWRFIRIDTACVCVLSRKAVRRA

SEQ ID NO: 9356 - protein, 633 aa, Homo Sapiens
AALGSSSGSASPAVAELCQNTPETFLEASKLLLTYADNILRNPNDEKYRSIRIGNTAFSTRLLPVRGAVECLFEMGFEEGETHLIFPKKASVEQLQKIRDLIAIERSSRLDGSNKSHKVKSSQQPAASTQLPTTPSSNPSGLNQHTRNRQGQSSDPPSASTVAADSAILEVLQSNIQHVLVYENPALQEKALACIPVQELKRKSQEKLSRARKLDKGINISDEDFLLLELLHWFKEEFFHWVNNVLCSKCGGQTRSRDRSLLPSDDELKWGAKEVEDHYCDACQFSNRFPRYNNPEKLLETRCGRCGEWANCFTLCCRAVGFEARYVWDYTELQRTLSLKLTTLKEIGKTFLRISKRQKLIQVVDVTWRYSCKHEEVIARRTKVKEALLRDTINGLNKQRQLFLSENRRKELLQRIIVELVEFISPKTPKPGELGGRISGSVAWRVARGEMGLQRKETLFIPCENEKISKQLHLCYNIVKDRYVRVSNNNQTISGWENGVWKMESIFRKVETDWHMVYLARKEGSSFAYISWKFECGSVGLKVDSISIRTSSQTFQTGTVEWKLRSDTAQVELTGDNSLHSYADFSGATEVILEAELSRGDGDVAWQHTQLFRQSLNDHEENCLEIIIKFSDL

SEQ ID NO: 9357 - protein, 654 aa, Homo Sapiens [sequence omitted]

SEQ ID NO: 9358 - protein, 558 aa, Homo Sapiens
MAAAALGSSSGSASPAVAELCQNTPETFLEASKLLLTYADNILRNPNDEKYRSIRIGNTAFSTRLLPVRGAVECLFEMGFEEGETHLIFPKKASVEQLQKIRDLIAIERSSRLDGSNKSHKVKSSQQPAASTQLPTTPSSNPSGLNQHTRNRQGQSSDPPSASTVAADSAILEVLQSNIQHVLVYENPALQEKALACIPVQELKRKSQEKLSRARKLDKGINISDEDFLLLELLHWFKEEFFHWVNNVLCSKCGGQTRSRDRSLLPSDDELKWGAKEVEDHYCDACQFSNRFPRYNNPEKLLETRCGRCGEWANCFTLCCRAVGFEARYVWDYTDHVWTEVYSPSQQRWLHCDACEDVCDKPLLYEIGWGKKLSYVIAFSKDEVVDVTWRYSCKHEEVIARRTKVKEALLRDTINGLNKQRQLFLSENRRKELLQRIIVELVEFISPKTPKPGELGGRISGSVAWRVARGEMGLQRKETLFIPCENEKISKQLHLCYNIVKDRYVRVSNNNQTISGWENGVWKMESIFRKVETDWHMITVFTPMLIFLVPLKLFWKQN

SEQ ID NO: 9359 - protein, 636 aa, Homo Sapiens
MAAAALGSSSGSASPAVAELCQNTPETFLEASKLLLTYADNILRNPNDEKYRSIRIGNTAFSTRLLPVRGAVECLFEMGFEEGETHLIFPKKASVEQLQKIRDLIAIERSSRLDGSNKSHKVKSSQQPAASTQLPTTPSSNPSGLNQHTRNRQGQSSDPPSASTVAADSAILEVLQSNIQHVLVYENPALQEKALACIPVQELKRKSQEKLSRARKLDKGINISDEDFLLLELLHWFKEEFFHWVNNVLCSKCGGQTRSRDRSLLPSDDELKWGAKEVEDHYCDACQFSNRFPRYNNPEKLLETRCGRCGEWANCFTLCCRAVGFEARYVWDYTELQRTLSLKLTTLKEIGKTFLRISKRQKLIQVVDVTWRYSCKHEEVIARRTKVKEALLRDTINGLNKQRQLFLSENRRKELLQRIIVELVEFISPKTPKPGELGGRISGSVAWRVARGEMGLQRKETLFIPCENEKISKQLHLCYNIVKDRYVRVSNNNQTISGWENGVWKMESIFRKVETDWHMVYLARKEGSSFAYISWKFECGSVGLKVDSISIRTSSQTFQTGTVEWKLRSDTAQVELTGDNSLHSYADFSGATEVILEAELSRGDGDVAWQHTQLFRQSLNDHEENCLEIIIKFSDL

SEQ ID NO: 9360 - protein, 114 aa, Homo Sapiens
MGFEEGETHLIFPKKASVEQLQKIRDLIAIERSSRLDGSNKSHKVKSSQQPAASTQLPTTPSSNPSGLNQHTRNRQGQSSDPPSASTVAADSAILEVLQSNIQHVLVYENPALQ

SEQ ID NO: 9361 - protein, 612 aa, Homo Sapiens
MRNPNDEKYRSIRIGNTAFSTRLLPVRGAVECLFEMGFEEGETHLIFPKKASVEQLQKIRDLIAIERSSRLDGSNKSHKVKSSQQPAASTQLPTTPSSNPSGLNQHTRNRQGQSSDPPSASTVAADSAILEVLQSNIQHVLVYENPALQEKALACIPVQELKRKSQEKLSRARKLDKGINISDEDFLLLELLHWFKEEFFHWVNNVLCSKCGGQTRSRDRSLLPSDDELKWGAKEVEDHYCDACQFSNRFPRYNNPEKLLETRCGRCGEWANCFTLCCRAVGFEARYVWDYTDHVWTEVYSPSQQRWLHCDACEDVCDKPLLYEIGWGKKLSYVIAFSKDEVVDVTWRYSCKHEEVIARRTKVKEALLRDTINGLNKQRQLFLSENRRKELLQRIIVELVEFISPKTPKPGELGGRISGSVAWRVARGEMGLQRKETLFIPCENEKISKQLHLCYNIVKDRYVRVSNNNQTISGWENGVWKMESIFRKVETDWHMVYLARKEGSSFAYISWKFECGSVGLKVDSISIRTSSQTFQTGTVEWKLRSDTAQVELTGDNSLHSYADFSGATEVILEAELSRGDGDVAWQHTQLFRQSLNDHEENCLEIIIKFSDL

SEQ ID NO: 9362 - protein, 240 aa, Homo Sapiens
  misc_feature (1)..(1): Xaa can be any naturally occurring amino acid
XSGSASPAVAELCQNTPETFLEASKLLLTYADNILRNPNDEKYRSIRIGNTAFSTRLLPVRGAVECLFEMGFEEGETHLIFPKKASVEQLQKIRDLIAIERSSRLDGSNKSHKVKSSQQPAASTQLPTTPSSNPSGLNQHTRNRQGQSSDPPSASTVAADSAILEVLQSNIQHVLVYENPALQEKALACIPVQELKRKSQEKLSRARKLDKDIITLRNFWKQDVDGVASGPIVLHCAAEL

SEQ ID NO: 9363 - protein, 23 aa, Homo Sapiens
EAPGAPPRTLTWEAMEQIRYLSS

SEQ ID NO: 9364 - protein, 291 aa, Homo Sapiens
MAVTLSLLLGGRVCAAVTRCGFATRGVAGPGPIGREPDPDSDWEPEERELQEVESTLKRQKQAIRFQKIRRQMEAPGAPPRTLTWEAMEQIRYLHEEFPESWSVPRLAEGFDVSTDVIRRVLKSKFLPTLEQKLKQDQKVLKKAGLAHSLQHLRGSGNTSKLLPAGHSVSGSLLMPGHEASSKDPNHSTALKVIESDTHRTNTPRRRKGRNKEIQDLEESFVPVAAPLGHPRELQKYSSDSESPRGTGSGALPSGQKLEELKAEEPDNFSSKVVQRGREFFDSNGNFLYRI

SEQ ID NO: 9365 - protein, 280 aa, Homo Sapiens
MARFWVCVAGAGFFLAFLVLHSRFCGSPVLRNFTFAVSWRTEKILYRLDVGWPKHPEYFTGTTFCVAVDSLNGLVYIGQRGDNIPKILVFTEDGYFLRAWNYTVDTPHGIFAASTLYEQSVWITDVGSDFMILWLHGENGTGPAKFNIPHSVTLDSAGRVWVADRGNKRIQVFDKDTGEWLGAWNNCFTEEGPSSVRFTPDGKYLIVAQLNLSRLSVVAAPPVGSIGECSVISTIQLADQVLPHLLEVDRKTGAVYVAEIGAKQVQKYVPLNSYVPSFGS

SEQ ID NO: 9366 - protein, 347 aa, Homo Sapiens
MARFWVCVAGAGFFLAFLVLHSRFCGSPVLRNFTFAVSWRTEKILYRLDVGWPKHPEYFTGTTFCVAVDSLNGLVYIGQRGDNIPKILVFTEDGYFLRAWNYTVDTPHGIFAASTLYEQSVWITDVGSGFFGHTVKKYSSFGDLVQVLGTPGKKGTSLNPLQFDNPAELYVEDTGDIYIVDGDGGLNNRLIKLSQDFMILWLHGENGTGPAKFNIPHSVTLDSAGRVWVADRGNKRIQVFDKDTGEWLGAWNNCFTEEGPSSVRFTPDGKYLIVAQLNLSRLSVVAAPPVGSIGECSVISTIQLADQVLPHLLEVDRKTGAVYVAEIGAKQVQKYVPLNSYVPSFGS

SEQ ID NO: 9367 - protein, 150 aa, Homo Sapiens
MILWLHGENGTGPAKFNIPHSVTLDSAGRVWVADRGNKRIQVFDKDTGEWLGAWNNCFTEEGPSSVRFTPDGKYLIVAQLNLSRLSVVAAPPVGSIGECSVISTIQLADQVLPHLLEVDRKTGAVYVAEIGAKQVQKYVPLNSYVPSFGS

SEQ ID NO: 9368 - protein, 1247 aa, Homo Sapiens
MLASSSRIRAAWTRALLLPLLLAGPVGCLSRQELFPFGPGQGDLELEDGDDFVSPALELSGALRFYDRSDIDAVYVTTNGIIATSEPPAKESHPGLFPPTFGAVAPFLADLDTTDGLGKVYYREDLSPSITQRAAECVHRGFPEISFQPSSAVVVTWESVAPYQGPSRDPDQKGKRNTFQAVLASSDSSSYAIFLYPEDGLQFHTTFSKKENNQVPAVVAFSQGSVGFLWKSNGAYNIFANDRESVENLAKSSNSGQQGVWVFEIGSPATTNGVVPADVILGTEDGAEYDDEDEDYDLATTRLGLEDVGTTPFSYKALRRGGADTYSVPSVLSPRRAATERPLGPPTERTRSFQLAVETFHQQHPQVIDVDEVEETGVVFSYNTDSRQTCANNRHQCSVHAECRDYATGFCCSCVAGYTGNGRQCVAEGSPQRVNGKVKGRIFVGSSQVPIVFENTDLHSYVVMNHGRSYTAISTIPETVGYSLLPLAPVGGIIGWMFAVEQDGFKNGFSITGGEFTRQAEVTFVGHPGNLVIKQRFSGIDEHGHLTIDTELEGRVPQIPFGSSVHIEPYTELYHYSTSVITSSSTREYTVTEPERDGASPSRIYTYQWRQTITFQECVHDDSRPALPSTQQLSVDSVFVLYNQEEKILRYALSNSIGPVREGSPDALQNPCYIGTHGCDTNAACRPGPRTQFTCECSIGFRGDGRTCYDIDECSEQPSVCGSHTICNNHPGTFRCECVEGYQFSDEGTCVAVVDQRPINYCETGLHNCDIPQRAQCIYTGGSSYTCSCLPGFSGDGQACQDVDECQPSRCHPDAFCYNTPGSFTCQCKPGYQGDGFRCVPGEVEKTRCQHEREHILGAAGATDPQRPIPPGLFVPECDAHGHYAPTQCHGSTGYCWCVDRDGREVEGTRTRPGMTPPCLSTVAPPIHQGPAVPTAVIPLPPGTHLLFAQTGKIERLPLEGNTMRKTEAKAFLHVPAKVIIGLAFDCVDKMVYWTDITEPSIGRASLHGGEPTTIIRQDLGSPEGIAVDHLGRNIFWTDSNLDRIEVAKLDGTQRRVLFETDLVNPRGIVTDSVRGNLYWTDWNRDNPKIETSYMDGTNRRILVQDDLGLPNGLTFDAFSSQLCWVDAGTNRAECLNPSQPSRRKALEGLQYPFAVTSYGKNLYFTDWKMNSVVALDLAISKETDAFQPHKQTRLYGITTALSQCPQGHNYCSVNNGGCTHLCLATPGSRTCRCPDNTLGVDCIEQK

SEQ ID NO: 9369 - protein, 1114 aa, Homo Sapiens
MLASSSRIRAAWTRALLLPLLLAGPVGCLSRQELFPFGPGQGDLELEDGDDFVSPALELSGALRFYDRSDIDAVYVTTNGIIATSEPPAKESHPGLFPPTFGAVAPFLADLDTTDGLGKVYYREDLSPSITQRAAECVHRGFPEISFQPSSAVVVTWESVAPYQGPSRDPDQKGKRNTFQAVLASSDSSSYAIFLYPEDGLQFHTTFSKKENNQVPAVVAFSQGSVGFLWKSNGAYNIFANDRESVENLAKSSNSGQQGVWVFEIGSPATTNGVVPADVILGTEDGAEYDDEDEDYDLATTRLGLEDVGTTPFSYKALRRGGADTYSVPSVLSPRRAATERPLGPPTERTRSFQLAVETFHQQHPQVIDVDEVEETGVVFSYNTDSRQTCANNRHQCSVHAECRDYATGFCCSCVAGYTGNGRQCVAEGSPQRVNGKVKGRIFVGSSQVPIVFENTDLHSYVVMNHGRSYTAISTIPETVGYSLLPLAPVGGIIGWMFAVEQDGFKNGFSITGGEFTRQAEVTFVGHPGNLVIKQRFSGIDEHGHLTIDTELEGRVPQIPFGSSVHIEPYTELYHYSTSVITSSSTREYTVTEPERDGASPSRIYTYQWRQTITFQECVHDDSRPALPSTQQLSVDSVFVLYNQEEKILRYALSNSIGPVREGSPDALQNPCYIGTHGCDTNAACRPGPRTQFTCECSIGFRGDGRTCYEVEKTRCQHEREHILGAAGATDPQRPIPPGLFVPECDAHGHYAPTQCHGSTGYCWCVDRDGREVEGTRTRPGMTPPCLSTVAPPIHQGPAVPTAVIPLPPGTHLLFAQTGKIERLPLEGNTMRKTEAKAFLHVPAKVIIGLAFDCVDKMVYWTDITEPSIGRASLHGGEPTTIIRQDLGSPEGIAVDHLGRNIFWTDSNLDRIEVAKLDGTQRRVLFETDLVNPRGIVTDSVRGNLYWTDWNRDNPKIETSYMDGTNRRILVQDDLGLPNGLTFDAFSSQLCWVDAGTNRAECLNPSQPSRRKALEGLQYPFAVTSYGKNLYFTDWKMNSVVALDLAISKETDAFQPHKQTRLYGITTALSQCPQGHNYCSVNNGGCTHLCLATPGSRTCRCPDNTLGVDCIEQK

SEQ ID NO: 9370 - protein, 1375 aa, Homo Sapiens
MEGDRVAGRPVLSSLPVLLLLPLLMLRAAALHPDELFPHGESWGDQLLQEGDDESSAVVKLANPLHFYEARFSNLYVGTNGIISTQDFPRETQYVDYDFPTDFPAIAPFLADIDTSHGRGRVLYREDTSPAVLGLAARYVRAGFPRSARFTPTHAFLATWEQVGAYEEVKRGALPSGELNTFQAVLASDGSDSYALFLYPANGLQFLGTRPKESYNVQLQLPARVGFCRGEADDLKSEGPYFSLTSTEQSVKNLYQLSNLGIPGVWAFHIGSTSPLDNVRPAAVGDLSAAHSSVPLGRSFSHATALESDYNEDNLDYYDVNEEEAEYLPGEPEEALNGHSSIDVSFQSKVDTKPLEESSTLDPHTKEGTSLGEVGGPDLKGQVEPWDERETRSPAPPEVDRDSLAPSWETPPPYPENGSIQPYPDGGPVPSEMDVPPAHPEEEIVLRSYPASGHTTPLSRGTYEVGLEDNIGSNTEVFTYNAANKETCEHNHRQCSRHAFCTDYATGFCCHCQSKFYGNGKHCLPEGAPHRVNGKVSGHLHVGHTPVHFTDVDLHAYIVGNDGRAYTAISHIPQPAAQALLPLTPIGGLFGWLFALEKPGSENGFSLAGAAFTHDMEVTFYPGEETVRITQTAEGLDPENYLSIKTNIQGQVPYVSANFTAHISPYKELYHYSDSTVTSTSSRDYSLTFGAINQTWSYRIHQNITYQVCRHAPRHPSFPTTQQLNVDRVFALYNDEERVLRFAVTNQIGPVKEDSDPTPGNPCYDGSHMCDTTARCHPGTGVDYTCECASGYQGDGRNCVDENECATGFHRCGPNSVCINLPGSYRCECRSGYEFADDRHTCILITPPANPCEDGSHTCAPAGQARCVHHGGSTFSCACLPGYAGDGHQCTDVDECSENRCHPAATCYNTPGSFSCRCQPGYYGDGFQCIPDSTSSLTPCEQQQRHAQAQYAYPGARFHIPQCDEQGNFLPLQCHGSTGFCWCVDPDGHEVPGTQTPPGSTPPHCGPSPEPTQRPPTICERWRENLLEHYGGTPRDDQYVPQCDDLGHFIPLQCHGKSDFCWCVDKDGREVQGTRSQPGTTPACIPTVAPPMVRPTPRPDVTPPSVGTFLLYTQGQQIGYLPLNGTRLQKDAAKTLLSLHGSIIVGIDYDCRERMVYWTDVAGRTISRAGLELGAEPETIVNSGLISPEGLAIDHIRRTMYWTDSVLDKIESALLDGSERKVLFYTDLVNPRAIAVDPIRGNLYWTDWNREAPKIETSSLDGENRRILINTDIGLPNGLTFDPFSKLLCWADAGTKKLECTLPDGTGRRVIQNNLKYPFSIVSYADHFYHTDWRRDGVVSVNKHSGQFTDEYLPEQRSHLYGITAVYPYCPTGRK

SEQ ID NO: 9371 - protein, 969 aa, Homo Sapiens
MEGDRVAGRPVLSSLPVLLLLPLLMLRAAALHPDELFPHGESWGDQLLQEGDDESSAVVKLANPLHFYEARFSNLYVGTNGIISTQDFPRETQYVDYDFPTDFPAIAPFLADIDTSHGRGRVLYRVNGKVSGHLHVGHTPVHFTDVDLHAYIVGNDGRAYTAISHIPQPAAQALLPLTPIGGLFGWLFALEKPGSENGFSLAGAAFTHDMEVTFYPGEETVRITQTAEGLDPENYLSIKTNIQGQVPYVSANFTAHISPYKELYHYSDSTVTSTSSRDYSLTFGAINQTWSYRIHQNITYQVCRHAPRHPSFPTTQQLNVDRVFALYNDEERVLRFAVTNQIGPVKEDSDPTPGNPCYDGSHMCDTTARCHPGTGVDYTCECASGYQGDGRNCVDENECATGFHRCGPNSVCINLPGSYRCECRSGYEFADDRHTCILITPPANPCEDGSHTCAPAGQARCVHHGGSTFSCACLPGYAGDGHQCTDVDECSENRCHPAATCYNTPGSFSCRCQPGYYGDGFQCIPDSTSSLTPCEQQQRHAQAQYAYPGARFHIPQCDEQGNFLPLQCHGSTGFCWCVDPDGHEVPGTQTPPGSTPPHCGPSPEPTQRPPTICERWRENLLEHYGGTPRDDQYVPQCDDLGHFIPLQCHGKSDFCWCVDKDGREVQGTRSQPGTTPACIPTVAPPMVRPTPRPDVTPPSVGTFLLYTQGQQIGYLPLNGTRLQKDAAKTLLSLHGSIIVGIDYDCRERMVYWTDVAGRTISRAGLELGAEPETIVNSGLISPEGLAIDHIRRTMYWTDSVLDKIESALLDGSERKVLFYTDLVNPRAIAVDPIRGNLYWTDWNREAPKIETSSLDGENRRILINTDIGLPNGLTFDPFSKLLCWADAGTKKLECTLPDGTGRRVIQNNLKYPFSIVSYADHFYHTDWRRDGVVSVNKHSGQFTDEYLPEQRSHLYGITAVYPYCPTGRK

SEQ ID NO: 9372 - protein, 644 aa, Homo Sapiens
  misc_feature (1)..(1): Xaa can be any naturally occurring amino acid
XYSLTFGAINQTWSYRIHQNITYQVCRHAPRHPSFPTTQQLNVDRVFALYNDEERVLRFAVTNQIGPVKEDSDPTPGNPCYDGSHMCDTTARCHPGTGVDYTCECASGYQGDGRNCVDENECATGFHRCGPNSVCINLPGSYRCECRSGYEFADDRHTCIYVDECSENRCHPAATCYNTPGSFSCRCQPGYYGDGFQCIPDSTSSLTPCEQQQRHAQAQYAYPGARFHIPQCDEQGNFLPLQCHGSTGFCWCVDPDGHEVPGTQTPPGSTPPHCGPSPEPTQRPPTICERWRENLLEHYGGTPRDDQYVPQCDDLGHFIPLQCHGKSDFCWCVDKDGREVQGTRSQPGTTPACIPTVAPPMVRPTPRPDVTPPSVGTFLLYTQGQQIGYLPLNGTRLQKDAAKTLLSLHGSIIVGIDYDCRERMVYWTDVAGRTISRAGLELGAEPETIVNSGLISPEGLAIDHIRRTMYWTDSVLDKIESALLDGSERKVLFYTDLVNPRAIAVDPIRGNLYWTDWNREAPKIETSSLDGENRRILINTDIGLPNGLTFDPFSKLLCWADAGTKKLECTLPDGTGRRVIQNNLKYPFSIVSYADHFYHTDWRRDGVVSVNKHSGQFTDEYLPEQRSHLYGITAVYPYCPTGRK

SEQ ID NO: 9373 - protein, 85 aa, Homo Sapiens
MELCRSLALLGGSLGLMFCLIALSTDFWFEAVGPTHSAHSGLWPTGHGDIISGHGPLVSTTAAFAAGALSLGAHCGGPRPGYETL

SEQ ID NO: 9374 - protein, 142 aa, Homo Sapiens
MELCRSLALLGGSLGLMFCLIALSTDFWFEAVGPTHSAHSGLWPTGHGDIISGHGPLVSTTAAFAAGKDSGLDWGIASQRIPAEELSHLSCPCPQPSPWWWPWRCTPASGGTSLHTPRSRPSSPGPSTWAGSQLSSCSVQVP

SEQ ID NO: 9375 - protein, 165 aa, Homo Sapiens
MELCRSLALLGGSLGLMFCLIALSTDFWFEAVGPTHSAHSGLWPTGHGDIISGYIHVTQTFSIMAVLWALVSVSFLVLSCFPSLFPPGHGPLVSTTAAFAAAISMVVAMAVYTSERWDQPPHPQIQTFFSWSFYLGWVSAILLLCTGALSLGAHCGGPRPGYETL

SEQ ID NO: 9376 - protein, 72 aa, Homo Sapiens
TGHGDIISAISMVVAMAVYTSERWDQPPHPQIQTFFSWSFYLGWVSAILLLCTGALSLGAHCGGPRPGYETL

SEQ ID NO: 9377 - protein, 89 aa, Homo Sapiens
  misc_feature (1)..(1): Xaa can be any naturally occurring amino acid
XWPTGHGDIISGHGPLVSTTAAFAAAISMVVAMAVYTSERWDQPPHPQIQTFFSWSFYLGWVSAILLLCTGALSLGAHCGGPRPGYETL

SEQ ID NO: 9378 - protein, 351 aa, Homo Sapiens
MLPVWFTANLDIVATYIQEPNEDCLYLNVYVPTEDGSGAKKQGEDLADNDGDEDEDIRDSGAKPVMVYIHGGSYMEGTGNMIDGSILASYGNVIVITLNYRVGVLGFLSTGDQAAKGNYGLLDQIQALRWVSENIAFFGGDPRRITVFGSGIGASCVSLLTLSHHSEGLFQRAIIQSGSALSSWAVNYQPVKYTSLLADKVGCNVLDTVDMVDCLRQKSAKELVEQDIQPARYHVAFGPVIDGDVIPDDPEILMEQGEFLNYDIMLGVNQGEGLKFVEGVVDPEDGVSGTDFDYSVSILWTICMAILRVRTPCERPSSSCIQTGQTVTTLRPAVKHWWHSSLTTSGWSPQW

SEQ ID NO: 9379 - protein, 513 aa, Homo Sapiens
MWLRLGPPSLSLSPKPTVGRSLCLTLWFLSLALRASTQAPAPTVNTHFGKLRGARVPLPSEILGPVDQYLGVPYAAPPIGEKRFLPPEPPPSWSGIRNATHFPPVCPQNIHTAVPEVMLPVWFTANLDIVATYIQEPNEDCLYLNVYVPTEDDIRDSGAKPVMVYIHGGSYMEGTGNMIDGSILASYGNVIVITLNYRVGVLGFLSTGDQAAKGNYGLLDQIQALRWVSENIAFFGGDPRRITVFGSGIGASCVSLLTLSHHSEGLFQRAIIQSGSALSSWAVNYQPVKYTSLLADKVGCNVLDTVDMVDCLRQKSAKELVEQDIQPARYHVAFGPVIDGDVIPDDPEILMEQGEFLNYDIMLGVNQGEGLKFVEGVVDPEDGVSGTDFDYSVSNFVDNLYGYPEGKDTLRETIKFMYTDWADRDNPETRRKTLVALFTDHQWVEPSVVTADLHARYGSPTYFYAFYHHCQSLMKPAWSDAAHGDEVPYVFGVPMVGPTDLFPCNFSKNDVML

SEQ ID NO: 9380 - protein, 808 aa, Homo Sapiens
MWLRLGPPSLSLSPKPTVGRSLCLTLWFLSLALRASTQAPAPTVNTHFGKLRGARVPLPSEILGPVDQYLGVPYAAPPIGEKRFLPPEPPPSWSGIRNATHFPPVCPQNIHTAVPEVMLPVWFTANLDIVATYIQEPNEDCLYLNVYVPTEDDIRDSGAKPVMVYIHGGSYMEGTGNMIDGSILASYGNVIVITLNYRVGVLGFLSTGDQAAKGNYGLLDQIQALRWVSENIAFFGGDPRRITVFGSGIGASCVSLLTLSHHSEGLFQRAIIQSGSALSSWAVNYQPVKYTSLLADKVGCNVLDTVDMVDCLRQKSAKELVEQDIQPARYHVAFGPVIDGDVIPDDPEILMEQGEFLNYDIMLGVNQGEGLKFVEGVVDPEDGVSGTDFDYSVSNFVDNLYGYPEGKDTLRETIKFMYTDWADRDNPETRRKTLVALFTDHQWVEPSVVTADLHARYGSPTYFYAFYHHCQSLMKPAWSDAAHGDEVPYVFGVPMVGPTDLFPCNFSKNDVMLSAVVMTYWTNFAKTGDPNKPVPQDTKFIHTKANRFEEVAWSKYNPRDQLYLHIGLKPRVRDHYRATKVAFWKHLVPHLYNLHDMFHYTSTTTKVPPPDTTHSSHITRRPNGKTWSTKRPAISPAYSNENAQGSWNGDQDAGPLLVENPRDYSTELSVTIAVGASLLFLNVLAFAALYYRKDKRRQEPLRQPSPQRGAGAPELGAAPEEELAALQLGPTHHECEAGPPHDTLRLTALPDYTLTLRRSPDDIPLMTPNTITMIPNSLVGLQTLHPYNTFAAGFNSTGLPHSHSTTRV

SEQ ID NO: 9381 - protein, 828 aa, Homo Sapiens
MWLRLGPPSLSLSPKPTVGRSLCLTLWFLSLALRASTQAPAPTVNTHFGKLRGARVPLPSEILGPVDQYLGVPYAAPPIGEKRFLPPEPPPSWSGIRNATHFPPVCPQNIHTAVPEVMLPVWFTANLDIVATYIQEPNEDCLYLNVYVPTEDGSGAKKQGEDLADNDGDEDEDIRDSGAKPVMVYIHGGSYMEGTGNMIDGSILASYGNVIVITLNYRVGVLGFLSTGDQAAKGNYGLLDQIQALRWVSENIAFFGGDPRRITVFGSGIGASCVSLLTLSHHSEGLFQRAIIQSGSALSSWAVNYQPVKYTSLLADKVGCNVLDTVDMVDCLRQKSAKELVEQDIQPARYHVAFGPVIDGDVIPDDPEILMEQGEFLNYDIMLGVNQGEGLKFVEGVVDPEDGVSGTDFDYSVSNFVDNLYGYPEGKDTLRETIKFMYTDWADRDNPETRRKTLVALFTDHQWVEPSVVTADLHARYGSPTYFYAFYHHCQSLMKPAWSDAAHGDEVPYVFGVPMVGPTDLFPCNFSKNDVMLSAVVMTYWTNFAKTGDPNKPVPQDTKFIHTKANRFEEVAWSKYNPRDQLYLHIGLKPRVRDHYRATKVAFWKHLVPHLYNLHDMFHYTSTTTKVPPPDTTHSSHITRRPNGKTWSTKRPAISPAYSNENAQGSWNGDQDAGPLLVENPRDYSTELSVTIAVGASLLFLNVLAFAALYYRKDKRRQEPLRQPSPQRGAGAPELGAAPEEELAALQLGPTHHECEAGPPHDTLRLTALPDYTLTLRRSPDDIPLMTPNTITMIPNSLVGLQTLHPYNTFAAGFNSTGLPHSHSTTRV

SEQ ID NO: 9382 - protein, 848 aa, Homo Sapiens
MWLRLGPPSLSLSPKPTVGRSLCLTLWFLSLALRASTQAPAPTVNTHFGKLRGARVPLPSEILGPVDQYLGVPYAAPPIGEKRFLPPEPPPSWSGIRNATHFPPVCPQNIHTAVPEVMLPVWFTANLDIVATYIQEPNEDCLYLNVYVPTEDVKRISKECARKPNKKICRKGGSGAKKQGEDLADNDGDEDEDIRDSGAKPVMVYIHGGSYMEGTGNMIDGSILASYGNVIVITLNYRVGVLGFLSTGDQAAKGNYGLLDQIQALRWVSENIAFFGGDPRRITVFGSGIGASCVSLLTLSHHSEGLFQRAIIQSGSALSSWAVNYQPVKYTSLLADKVGCNVLDTVDMVDCLRQKSAKELVEQDIQPARYHVAFGPVIDGDVIPDDPEILMEQGEFLNYDIMLGVNQGEGLKFVEGVVDPEDGVSGTDFDYSVSNFVDNLYGYPEGKDTLRETIKFMYTDWADRDNPETRRKTLVALFTDHQWVEPSVVTADLHARYGSPTYFYAFYHHCQSLMKPAWSDAAHGDEVPYVFGVPMVGPTDLFPCNFSKNDVMLSAVVMTYWTNFAKTGDPNKPVPQDTKFIHTKANRFEEVAWSKYNPRDQLYLHIGLKPRVRDHYRATKVAFWKHLVPHLYNLHDMFHYTSTTTKVPPPDTTHSSHITRRPNGKTWSTKRPAISPAYSNENAQGSWNGDQDAGPLLVENPRDYSTELSVTIAVGASLLFLNVLAFAALYYRKDKRRQEPLRQPSPQRGAGAPELGAAPEEELAALQLGPTHHECEAGPPHDTLRLTALPDYTLTLRRSPDDIPLMTPNTITMIPNSLVGLQTLHPYNTFAAGFNSTGLPHSHSTTRV

SEQ ID NO: 9383 - protein, 33 aa, Homo Sapiens
MLRPQGLLWLPLLFTSVCVMLNSNVLLWITALA

SEQ ID NO: 9384 - protein, 816 aa, Homo Sapiens
MLRPQGLLWLPLLFTSVCVMLNSNVLLWITALAIKFTLIDSQAQYPVVNTNYGKIQGLRTPLPSEILGPVEQYLGVPYASPPTGERRFQPPESPSSWTGIRNATQFSAVCPQHLDERFLLHDMLPIWFTTSLDTLMTYVQDQNEDCLYLNIYVPMEDDIHEQNSKKPVMVYIHGGSYMEGTGNMIDGSILASYGNVIVITINYRLGILGFLSTGDQAAKGNYGLLDQIQALRWIEENVGAFGGDPKRVTIFGSGAGASCVSLLTLSHYSEGLFQKAIIQSGTALSSWAVNYQPAKYTRILADKVGCNMLDTTDMVECLKNKNYKELIQQTITPATYHIAFGPVIDGDVIPDDPQILMEQGEFLNYDIMLGVNQGEGLKFVDGIVDNEDGVTPNDFDFSVSNFVDNLYGYPEGKDTLRETIKFMYTDWADKENPETRRKTLVALFTDHQWVAPAVATADLHAQYGSPTYFYAFYHHCQSEMKPSWADSAHGDEVPYVFGIPMIGPTELFSCNFSKNDVMLSAVVMTYWTNFAKTGDPNQPVPQDTKFIHTKPNRFEEVAWSKYNPKDQLYLHIGLKPRVRDHYRATKVAFWLELVPHLHNLNEIFQYVSTTTKVPPPDMTSFPYGTRRSPAKIWPTTKRPAITPANNPKHSKDPHKTGPEDTTVLIETKRDYSTELSVTIAVGASLLFLNILAFAALYYKKDKRRHETHRHPSPQRNTTNDITHIQNEEIMSLQMKQLEHDHECESLQAHDTLRLTCPPDYTLTLRRSPDDIPFMTPNTITMIPNTLMGMQPLHTFKTFSGGQNSTNLPHGHSTTRV

SEQ ID NO: 9385 - protein, 816 aa, Homo Sapiens; identical to SEQ ID NO: 9384

SEQ ID NO: 9386 - protein, 873 aa, Homo Sapiens
MLRPQGLLWLPLLFTSVCVMLNSNVLLWITALAIKFTLIDSQAQYPVVNTNYGKIQGLRTPLPSEILGPVEQYLGVPYASPPTGERRFQPPESPSSWTGIRNATQFSAVCPQHLDERFLLHDMLPIWFTTSLDTLMTYVQDQNEDCLYLNIYVPMEDGTNIKRNADDITSNDHGEDKDIHEQNSKKPVMVYIHGGSYMEGTGNMIDGSILASYGNVIVITINYRLGILAQNTLAHGNCKHRCQLHLQAPRDCKSAYPFRNEDEIRGFLSTGDQAAKGNYGLLDQIQALRWIEENVGAFGGDPKRVTIFGSGAGASCVSLLTLSHYSEGLFQKAIIQSGTALSSWAVNYQPAKYTRILADKVGCNMLDTTDMVECLKNKNYKELIQQTITPATYHIAFGPVIDGDVIPDDPQILMEQGEFLNYDIMLGVNQGEGLKFVDGIVDNEDGVTPNDFDFSVSNFVDNLYGYPEGKDTLRETIKFMYTDWADKENPETRRKTLVALFTDHQWVAPAVATADLHAQYGSPTYFYAFYHHCQSEMKPSWADSAHGDEVPYVFGIPMIGPTELFSCNFSKNDVMLSAVVMTYWTNFAKTGDPNQPVPQDTKFIHTKPNRFEEVAWSKYNPKDQLYLHIGLKPRVRDHYRATKVAFWLELVPHLHNLNEIFQYVSTTTKVPPPDMTSFPYGTRRSPAKIWPTTKRPAITPANNPKHSKDPHKTGPEDTTVLIETKRDYSTELSVTIAVGASLLFLNILAFAALYYKKDKRRHETHRHPSPQRNTTNDITHIQNEEIMSLQMKQLEHDHECESLQAHDTLRLTCPPDYTLTLRRSPDDIPFMTPNTITMIPNTLMGMQPLHTFKTFSGGQNSTNLPHGHSTTRV

SEQ ID NO: 9387 - protein, 836 aa, Homo Sapiens
MLRPQGLLWLPLLFTSVCVMLNSNVLLWITALAIKFTLIDSQAQYPVVNTNYGKIQGLRTPLPSEILGPVEQYLGVPYASPPTGERRFQPPESPSSWTGIRNATQFSAVCPQHLDERFLLHDMLPIWFTTSLDTLMTYVQDQNEDCLYLNIYVPMEDGTNIKRNADDITSNDHGEDKDIHEQNSKKPVMVYIHGGSYMEGTGNMIDGSILASYGNVIVITINYRLGILGFLSTGDQAAKGNYGLLDQIQALRWIEENVGAFGGDPKRVTIFGSGAGASCVSLLTLSHYSEGLFQKAIIQSGTALSSWAVNYQPAKYTRILADKVGCNMLDTTDMVECLKNKNYKELIQQTITPATYHIAFGPVIDGDVIPDDPQILMEQGEFLNYDIMLGVNQGEGLKFVDGIVDNEDGVTPNDFDFSVSNFVDNLYGYPEGKDTLRETIKFMYTDWADKENPETRRKTLVALFTDHQWVAPAVATADLHAQYGSPTYFYAFYHHCQSEMKPSWADSAHGDEVPYVFGIPMIGPTELFSCNFSKNDVMLSAVVMTYWTNFAKTGDPNQPVPQDTKFIHTKPNRFEEVAWSKYNPKDQLYLHIGLKPRVRDHYRATKVAFWLELVPHLHNLNEIFQYVSTTTKVPPPDMTSFPYGTRRSPAKIWPTTKRPAITPANNPKHSKDPHKTGPEDTTVLIETKRDYSTELSVTIAVGASLLFLNILAFAALYYKKDKRRHETHRHPSPQRNTTNDITHIQNEEIMSLQMKQLEHDHECESLQAHDTLRLTCPPDYTLTLRRSPDDIPFMTPNTITMIPNTLMGMQPLHTFKTFSGGQNSTNLPHGHSTTRV

SEQ ID NO: 9388 - protein, 648 aa, Homo Sapiens
MVYIHGGSYMEGTGNMIDGSILASYGNVIVITINYRLGILGFLSTGDQAAKGNYGLLDQIQALRWIEENVGAFGGDPKRVTIFGSGAGASCVSLLTLSHYSEGLFQKAIIQSGTALSSWAVNYQPAKYTRILADKVGCNMLDTTDMVECLKNKNYKELIQQTITPATYHIAFGPVIDGDVIPDDPQILMEQGEFLNYDIMLGVNQGEGLKFVDGIVDNEDGVTPNDFDFSVSNFVDNLYGYPEGKDTLRETIKFMYTDWADKENPETRRKTLVALFTDHQWVAPAVATADLHAQYGSPTYFYAFYHHCQSEMKPSWADSAHGDEVPYVFGIPMIGPTELFSCNFSKNDVMLSAVVMTYWTNFAKTGDPNQPVPQDTKFIHTKPNRFEEVAWSKYNPKDQLYLHIGLKPRVRDHYRATKVAFWLELVPHLHNLNEIFQYVSTTTKVPPPDMTSFPYGTRRSPAKIWPTTKRPAITPANNPKHSKDPHKTGPEDTTVLIETKRDYSTELSVTIAVGASLLFLNILAFAALYYKKDKRRHETHRHPSPQRNTTNDITHIQNEEIMSLQMKQLEHDHECESLQAHDTLRLTCPPDYTLTLRRSPDDIPFMTPNTITMIPNTLMGMQPLHTFKTFSGGQNSTNLPHGHSTTRV

SEQ ID NO: 9389 - protein, 236 aa, Homo Sapiens
  misc_feature (1)..(1): Xaa can be any naturally occurring amino acid
XNSNVLLWITALAIKFTLIDSQAQYPVVNTNYGKIQGLRTPLPSEILGPVEQYLGVPYASPPTGERRFQPPESPSSWTGIRNATQFSAVCPQHLDERFLLHDMLPIWFTTSLDTLMTYVQDQNEDCLYLNIYVPMEDGTNIKRNADDITSNDHGEDKDIHEQNSKKPVMVYIHGGSYMEGTGNMIDGSILASYGNVIVITINYRLGILGMQEARLCGSSKMFNYFKSPFTNLINFF

SEQ ID NO: 9390 - protein, 178 aa, Homo Sapiens
GPTCSILPKNPLFPQNLSSQPCIKMEGDKSLTFSSYGLQWCLYELDKEEFQTFKELLKKKSSESTTCSIPQFEIENANVECLALLLHEYYGASLAWATSISIFENMNLRTLSEKARDDMKRHSPEDPEATMTDQGPSKEKVPGISQAVQQDSATAAETKEQESFAVLLRLQCSGYPQA

SEQ ID NO: 9391 - protein, 1200 aa, Homo Sapiens
MKVAGGLELGAAALLSASPRALVTLSTGPTCSILPKNPLFPQNLSSQPCIKMEGDKSLTFSSYGLQWCLYELDKEEFQTFKELLKKKSSESTTCSIPQFEIENANVECLALLLHEYYGASLAWATSISIFENMNLRTLSEKARDDMKRHSPEDPEATMTDQGPSKEKVPDISDSNNKHKYVGIHSSFAEISQAMEQEGATAAETEEQEISQAMEQEGATAAETEEQGHGGDTWDYKSHVMTKFAEEEDVRRSFENTAADWPEMQTLAGAFDSDRWGFRPRTVVLHGKSGIGKSALARRIVLCWAQGGLYQGMFSYVFFLPVREMQRKKESSVTEFISREWPDSQAPVTEIMSRPERLLFIIDGFDDLGSVLNNDTKLCKDWAEKQPPFTLIRSLLRKVLLPESFLIVTVRDVGTEKLKSEVVSPRYLLVRGISGEQRIHLLLERGIGEHQKTQGLRAIMNNRELLDQCQVPAVGSLICVALQLQDVVGESVAPFNQTLTGLHAAFVFHQLTPRGVVRRCLNLEERVVLKRFCRMAVEGVWNRKSVFDGDDLMVQGLGESELRALFHMNILLPDSHCEEYYTFFHLSLQDFCAALYYVLEGLEIEPALCPLYVEKTKRSMELKQAGFHIHSLWMKRFLFGLVSEDVRRPLEVLLGCPVPLGVKQKLLHWVSLLGQQPNATTPGDTLDAFHCLFETQDKEFVRLALNSFQEVWLPINQNLDLIASSFCLQHCPYLRKIRVDVKGIFPRDESAEACPVVPLWMRDKTLIEEQWEDFCSMLGTHPHLRQLDLGSSILTERAMKTLCAKLRHPTCKIQTLMFRNAQITPGVQHLWRIVMANRNLRSLNLGGTHLKEEDVRMACEALKHPKCLLESLRLDCCGLTHACYLKISQILTTSPSLKSLSLAGNKVTDQGVMPLSDALRVSQCALQKLILEDCGITATGCQSLASALVSNRSLTHLCLSNNSLGNEGVNLLCRSMRLPHCSLQRLMLNQCHLDTAGCGFLALALMGNSWLTHLSLSMNPVEDNGVKLLCEVMREPSCHLQDLELVKCHLTAACCESLSCVISRSRHLKSLDLTDNALGDGGVAALCEGLKQKNSVLARLGLKACGLTSDCCEALSLALSCNRHLTSLNLVQNNFSPKGMMKLCSAFACPTSNLQIIGLWKWQYPVQIRKLLEEVQLLKPRVVIDGSWHSFDEDDRYWWKN

SEQ ID NO: 9392 - protein, 1200 aa, Homo Sapiens
MKVAGGLELGAAALLSASPRALVTLSTGPTCSILPKNPLFPQNLSSQPCIKMEGDKSLTFSSYGLQWCLYELDKEEFQTFKELLKKKSSESTTCSIPQFEIENANVECLALLLHEYYGASLAWATSISIFENMNLRTLSEKARDDMKRHSPEDPEATMTDQGPSKEKVPGISQAVQQDSATAAETKEQEISQAMEQEGATAAETEEQEISQAMEQEGATAAETEEQGHGGDTWDYKSHVMTKFAEEEDVRRSFENTAADWPEMQTLAGAFDSDRWGFRPRTVVLHGKSGIGKSALARRIVLCWAQGGLYQGMFSYVFFLPVREMQRKKESSVTEFISREWPDSQAPVTEIMSRPERLLFIIDGFDDLGSVLNNDTKLCKDWAEKQPPFTLIRSLLRKVLLPESFLIVTVRDVGTEKLKSEVVSPRYLLVRGISGEQRIHLLLERGIGEHQKTQGLRAIMNNRELLDQCQVPAVGSLICVALQLQDVVGESVAPFNQTLTGLHAAFVFHQLTPRGVVRRCLNLEERVVLKRFCRMAVEGVWNRKSVFDGDDLMVQGLGESELRALFHMNILLPDSHCEEYYTFFHLSLQDFCAALYYVLEGLEIEPALCPLYVEKTKRSMELKQAGFHIHSLWMKRFLFGLVSEDVRRPLEVLLGCPVPLGVKQKLLHWVSLLGQQPNATTPGDTLDAFHCLFETQDKEFVRLALNSFQEVWLPINQNLDLIASSFCLQHCPYLRKIRVDVKGIFPRDESAEACPVVPLWMRDKTLIEEQWEDFCSMLGTHPHLRQLDLGSSILTERAMKTLCAKLRHPTCKIQTLMFRNAQITPGVQHLWRIVMANRNLRSLNLGGTHLKEEDVRMACEALKHPKCLLESLRLDCCGLTHACYLKISQILTTSPSLKSLSLAGNKVTDQGVMPLSDALRVSQCALQKLILEDCGITATGCQSLASALVSNRSLTHLCLSNNSLGNEGVNLLCRSMRLPHCSLQRLMLNQCHLDTAGCGFLALALMGNSWLTHLSLSMNPVEDNGVKLLCEVMREPSCHLQDLELVKCHLTAACCESLSCVISRSRHLKSLDLTDNALGDGGVAALCEGLKQKNSVLARLGLKACGLTSDCCEALSLALSCNRHLTSLNLVQNNFSPKGMMKLCSAFACPTSNLQIIGLWKWQYPVQIRKLLEEVQLLKPRVVIDGSWHSFDEDDRYWWKN

SEQ ID NO: 9393 - protein, 154 aa, Homo Sapiens
MARRAGGARMFGSLLLFALLAAGVAPLSWDLPEPRSRASKIRVHSRGNLWATGHFMGKKSLEPSSPSPLGTAPHTSLRDQRLQLSHDLLGILLLKKALGVSLSRPAPQIQEAAGTNTAEMTPIMGQTQQRGLDCAHPGKVLNGTLLMAPSGCKS

SEQ ID NO: 9394 - protein, 121 aa, Homo Sapiens
MARRAGGARMFGSLLLFALLAAGVAPLSWDLPEPRSRASKIRVHSRGNLWATGHFMGKKSLEPSSPSPLGTAPHTSLRDQRLQLSHDLLGILLLKKALGVSLSRPAPQIQYRRLLVQILQK

SEQ ID NO: 9395 - protein, 82 aa, Homo Sapiens
MANCERTFIAIKPDGVQRGLVGEIIKRFEQKGFRLVGLKFMQASEDLLKEHYVDLKDRPFFAGLVKYMHSGPVVAMLPDFLL

SEQ ID NO: 9396 - protein, 82 aa, Homo Sapiens; identical to SEQ ID NO: 9395

SEQ ID NO: 9397 - protein, 152 aa, Homo Sapiens
MANCERTFIAIKPDGVQRGLVGEIIKRFEQKGFRLVGLKFMQASEDLLKEHYVDLKDRPFFAGLVKYMHSGPVVAMVWEGLNVVKTGRVMLGETNPADSKPGTIRGDFCIQVGRNIIHGSDSVESAEKEIGLWFHPEELVDYTSCAQNWIYE

SEQ ID NO: 9398 - protein, 60 aa, Homo Sapiens
MVLLSTLGIVFQGEGPPISSCDTGTMANCERTFIAIKPDGVQRGLVGEIIKRFEQKGFRL

SEQ ID NO: 9399 - protein, 139 aa, Homo Sapiens
MVLLSTLGIVFQGEGPPISSCDTGTMANCERTFIAIKPDGVQRGLVGEIIKRFEQKGFRLVGLKFMQASEDLLKEHYVDLKDRPFFAGLVKYMHSGPVVAMVWEGLNVVKTGRVMLGETNPADSKPGTIRGDFCIQVGR

SEQ ID NO: 9400 - protein, 177 aa, Homo Sapiens
MVLLSTLGIVFQGEGPPISSCDTGTMANCERTFIAIKPDGVQRGLVGEIIKRFEQKGFRLVGLKFMQASEDLLKEHYVDLKDRPFFAGLVKYMHSGPVVAMVWEGLNVVKTGRVMLGETNPADSKPGTIRGDFCIQVGRNIIHGSDSVESAEKEIGLWFHPEELVDYTSCAQNWIYE

SEQ ID NO: 9401 - protein, 177 aa, Homo Sapiens; identical to SEQ ID NO: 9400

SEQ ID NO: 9402 - protein, 197 aa, Homo Sapiens
MANCERTFIAIKPDGVQRGLVGEIIKRFEQKGFRLVGLKFMQASEDLLKEHYVDLKDRPFFAGLVKYMHSGPVVAMVWEGLNVVKTGRVMLGETNPADSKPGTIRGDFCIQVGRTMANLERTFIAIKPDGVQRGLVGEIIKRFEQKGFRLVAMKFLRASEEHLKQHYIDLKDRPFFPGLVKYMNSGPVVAMEHHSWQ

SEQ ID NO: 9403 - protein, 267 aa, Homo Sapiens
MANCERTFIAIKPDGVQRGLVGEIIKRFEQKGFRLVGLKFMQASEDLLKEHYVDLKDRPFFAGLVKYMHSGPVVAMVWEGLNVVKTGRVMLGETNPADSKPGTIRGDFCIQVGRTMANLERTFIAIKPDGVQRGLVGEIIKRFEQKGFRLVAMKFLRASEEHLKQHYIDLKDRPFFPGLVKYMNSGPVVAMVWEGLNVVKTGRVMLGETNPADSKPGTIRGDFCIQVGRNIIHGSDSVKSAEKEISLWFKPEELVDYKSCAHDWVYE

SEQ ID NO: 9404 - protein, 292 aa, Homo Sapiens
MVLLSTLGIVFQGEGPPISSCDTGTMANCERTFIAIKPDGVQRGLVGEIIKRFEQKGFRLVGLKFMQASEDLLKEHYVDLKDRPFFAGLVKYMHSGPVVAMVWEGLNVVKTGRVMLGETNPADSKPGTIRGDFCIQVGRTMANLERTFIAIKPDGVQRGLVGEIIKRFEQKGFRLVAMKFLRASEEHLKQHYIDLKDRPFFPGLVKYMNSGPVVAMVWEGLNVVKTGRVMLGETNPADSKPGTIRGDFCIQVGRNIIHGSDSVKSAEKEISLWFKPEELVDYKSCAHDWVYE

SEQ ID NO: 9405 - protein, 53 aa, Homo Sapiens
FANLFPAACTGAHERTFLAVKPDGVQRRLVGEIVRRFERKGFKLVALKLVQAA

SEQ ID NO: 9406 - protein, 57 aa, Homo Sapiens
IFANLFPAACTGAHERTFLAVKPDGVQRRLVGEIVRRFERKGFKRPDPSAGLRGAAA

SEQ ID NO: 9407 - protein, 85 aa, Homo Sapiens
MASGPVVAMVWQGLDVVRTSRALIGATNPADAPPGTIRGDFCIEVGKNLIHGSDSVESARREIALWFRADELLCWEDSAGHWLYE

SEQ ID NO: 9408 - protein, 169 aa, Homo Sapiens
MICLVLTIFANLFPAACTGAHERTFLAVKPDGVQRRLVGEIVRRFERKGFKLVALKLVQASEELLREHYAELRERPFYGRLVKYMASGPVVAMVWQGLDVVRTSRALIGATNPADAPPGTIRGDFCIEVGKNLIHGSDSVESARREIALWFRADELLCWEDSAGHWLYE

SEQ ID NO: 9409 - protein, 123 aa, Homo Sapiens
PAACTGAHERTFLAVKPDGVQRRLVGEIVRRFERKGFKLVALKLVQVGARPPRSCCVSTTPSCVNARSTAALSSIWPPGRWWPWYGRGWTWCAPRGRSSEPRTRPTPRPAPSAGISASRLART

SEQ ID NO: 9410 - protein, 153 aa, Homo Sapiens
MKHLRPQFPLILAIYCFCMLQIPSSGFPQPLADPSDGLDIVQLEQLAYCLSQWAPLSRQPKDNQDIYKRFLFHYSRTQEATHPVKTGFPPVHPLMHLAAKLANRRMKRILQRGSGTAAVDFTKKDHTATWGRPFFLFRPRNGRNIEDEAQIQW

SEQ ID NO: 9411 - protein, 158 aa, Homo Sapiens
MLRTESCRPRSPAGQVAAASPLLLLLLLLAWCAGACRGAPILPQGLQPEQQLQLWNEASNALEELCFMIMGMLPKPQEQDEKDNTKRFLFHYSKTQKLGKSNVVSSVVHPLLQLVPHLHERRMKRFRVDEEFQSPFASQSRGYFLFRPRNGRRSAGFI

SEQ ID NO: 9412 - protein, 149 aa, Homo Sapiens
MLRTESCRPRSPAGQVAAASPLLLLLLLLAWCAGACRGAPILPQGLQPEQQLQLWNEIDDTCSSFLSIDSQPQASNALEELCFMIMGMLPKPQEQDEKDNTKRFLFHYSKTQKLGKSNVVEEFQSPFASQSRGYFLFRPRNGRRSAGFI

SEQ ID NO: 9413 - protein, 174 aa, Homo Sapiens
MLRTESCRPRSPAGQVAAASPLLLLLLLLAWCAGACRGAPILPQGLQPEQQLQLWNEIDDTCSSFLSIDSQPQASNALEELCFMIMGMLPKPQEQDEKDNTKRFLFHYSKTQKLGKSNVVSSVVHPLLQLVPHLHERRMKRFRVDEEFQSPFASQSRGYFLFRPRNGRRSAGFI

SEQ ID NO: 9414 - protein, 147 aa, Homo Sapiens
MLRTESCRPRSPAGQVAAASPLLLLLLLLAWCAGACRGAPILPQGLQPEQQLQLWNEIDDTCSSFLSIDSQPQASNALEELCFMIMGMLPKPQSSVVHPLLQLVPHLHERRMKRFRVDEEFQSPFASQSRGYFLFRPRNGRRSAGFI

SEQ ID NO: 9415 - protein, 698 aa, Homo Sapiens
MLPARLPFRLLSLFLRGSAPTAARHGLREPLLERRCAAASSFQHSSSLGRELPYDPVDTEGFGEGGDMQERFLFPEYILDPEPQPTREKQLQELQQQQEEEERQRQQRREERRQQNLRARSREHPVVGHPDPALPPSGVNCSGCGAELHCQDAGVPGYLPREKFLRTAEADGGLARTVCQRCWLLSHHRRALRLQVSREQYLELVSAALRRPGPSLVLYMVDLLDLPDALLPDLPALVGPKQLIVLGNKVDLLPQDAPGYRQRLRERLWEDCARAGLLLAPGHQGPQRPVKDEPQDGENPNPPNWSRTVVRDVRLISAKTGYGVEELISALQRSWRYRGDVYLVGATNAGKSTLFNTLLESDYCTAKGSEAIDRATISPWPGTTLNLLKFPICNPTPYRMFKRHQRLKKDSTQAEEDLSEQEQNQLNVLKKHGYVVGRVGRTFLYSEEQKDNIPFEFDADSLAFDMENDPVMGTHKSTKQVELTAQDVKDAHWFYDTPGITKENCILNLLTEKEVNIVLPTQSIVPRTFVLKPGMVLFLGAIGRIDFLQGNQSAWFTVVASNILPVHITSLDRADALYQKHAGHTLLQIPMGGKERMAGFPPLVAEDIMLKEGLGASEAVADIKFSSAGWVSVTPNFKDRLHLRGYTPEGTVLTVRPPLLPYIVNIKGQRIKKSVAYKTKKPPSLMYNVRKKKGKINV

SEQ ID NO: 9416 - protein, 292 aa, Homo Sapiens
DQQLGIQTKDVAVDGQNWTFAFDFSFLSQQEDLAWAELRLQLSSPVDLPTEGSLAIEIFHQPKPDTEQASDSCLERFQMDLFTVTLSQVTFSLGSMVLEVTRPLSKWLKHPGALEKQMSRVAGECWPRPPTPPATNVLLMLYSNLSQEQRQLGGSTLLWEAESSWRAQEGQLSWEWGKRHRRHHLPDRSQLCRKVKFQVDFNLIGWGSWIIYPKQYNAYRCEGECPNPVGEEFHPTNHAYIQSLLKRYQPHRVPSTCCAPVKTKPLSMLYVDNGRVLLDHHKDMIVEECGCL

SEQ ID NO: 9417 - protein, 347 aa, Homo Sapiens
MHAHCLPFLLHAWWALLQAGAATVATALLRTRGQPSSPSPLAYMLSLYRDPLPRADIIRSLQAEDVAVDGQNWTFAFDFSFLSQQEDLAWAELRLQLSSPVDLPTEGSLAIEIFHQPKPDTEQASDSCLERFQMDLFTVTLSQVTFSLGSMVLEVTRPLSKWLKHPGALEKQMSRVAGECWPRPPTPPATNVLLMLYSNLSQEQRQLGGSTLLWEAESSWRAQEGQLSWEWGKRHRRHHLPDRSQLCRKVKFQVDFNLIGWGSWIIYPKQYNAYRCEGECPNPVGEEFHPTNHAYIQSLLKRYQPHRVPSTCCAPVKTKPLSMLYVDNGRVLLDHHKDMIVEECGCL

SEQ ID NO: 9418 - protein, 232 aa, Homo Sapiens
MERCPSLGVTLYALVVVLGLRATPAGGQHYLHIRPAPSDNLPLVDLIEHPDPIFDPKEKDLNETLLRSLLGGHYDPGFMATSPPEDRPGGGGGAAGGAEDLAELDQLLRQRPSGAMPSEIKGLEFSEGLAQGKKQRLSKKLRRKLQMWLWSQTFCPVLYAWNDLGSRFWPRYVKVGSCFSKRSCSVPEGMVCKPSKSVHLTVLRWRCQRRGGQRCGWIPIQYPIISECKCSC

SEQ ID NO: 9419 - protein, 138 aa, Homo Sapiens
MLVGQGAGPLGPAVVTAAVVLLLSGVGPAHGSEDIVVGCGGFVKSDVEINYSLIEIKLYTKHGTLKYQTDCAPNNGYFMIPLYDKGDFILKIEPPLGWSFEPTTVELHVDGVSDICTKGGDINFVFTGFSVNGKVCIF

SEQ ID NO: 9420 - protein, 1267 aa, Homo Sapiens
MLVGQGAGPLGPAVVTAAVVLLLSGVGPAHGSEDIVVGCGGFVKSDVEINYSLIEIKLYTKHGTLKYQTDCAPNNGYFMIPLYDKGDFILKIEPPLGWSFEPTTVELHVDGVSDICTKGGDINFVFTGFSVNGKVLSKGQPLGPAGVQVSLRNTGTEAKIQSTVTQPGGKFAFFKVLPGDYEILATHPTWALKEASTTVRVTNSNANAASPLIVAGYNVSGSVRSDGEPMKGVKFLLFSSLVTKEDVLGCNVSPVPGFQPQDESLVYLCYTVSREDGSFSFYSLPSGGYTVIPFYRGERITFDVAPSRLDFTVEHDSLKIEPVFHVMGFSVTGRVLNGPEGDGVPEAVVTLNNQIKVKTKADGSFRLENITTGTYTIHAQKEHLYFETVTIKIAPNTPQLADIVATGFSVCGQISIIRFPDTVKQMNKYKVVLSSQDKDKSLVTVETDAHGSFCFKANPGTYKVQVMVPEAETRAGLTLKPQTFPLTVTDRPVMDVAFVQFLASVSGKVSCLDTCGDLLVTLQSLSRQGEKRSLQLSGKVNAMTFTFDNVLPGKYKISIMHEDWCWKNKSLEVEVLEDDVSAVEFRQTGYMLRCSLSHAITLEFYQDGNGRENVGIYNLSKGVNRFCLSKPGVYKVTPRSCHRFEQAFYTYDTSSPSILTLTAIRHHVLGTITTDKMMDVTVTIKSSIDSEPALVLGPLKSVQELRREQQLAEIEARRQEREKNGNEEGEERMTKPPVQEMVDELQGPFSYDFSYWARSGEKITVTPSSKELLFYPPSMEAVVSGESCPGKLIEIHGKAGLFLEGQIHPELEGVEIVISEKGASSPLITVFTDDKGAYSVGPLHSDLEYTVTSQKEGYVLTAVEGTIGDFKAYALAGVSFEIKAEDDQPLPGVLLSLSGGLFRSNLLTQDNGILTFSNLSPGQYYFKPMMKEFRFEPSSQMIEVQEGQNLKITITGYRTAYSCYGTVSSLNGEPEQGVAMEAVGQNDCSIYGEDTVTDEEGKFRLRGLLPGCVYHVQLKAEGNDHIERALPHHRVIEVGNNDIDDVNIIVFRQINQFDLSGNVITSSEYLPTLWVKLYKSENLDNPIQTVSLGQSLFFHFPPLLRDGENYVVLLDSTLPRSQYDYILPQVSFTAVGYHKHITLIFNPTRKLPEQDIAQGSYIALPLTLLVLLAGYNHDKLIPLLLQLTSRLQGVGALGQAASDNSGPEDAKRQAKKQKTRRTLRLQEEFQLMWCLVPWRGTLGIHLFSSLPFASEILLETTATCIHY

SEQ ID NO: 9421 - protein, 1222 aa, Homo Sapiens
MLVGQGAGPLGPAVVTAAVVLLLSGVGPAHGSEDIVVGCGGFVKSDVEINYSLIEIKLYTKHGTLKYQTDCAPNNGYFMIPLYDKGDFILKIEPPLGWSFEPTTVELHVDGVSDICTKGGDINFVFTGFSVNGKVLSKGQPLGPAGVQVSLRNTGTEAKIQSTVTQPGGKFAFFKVLPGDYEILATHPTWALKEASTTVRVTNSNANAASPLIVAGYNVSGSVRSDGEPMKGVKFLLFSSLVTKEDVLGCNVSPVPGFQPQDESLVYLCYTVSREDGSFSFYSLPSGGYTVIPFYRGERITFDVAPSRLDFTVEHDSLKIEPVFHVMGFSVTGRVLNGPEGDGVPEAVVTLNNQIKVKTKADGSFRLENITTGTYTIHAQKEHLYFETVTIKIAPNTPQLADIVATGFSVCGQISIIRFPDTVKQMNKYKVVLSSQDKDKSLVTVETDAHGSFCFKANPGTYKVQVMVPEAETRAGLTLKPQTFPLTVTDRPVMDVAFVQFLASVSGKVSCLDTCGDLLVTLQSLSRQGEKRSLQLSGKVNAMTFTFDNVLPGKYKISIMHEDWCWKNKSLEVEVLEDDVSAVEFRQTGYMLRCSLSHAITLEFYQDGNGRENVGIYNLSKGVNRFCLSKPGVYKVTPRSCHRFEQAFYTYDTSSPSILTLTAIRHHVLGTITTDKMMDVTVTIKSSIDSEPALVLGPLKSVQELRREQQLAEIEARRQEREKNGNEEGEERMTKPPVQEMVDELQGPFSYDFSYWARSGEKITVTPSSKELLFYPPSMEAVVSGESCPGKLIEIHGKAGLFLEGQIHPELEGVEIVISEKGASSPLITVFTDDKGAYSVGPLHSDLEYTVTSQKEGYVLTAVEGTIGDFKAYALAGVSFEIKAEDDQPLPGVLLSLSGGLFRSNLLTQDNGILTFSNLSPGQYYFKPMMKEFRFEPSSQMIEVQEGQNLKITITGYRTAYSCYGTVSSLNGEPEQGVAMEAVGQNDCSIYGEDTVTDEEGKFRLRGLLPGCVYHVQLKAEGNDHIERALPHHRVIEVGNNDIDDVNIIVFRQINQFDLSGNVITSSEYLPTLWVKLYKSENLDNPIQTVSLGQSLFFHFPPLLRDGENYVVLLDSTLPRSQYDYILPQVSFTAVGYHKHITLIFNPTRKLPEQDIAQGSYIALPLTLLVLLAGYNHDKLIPLLLQLTSRLQGVGALGQAASDNSGPEDAKRQAKKQKTRRT

SEQ ID NO: 9422 - protein, 61 aa, Homo Sapiens
MLVGQGAGPLGPAVVTAAVVLLLSGVGPAHGSEDIVVGCGGFVKSDVEINYSLIEQVLNMH

SEQ ID NO: 9423 - protein, 95 aa, Homo Sapiens
  misc_feature (1)..(1): Xaa can be any naturally occurring amino acid
XEDWCWKNKSLEVEVLEDDVSAVEFRQTGYMLRCSLSHAITLVQPYCSGEMCPGTSELKTPRNFIRMEMGVRMWGFITSPKESTDSACPSLVCTK

SEQ ID NO: 9424 - protein, 50 aa, Homo Sapiens
  misc_feature (1)..(1): Xaa can be any naturally occurring amino acid
XSYIALPLTLLVLLAGYNHDKGHIRPGERPAHPWGLISKRPASFELKPTH

SEQ ID NO: 9425 - protein, 80 aa, Homo Sapiens
  misc_feature (1)..(1): Xaa can be any naturally occurring amino acid
XTGYMLRCSLSHAITLVCTAYGVSYLEKRLPCGCQERLTSQEYCKRRNFIRMEMGVRMWGFITSPKESTDSACPSLVCTK

SEQ ID NO: 9426 - protein, 81 aa, Homo Sapiens
MLQHISLLVKQVQELELKLSGQNAMGSQDSLLEITFRSGALPVLCDPTTPKPEDLHSPPLGAGLADFAHPAGSPLGRRDCL

SEQ ID NO: 9427 - protein, 349 aa, Homo Sapiens
MPSKTKYNLVDDGHDLRIPLHNEDAFQHGICFEAKYVGSLDVPRPNSRVEIVAAMRRIRYEFKAKNIKKKKVSIMVSVDGVKVILKKKKKKKEWTWDESKMLVMQDPIYRIFYVSHDSQDLKIFSYIARDGASNIFRCNVFKSKKKSQAMRIVRTVGQAFEVCHKLSLQHTQQNADGQEDGESERNSNSSGDPGRQLTGAERASTATAEETDIDAVEVPLPGNDVLEFSRGVTDLDAVGKEGGSHTGSKVSHPQEPMLTASPRMLLPSSSSKPPGLGTETPLSTHHQMQLLQQLLQQQQQQTQVAVAQCVVGQIALVLSTAISMCLLLPNFSLALPSLLMEELESRYTC

SEQ ID NO: 9428 - protein, 501 aa, Homo Sapiens
MPSKTKYNLVDDGHDLRIPLHNEDAFQHGICFEAKYVGSLDVPRPNSRVEIVAAMRRIRYEFKAKNIKKKKVSIMVSVDGVKVILKKKKKKKEWTWDESKMLVMQDPIYRIFYVSHDSQDLKIFSYIARDGASNIFRCNVFKSKKKSQAMRIVRTVGQAFEVCHKLSLQHTQQNADGQEDGESERNSNSSGDPGRQLTGAERASTATAEETDIDAVEVPLPGNDVLEFSRGVTDLDAVGKEGGSHTGSKVSHPQEPMLTASPRMLLPSSSSKPPGLGTETPLSTHHQMQLLQQLLQQQQQQTQVAVAQVHLLKDQLAAEAAARLEAQARVHQLLLQNKDMLQHISLLVKQVQELELKLSGQNAMGSQDSLLEITFRSGALPVLCDPTTPKPEDLHSPPLGAGLADFAHPAGSPLGRRDCLVKLECFRFLPPEDTPPPAQGEALLGGLELIKFRESGIASEYESNTDESEERDSWSQEELPRLLNVLQRQELGDGLDDEIAV

SEQ ID NO: 9429 - protein, 506 aa, Homo Sapiens
MPSKTKYNLVDDGHDLRIPLHNEDAFQHGICFEAKYVGSLDVPRPNSRVEIVAAMRRIRYEFKAKNIKKKKVSIMVSVDGVKVILKKKKKLLLLQKKEWTWDESKMLVMQDPIYRIFYVSHDSQDLKIFSYIARDGASNIFRCNVFKSKKKSQAMRIVRTVGQAFEVCHKLSLQHTQQNADGQEDGESERNSNSSGDPGRQLTGAERASTATAEETDIDAVEVPLPGNDVLEFSRGVTDLDAVGKEGGSHTGSKVSHPQEPMLTASPRMLLPSSSSKPPGLGTETPLSTHHQMQLLQQLLQQQQQQTQVAVAQVHLLKDQLAAEAAARLEAQARVHQLLLQNKDMLQHISLLVKQVQELELKLSGQNAMGSQDSLLEITFRSGALPVLCDPTTPKPEDLHSPPLGAGLADFAHPAGSPLGRRDCLVKLECFRFLPPEDTPPPAQGEALLGGLELIKFRESGIASEYESNTDESEERDSWSQEELPRLLNVLQRQELGDGLDDEIAV

SEQ ID NO: 9430 - protein, 211 aa, Homo Sapiens
MSLSSLCPVFSAAASSLQVHLLKDQLAAEAAARLEAQARVHQLLLQNKDMLQHISLLVKQVQELELKLSGQNAMGSQDSLLEITFRSGALPVLCDPTTPKPEDLHSPPLGAGLADFAHPAGSPLGRRDCLVKLECFRFLPPEDTPPPAQGEALLGGLELIKFRESGIASEYESNTDESEERDSWSQEELPRLLNVLQRQELGDGLDDEIAV

SEQ ID NO: 9431 - protein, 1286 aa, Homo Sapiens
GPGARGRRRRRRPMSPPPPPPPVRALPLLLLLAGPGAAAPPCLDGSPCANGGRCTQLPSREAACLCPPGWVGERCQLEDPCHSGPCAGRGVCQSSVVAGTARFSCRCPRGFRGPDCSLPDPCLSSPCAHGARCSVGPDGRFLCSCPPGYQGRSCRSDVDECRVGEPCRHGGTCLNTPGSFRCQCPAGYTGPLCENPAVPCAPSPCRNGGTCRQSGDLTYDCACLPGFEGQNCEVNVDDCPGHRCLNGGTCVDGVNTYNCQCPPEWTGQFCTEDVDECQLQPNACHNGGTCFNTLGGHSCVCVNGWTGESCSQNIDDCATAVCFHGATCHDRVASFYCACPMGKTGLLCHLDDACVSNPCHEDAICDTNPVNGRAICTCPPGFTGGACDQDVDECSIGANPCEHLGRCVNTQGSFLCQCGRGYTGPRCETDVNECLSGPCRNQATCLDRIGQFTCICMAGFTGTYCEVDIDECQSSPCVNGGVCKDRVNGFSCTCPSGFSGSTCQLDVDECASTPCRNGAKCVDQPDGYECRCAEGFEGTLCDRNVDDCSPDPCHHGRCVDGIASFSCACAPGYTGTRCESQVDECRSQPCRHGGKCLDLVDKYLCRCPSGTTGVNCEVNIDDCASNPCTFGVCRDGINRYDCVCQPGFTGPLCNVEINECASSPCGEGGSCVDGENGFRCLCPPGSLPPLCLPPSHPCAHEPCSHGICYDAPGGFRCVCEPGWSGPRCSQSLARDACESQPCRAGGTCSSDGMGFHCTCPPGVQGRQCELLSPCTPNPCEHGGRCESAPGQLPVCSCPQGWQDPCLNGGSCQDGVGSFSCSCLPGFAGPRCARDVDECLSNPCGPGTCTDHVASFTCTCPPGYGGFHCEQDLPDCSPSSCFNGGTCVDGVNSFSCLCRPGYTGAHCQHEADPCLSRPCLHGGVCSAAHPGFRCTCLESFTGPQCQTLVDWCSRQPCQNGGRCVQTGAYCLCPPGWSGRLCDIRSLPCREAAAQIGVRLEQLCQAGGQCVDEDSSHYCVCPEGRTGSHCEQEVDPCLAQPCQHGGTCRGYMGGYMCECLPGYNGDNCEDDVDECASQPCQHGGSCIDLVARYLCSCPPGTLGVLCEINEDDCGPGPPLDSGPRCLHNGTCVDLVGGFRCTCPPGYTGLRCEADINECRSGACHAAHTRDCLQDPGGGFRCLCHAGFSGPRCQTVLSPCESQPCQHGGQCRPSPGPGGGLTFTCHCAQPFWGPRCERVARSCRELQCPVGVPCQQTPRGPRCACPPGLSGPSCRSFPGSPPGASNASC

SEQ ID NO: 9432 - protein, 2321 aa, Homo Sapiens
MGPGARGRRRRRRPMSPPPPPPPVRALPLLLLLAGPGAAAPPCLDGSPCANGGRCTQLPSREAACLCPPGWVGERCQLEDPCHSGPCAGRGVCQSSVVAGTARFSCRCPRGFRGPDCSLPDPCLSSPCAHGARCSVGPDGRFLCSCPPGYQGRSCRSDVDECRVGEPCRHGGTCLNTPGSFRCQCPAGYTGPLCENPAVPCAPSPCRNGGTCRQSGDLTYDCACLPGFEGQNCEVNVDDCPGHRCLNGGTCVDGVNTYNCQCPPEWTGQFCTEDVDECQLQPNACHNGGTCFNTLGGHSCVCVNGWTGESCSQNIDDCATAVCFHGATCHDRVASFYCACPMGKTGLLCHLDDACVSNPCHEDAICDTNPVNGRAICTCPPGFTGGACDQDVDECSIGANPCEHLGRCVNTQGSFLCQCGRGYTGPRCETDVNECLSGPCRNQATCLDRIGQFTCICMAGFTGTYCEVDIDECQSSPCVNGGVCKDRVNGFSCTCPSGFSGSTCQLDVDECASTPCRNGAKCVDQPDGYECRCAEGFEGTLCDRNVDDCSPDPCHHGRCVDGIASFSCACAPGYTGTRCESQVDECRSQPCRHGGKCLDLVDKYLCRCPSGTTGVNCEVNIDDCASNPCTFGVCRDGINRYDCVCQPGFTGPLCNVEINECASSPCGEGGSCVDGENGFRCLCPPGSLPPLCLPPSHPCAHEPCSHGICYDAPGGFRCVCEPGWSGPRCSQSLARDACESQPCRAGGTCSSDGMGFHCTCPPGVQGRQCELLSPCTPNPCEHGGRCESAPGQLPVCSCPQGWQGPRCQQDVDECAGPAPCGPHGICTNLAGSFSCTCHGGYTGPSCDQDINDCDPNPCLNGGSCQDGVGSFSCSCLPGFAGPRCARDVDECLSNPCGPGTCTDHVASFTCTCPPGYGGFHCEQDLPDCSPSSCFNGGTCVDGVNSFSCLCRPGYTGAHCQHEADPCLSRPCLHGGVCSAAHPGFRCTCLESFTGPQCQTLVDWCSRQPCQNGGRCVQTGAYCLCPPGWSGRLCDIRSLPCREAAAQIGVRLEQLCQAGGQCVDEDSSHYCVCPEGRTGSHCEQEVDPCLAQPCQHGGTCRGYMGGYMCECLPGYNGDNCEDDVDECASQPCQHGGSCIDLVARYLCSCPPGTLGVLCEINEDDCGPGPPLDSGPRCLHNGTCVDLVGGFRCTCPPGYTGLRCEADINECRSGACHAAHTRDCLQDPGGGFRCLCHAGFSGPRCQTVLSPCESQPCQHGGQCRPSPGPGGGLTFTCHCAQPFWGPRCERVARSCRELQCPVGVPCQQTPRGPRCACPPGLSGPSCRSFPGSPPGASNASCAAAPCLHGGSCRPAPLAPFFRCACAQGWTGPRCEAPAAAPEVSEEPRCPRAACQAKRGDQRCDRECNSPGCGWDGGDCSLSVGDPWRQCEALQCWRLFNNSRCDPACSSPACLYDNFDCHAGGRERTCNPVYEKYCADHFADGRCDQGCNTEECGWDGLDCASEVPALLARGVLVLTVLLPPEELLRSSADFLQRLSAILRTSLRFRLDAHGQAMVFPYHRPSPGSEPRARRELAPEVIGSVVMLEIDNRLCLQSPENDHCFPDAQSAADYLGALSAVERLDFPYPLRDVRGEPLEPPEPSVPLLPLLVAGAVLLLVILVLGVMVARRKREHSTLWFPEGFSLHKDVASGHKGRREPVGQDALGMKNMAKGESLMGEVATDWMDTECPEAKRLKVEEPGMGAEEAVDCRQWTQHHLVAADIRVAPAMALTPPQGDADADGMDVNVRGPDGFTPLMLASFCGGALEPMPTEEDEADDTSASIISDLICQGAQLGARTDRTGETALHLAARYARADAAKRLLDAGADTNAQDHSGRTPLHTAVTADAQGVFQILIRNRSTDLDARMADGSTALILAARLAVEGMVEELIASHADVNAVDELGKSALHWAAAVNNVEATLALLKNGANKDMQDSKEETPLFLAAREGSYEAAKLLLDHFANREITDHLDRLPRDVAQERLHQDIVRLLDQPSGPRSPPGPHGLGPLLCPPGAFLPGLKAAQSGSKKSRRPPGKAGLGPQGPRGRGKKLTLACPGPLADSSVTLSPVDSLDSPRPFGGPPASPGGFPLEGPYAAATATAVSLAQLGGPGRAGLGRQPPGGCVLSLGLLNPVAVPLDWARLPPPAPPGPSFLLPLAPGPQLLNPGTPVSPQERPPPYLAVPGHGEEYPAAGAHSSPPKARFLRVPSEHPYLTPSPESPEHWASPSPPSLSDWSESTPSPATATGAMATTTGALPAQPLPLSVPSSLAQAQTQLGPQPEVTPKRQVLA

SEQ ID NO: 9433 - protein, 117 aa, Homo Sapiens
  misc_feature (1)..(1): Xaa can be any naturally occurring amino acid
XLMGEVATDWMDTECPEAKRLKVEEPGMGAEEAVDCRQWTQHHLVAADIRVAPAMALTPPQGDADADGMDVNVRGPDSHPKPLYRLGCPHGRWLNGTDPGGPPGSRGHGGRAHRQPC

SEQ ID NO: 9434 - protein, 177 aa, Homo Sapiens
  misc_feature (1)..(1): Xaa can be any naturally occurring amino acid
XQLGARTDRTGETALHLAARYARADAAKRLLDAGADTNAQDHSGRTPLHTAVTADAQGVFQILIRNRSTDLDARMADGSTALILAARLAVEGMVEELIASHADVNAVDELGKSALHWAAAVNNVEATLALLKNGANKDMQDSKVSPSPWSTGCQQWHSAIAIQPGQQSETLSKNKTK

SEQ ID NO: 9435 - protein, 295 aa, Homo Sapiens
MGRGVRVLLLLSLLHCAGGSEGRKTWRRRGQQPPPPPRTEAAPAAGQPVESFPLDFTAVEGNMDSFMAQVKSLAQSLYPCSAQQLNEDLRLHLLLNTSVTCNDGSPAGYYLKESRGSRRWLLFLEGGWYCFNRENCDSRYDTMRRLMSSRDWPRTRTGTGILSSQPEENPYWWNANMVFIPYCSSDVWSGASSKSEKNEYAFMGALIIQEVVRELLGRGLSGAKVLLLAGSSAGGTGVLLNVDRVAEQLEKLGYPAIQVRGLADSGWFLDNKQYRHTDCVDTITCAPTEAIRRGI

SEQ ID NO: 9436 - protein, 496 aa, Homo Sapiens
MGRGVRVLLLLSLLHCAGGSEGRKTWRRRGQQPPPPPRTEAAPAAGQPVESFPLDFTAVEGNMDSFMAQVKSLAQSLYPCSAQQLNEDLRLHLLLNTSVTCNDGSPAGYYLKESRGSRRWLLFLEGGWYCFNRENCDSRYDTMRRLMSSRDWPRTRTGTGILSSQPEENPYWWNANMVFIPYCSSDVWSGASSKSEKNEYAFMGALIIQEVVRELLGRGLSGAKVLLLAGSSAGGTGVLLNVDRVAEQLEKLGYPAIQVRGLADSGWFLDNKQYRHTDCVDTITCAPTEAIRRGIRYWNGVVPERCRRQFQEGEEWNCFFGYKVYPTLRCPVFVVQWLFDEAQLTVDNVHLTGQPVQEGLRLYIQNLGRELRHTLKDVPASFAPACLSHEIIIRSHWTDVQVKGTSLPRALHCWDRSLHDSHKASKTPLKGCPVHLVDSCPWPHCNPSCPTVRDQFTGQEMNVAQFLMHMGFDMQTVAQPQGLEPSELLGMLSNGS

SEQ ID NO: 9437 - protein, 197 aa, Homo Sapiens
MRRLMSSRDWPRTRTGTGILSSQPEENPYWWNANMVFIPYCSSDVWSGASSKSEKNEYAFMGALIIQEVVRELLGRGLSGAKVLLLAGSSAGGTGVLLNVDRVAEQLEKLGYPAIQVRGLADSGWFLDNKQYRHTDCVDTITCAPTEAIRRGIRYWNGVVPERCRRQFQEGEEWNCFFGYKVYPTLRCPVFVVQWLF

SEQ ID NO: 9438 - protein, 357 aa, Homo Sapiens
MQSVQSTSFCLRKQCLCLTFLLLHLLGQVAATQRCPPQCPGRCPATPPTCAPGVRAVLDGCSCCLVCARQRGESCSDLEPCDESSGLYCDRSADPSNQTGICTAVEGDNCVFDGVIYRSGEKFQPSCKFQCTCRDGQIGCVPRCQLDVLLPEPNCPAPRKVEVPGECCEKWICGPDEEDSLGGLTLAAYRPEATLGVEVSDSSVNCIEQTTEWTACSKSCGMGFSTRVTNRNRQCEMLKQTRLCMVRPCEQEPEQPTDKKGKKCLRTKKSLKAIHLQFKNCTSLHTYKPRFCGVCSDGRCCTPHNTKTIQAEFQCSPGQIVKKPVMVIGTCTCHTNCPKNNEAFLQELELKTTRGKM

SEQ ID NO: 9439 - protein, 125 aa, Homo Sapiens
MARSATLAAAALALCLLLAPPGLAWYKPAAGHSSYSVGRAAGLLSGLRRSPYARRSQPYRGAEPPGGAGASPELQLHPRLRSLAVCVQDVAPNLQRCERLPDGRGTYQCKANVFLSLRAADCLAA

SEQ ID NO: 9440 - protein, 156 aa, Homo Sapiens
MARSATLAAAALALCLLLAPPGLAWYKPAAGHSSYSVGRAAGLLSGLRRSPYARRSQPYRGAEPPGGAGASPELQLHPRLRSLVSPACRGLMGGGGRTWVGVRRPLSLCLPAPQAVCVQDVAPNLQRCERLPDGRGTYQCKANVFLSLRAADCLAA

SEQ ID NO: 9441 - protein, 53 aa, Homo Sapiens
GAQHRCPGRTGAVQGLRFCGWSYKGSECEPMPHPTLPAEQRTVLQRQCHLHQQ

SEQ ID NO: 9442 - protein, 201 aa, Homo Sapiens
MRFLAATFLLLALSTAAQAEPVQFKDCGSVDGVIKEVNVSPCPTQPCQLSKGQSYSVNVTFTSNIQSKSSKAVVHGILMGVPVPFPIPEPDGCKSGINCPIQKDKTYSYLNKLPVKSEYPSIKLVVEWQLQDDKNQSLFCWEIPVQIMFPCLFSAHCPMLATEHRCLQLQMETKSLRFWSRRGMSVWLPSPAGAWRRTAPF

SEQ ID NO: 9443 - protein, 151 aa, Homo Sapiens
MRFLAATFLLLALSTAAQAEPVQFKDCGSVDGVIKEVNVSPCPTQPCQLSKGQSYSVNVTFTSNIQSKSSKAVVHGILMGVPVPFPIPEPDGCKSGINCPIQKDKTYSYLNKLPVKSEYPSIKLVVEWQLQDDKNQSLFCWEIPVQIVSHL

SEQ ID NO: 9444 - protein, 174 aa, Homo Sapiens
MRFLAATFLLLALSTAAQAEPVQFKDCGSVDGVIKEVNVSPCPTQPCQLSKGQSYSVNVTFTSNIQSKSSKAVVHGILMGVPVPFPIPEPDGCKSGINCPIQKDKTYSYLNKLPVKSEYPSIKLVVEWQLQDDKNQSLFCWEIPVQIVSLSGGERAWVEGRKWRRNQTETKSVP

SEQ ID NO: 9445 - protein, 221 aa, Homo Sapiens
MRFLAATFLLLALSTAAQAEPVQFKDCGSVDGVIKEVNVSPCPTQPCQLSKGQSYSVNVTFTSNIQSKSSKAVVHGILMGVPVPFPIPEPDGCKSGINCPIQKDKTYSYLNKLPVKSEYPSIKLVVEWQLQDDKNQSLFCWEIPVQIVSLSGGFSSLSASLSSVHLANESAETLDSTSSSAASTTVTCSPMVSSDSLKRRCSVAETELRVAGSQWLSHVSF

SEQ ID NO: 9446 - protein, 148 aa, Homo Sapiens
MRFLAATFLLLALSTAAQAEPVQFKDCGSVDGVIKEVNVSPCPTQPCQLSKGQSYSVNVTFTSNIQSKSSKAVVHGILMGVPVPFPIPEPDGCKSGINCPIQKDKTYSYLNKLPVKSEYPSIKLVVEWQLQDDKNQSLFCWEIPVSHL

SEQ ID NO: 9447 - protein, 122 aa, Homo Sapiens
MRFLAATFLLLALSTAAQAEPVQFKDCGSVDGVIKEVNVSPCPTQPCQLSKGQSYSVNVTFTSNIQSKSSKAVVHGILMGVPVPFPIPEPDGCKSGINCPIQKDKTYSYLNKLPVKSEYPSV

SEQ ID NO: 9448 - protein, 125 aa, Homo Sapiens
MRFLAATFLLLALSTAAQAEPVQFKDCGSVDGVIKEVNVSPCPTQPCQLSKGQSYSVNVTFTSNIQSKSSKAVVHGILMGVPVPFPIPEPDGCKSGINCPIQKDKTYSYLNKLPVKSEYPSVSHL

SEQ ID NO: 9449 - protein, 173 aa, Homo Sapiens
  misc_feature (1)..(1): Xaa can be any naturally occurring amino acid
XPLRVRPPTWTQLSVRRICPSPASGLEDDASRRAWGPREAVRSLRAREEGSVDGVIKEVNVSPCPTQPCQLSKGQSYSVNVTFTSNIQSKSSKAVVHGILMGVPVPFPIPEPDGCKSGINCPIQKDKTYSYLNKLPVKSEYPSIKLVVEWQLQDDKNQSLFCWEIPVQIVSHL

SEQ ID NO: 9450 - protein, 113 aa, Homo Sapiens
MDSRQAAALLVLLLLIDGGCAEGPGGQQEDQLSAEEDSEPLPPQDAQTSGSLLHYLLQAMERPGRSQAFLFQPQRFGRNTQGSWRNEWLSPRAGEGLNSQFWSLAAPQRFGKK

SEQ ID NO: 9451 - protein, 423 aa, Homo Sapiens
MFIMNEKWDTNSSENWHPIWNVNDTKHHLYSDINITYVNYYLHQPQVAAIFIISYFLIFFLCMMGNTVVCFIVMRNKHMHTVTNLFILNLAISDLLVGIFCMPITLLDNIIAGWPFGNTMCKISGLVQGISVAASVFTLVAIAVDRFQCVVYPFKPKLTIKTAFVIIMIIWVLAITIMSPSAVMLHVQEEKYYRVRLNSQNKTSPVYWCREDWPNQEMRKIYTTVLFANIYLAPLSLIVIMYGRIGISLFRAAVPHTGRKNQEQWHVVSRKKQKIIKMLLIVALLFILSWLPLWTLMMLSDYADLSPNELQIINIYIYPFAHWLAFGNSSVNPIIYGFFNENFRRGFQEAFQLQLCQKRAKPMEAYALKAKSHVLINTSNQLVQESTFQNPHGETLLYRKSAEKPQQELVMEELKETTNSSEI

SEQ ID NO: 9452 - protein, 420 aa, Homo Sapiens
MNEKWDTNSSENWHPIWNVNDTKHHLYSDINITYVNYYLHQPQVAAIFIISYFLIFFLCMMGNTVVCFIVMRNKHMHTVTNLFILNLAISDLLVGIFCMPITLLDNIIAGWPFGNTMCKISGLVQGISVAASVFTLVAIAVDRFQCVVYPFKPKLTIKTAFVIIMIIWVLAITIMSPSAVMLHVQEEKYYRVRLNSQNKTSPVYWCREDWPNQEMRKIYTTVLFANIYLAPLSLIVIMYGRIGISLFRAAVPHTGRKNQEQWHVVSRKKQKIIKMLLIVALLFILSWLPLWTLMMLSDYADLSPNELQIINIYIYPFAHWLAFGNSSVNPIIYGFFNENFRRGFQEAFQLQLCQKRAKPMEAYALKAKSHVLINTSNQLVQESTFQNPHGETLLYRKSAEKPQQELVMEELKETTNSSEI

SEQ ID NO: 9453 - protein, 522 aa, Homo Sapiens
MNSFFGTPAASWCLLESDVSSAPDKEAGRERRALSVQQRGGPAWSGSLEWSRQSAGDRRRLGLSRQTAKSSWSRSRDRTCCCRRAWWILVPAADRARRERFIMNEKWDTNSSENWHPIWNVNDTKHHLYSDINITYVNYYLHQPQVAAIFIISYFLIFFLCMMGNTVVCFIVMRNKHMHTVTNLFILNLAISDLLVGIFCMPITLLDNIIAGWPFGNTMCKISGLVQGISVAASVFTLVAIAVDRFQCVVYPFKPKLTIKTAFVIIMIIWVLAITIMSPSAVMLHVQEEKYYRVRLNSQNKTSPVYWCREDWPNQEMRKIYTTVLFANIYLAPLSLIVIMYGRIGISLFRAAVPHTGRKNQEQWHVVSRKKQKIIKMLLIVALLFILSWLPLWTLMMLSDYADLSPNELQIINIYIYPFAHWLAFGNSSVNPIIYGFFNENFRRGFQEAFQLQLCQKRAKPMEAYALKAKSHVLINTSNQLVQESTFQNPHGETLLYRKSAEKPQQELVMEELKETTNSSEI

SEQ ID NO: 9454 - protein, 132 aa, Homo Sapiens
MNSFFGTPAASWCLLESDVSSAPDKEAGRERRALSVQQRGGPAWSGSLEWSRQSAGDRRRLGLSRQTAKSSWSRSRDRTCCCRRAWWILVPAADRARRERMAIWKHDVQDQWIGPGNICRSFSLYVSCNCCR

SEQ ID NO: 9455 - protein, 1201 aa, Homo Sapiens
MALGTTLRASLLLLGLLTEGLAQLAIPASVPRGFWALPENLTVVEGASVELRCGVSTPGSAVQWAKDGLLLGPDPRIPGFPRYRLEGDPARGEFHLHIEACDLSDDAEYECQVGRSEMGPELVSPRVILSILVPPKLLLLTPEAGTMVTWVAGQEYVVNCVSGDAKPAPDITILLSGQTISDISANVNEGSQQKLFTVEATARVTPRSSDNRQLLVCEASSPALEAPIKASFTVNVLFPPGPPVIEWPGLDEGHVRAGQSLELPCVARGGNPLATLQWLKNGQPVSTAWGTEHTQAVARSVLVMTVRPEDHGAQLSCEAHNSVSAGTQEHGITLQVTFPPSAIIILGSASQTENKNVTLSCVSKSSRPRVLLRWWLGWRQLLPMEETVMDGLHGGHISMSNLTFLARREDNGLTLTCEAFSEAFTKETFKKSLILNVKYPAQKLWIEGPPEGQKLRAGTRVRLVCLAIGGNPEPSLMWYKDSRTVTESRLPQESRRVHLGSVEKSGSTFSRELVLVTGPSDNQAKFTCKAGQLSASTQLAVQFPPTNVTILANASALRPGDALNLTCVSVSSNPPVNLSWDKEGERLEGVAAPPRRAPFKGSAAARSVLLQVSSRDHGQRVTCRAHSAELRETVSSFYRLNVLYRPEFLGEQVLVVTAVEQGEALLPVSVSANPAPEAFNWTFRGYRLSPAGGPRHRILSSGALHLWNVTRADDGLYQLHCQNSEGTAEARLRLDVHYAPTIRALQDPTEVNVGGSVDIVCTVDANPILPGMFNWERLGEDEEDQSLDDMEKISRGPTGRLRIHHAKLAQAGAYQCIVDNGVAPPARRLLRLVVRFAPQVEHPTPLTKVAAAGDSTSSATLHCRARGVPNIVFTWTKNGVPLDLQDPRYTEHTYHQGGVHSSLLTIANVSAAQDYALFTCTATNALGSDQTNIQLVSISRPDPPSGLKVVSLTPHSVGLEWKPGFDGGLPQRFCIRYEALGTPGFHYVDVVPPQATTFTLTGLQPSTRYRVWLLASNALGDSGLADKGTQLPITTPGLHQPSGEPEDQLPTEPPSGISEKTEAGSEEDRVRNEYEESQWTGERDTQSSTVSTTEAEPYYRSLRDFSPQLPPTQEEVSYSRGFTGEDEDMAFPGHLYDEVERTYPPSGAWGPLYDEVQMGPWDLHWPEDTYQDPRGIYDQVAGDLDTLEPDSLPFELRGHLV

SEQ ID NO: 9456 - protein, 1241 aa, Homo Sapiens
MALGTTLRASLLLLGLLTEGLAQLAIPASVPRGFWALPENLTVVEGASVELRCGVSTPGSAVQWAKDGLLLGPDPRIPGFPRYRLEGDPARGEFHLHIEACDLSDDAEYECQVGRSEMGPELVSPRVILSILVPPKLLLLTPEAGTMVTWVAGQEYVVNCVSGDAKPAPDITILLSGQTISDISANVNEGSQQKLFTVEATARVTPRSSDNRQLLVCEASSPALEAPIKASFTVNVLFPPGPPVIEWPGLDEGHVRAGQSLELPCVARGGNPLATLQWLKNGQPVSTAWGTEHTQAVARSVLVMTVRPEDHGAQLSCEAHNSVSAGTQEHGITLQVTFPPSAIIILGSASQTENKNVTLSCVSKSSRPRVLLRWWLGWRQLLPMEETVMDGLHGGHISMSNLTFLARREDNGLTLTCEAFSEAFTKETFKKSLILNVKYPAQKLWIEGPPEGQKLRAGTRVRLVCLAIGGNPEPSLMWYKDSRTVTESRLPQESRRVHLGSVEKSGSTFSRELVLVTGPSDNQAKFTCKAGQLSASTQLAVQFPPTNVTILANASALRPGDALNLTCVSVSSNPPVNLSWDKEGERLEGVAAPPRRAPFKGSAAARSVLLQVSSRDHGQRVTCRAHSAELRETVSSFYRLNVLYRPEFLGEQVLVVTAVEQGEALLPVSVSANPAPEAFNWTFRGYRLSPAGGPRHRILSSGALHLWNVTRADDGLYQLHCQNSEGTAEARLRLDVHYAPTIRALQDPTEVNVGGSVDIVCTVDANPILPGMFNWERLGEDEEDQSLDDMEKISRGPTGRLRIHHAKLAQAGAYQCIVDNGVAPPARRLLRLVVRFAPQVEHPTPLTKVAAAGDSTSSATLHCRARGVPNIVFTWTKNGVPLDLQDPRYTEHTYHQGGVHSSLLTIANVSAAQDYALFTCTATNALGSDQTNIQLVSISRPDPPSGLKVVSLTPHSVGLEWKPGFDGGLPQRFCIRYEALGTPGFHYVDVVPPQATTFTLTGLQPSTRYRVWLLASNALGDSGLADKGTQLPITTPGLHQPSGEPEDQLPTEPPSGPSGLPLLPVLFALGGLLLLSNASCVGGVLWQRRLRRLAEGISEKTEAGSEEDRVRNEYEESQWTGERDTQSSTVSTTEAEPYYRSLRDFSPQLPPTQEEVSYSRGFTGEDEDMAFPGHLYDEVERTYPPSGAWGPLYDEVQMGPWDLHWPEDTYQDPRGIYDQVAGDLDTLEPDSLPFELRGHLV

SEQ ID NO: 9457 - protein, 609 aa, Homo Sapiens
MDFLLALVLVSSLYLQAAAEFDGRWPRQIVSSIGLCRYGGRIDCCWGWARQSWGQCQPFYVLRQRIARIRCQLKAVCQPRCKHGECIGPNKCKCHPGYAGKTCNQDEHIPAPLDQGSEQPLFQPLDHQATSLPSRDLNECGLKPRPCKHRCMNTYGSYKCYCLNGYMLMPDGSCSSALTCSMANCQYGCDVVKGQIRCQCPSPGLQLAPDGRTCVDVDECATGRASCPRFRQCVNTFGSYICKCHKGFDLMYIGGKYQCHDIDECSLGQYQCSSFARCYNIRGSYKCKCKEGYQGDGLTCVYIPKVMIEPSGPIHVPKGNGTILKGDTGNNNWIPDVGSTWWPPKTPYIPPIITNRPTSKPTTRPTPKPTPIPTPPPPPPLPTELRTPLPPTTPERPTTGLTTIAPAASTPPGGITVDNRVQTDPQKPRGDVFIPRQPSNDLFEIFEIERGVSADDEAKDDPGVLVHSCNFDHGLCGWIREKDNDLHWEPIRDPAGGQYLTVSAAKAPGGKAARLVLPLGRLMHSGDLCLSFRHKVTGLHSGTLQVFVRKHGAHGAALWGRNGGHGWRQTQITLRGADIKSVVFKGEKRRGHTGEIGLDDVSLKKGHCS

SEQ ID NO: 9458 - protein, 582 aa, Homo Sapiens
MDFLLALVLVSSLYLQAAAEFDGRWPRQIVSSIGLCRYGGRIDCCWGWARQSWGQCQPFYVLRQRIARIRCQLKAVCQPRCKHGECIGPNKCKCHPGYAGKTCNQDLNECGLKPRPCKHRCMNTYGSYKCYCLNGYMLMPDGSCSSALTCSMANCQYGCDVVKGQIRCQCPSPGLQLAPDGRTCVDVDECATGRASCPRFRQCVNTFGSYICKCHKGFDLMYIGGKYQCHDIDECSLGQYQCSSFARCYNIRGSYKCKCKEGYQGDGLTCVYIPKVMIEPSGPIHVPKGNGTILKGDTGNNNWIPDVGSTWWPPKTPYIPPIITNRPTSKPTTRPTPKPTPIPTPPPPPPLPTELRTPLPPTTPERPTTGLTTIAPAASTPPGGITVDNRVQTDPQKPRGDVFIPRQPSNDLFEIFEIERGVSADDEAKDDPGVLVHSCNFDHGLCGWIREKDNDLHWEPIRDPAGGQYLTVSAAKAPGGKAARLVLPLGRLMHSGDLCLSFRHKVTGLHSGTLQVFVRKHGAHGAALWGRNGGHGWRQTQITLRGADIKSVVFKGEKRRGHTGEIGLDDVSLKKGHCSEER

SEQ ID NO: 9459 - protein, 595 aa, Homo Sapiens
MDFLLALVLVSSLYLQAAAEFDGRWPRQIVSSIGLCRYGGRIDCCWGWARQSWGQCQPVCQPRCKHGECIGPNKCKCHPGYAGKTCNQDEHIPAPLDQGSEQPLFQPLDHQATSLPSRDLNECGLKPRPCKHRCMNTYGSYKCYCLNGYMLMPDGSCSSALTCSMANCQYGCDVVKGQIRCQCPSPGLQLAPDGRTCVDVDECATGRASCPRFRQCVNTFGSYICKCHKGFDLMYIGGKYQCHDIDECSLGQYQCSSFARCYNIRGSYKCKCKEGYQGDGLTCVYIPKVMIEPSGPIHVPKGNGTILKGDTGNNNWIPDVGSTWWPPKTPYIPPIITNRPTSKPTTRPTPKPTPIPTPPPPPPLPTELRTPLPPTTPERPTTGLTTIAPAASTPPGGITVDNRVQTDPQKPRGDVFIPRQPSNDLFEIFEIERGVSADDEAKDDPGVLVHSCNFDHGLCGWIREKDNDLHWEPIRDPAGGQYLTVSAAKAPGGKAARLVLPLGRLMHSGDLCLSFRHKVTGLHSGTLQVFVRKHGAHGAALWGRNGGHGWRQTQITLRGADIKSVVFKGEKRRGHTGEIGLDDVSLKKGHCSEER

SEQ ID NO: 9460 - protein, 566 aa, Homo Sapiens
MDFLLALVLVSSLYLQAAAEFDGRWPRQIVSSIGLCRYGGRIDCCWGWARQSWGQCQPVCQPRCKHGECIGPNKCKCHPGYAGKTCNQDEHIPAPLDQGSEQPLFQPLDHQATSLPSRDLNECGLKPRPCKHRCMNTYGSYKCYCLNGYMLMPDGSCSSALTCSMANCQYGCDVVKGQIRCQCPSPGLQLAPDGRTCVDVDECATGRASCPRFRQCVNTFGSYICKCHKGFDLMYIGGKYQCHDIDECSLGQYQCSSFARCYNIRGSYKCKCKEGYQGDGLTCVYIPKVMIEPSGPIHVPKGNGTILKGDTGNNNWIPDVGSTWWPPKTPYIPPIITNRPTSKPTTRPTPKPTPIPTPPPPPPLPTELRTPLPPTTPERPTTGLTTIAPAASTPPGGITVDNRVQTDPQKPRGDVFSVLVHSCNFDHGLCGWIREKDNDLHWEPIRDPAGGQYLTVSAAKAPGGKAARLVLPLGRLMHSGDLCLSFRHKVTGLHSGTLQVFVRKHGAHGAALWGRNGGHGWRQTQITLRGADIKSVVFKGEKRRGHTGEIGLDDVSLKKGHCSEER

SEQ ID NO: 9461 - protein, 509 aa, Homo Sapiens
MDFLLALVLVSSLYLQAAAEFDGRWPRQIVSSIGLCRYGGRIDCCWGWARQSWGQCQPVCQPRCKHGECIGPNKCKCHPGYAGKTCNQDLNECGLKPRPCKHRCMNTYGSYKCYCLNGYMLMPDGSCSSALTCSMANCQYGCDVVKGQIRCQCPSPGLQLAPDGRTCVDVDECATGRASCPRFRQCVNTFGSYICKCHKGFDLMYIGGKYQCHDIDECSLGQYQCSSFARCYNIRGSYKCKCKEGYQGDGLTCVYIPKVMIEPSGPIHVPKGNGTILKGDTGNNNWIPDVGSTWWPPKTPYIPPIITNRPTSKPTTRPTPKPTPIPTPPPPPPLPTELRTPLPPTTPERPTTGLTTIAPAASTPPGGITVDNRVQTDPQKPRGDVFSVLVHSCNFDHGLCGWIREKDNDLHWEPIRDPAGGQYLTVSAAKAPGGKAARLVLPLGRLMHSGDLCLSFRHKVTGLHSGTLQVFVRKHGAHGAALWGRNGGHGWRQTQITLRGADIKSESQR

SEQ ID NO: 9462 - protein, 565 aa, Homo Sapiens
MDFLLALVLVSSLYLQAAAEFDGRWPRQIVSSIGLCRYGGRIDCCWGWARQSWGQCQPVCQPRCKHGECIGPNKCKCHPGYAGKTCNQDLNECGLKPRPCKHRCMNTYGSYKCYCLNGYMLMPDGSCSSALTCSMANCQYGCDVVKGQIRCQCPSPGLQLAPDGRTCVDVDECATGRASCPRFRQCVNTFGSYICKCHKGFDLMYIGGKYQCHDIDECSLGQYQCSSFARCYNIRGSYKCKCKEGYQGDGLTCVYIPKVMIEPSGPIHVPKGNGTILKGDTGNNNWIPDVGSTWWPPKTPYIPPIITNRPTSKPTTRPTPKPTPIPTPPPPPPLPTELRTPLPPTTPERPTTGLTTIAPAASTPPGGITVDNRVQTDPQKPRGDVFIPRQPSNDLFEIFEIERGVSADDEAKDDPGVLVHSCNFDHGLCGWIREKDNDLHWEPIRDPAGGQYLTVSAAKAPGGKAARLVLPLGRLMHSGDLCLSFRHKVTGLHSGTLQVFVRKHGAHGAALWGRNGGHGWRQTQITLRGADIKSVVFKGEKRRGHTGEIGLDDVSLKKGHCSEER

SEQ ID NO: 9463 - protein, 536 aa, Homo Sapiens
MDFLLALVLVSSLYLQAAAEFDGRWPRQIVSSIGLCRYGGRIDCCWGWARQSWGQCQPVCQPRCKHGECIGPNKCKCHPGYAGKTCNQDLNECGLKPRPCKHRCMNTYGSYKCYCLNGYMLMPDGSCSSALTCSMANCQYGCDVVKGQIRCQCPSPGLQLAPDGRTCVDVDECATGRASCPRFRQCVNTFGSYICKCHKGFDLMYIGGKYQCHDIDECSLGQYQCSSFARCYNIRGSYKCKCKEGYQGDGLTCVYIPKVMIEPSGPIHVPKGNGTILKGDTGNNNWIPDVGSTWWPPKTPYIPPIITNRPTSKPTTRPTPKPTPIPTPPPPPPLPTELRTPLPPTTPERPTTGLTTIAPAASTPPGGITVDNRVQTDPQKPRGDVFSVLVHSCNFDHGLCGWIREKDNDLHWEPIRDPAGGQYLTVSAAKAPGGKAARLVLPLGRLMHSGDLCLSFRHKVTGLHSGTLQVFVRKHGAHGAALWGRNGGHGWRQTQITLRGADIKSVVFKGEKRRGHTGEIGLDDVSLKKGHCSEER

SEQ ID NO: 9464 - protein, 61 aa, Homo Sapiens
MNTYGSYKCYCLNGYMLMPDGSCSSALTCSMANCQYGCDVVKGQIRCQCPSPGLQLAPDGR

SEQ ID NO: 9465 - protein, 104 aa, Homo Sapiens
  misc_feature (1)..(1): Xaa can be any naturally occurring amino acid
XGLCGWIREKDNDLHWEPIRDPAGITKMIKGLEKKIYDGKLKELGLLSLEKRRLRGKPLMVFKYMKGWHREGGDQLFSICTKNRTRGNWLRLEYKGAFLGRGHC

SEQ ID NO: 9466 - protein, 26 aa, Homo Sapiens
  misc_feature (1)..(1): Xaa can be any naturally occurring amino acid
XNDLHWEPIRDPADNCSCLHAGGLDL

SEQ ID NO: 9467 - protein, 453 aa, Homo Sapiens
  misc_feature (1)..(1): Xaa can be any naturally occurring amino acid
XWPRQIVSSIGLCRYGGRIDCCWGWARQSWGQCQPVCQPRCKHGECIGPNKCKCHPGYAGKTCNQDLNECGLKPRPCKHRCMNTYGSYKCYCLNGYMLMPDGSCSSALTCSMANCQYGCDVVKGQIRCQCPSPGLQLAPDGRTCVDVDECATGRASCPRFRQCVNTFGSYICKCHKGFDLMYIGGKYQCHDIDECSLGQYQCSSFARCYNIRGSYKCKCKEGYQGDGLTCVYIPKVMIEPSGPIHVPKGNGTILKGDTGNNNWIPDVGSTWWPPKTPYIPPIITNRPTSKPTTRPTPKPTPIPTPPPPPPLPTELRTPLPPTTPERPTTGLTTIAPAASTPPGGITVDNRVQTDPQKPRGDVFIPRQPSNDLFEIFEIERGVSADDEAKDDPGVLVHSCNFDHGLCGWIREKDNDLHWEPIRDPAEILQGTQFREIFIGCILSASCVTSYLGC

SEQ ID NO: 9468 - protein, 101 aa, Homo Sapiens
MPLEDEVVPPQVLSEPNEEAGAALSPLPEVPPWTGEVSPAQRDGGALGRGPWDSSDRSALLKSKLRALLTAPRSLRRSSCFGGRMDRIGAQSGLGCNSFRY

SEQ ID NO: 9469 - protein, 151 aa, Homo Sapiens
MSSFSTTTVSFLLLLAFQLLGQTRANPMYNAVSNADLMDFKNLLDHLEEKMPLEDEVVPPQVLSEPNEEAGAALSPLPEVPPWTGEVSPAQRDGGALGRGPWDSSDRSALLKSKLRALLTAPRSLRRSSCFGGRMDRIGAQSGLGCNSFRY

SEQ ID NO: 9470 - protein, 152 aa, Homo Sapiens [sequence omitted]

SEQ ID NO: 9471 - protein, 134 aa, Homo Sapiens
MDPQTAPSRALLLLLFLHLAFLGGRSHPLGSPGSASDLETSGLQEQRNHLQGKLSELQVEQTSLEPLQESPRPTGVWKSREVATEGIRGHRKMVLYTLRAPRSPKMVQGSGCFGRKMDRISSSSGLGCKVLRRH

SEQ ID NO: 9472 - protein, 126 aa, Homo Sapiens
MHLSQLLACALLLTLLSLRPSEAKPGAPPKVPRTPPAEELAEPQAAGGGQKKGDKAPGGGGANLKGDRSRLLRDLRVDTKSRAAWARLLQEHPNARKYKGANKKGLSKGCFGLKLDRIGSMSGLGC

SEQ ID NO: 9473 - protein, 126 aa, Homo Sapiens; identical to SEQ ID NO: 9472

SEQ ID NO: 9474 - protein, 89 aa, Homo Sapiens
MISSVKLNLILVLSLSTMHVFWCYPVPSSKVSGKSDYFLILLNSCPTRLDRSKELAFLKPILEKMFVKRSFRNGVGTGMKKTSFQRAKS

SEQ ID NO: 9475 - protein, 432 aa, Homo Sapiens
MPAGRAARTCALLALCLLGAGAQDFGPTRFICTSVPVDADMCAASVAAGGAEELRSSVLQLRETVLQQKETILSQKETIRELTAKLGRCESQSTLDPGAGEARAGGGRKQPGSGKNTMGDLSRTPAAETLSQLGQTLQSLKTRLENLEQYSRLNSSSQTNSLKDLLQSKIDELERQVLSRVNTLEEGKGGPRNDTEERVKIETALTSLHQRISELEKGQKDNRPGDKFQLTFPLRTNYMYAKVKKSLPEMYAFTVCMWLKSSATPGVGTPFSYAVPGQANELVLIEWGNNPMEILINDKVAKLPFVINDGKWHHICVTWTTRDGVWEAYQDGTQGGSGENLAPYHPIKPQGVLVLGQEQDTLGGGFDATQAFVGELAHFNIWDRKLTPGEVYNLATCSTKALSGNVIAWAESHIEIYGGATKWTFEACRQIN

SEQ ID NO: 9476 - protein, 431 aa, Homo Sapiens
MLALLAASVALAVAAGAQDSPAPGSRFVCTALPPEAVHAGCPLPAMPMQGGAQSPEEELRAAVLQLRETVVQQKETLGAQREAIRELTGKLARCEGLAGGKARGAGATGKDTMGDLPRDPGHVVEQLSRSLQTLKDRLESLEHQLRANVSNAGLPGDFREVLQQRLGELERQLLRKVAELEDEKSLLHNETSAHRQKTESTLNALLQRVTELERGNSAFKSPDAFKVSLPLRTNYLYGKIKKTLPELYAFTICLWLRSSASPGIGTPFSYAVPGQANEIVLIEWGNNPIELLINDKVAQLPLFVSDGKWHHICVTWTTRDGMWEAFQDGEKLGTGENLAPWHPIKPGGVLILGQEQDTVGGRFDATQAFVGELSQFNIWDRVLRAQEIVNIANCSTNMPGNIIPWVDNNVDVFGGASKWPVETCEERLLDL

SEQ ID NO: 9477 - protein, 500 aa, Homo Sapiens
LKFLAVLLAAGMLAFLGAVICIIASVPLAASPARALPGGADNASVASGAAASPGPQRSLSALHGAGGSAGPPALPGAPAASAHPLPPGPLFSRFLCTPLAAACPSGAQQGDAAGAAPGEREELLLLQSTAEQLRQTALQQEARIRADQDTIRELTGKLGRCESGLPRGLQGAGPRRDTMADGPWDSPALILELEDAVRALRDRIDRLEQELPARVNLSAAPAPVSAVPTGLHSKMDQLEGQLLAQVLALEKERVALSHSSRRQRQEVEKELDVLQGRVAELEHGSSAYSPPDAFKISIPIRNNYMYARVRKALPELYAFTACMWLRSRSSGTGQGTPFSYSVPGQANEIVLLEAGHEPMELLINDKVAQLPLSLKDNGWHHICIAWTTRDGLWSAYQDGELQGSGENLAAWHPIKPHGILILGQEQDTLGGRFDATQAFVGDIAQFNLWDHALTPAQVLGIANCTAPLLGNVLPWEDKLVEAFGGATKAAFDVCKGRAKA

SEQ ID NO: 9478 - protein, 500 aa, Homo Sapiens; identical to SEQ ID NO: 9477

SEQ ID NO: 9479 - protein, 196 aa, Homo Sapiens
MEIISSKLFILLTLATSSLLTSNIFCADELVMSNLHSKENYDKYSEPRGYPKGERSLNFEELKDWGPKNVIKMSTPAVNKMPHSFANLPLRFGRNVQEERSAGATANLPLRSGRNMEVSLVRRVPNLPQRFGRTTTAKSVCRMLSDLCQGSMHSPCANDLFYSMTCQHQEIQNPDQKQSRRLLFKKIDDAELKQEK

SEQ ID NO: 9480 - protein, 165 aa, Homo Sapiens
LAWRPGERGAPASRPRLALLLLLLLLPLPSGAWYKHVASPRYHTVGRAAGLLMGLRRSPYLWRRALRAAAGPLARDTLSPEPAAREAPLLLPSWVQELWETRRRSSQAGIPVRAPRSPRAPEPALEPESLDFSGAGQRLRRDVSRPAVDPAANRLGLPCLAPGPF

SEQ ID NO: 9481 - protein, 113 aa, Homo Sapiens
MGLRRSPYLWRRALRAAAGPLARDTLSPEPAAREAPLLLPSWVQELWETRRRSSQAGIPVRAPRSPRAPEPALEPESLDFSGAGQRLRRDVSRPAVDPAANRLGLPCLAPGPF

SEQ ID NO: 9482 - protein, 128 aa, Homo Sapiens
MSRPLEGPRGHAASPGLLWATRVTSTLAGLHELALSDETRHNWFASQMNKGSCLSPARLLSCCPRGFRSCGRRDAGAPRQGSPSVRPGARAPQSLRWNRSPWTSAELARDFGETSPAQRWTPQQTALA

SEQ ID NO: 9483 - protein, 97 aa, Homo Sapiens
MLGNKRLGLSGLTLALSLLVCLGALAEAYPSKPDNPGEDAPAEDMARYYSALRHYINLITRQRYGKRSSPETLISDLLMRESTENVPRTRLEDPAMW

SEQ ID NO: 9484 - protein, 97 aa, Homo Sapiens; identical to SEQ ID NO: 9483

SEQ ID NO: 9485 - protein, 97 aa, Homo Sapiens; identical to SEQ ID NO: 9483

SEQ ID NO: 9486 - protein, 35 aa, Homo Sapiens
MAEFRFLKSGALPILSLLCLQALKFSLGCSRGSSE

SEQ ID NO: 9487 - protein, 63 aa, Homo Sapiens
MAGKKVLIVYAHQEPKSFNGSLKNVAVDELSRQGCTVTVSDLYAMNLEPRATDKDITGTLSNP

SEQ ID NO: 9488 - protein, 139 aa, Homo Sapiens
MAGKKVLIVYAHQEPKSFNGSLKNVAVDELSRQGCTVTVSDLYAMNLEPRATDKDITGTLSNPEVFNYGVETHEAYKQRSLASDITDEQKKVREADLVIFQFPLYWFSVPAILKGWMDRVLCQGFAFDIPGFYDSGLLQ

SEQ ID NO: 9489 - protein, 139 aa, Homo Sapiens; identical to SEQ ID NO: 9488

SEQ ID NO: 9490 - protein, 231 aa, Homo Sapiens
MAGKKVLIVYAHQEPKSFNGSLKNVAVDELSRQGCTVTVSDLYAMNLEPRATDKDITGTLSNPEVFNYGVETHEAYKQRSLASDITDEQKKVREADLVIFQFPLYWFSVPAILKGWMDRVLCQGFAFDIPGFYDSGLLQGKLALLSVTTGGTAEMYTKTGVNGDSRYFLWPLQHGTLHFCGFKVLAPQISFAPEIASEEERKGMVAAWSQRLQTIWKEEPIPCTAHWHFGQ

SEQ ID NO: 9491 - protein, 231 aa, Homo Sapiens; identical to SEQ ID NO: 9490

SEQ ID NO: 9492 - protein, 231 aa, Homo Sapiens; identical to SEQ ID NO: 9490

SEQ ID NO: 9493 - protein, 193 aa, Homo Sapiens
MAGKKVLIVYAHQEPKSFNGSLKNVAVDELSRQGCTVTVSDLYAMNLEPRATDKDITGTLSNPEVFNYGVETHEAYKQRSLASDITDEQKKVREADLVIFQGKLALLSVTTGGTAEMYTKTGVNGDSRYFLWPLQHGTLHFCGFKVLAPQISFAPEIASEEERKGMVAAWSQRLQTIWKEEPIPCTAHWHFGQ

SEQ ID NO: 9494 - protein, 193 aa, Homo Sapiens; identical to SEQ ID NO: 9493

SEQ ID NO: 9495 - protein, 1299 aa, Homo Sapiens
MPKKKRLSAGRVPLILFLCQMISALEVPLDPKLLEDLVQPPTITQQSPKDYIIDPRENIVIQCEAKGKPPPSFSWTRNGTHFDIDKDPLVTMKPGTGTLIINIMSEGKAETYEGVYQCTARNERGAAVSNNIVVRPSRSPLWTKEKLEPITLQSGQSLVLPCRPPIGLPPPIIFWMDNSFQRLPQSERVSQGLNGDLYFSNVLPEDTREDYICYARFNHTQTIQQKQPISVKVISVDELNDTIAANLSDTEFYGAKSSRERPPTFLTPEGNASNKEELRGNVLSLECIAEGLPTPIIYWAKEDGMLPKNRTVYKNFEKTLQIIHVSEADSGNYQCIAKNALGAIHHTISVRVKAAPYWITAPQNLVLSPGEDGTLICRANGNPKPRISWLTNGVPIEIAPDDPSRKIDGDTIIFSNVQERSSAVYQCNASNEYGYLLANAFVNVLAEPPRILTPANTLYQVIANRPALLDCAFFGSPLPTIEWFKGAKGSALHEDIYVLHENGTLEIPVAQKDSTGTYTCVARNKLGMAKNEVHLEIKDPTWIVKQPEYAVVQRGSMVSFECKVKHDHTLSLTVLWLKDNRELPSDERFTVDKDHLVVADVSDDDSGTYTCVANTTLDSVSASAVLSVVAPTPTPAPVYDVPNPPFDLELTDQLDKSVQLSWTPGDDNNSPITRIHHEYEDAMHKPGLWHHQTEVSGTQTTAQLKLSPYVNYSFRVMAVNSIGKSLPSEASEQYLTKASEPDKNPTAVEGLGSEPDNLVITWKPLNGFESNGPGLQYKVSWRQKDGDDEWTSVVVANVSKYIVSGTPTFVPYLIKVQALNDMGFAPEPAVVMGHSGEDLPMVAPGNVRVNVVNSTLAEVHWDPVPLKSIRGHLQGYRIYYWKTQSSSKRNRRHIEKKILTFQGSKTHGMLPGLEPFSHYTLNVRVVNGKGEGPASPDRVFNTPEGVPSAPSSLKIVNPTLDSLTLEWDPPSHPNGILTEYTLKYQPINSTHELGPLVDLKIPANKTRWTLKNLNFSTRYKFYFYAQTSAGSGSQITEEAVTTVDEAGILPPDVGAGKVQAVNPRISNLTAAAAETYANISWEYEGPEHVNFYVEYGVAGSKEEWRKEIVNGSRSFFGLKGLMPGTAYKVRVGAVGDSGFVSSEDVFETGPAMASRQVDIATQGWFIGLMCAVALLILILLIVCFIRRNKGGKYPVKEKEDAHADPEIQPMKEDDGTFGEYSDAEDHKPLKKGSRTPSDRTVKKEDSDDSLVDYGEGVNGQFNEDGSFIGQYSGKKEKEPAEGNESSEAPSPVNAMNSFV

SEQ ID NO: 9496 - protein, 106 aa, Homo Sapiens
MQLKIMPKKKRLSAGRVPLILFLCQMISALEVPLDLVQPPTITQQSPKDYIIDPRENIVIQCEAKGKPPPSFSWTRNGTHFDIDKDPLVTMKPGTGTLIINIMSEG

SEQ ID NO: 9497 - protein, 106 aa, Homo Sapiens; identical to SEQ ID NO: 9496

SEQ ID NO: 9498 - protein, 1183 aa, Homo Sapiens
MQLKIMPKKKRLSAGRVPLILFLCQMISALEVPLDLVQPPTITQQSPKDYIIDPRENIVIQCEAKGKPPPSFSWTRNGTHFDIDKDPLVTMKPGTGTLIINIMSEGKAETYEGVYQCTARNERGAAVSNNIVVRPSRSPLWTKEKLEPITLQSGQSLVLPCRPPIGLPPPIIFWMDNSFQRLPQSERVSQGLNGDLYFSNVLPEDTREDYICYARFNHTQTIQQKQPISVKVISVDELNDTIAANLSDTEFYGAKSSRERPPTFLTPEGNASNKEELRGNVLSLECIAEGLPTPIIYWAKEDGMLPKNRTVYKNFEKTLQIIHVSEADSGNYQCIAKNALGAIHHTISVRVKAAPYWITAPQNLVLSPGEDGTLICRANGNPKPRISWLTNGVPIEIAPDDPSRKIDGDTIIFSNVQERSSAVYQCNASNEYGYLLANAFVNVLAEPPRILTPANTLYQVIANRPALLDCAFFGSPLPTIEWFKGAKGSALHEDIYVLHENGTLEIPVAQKDSTGTYTCVARNKLGMAKNEVHLEIKDPTWIVKQPEYAVVQRGSMVSFECKVKHDHTLSLTVLWLKDNRELPSDERFTVDKDHLVVADVSDDDSGTYTCVANTTLDSVSASAVLSVVDVPNPPFDLELTDQLDKSVQLSWTPGDDNNSPITKFIIEYEDAMHKPGLWHHQTEVSGTQTTAQLKLSPYVNYSFRVMAVNSIGKSLPSEASEQYLTKASEPDKNPTAVEGLGSEPDNLVITWKPLNGFESNGPGLQYKVSWRQKDGDDEWTSVVVANVSKYIVSGTPTFVPYLIKVQALNDMGFAPEPAVVMGHSGEDLPMVAPGNVRVNVVNSTLAEVHWDPVPLKSIRGHLQGYRIYYWKTQSSSKRNRRHIEKKILTFQGSKTHGMLPGLEPFSHYTLNVRVVNGKGEGPASPDRVFNTPEGVPSAPSSLKIVNPTLDSLTLEWDPPSHPNGILTEYTLKYQPINSTHELGPLVDLKIPANKTRWTLKNLNFSTRYKFYFYAQTSAGSGSQITEEAVTTVDEAMASRQVDIATQGWFIGLMCAVALLILILLIVCFIRRNKGGKYPVKEKEDAHADPEIQPMKEDDGTFGEYSDAEDHKPLKKGSRTPSDRTVKKEDSDDSLVDYGEGVNGQFNEDGSFIGQYSGKKEKEPAEGNESSEAPSPVNAMNSFV

SEQ ID NO: 9499 - protein, 431 aa, Homo Sapiens
MQLKIMPKKKRLSAGRVPLILFLCQMISALEVPLDLVQPPTITQQSPKDYIIDPRENIVIQCEAKGKPPPSFSWTRNGTHFDIDKDPLVTMKPGTGTLIINIMSEGKAETYEGVYQCTARNERGAAVSNNIVVRPSRSPLWTKEKLEPITLQSGQSLVLPCRPPIGLPPPIIFWMDNSFQRLPQSERVSQGLNGDLYFSNVLPEDTREDYICYARFNHTQTIQQKQPISVKVISVDELNDTIAANLSDTEFYGAKSSRERPPTFLTPEGNASNKEELRGNVLSLECIAEGLPTPIIYWAKEDGMLPKNRTVYKNFEKTLQIIHVSEADSGNYQCIAKNALGAIHHTISVRVKAAPYWITAPQNLVLSPGEDGTLICRANGNPKPRISWLTNGVPIEIAPDDPSRKIDGDTIIFSNVQERSSAVYQCNASNE

SEQ ID NO: 9500 - protein, 771 aa, Homo Sapiens [sequence omitted]

SEQ ID NO: 9501 - protein, 61 aa, Homo Sapiens
MQLKIMPKKKRLSAGRVPLILFLCQMISALEVPLDPKLLEDLVQPPTITQQSPKDYIIDPR

SEQ ID NO: 9502 - protein, 118 aa, Homo Sapiens
MQLKIMPKKKRLSAGRVPLILFLCQMISALEVPLDPKLLEDLVQPPTITQQSPKDYIIDPRENIVIQCEAKGKPPPSFSWTRNGTHFDIDKDPLVTMKPGTGTLIINIMSEGKAETYE

SEQ ID NO: 9503 - protein, 1192 aa, Homo Sapiens
MQLKIMPKKKRLSAGRVPLILFLCQMISALEVPLDPKLLEDLVQPPTITQQSPKDYIIDPRENIVIQCEAKGKPPPSFSWTRNGTHFDIDKDPLVTMKPGTGTLIINIMSEGKAETYEGVYQCTARNERGAAVSNNIVVRPSRSPLWTKEKLEPITLQSGQSLVLPCRPPIGLPPPIIFWMDNSFQRLPQSERVSQGLNGDLYFSNVLPEDTREDYICYARFNHTQTIQQKQPISVKVISAKSSRERPPTFLTPEGNASNKEELRGNVLSLECIAEGLPTPIIYWAKEDGMLPKNRTVYKNFEKTLQIIHVSEADSGNYQCIAKNALGAIHHTISVRVKAAPYWITAPQNLVLSPGEDGTLICRANGNPKPRISWLTNGVPIEIAPDDPSRKIDGDTIIFSNVQERSSAVYQCNASNEYGYLLANAFVNVLAEPPRILTPANTLYQVIANRPALLDCAFFGSPLPTIEWFKGAKGSALHEDIYVLHENGTLEIPVAQKDSTGTYTCVARNKLGMAKNEVHLEIKDPTWIVKQPEYAVVQRGSMVSFECKVKHDHTLSLTVLWLKDNRELPSDERFTVDKDHLVVADVSDDDSGTYTCVANTTLDSVSASAVLSVVAPTPTPAPVYDVPNPPFDLELTDQLDKSVQLSWTPGDDNNSPITKFIIEYEDAMHKPGLWHHQTEVSGTQTTAQLKLSPYVNYSFRVMAVNSIGKSLPSEASEQYLTKASEPDKNPTAVEGLGSEPDNLVITWKPLNGFESNGPGLQYKVSWRQKDGDDEWTSVVVANVSKYIVSGTPTFVPYLIKVQALNDMGFAPEPAVVMGHSGEDLPMVAPGNVRVNVVNSTLAEVHWDPVPLKSIRGHLQGYRIYYWKTQSSSKRNRRHIEKKILTFQGSKTHGMLPGLEPFSHYTLNVRVVNGKGEGPASPDRVFNTPEGVPSAPSSLKIVNPTLDSLTLEWDPPSHPNGILTEYTLKYQPINSTHELGPLVDLKIPANKTRWTLKNLNFSTRYKFYFYAQTSAGSGSQITEEAVTTVDEAGILPPDVGAGKAMASRQVDIATQGWFIGLMCAVALLILILLIVCFIRRNKGGKYPVKEKEDAHADPEIQPMKEDDGTFGEYSDAEDHKPLKKGSRTPSDRTVKKEDSDDSLVDYGEGVNGQFNEDGSFIGQYSGKKEKEPAEGNESSEAPSPVNAMNSFV

SEQ ID NO: 9504 - protein, 1304 aa, Homo Sapiens
MQLKIMPKKKRLSAGRVPLILFLCQMISALEVPLDPKLLEDLVQPPTITQQSPKDYIIDPRENIVIQCEAKGKPPPSFSWTRNGTHFDIDKDPLVTMKPGTGTLIINIMSEGKAETYEGVYQCTARNERGAAVSNNIVVRPSRSPLWTKEKLEPITLQSGQSLVLPCRPPIGLPPPIIFWMDNSFQRLPQSERVSQGLNGDLYFSNVLPEDTREDYICYARFNHTQTIQQKQPISVKVISVDELNDTIAANLSDTEFYGAKSSRERPPTFLTPEGNASNKEELRGNVLSLECIAEGLPTPIIYWAKEDGMLPKNRTVYKNFEKTLQIIHVSEADSGNYQCIAKNALGAIHHTISVRVKAAPYWITAPQNLVLSPGEDGTLICRANGNPKPRISWLTNGVPIEIAPDDPSRKIDGDTIIFSNVQERSSAVYQCNASNEYGYLLANAFVNVLAEPPRILTPANTLYQVIANRPALLDCAFFGSPLPTIEWFKGAKGSALHEDIYVLHENGTLEIPVAQKDSTGTYTCVARNKLGMAKNEVHLEIKDPTWIVKQPEYAVVQRGSMVSFECKVKHDHTLSLTVLWLKDNRELPSDERFTVDKDHLVVADVSDDDSGTYTCVANTTLDSVSASAVLSVVAPTPTPAPVYDVPNPPFDLELTDQLDKSVQLSWTPGDDNNSPITKFIIEYEDAMHKPGLWHHQTEVSGTQTTAQLKLSPYVNYSFRVMAVNSIGKSLPSEASEQYLTKASEPDKNPTAVEGLGSEPDNLVITWKPLNGFESNGPGLQYKVSWRQKDGDDEWTSVVVANVSKYIVSGTPTFVPYLIKVQALNDMGFAPEPAVVMGHSGEDLPMVAPGNVRVNVVNSTLAEVHWDPVPLKSIRGHLQGYRIYYWKTQSSSKRNRRHIEKKILTFQGSKTHGMLPGLEPFSHYTLNVRVVNGKGEGPASPDRVFNTPEGVPSAPSSLKIVNPTLDSLTLEWDPPSHPNGILTEYTLKYQPINSTHELGPLVDLKIPANKTRWTLKNLNFSTRYKFYFYAQTSAGSGSQITEEAVTTVDEAGILPPDVGAGKVQAVNPRISNLTAAAAETYANISWEYEGPEHVNFYVEYGVAGSKEEWRKEIVNGSRSFFGLKGLMPGTAYKVRVGAVGDSGFVSSEDVFETGPAMASRQVDIATQGWFIGLMCAVALLILILLIVCFIRRNKGGKYPVKEKEDAHADPEIQPMKEDDGTFGEYSDAEDHKPLKKGSRTPSDRTVKKEDSDDSLVDYGEGVNGQFNEDGSFIGQYSGKKEKEPAEGNESSEAPSPVNAMNSFV

SEQ ID NO: 9505 - protein, 1211 aa, Homo Sapiens
MQLKIMPKKKRLSAGRVPLILFLCQMISALEVPLDPKLLEDLVQPPTITQQSPKDYIIDPRENIVIQCEAKGKPPPSFSWTRNGTHFDIDKDPLVTMKPGTGTLIINIMSEGKAETYEGVYQCTARNERGAAVSNNIVVRPSRSPLWTKEKLEPITLQSGQSLVLPCRPPIGLPPPIIFWMDNSFQRLPQSERVSQGLNGDLYFSNVLPEDTREDYICYARFNHTQTIQQKQPISVKVISVDELNDTIAANLSDTEFYGAKSSRERPPTFLTPEGNASNKEELRGNVLSLECIAEGLPTPIIYWAKEDGMLPKNRTVYKNFEKTLQIIHVSEADSGNYQCIAKNALGAIHHTISVRVKAAPYWITAPQNLVLSPGEDGTLICRANGNPKPRISWLTNGVPIEIAPDDPSRKIDGDTIIFSNVQERSSAVYQCNASNEYGYLLANAFVNVLAEPPRILTPANTLYQVIANRPALLDCAFFGSPLPTIEWFKGAKGSALHEDIYVLHENGTLEIPVAQKDSTGTYTCVARNKLGMAKNEVHLEIKDPTWIVKQPEYAVVQRGSMVSFECKVKHDHTLSLTVLWLKDNRELPSDERFTVDKDHLVVADVSDDDSGTYTCVANTTLDSVSASAVLSVVAPTPTPAPVYDVPNPPFDLELTDQLDKSVQLSWTPGDDNNSPITKFIIEYEDAMHKPGLWHHQTEVSGTQTTAQLKLSPYVNYSFRVMAVNSIGKSLPSEASEQYLTKASEPDKNPTAVEGLGSEPDNLVITWKPLNGFESNGPGLQYKVSWRQKDGDDEWTSVVVANVSKYIVSGTPTFVPYLIKVQALNDMGFAPEPAVVMGHSGEDLPMVAPGNVRVNVVNSTLAEVHWDPVPLKSIRGHLQGYRIYYWKTQSSSKRNRRHIEKKILTFQGSKTHGMLPGLEPFSHYTLNVRVVNGKGEGPASPDRVFNTPEGVPSAPSSLKIVNPTLDSLTLEWDPPSHPNGILTEYTLKYQPINSTHELGPLVDLKIPANKTRWTLKNLNFSTRYKFYFYAQTSAGSGSQITEEAVTTVDEAGILPPDVGAGKAMASRQVDIATQGWFIGLMCAVALLILILLIVCFIRRNKGGKYPVKEKEDAHADPEIQPMKEDDGTFGEYSDAEDHKPLKKGSRTPSDRTVKKEDSDDSLVDYGEGVNGQFNEDGSFIGQYSGKKEKEPAEGNESSEAPSPVNAMNSFV

SEQ ID NO: 9506 - protein, 1304 aa, Homo Sapiens; identical to SEQ ID NO: 9504

SEQ ID NO: 9507 - protein, 190 aa, Homo Sapiens
  misc_feature (1)..(1): Xaa can be any naturally occurring amino acid
XGILPPDVGAGKVQAVNPRISNLTAAAAETYANISWEYEGPEHVNFYVEYGVAGTMASRQVDIATQGWFIGLMCAVALLILILLIVCFIRRNKGGKYPVKEKEDAHADPEIQPMKEDDGTFGEYSDAEDHKPLKKGSRTPSDRTVKKEDSDDSLVDYGEGVNGQFNEDGSFIGQYSGKKEKEPAEGNESS

SEQ ID NO: 9508 - protein, 296 aa, Homo Sapiens
MEIYSPDMSEVAAERSSSPSTQLSADPSLDGLPAAEDMPEPQTEDGRTPGLVGLAVPCCACLEAERLRGCLNSEKICIVPILACLVSLCLCIAGLKWVFVDKIFEYDSPTHLDPGGLGQDPIISLDATAASAVWVSSEAYTSPVSRAQSESEVQVTVQGDKAVVSFEPSAAPTPKNRIFAFSFLPSTAPSFPSPTRNPEVRTPKSATQPQTTETNLQTAPKLSTSTSTTGTSHLVKCAEKEKTFCVNGGECFMVKDLSNPSRYLCKCPNEFTGDRCQNYVMASFYSTSTPFLSLPE

SEQ ID NO: 9509 - protein, 590 aa, Homo Sapiens
MGKGRAGRVGTTALPPRLKEMKSQESAAGSKLVLRCETSSEYSSLRFKWFKNGNELNRKNKPQNIKIQKKPGKSELRINKASLADSGEYMCKVISKLGNDSASANITIVESNATSTSTTGTSHLVKCAEKEKTFCVNGGECFMVKDLSNPSRYLCKCPNEFTGDRCQNYVMASFYKHLGIEFMEAEELYQKRVLTITGICIALLVVGIMCVVAYCKTKKQRKKLHDRLRQSLRSERNNMMNIANGPHHPNPPPENVQLVNQYVSKNVISSEHIVEREAETSFSTSHYTSTAHHSTTVTQTPSHSWSNGHTESILSESHSVIVMSSVENSRHSSPTGGPRGRLNGTGGPRECNSFLRHARETPDSYRDSPHSERYVSAMTTPARMSPVDFHTPSSPKSPPSEMSPPVSSMTVSMPSMAVSPFMEEERPLLLVTPPRLREKKFDHHPQQFSSFHHNPAHDSNSLPASPLRIVEDEEYETTQEYEPAQEPVKKLANSRRAKRTKPNGHIANRLEVDSNTSSQSSNSESETEDERVGEDTPFLGIQNPLAASLEATPAFRLADSRTNPAGRFSTQEEIQARLSSVIANQDPIAV

SEQ ID NO: 9510 - protein, 481 aa, Homo Sapiens
MGKGRAGRVGTTALPPRLKEMKSQESAAGSKLVLRCETSSEYSSLRFKWFKNGNELNRKNKPQNIKIQKKPGKSELRINKASLADSGEYMCKVISKLGNDSASANITIVESNEIITGMPASTEGAYVSSATSTSTTGTSHLVKCAEKEKTFCVNGGECFMVKDLSNPSRYLCKCPNEFTGDRCQNYVMASFYKHLGIEFMEAEELYQKRVLTITGICIALLVVGIMCVVAYCKTKKQRKKLHDRLRQSLRSERNNMMNIANGPHHPNPPPENVQLVNQYVSKNVISSEHIVEREAETSFSTSHYTSTAHHSTTVTQTPSHSWSNGHTESILSESHSVIVMSSVENSRHSSPTGGPRGRLNGTGGPRECNSFLRHARETPDSYRDSPHSERYVSAMTTPARMSPVDFHTPSSPKSPPSEMSPPVSSMTVSMPSMAVSPFMEEERPLLLVTPPRLREKKFDHHPQQFSSFHHNPAHDSNSLPA

SEQ ID NO: 9511 - protein, 193 aa, Homo Sapiens
MKKRNEMIFLATLKNKALPPRLKEMKSQESAAGSKLVLRCETSSEYSSLRFKWFKNGNELNRKNKPQNIKIQKKPGKSELRINKASLADSGEYMCKVISKLGNDSASANITIVESNEIITGMPASTEGAYVSSESPIRISVSTEGANTSSSTSTSTTGTSHLVKCAEKEKTFCVNGGECFMVKDLSNPSRYLC

SEQ ID NO: 9512 - protein, 135 aa, Homo Sapiens
MQIPKHISIEDITATSTSTTGTSHLVKCAEKEKTFCVNGGECFMVKDLSNPSRYLCKCPNEFTGDRCQNYVMASFYKAEELYQKRVLTITGICIALLVVGIMCVVAYCKTKKQRKKLHDRLRQSLRSERNNMMNI

SEQ ID NO: 9513 - protein, 101 aa, Homo Sapiens
MQIPKHISIEDITATSTSTTGTSHLVKCAEKEKTFCVNGGECFMVKDLSNPSRYLCKCPNEFTGDRCQNYVMASFYKHLGIEFMEAEELYQKRVLTITGIC

SEQ ID NO: 9514 - protein, 129 aa, Homo Sapiens
MQIPKHISIEDITATSTSTTGTSHLVKCAEKEKTFCVNGGECFMVKDLSNPSRYLCKCQPGFTGARCTENVPMKVQNQEKAEELYQKRVLTITGICIALLVVGIMCVVAYCKTKKQRKKLHDRLRQSLR

SEQ ID NO: 9515 - protein, 308 aa, Homo Sapiens
MQIPKHISIEDITATSTSTTGTSHLVKCAEKEKTFCVNGGECFMVKDLSNPSRYLCKCQPGFTGARCTENVPMKVQNQEKAEELYQKRVLTITGICIALLVVGIMCVVAYCKTKKQRKKLHDRLRQSLRSERNNMMNIANGPHHPNPPPENVQLVNQYVSKNVISSEHIVEREAETSFSTSHYTSTAHHSTTVTQTPSHSWSNGHTESILSESHSVIVMSSVENSRHSSPTGGPRGRLNGTGGPRECNSFLRHARETPDSYRDSPHSERHNLIAELRRNKAHRSKCMQIQLSATHLRSSSIPHLGFIL

SEQ ID NO: 9516 - protein, 254 aa, Homo Sapiens [sequence omitted]

SEQ ID NO: 9517 - protein, 422 aa, Homo Sapiens
MRWRRAPRRSGRPGPRAQRPGSAARSSPPLPLLPLLLLLGTAALAPGAAAGNEAAPAGASVCYSSPPSVGSVQELAQRAAVVIEGKVHPQRRQQGALDRKAAAAAGEAGAWGGDREPPAAGPRALGPPAEEPLLAANGTVPSWPTAPVPSAGEPGEEAPYLVKVHQVWAVKAGGLKKDSLLTVRLGTWGHPAFPSCGRLKEDSRYIFFMEPDANSTSRAPAAFRASFPPLETGRNLKKEVSRVLCKRCALPPRLKEMKSQESAAGSKLVLRCETSSEYSSLRFKWFKNGNELNRKNKPQNIKIQKKPGKSELRINKASLADSGEYMCKVISKLGNDSASANITIVESNATSTSTTGTSHLVKCAEKEKTFCVNGGECFMVKDLSNPSRYLCKCPNEFTGDRCQNYVMASFYSTSTPFLSLPE

SEQ ID NO: 9518 - protein, 637 aa, Homo Sapiens
MSERKEGRGKGKGKKKERGSGKKPESAAGSQSPALPPRLKEMKSQESAAGSKLVLRCETSSEYSSLRFKWFKNGNELNRKNKPQNIKIQKKPGKSELRINKASLADSGEYMCKVISKLGNDSASANITIVESNEIITGMPASTEGAYVSSESPIRISVSTEGANTSSSTSTSTTGTSHLVKCAEKEKTFCVNGGECFMVKDLSNPSRYLCKCPNEFTGDRCQNYVMASFYKAEELYQKRVLTITGICIALLVVGIMCVVAYCKTKKQRKKLHDRLRQSLRSERNNMMNIANGPHHPNPPPENVQLVNQYVSKNVISSEHIVEREAETSFSTSHYTSTAHHSTTVTQTPSHSWSNGHTESILSESHSVIVMSSVENSRHSSPTGGPRGRLNGTGGPRECNSFLRHARETPDSYRDSPHSERYVSAMTTPARMSPVDFHTPSSPKSPPSEMSPPVSSMTVSMPSMAVSPFMEEERPLLLVTPPRLREKKFDHHPQQFSSFHHNPAHDSNSLPASPLRIVEDEEYETTQEYEPAQEPVKKLANSRRAKRTKPNGHIANRLEVDSNTSSQSSNSESETEDERVGEDTPFLGIQNPLAASLEATPAFRLADSRTNPAGRFSTQEEIQARLSSVIANQDPIAV

SEQ ID NO: 9519 - protein, 420 aa, Homo Sapiens
MSERKEGRGKGKGKKKERGSGKKPESAAGSQSPALPPRLKEMKSQESAAGSKLVLRCETSSEYSSLRFKWFKNGNELNRKNKPQNIKIQKKPGKSELRINKASLADSGEYMCKVISKLGNDSASANITIVESNEIITGMPASTEGAYVSSESPIRISVSTEGANTSSSTSTSTTGTSHLVKCAEKEKTFCVNGGECFMVKDLSNPSRYLCKCPNEFTGDRCQNYVMASFYKAEELYQKRVLTITGICIALLVVGIMCVVAYCKTKKQRKKLHDRLRQSLRSERNNMMNIANGPHHPNPPPENVQLVNQYVSKNVISSEHIVEREAETSFSTSHYTSTAHHSTTVTQTPSHSWSNGHTESILSESHSVIVMSSVENSRHSSPTGGPRGRLNGTGGPRECNSFLRHARETPDSYRDSPHSER

SEQ ID NO: 9520 - protein, 645 aa, Homo Sapiens
MSERKEGRGKGKGKKKERGSGKKPESAAGSQSPALPPRLKEMKSQESAAGSKLVLRCETSSEYSSLRFKWFKNGNELNRKNKPQNIKIQKKPGKSELRINKASLADSGEYMCKVISKLGNDSASANITIVESNEIITGMPASTEGAYVSSESPIRISVSTEGANTSSSTSTSTTGTSHLVKCAEKEKTFCVNGGECFMVKDLSNPSRYLCKCPNEFTGDRCQNYVMASFYKHLGIEFMEAEELYQKRVLTITGICIALLVVGIMCVVAYCKTKKQRKKLHDRLRQSLRSERNNMMNIANGPHHPNPPPENVQLVNQYVSKNVISSEHIVEREAETSFSTSHYTSTAHHSTTVTQTPSHSWSNGHTESILSESHSVIVMSSVENSRHSSPTGGPRGRLNGTGGPRECNSFLRHARETPDSYRDSPHSERYVSAMTTPARMSPVDFHTPSSPKSPPSEMSPPVSSMTVSMPSMAVSPFMEEERPLLLVTPPRLREKKFDHHPQQFSSFHHNPAHDSNSLPASPLRIVEDEEYETTQEYEPAQEPVKKLANSRRAKRTKPNGHIANRLEVDSNTSSQSSNSESETEDERVGEDTPFLGIQNPLAASLEATPAFRLADSRTNPAGRFSTQEEIQARLSSVIANQDPIAV

SEQ ID NO: 9521 - protein, 640 aa, Homo Sapiens
MSERKEGRGKGKGKKKERGSGKKPESAAGSQSPALPPRLKEMKSQESAAGSKLVLRCETSSEYSSLRFKWFKNGNELNRKNKPQNIKIQKKPGKSELRINKASLADSGEYMCKVISKLGNDSASANITIVESNEIITGMPASTEGAYVSSESPIRISVSTEGANTSSSTSTSTTGTSHLVKCAEKEKTFCVNGGECFMVKDLSNPSRYLCKCQPGFTGARCTENVPMKVQNQEKAEELYQKRVLTITGICIALLVVGIMCVVAYCKTKKQRKKLHDRLRQSLRSERNNMMNIANGPHHPNPPPENVQLVNQYVSKNVISSEHIVEREAETSFSTSHYTSTAHHSTTVTQTPSHSWSNGHTESILSESHSVIVMSSVENSRHSSPTGGPRGRLNGTGGPRECNSFLRHARETPDSYRDSPHSERYVSAMTTPARMSPVDFHTPSSPKSPPSEMSPPVSSMTVSMPSMAVSPFMEEERPLLLVTPPRLREKKFDHHPQQFSSFHHNPAHDSNSLPASPLRIVEDEEYETTQEYEPAQEPVKKLANSRRAKRTKPNGHIANRLEVDSNTSSQSSNSESETEDERVGEDTPFLGIQNPLAASLEATPAFRLADSRTNPAGRFSTQEEIQARLSSVIANQDPIAV

SEQ ID NO: 9522 - protein, 462 aa, Homo Sapiens
MSERKEGRGKGKGKKKERGSGKKPESAAGSQSPALPPRLKEMKSQESAAGSKLVLRCETSSEYSSLRFKWFKNGNELNRKNKPQNIKIQKKPGKSELRINKASLADSGEYMCKVISKLGNDSASANITIVESNEIITGMPASTEGAYVSSESPIRISVSTEGANTSSSTSTSTTGTSHLVKCAEKEKTFCVNGGECFMVKDLSNPSRYLCKCQPGFTGARCTENVPMKVQNQEKAEELYQKRVLTITGICIALLVVGIMCVVAYCKTKKQRKKLHDRLRQSLRSERNNMMNIANGPHHPNPPPENVQLVNQYVSKNVISSEHIVEREAETSFSTSHYTSTAHHSTTVTQTPSHSWSNGHTESILSESHSVIVMSSVENSRHSSPTGGPRGRLNGTGGPRECNSFLRHARETPDSYRDSPHSERHNLIAELRRNKAHRSKCMQIQLSATHLRSSSIPHLGFIL

SEQ ID NO: 9523 - protein, 196 aa, Homo Sapiens
PQTEDGRTPGLVGLAVPCCACLEAERLRGCLNSEKICIVPILACLVSLCLCIAGLKWVFVDKIFEYDSPTHLDPGGLGQDPIISLDATAASAVWVSSEAYTSPVSRAQSESEVQVTVQGDKAVVSFEPSAAPTPKNRIFAFSFLPSTAPSFPSPTRNPEVRTPKSATQPQTTETNLQTAPKLCAQMSLLVIAAKTT

SEQ ID NO: 9524 - protein, 713 aa, Homo Sapiens
VPSAGEPGEEAPYLVKVHQVWAVKAGGLKKDSLLTVRLGTWGHPAFPSCGRLKEDSRYIFFMEPDANSTSRAPAAFRASFPPLETGRNLKKEVSRVLCKRCALPPRLKEMKSQESAAGSKLVLRCETSSEYSSLRFKWFKNGNELNRKNKPQNIKIQKKPGKSELRINKASLADSGEYMCKVISKLGNDSASANITIVESNEIITGMPASTEGAYVSSESPIRISVSTEGANTSSSTSTSTTGTSHLVKCAEKEKTFCVNGGECFMVKDLSNPSRYLCKCPNEFTGDRCQNYVMASFYKHLGIEFMEAEELYQKRVLTITGICIALLVVGIMCVVAYCKTKKQRKKLHDRLRQSLRSERNNMMNIANGPHHPNPPPENVQLVNQYVSKNVISSEHIVEREAETSFSTSHYTSTAHHSTTVTQTPSHSWSNGHTESILSESHSVIVMSSVENSRHSSPTGGPRGRLNGTGGPRECNSFLRHARETPDSYRDSPHSERYVSAMTTPARMSPVDFHTPSSPKSPPSEMSPPVSSMTVSMPSMAVSPFMEEERPLLLVTPPRLREKKFDHHPQQFSSFHHNPAHDSNSLPASPLRIVEDEEYETTQEYEPAQEPVKKLANSRRAKRTKPNGHIANRLEVDSNTSSQSSNSESETEDERVGEDTPFLGIQNPLAASLEATPAFRLADSRTNPAGRFSTQEEIQARLSSVIANQDPIAV

SEQ ID NO: 9525 - protein, 126 aa, Homo Sapiens
  misc_feature (1)..(1): Xaa can be any naturally occurring amino acid
XASANITIVESNEIITGMPASTEGAYVSSESPIRISVSTEGANTSSSTSTSTTGTSHLVKCAEKEKTFCVNGGECFMVKDLSNPSRYLCKCQPGFTGARCTENVPMKVQNQESAQMSLLVIAAKTT

SEQ ID NO: 9526 - protein, 165 aa, Homo Sapiens
MMRCCRRRCCCRQPPHALRPLLLLPLVLLPPLAAAAAGPNRCDTIYQGFAECLIRLGDSMGRGGELETICRSWNDFHACASQVLSGCPEEAAAVWESLQQEARQAPRPNNLHTLCGAPVHVRERGTGSETNQETLRATAPALPMAPAPPLLAAALALAYLLRPLA

SEQ ID NO: 9527 - protein, 87 aa, Homo Sapiens
MTSMPVPLRSCQAVRRRQLQCGNHYSKKLARPPVRITCTLCAVPRCMFGSAAQAPKPTRRRCGLQRLHSPWPLRPHCWRLLWLWPTS

SEQ ID NO: 9528 - protein, 88 aa, Homo Sapiens
  misc_feature (1)..(1): Xaa can be any naturally occurring amino acid
XRCCRRRCCCRQPPHALRPLLLLPLVLLPPLAAAAAGPNRCDTIYQGFAECLIRLGDSMGRGGELETICSTVDKEYLIVLREPGGWMS

SEQ ID NO: 9529 - protein, 923 aa, Homo Sapiens
MERGLPLLCAVLALVLAPAGAFRNDKCGDTIKIESPGYLTSPGYPHSYHPSEKCEWLIQAPDPYQRIMINFNPHFDLEDRDCKYDYVEVFDGENENGHFRGKFCGKIAPPPVVSSGPFLFIKFVSDYETHGAGFSIRYEIFKRGPECSQNYTTPSGVIKSPGFPEKYPNSLECTYIVFVPKMSEIILEFESFDLEPDSNPPGGMFCRYDRLEIWDGFPDVGPHIGRYCGQKTPGRIRSSSGILSMVFYTDSAIAKEGFSANYSVLQSSVSEDFKCMEALGMESGEIHSDQITASSQYSTNWSAERSRLNYPENGWTPGEDSYREWIQVDLGLLRFVTAVGTQGAISKETKKKYYVKTYKIDVSSNGEDWITIKEGNKPVLFQGNTNPTDVVVAVFPKPLITRFVRIKPATWETGISMRFEVYGCKITDYPCSGMLGMVSGLISDSQITSSNQGDRNWMPENIRLVTSRSGWALPPAPHSYINEWLQIDLGEEKIVRGIIIQGGKHRENKVFMRKFKIGYSNNGSDWKMIMDDSKRKAKSFEGNNNYDTPELRTFPALSTRFIRIYPERATHGGLGLRMELLGCEVEAPTAGPTTPNGNLVDECDDDQANCHSGTGDDFQLTGGTTVLATEKPTVIDSTIQSEFPTYGFNCEFGWGSHKTFCHWEHDNHVQLKWSVLTSKTGPIQDHTGDGNFIYSQADENQKGKVARLVSPVVYSQNSAHCMTFWYHMSGSHVGTLRVKLRYQKPEEYDQLVWMAIGHQGDHWKEGRVLLHKSLKLYQVIFEGEIGKGNLGGIAVDDISINNHISQEDCAKPADLDKKNPEIKIDETGSTPGYEGEGEGDKNISRKPGNVLKTLDPILITIIAMSALGVLLGAVCGVVLYCACWHNGMSERNLSALENYNFELVDGVKLKKDKLNTQSTYSEA

SEQ ID NO: 9530 - protein, 641 aa, Homo Sapiens
MERGLPLLCAVLALVLAPAGAFRNDKCGDTIKIESPGYLTSPGYPHSYHPSEKCEWLIQAPDPYQRIMINFNPHFDLEDRDCKYDYVEVFDGENENGHFRGKFCGKIAPPPVVSSGPFLFIKFVSDYETHGAGFSIRYEIFKRGPECSQNYTTPSGVIKSPGFPEKYPNSLECTYIVFVPKMSEIILEFESFDLEPDSNPPGGMFCRYDRLEIWDGFPDVGPHIGRYCGQKTPGRIRSSSGILSMVFYTDSAIAKEGFSANYSVLQSSVSEDFKCMEALGMESGEIHSDQITASSQYSTNWSAERSRLNYPENGWTPGEDSYREWIQVDLGLLRFVTAVGTQGAISKETKKKYYVKTYKIDVSSNGEDWITIKEGNKPVLFQGNTNPTDVVVAVFPKPLITRFVRIKPATWETGISMRFEVYGCKITDYPCSGMLGMVSGLISDSQITSSNQGDRNWMPENIRLVTSRSGWALPPAPHSYINEWLQIDLGEEKIVRGIIIQGGKHRENKVFMRKFKIGYSNNGSDWKMIMDDSKRKAKSFEGNNNYDTPELRTFPALSTRFIRIYPERATHGGLGLRMELLGCEVEGTINTDQECPCARALAKDAKKKKRWADSTHCRCVRSIHGEMWSSGKGVCSLDANL

SEQ ID NO: 9531 - protein, 704 aa, Homo Sapiens
MERGLPLLCAVLALVLAPAGAFRNDKCGDTIKIESPGYLTSPGYPHSYHPSEKCEWLIQAPDPYQRIMINFNPHFDLEDRDCKYDYVEVFDGENENGHFRGKFCGKIAPPPVVSSGPFLFIKFVSDYETHGAGFSIRYEIFKRGPECSQNYTTPSGVIKSPGFPEKYPNSLECTYIVFVPKMSEIILEFESFDLEPDSNPPGGMFCRYDRLEIWDGFPDVGPHIGRYCGQKTPGRIRSSSGILSMVFYTDSAIAKEGFSANYSVLQSSVSEDFKCMEALGMESGEIHSDQITASSQYSTNWSAERSRLNYPENGWTPGEDSYREWIQVDLGLLRFVTAVGTQGAISKETKKKYYVKTYKIDVSSNGEDWITIKEGNKPVLFQGNTNPTDVVVAVFPKPLITRFVRIKPATWETGISMRFEVYGCKITDYPCSGMLGMVSGLISDSQITSSNQGDRNWMPENIRLVTSRSGWALPPAPHSYINEWLQIDLGEEKIVRGIIIQGGKHRENKVFMRKFKIGYSNNGSDWKMIMDDSKRKAKSFEGNNNYDTPELRTFPALSTRFIRIYPERATHGGLGLRMELLGCEVEAPTAGPTTPNGNLVDECDDDQANCHSGTGDDFQLTGAETIFIPLLYHFSSCLSWDQLTPVCVLVTPHGRELPRNRSCLARTRASSFPHVIWIDELFLIATTICNNNLSHFESQRLGLS

SEQ ID NO: 9532 - protein, 644 aa, Homo Sapiens
MERGLPLLCAVLALVLAPAGAFRNDKCGDTIKIESPGYLTSPGYPHSYHPSEKCEWLIQAPDPYQRIMINFNPHFDLEDRDCKYDYVEVFDGENENGHFRGKFCGKIAPPPVVSSGPFLFIKFVSDYETHGAGFSIRYEIFKRGPECSQNYTTPSGVIKSPGFPEKYPNSLECTYIVFVPKMSEIILEFESFDLEPDSNPPGGMFCRYDRLEIWDGFPDVGPHIGRYCGQKTPGRIRSSSGILSMVFYTDSAIAKEGFSANYSVLQSSVSEDFKCMEALGMESGEIHSDQITASSQYSTNWSAERSRLNYPENGWTPGEDSYREWIQVDLGLLRFVTAVGTQGAISKETKKKYYVKTYKIDVSSNGEDWITIKEGNKPVLFQGNTNPTDVVVAVFPKPLITRFVRIKPATWETGISMRFEVYGCKITDYPCSGMLGMVSGLISDSQITSSNQGDRNWMPENIRLVTSRSGWALPPAPHSYINEWLQIDLGEEKIVRGIIIQGGKHRENKVFMRKFKIGYSNNGSDWKMIMDDSKRKAKSFEGNNNYDTPELRTFPALSTRFIRIYPERATHGGLGLRMELLGCEVEAPTAGPTTPNGNLVDECDDDQANCHSGTGDDFQLTGGTTVLATEKPTVIDSTIQSGIK

SEQ ID NO: 9533 - protein, 923 aa, Homo Sapiens; identical to SEQ ID NO: 9529

SEQ ID NO: 9534 - protein, 609 aa, Homo Sapiens
MERGLPLLCAVLALVLAPAGAFRNDKCGDTIKIESPGYLTSPGYPHSYHPSEKCEWLIQAPDPYQRIMINFNPHFDLEDRDCKYDYVEVFDGENENGHFRGKFCGKIAPPPVVSSGPFLFIKFVSDYETHGAGFSIRYEIFKRGPECSQNYTTPSGVIKSPGFPEKYPNSLECTYIVFVPKMSEIILEFESFDLEPDSNPPGGMFCRYDRLEIWDGFPDVGPHIGRYCGQKTPGRIRSSSGILSMVFYTDSAIAKEGFSANYSVLQSSVSEDFKCMEALGMESGEIHSDQITASSQYSTNWSAERSRLNYPENGWTPGEDSYREWIQVDLGLLRFVTAVGTQGAISKETKKKYYVKTYKIDVSSNGEDWITIKEGNKPVLFQGNTNPTDVVVAVFPKPLITRFVRIKPATWETGISMRFEVYGCKITDYPCSGMLGMVSGLISDSQITSSNQGDRNWMPENIRLVTSRSGWALPPAPHSYINEWLQIDLGEEKIVRGIIIQGGKHRENKVFMRKFKIGYSNNGSDWKMIMDDSKRKAKSFEGNNNYDTPELRTFPALSTRFIRIYPERATHGGLGLRMELLGCEVEGGTTVLATEKPTVIDSTIQSGIK

SEQ ID NO: 9535 - protein, 597 aa, Homo Sapiens
MERGLPLLCAVLALVLAPAGAFRNDKCGDTIKIESPGYLTSPGYPHSYHPSEKCEWLIQAPDPYQRIMINFNPHFDLEDRDCKYDYVEVFDGENENGHFRGKFCGKIAPPPVVSSGPFLFIKFVSDYETHGAGFSIRYEIFKRGPECSQNYTTPSGVIKSPGFPEKYPNSLECTYIVFVPKMSEIILEFESFDLEPDSNPPGGMFCRYDRLEIWDGFPDVGPHIGRYCGQKTPGRIRSSSGILSMVFYTDSAIAKEGFSANYSVLQSSVSEDFKCMEALGMESGEIHSDQITASSQYSTNWSAERSRLNYPENGWTPGEDSYREWIQVDLGLLRFVTAVGTQGAISKETKKKYYVKTYKIDVSSNGEDWITIKEGNKPVLFQGNTNPTDVVVAVFPKPLITRFVRIKPATWETGISMRFEVYGCKITDYPCSGMLGMVSGLISDSQITSSNQGDRNWMPENIRLVTSRSGWALPPAPHSYINEWLQIDLGEEKIVRGIIIQGGKHRENKVFMRKFKIGYSNNGSDWKMIMDDSKRKAKVRAGDWEEVIPYVLDFNQGPLAFSRGRASYFLPAMTLEEVCDGVSKTLDSRKTGIWHEK

SEQ ID NO: 9536 - protein, 906 aa, Homo Sapiens
MERGLPLLCAVLALVLAPAGAFRNDKCGDTIKIESPGYLTSPGYPHSYHPSEKCEWLIQAPDPYQRIMINFNPHFDLEDRDCKYDYVEVFDGENENGHFRGKFCGKIAPPPVVSSGPFLFIKFVSDYETHGAGFSIRYEIFKRGPECSQNYTTPSGVIKSPGFPEKYPNSLECTYIVFVPKMSEIILEFESFDLEPDSNPPGGMFCRYDRLEIWDGFPDVGPHIGRYCGQKTPGRIRSSSGILSMVFYTDSAIAKEGFSANYSVLQSSVSEDFKCMEALGMESGEIHSDQITASSQYSTNWSAERSRLNYPENGWTPGEDSYREWIQVDLGLLRFVTAVGTQGAISKETKKKYYVKTYKIDVSSNGEDWITIKEGNKPVLFQGNTNPTDVVVAVFPKPLITRFVRIKPATWETGISMRFEVYGCKITDYPCSGMLGMVSGLISDSQITSSNQGDRNWMPENIRLVTSRSGWALPPAPHSYINEWLQIDLGEEKIVRGIIIQGGKHRENKVFMRKFKIGYSNNGSDWKMIMDDSKRKAKSFEGNNNYDTPELRTFPALSTRFIRIYPERATHGGLGLRMELLGCEVEAPTAGPTTPNGNLVDECDDDQANCHSGTGDDFQLTGGTTVLATEKPTVIDSTIQSEFPTYGFNCEFGWGSHKTFCHWEHDNHVQLKWSVLTSKTGPIQDHTGDGNFIYSQADENQKGKVARLVSPVVYSQNSAHCMTFWYHMSGSHVGTLRVKLRYQKPEEYDQLVWMAIGHQGDHWKEGRVLLHKSLKLYQVIFEGEIGKGNLGGIAVDDISINNHISQEDCARSTPGYEGEGEGDKNISRKPGNVLKTLDPILITIIAMSALGVLLGAVCGVVLYCACWHNGMSERNLSALENYNFELVDGVKLKKDKLNTQSTYSEA

SEQ ID NO: 9537 - protein, 735 aa, Homo Sapiens
MSEIILEFESFDLEPDSNPPGGMFCRYDRLEIWDGFPDVGPHIGRYCGQKTPGRIRSSSGILSMVFYTDSAIAKEGFSANYSVLQSSVSEDFKCMEALGMESGEIHSDQITASSQYSTNWSAERSRLNYPENGWTPGEDSYREWIQVDLGLLRFVTAVGTQGAISKETKKKYYVKTYKIDVSSNGEDWITIKEGNKPVLFQGNTNPTDVVVAVFPKPLITRFVRIKPATWETGISMRFEVYGCKITDYPCSGMLGMVSGLISDSQITSSNQGDRNWMPENIRLVTSRSGWALPPAPHSYINEWLQIDLGEEKIVRGIIIQGGKHRENKVFMRKFKIGYSNNGSDWKMIMDDSKRKAKSFEGNNNYDTPELRTFPALSTRFIRIYPERATHGGLGLRMELLGCEVEAPTAGPTTPNGNLVDECDDDQANCHSGTGGTTVLATEKPTVIDSTIQSEFPTYGFNCEFGWGSHKTFCHWEHDNHVQLKWSVLTSKTGPIQDHTGDGNFIYSQADENQKGKVARLVSPVVYSQNSAHCMTFWYHMSGSHVGTLRVKLRYQKPEEYDQLVWMAIGHQGDHWKEGRVLLHKSLKLYQVIFEGEIGKGNLGGIAVDDISINNHISQEDCAKPADLDKKNPEIKIDETGSTPGYEGEGEGDKNISRKPGNVLKTLDPILITIIAMSALGVLLGAVCGVVLYCACWHNGMSERNLSALENYNFELVDGVKLKKDKLNTQSTYSEA

SEQ ID NO: 9538 - protein, 105 aa, Homo Sapiens
NHISQEDCARSTPGYEGEGEGDKNISRKPGNVLKTLDPILITIIAMSALGVLLGAVCGVVLYCACWHNGMSERNLSALENYNFELVDGVKLKKDKLNTQSTYSEA

SEQ ID NO: 9539 - protein, 60 aa, Homo Sapiens
  misc_feature (1)..(1): Xaa can be any naturally occurring amino acid
XINEWLQIDLGEEKIVRGIIIQGGKHRENKVFMRKFKIGYSNNGSDWKMIMDDSKRKALI

SEQ ID NO: 9540 - protein, 170 aa, Homo Sapiens
  misc_feature (1)..(1): Xaa can be any naturally occurring amino acid
XPGGMFCRYDRLEIWDGFPDVGPHIGRYCGQKTPGRIRSSSGILSMVFYTDSAIAKEGFSANYSVLQSSVSEDFKCMEALGMESGEIHSDQITASSQYSTNWSAERSRLNYPENGWTPGEDSYREWIQDAKYRLRVSVVRSKSSSSSTSLEPRPLSSLKLSFFSYKIKIT

SEQ ID NO: 9541 - protein, 77 aa, Homo Sapiens
  misc_feature (1)..(1): Xaa can be any naturally occurring amino acid
XPTAGPTTPNGNLVDECDDDQANCHSGTGDDFQLTGGTTVLATEKPTVIDSTIQSARLEVSTLNLSLHNPPQQKALI

SEQ ID NO: 9542 - protein, 100 aa, Homo Sapiens
  misc_feature (1)..(1): Xaa can be any naturally occurring amino acid
XTHGGLGLRMELLGCEVEAPTAGPTTPNGNLVDECDDDQANCHSGTGDDFQLTGGTTVLATEKPTVIDSTIQSGSRFFKHHHKQQSMRPQNLHHNSILLL

SEQ ID NO: 9543 - protein, 102 aa, Homo Sapiens
MDMFPLTWVFLALYFSRHQVRGQPDPPCGGRLNSKDAGYITSPGYPQDYPSHQNCEWIVYAPEPNQKIVLNFNPHFEIEKHDCKYDFIEIRDGDSESADLLG

SEQ ID NO: 9544 - protein, 906 aa, Homo Sapiens
MDMFPLTWVFLALYFSRHQVRGQPDPPCGGRLNSKDAGYITSPGYPQDYPSHQNCEWIVYAPEPNQKIVLNFNPHFEIEKHDCKYDFIEIRDGDSESADLLGKHCGNIAPPTIISSGSMLYIKFTSDYARQGAGFSLRYEIFKTGSEDCSKNFTSPNGTIESPGFPEKYPHNLDCTFTILAKPKMEIILQFLIFDLEHDPLQVGEGDCKYDWLDIWDGIPHVGPLIGKYCGTKTPSELRSSTGILSLTFHTDMAVAKDGFSARYYLVHQEPLENFQCNVPLGMESGRIANEQISASSTYSDGRWTPQQSRLHGDDNGWTPNLDSNKEYLQVDLRFLTMLTAIATQGAISRETQNGYYVKSYKLEVSTNGEDWMVYRHGKNHKVFQANNDATEVVLNKLHAPLLTRFVRIRPQTWHSGIALRLELFGCRVTDAPCSNMLGMLSGLIADSQISASSTQEYLWSPSAARLVSSRSGWFPRIPQAQPGEEWLQVDLGTPKTVKGVIIQGARGGDSITAVEARAFVRKFKVSYSLNGKDWEYIQDPRTQQPKLFEGNMHYDTPDIRRFDPIPAQYVRVYPERWSPAGIGMRLEVLGCDWTDSKPTVETLGPTVKSEETTTPYPTEEEATECGENCSFEDDKDLQLPSGFNCNFDFLEEPCGWMYDHAKWLRTTWASSSSPNDRTFPDDRNFLRLQSDSQREGQYARLISPPVHLPRSPVCMEFQYQATGGRGVALQVVREASQESKLLWVIREDQGGEWKHGRIILPSYDMEYQIVFEGVIGKGRSGEIAIDDIRISTDVPLENCMEPISAFAGENFKGGTLLPGTEPTVDTVPMQPIPAYWYYVMAAGGAVLVLVSVALALVLHYHRFRYAAKKTDHSITYKTSHYTNGAPLAVEPTLTIKLEQDRGSHC

SEQ ID NO: 9545 - protein, 926 aa, Homo Sapiens
MDMFPLTWVFLALYFSRHQVRGQPDPPCGGRLNSKDAGYITSPGYPQDYPSHQNCEWIVYAPEPNQKIVLNFNPHFEIEKHDCKYDFIEIRDGDSESADLLGKHCGNIAPPTIISSGSMLYIKFTSDYARQGAGFSLRYEIFKTGSEDCSKNFTSPNGTIESPGFPEKYPHNLDCTFTILAKPKMEIILQFLIFDLEHDPLQVGEGDCKYDWLDIWDGIPHVGPLIGKYCGTKTPSELRSSTGILSLTFHTDMAVAKDGFSARYYLVHQEPLENFQCNVPLGMESGRIANEQISASSTYSDGRWTPQQSRLHGDDNGWTPNLDSNKEYLQVDLRFLTMLTAIATQGAISRETQNGYYVKSYKLEVSTNGEDWMVYRHGKNHKVFQANNDATEVVLNKLHAPLLTRFVRIRPQTWHSGIALRLELFGCRVTDAPCSNMLGMLSGLIADSQISASSTQEYLWSPSAARLVSSRSGWFPRIPQAQPGEEWLQVDLGTPKTVKGVIIQGARGGDSITAVEARAFVRKFKVSYSLNGKDWEYIQDPRTQQPKLFEGNMHYDTPDIRRFDPIPAQYVRVYPERWSPAGIGMRLEVLGCDWTDSKPTVETLGPTVKSEETTTPYPTEEEATECGENCSFEDDKDLQLPSGFNCNFDFLEEPCGWMYDHAKWLRTTWASSSSPNDRTFPDDRNFLRLQSDSQREGQYARLISPPVHLPRSPVCMEFQYQATGGRGVALQVVREASQESKLLWVIREDQGGEWKHGRIILPSYDMEYQIVFEGVIGKGRSGEIAIDDIRISTDVPLENCMEPISAFAVDIPEIHEREGYEDEIDDEYEVDWSNSSSATSGSGAPSTDKEKSWLYTLDPILITIIAMSSLGVLLGATCAGLLLYCTCSYSGLSSRSCTTLENYNFELYDGLKHKVKMNHQKCCSEA

SEQ ID NO: 9546 - protein, 931 aa, Homo Sapiens
MDMFPLTWVFLALYFSRHQVRGQPDPPCGGRLNSKDAGYITSPGYPQDYPSHQNCEWIVYAPEPNQKIVLNFNPHFEIEKHDCKYDFIEIRDGDSESADLLGKHCGNIAPPTIISSGSMLYIKFTSDYARQGAGFSLRYEIFKTGSEDCSKNFTSPNGTIESPGFPEKYPHNLDCTFTILAKPKMEIILQFLIFDLEHDPLQVGEGDCKYDWLDIWDGIPHVGPLIGKYCGTKTPSELRSSTGILSLTFHTDMAVAKDGFSARYYLVHQEPLENFQCNVPLGMESGRIANEQISASSTYSDGRWTPQQSRLHGDDNGWTPNLDSNKEYLQVDLRFLTMLTAIATQGAISRETQNGYYVKSYKLEVSTNGEDWMVYRHGKNHKVFQANNDATEVVLNKLHAPLLTRFVRIRPQTWHSGIALRLELFGCRVTDAPCSNMLGMLSGLIADSQISASSTQEYLWSPSAARLVSSRSGWFPRIPQAQPGEEWLQVDLGTPKTVKGVIIQGARGGDSITAVEARAFVRKFKVSYSLNGKDWEYIQDPRTQQPKLFEGNMHYDTPDIRRFDPIPAQYVRVYPERWSPAGIGMRLEVLGCDWTDSKPTVETLGPTVKSEETTTPYPTEEEATECGENCSFEDDKDLQLPSGFNCNFDFLEEPCGWMYDHAKWLRTTWASSSSPNDRTFPDDRNFLRLQSDSQREGQYARLISPPVHLPRSPVCMEFQYQATGGRGVALQVVREASQESKLLWVIREDQGGEWKHGRIILPSYDMEYQIVFEGVIGKGRSGEIAIDDIRISTDVPLENCMEPISAFAGENFKVDIPEIHEREGYEDEIDDEYEVDWSNSSSATSGSGAPSTDKEKSWLYTLDPILITIIAMSSLGVLLGATCAGLLLYCTCSYSGLSSRSCTTLENYNFELYDGLKHKVKMNHQKCCSEA

SEQ ID NO: 9547 - protein, 901 aa, Homo Sapiens
MDMFPLTWVFLALYFSRHQVRGQPDPPCGGRLNSKDAGYITSPGYPQDYPSHQNCEWIVYAPEPNQKIVLNFNPHFEIEKHDCKYDFIEIRDGDSESADLLGKHCGNIAPPTIISSGSMLYIKFTSDYARQGAGFSLRYEIFKTGSEDCSKNFTSPNGTIESPGFPEKYPHNLDCTFTILAKPKMEIILQFLIFDLEHDPLQVGEGDCKYDWLDIWDGIPHVGPLIGKYCGTKTPSELRSSTGILSLTFHTDMAVAKDGFSARYYLVHQEPLENFQCNVPLGMESGRIANEQISASSTYSDGRWTPQQSRLHGDDNGWTPNLDSNKEYLQVDLRFLTMLTAIATQGAISRETQNGYYVKSYKLEVSTNGEDWMVYRHGKNHKVFQANNDATEVVLNKLHAPLLTRFVRIRPQTWHSGIALRLELFGCRVTDAPCSNMLGMLSGLIADSQISASSTQEYLWSPSAARLVSSRSGWFPRIPQAQPGEEWLQVDLGTPKTVKGVIIQGARGGDSITAVEARAFVRKFKVSYSLNGKDWEYIQDPRTQQPKLFEGNMHYDTPDIRRFDPIPAQYVRVYPERWSPAGIGMRLEVLGCDWTDSKPTVETLGPTVKSEETTTPYPTEEEATECGENCSFEDDKDLQLPSGFNCNFDFLEEPCGWMYDHAKWLRTTWASSSSPNDRTFPDDRNFLRLQSDSQREGQYARLISPPVHLPRSPVCMEFQYQATGGRGVALQVVREASQESKLLWVIREDQGGEWKHGRIILPSYDMEYQIVFEGVIGKGRSGEIAIDDIRISTDVPLENCMEPISAFAGGTLLPGTEPTVDTVPMQPIPAYWYYVMAAGGAVLVLVSVALALVLHYHRFRYAAKKTDHSITYKTSHYTNGAPLAVEPTLTIKLEQDRGSHC

SEQ ID NO: 9548 - protein, 555 aa, Homo Sapiens
MDMFPLTWVFLALYFSRHQVRGQPDPPCGGRLNSKDAGYITSPGYPQDYPSHQNCEWIVYAPEPNQKIVLNFNPHFEIEKHDCKYDFIEIRDGDSESADLLGKHCGNIAPPTIISSGSMLYIKFTSDYARQGAGFSLRYEIFKTGSEDCSKNFTSPNGTIESPGFPEKYPHNLDCTFTILAKPKMEIILQFLIFDLEHDPLQVGEGDCKYDWLDIWDGIPHVGPLIGKYCGTKTPSELRSSTGILSLTFHTDMAVAKDGFSARYYLVHQEPLENFQCNVPLGMESGRIANEQISASSTYSDGRWTPQQSRLHGDDNGWTPNLDSNKEYLQVDLRFLTMLTAIATQGAISRETQNGYYVKSYKLEVSTNGEDWMVYRHGKNHKVFQANNDATEVVLNKLHAPLLTRFVRIRPQTWHSGIALRLELFGCRVTDAPCSNMLGMLSGLIADSQISASSTQEYLWSPSAARLVSSRSGWFPRIPQAQPGEEWLQVDLGTPKTVKGVIIQGARGGDSITAVEARAFVRKFKVSYSLNGKDWEYIQDPRTQQPKVGCSWRPL

SEQ ID NO: 9549 - protein, 909 aa, Homo Sapiens
MDMFPLTWVFLALYFSRHQVRGQPDPPCGGRLNSKDAGYITSPGYPQDYPSHQNCEWIVYAPEPNQKIVLNFNPHFEIEKHDCKYDFIEIRDGDSESADLLGKHCGNIAPPTIISSGSMLYIKFTSDYARQGAGFSLRYEIFKTGSEDCSKNFTSPNGTIESPGFPEKYPHNLDCTFTILAKPKMEIILQFLIFDLEHDPLQVGEGDCKYDWLDIWDGIPHVGPLIGKYCGTKTPSELRSSTGILSLTFHTDMAVAKDGFSARYYLVHQEPLENFQCNVPLGMESGRIANEQISASSTYSDGRWTPQQSRLHGDDNGWTPNLDSNKEYLQVDLRFLTMLTAIATQGAISRETQNGYYVKSYKLEVSTNGEDWMVYRHGKNHKVFQANNDATEVVLNKLHAPLLTRFVRIRPQTWHSGIALRLELFGCRVTDAPCSNMLGMLSGLIADSQISASSTQEYLWSPSAARLVSSRSGWFPRIPQAQPGEEWLQVDLGTPKTVKGVIIQGARGGDSITAVEARAFVRKFKVSYSLNGKDWEYIQDPRTQQPKLFEGNMHYDTPDIRRFDPIPAQYVRVYPERWSPAGIGMRLEVLGCDWTDSKPTVETLGPTVKSEETTTPYPTEEEATECGENCSFEDDKDLQLPSGFNCNFDFLEEPCGWMYDHAKWLRTTWASSSSPNDRTFPDDRNFLRLQSDSQREGQYARLISPPVHLPRSPVCMEFQYQATGGRGVALQVVREASQESKLLWVIREDQGGEWKHGRIILPSYDMEYQIVFEGVIGKGRSGEIAIDDIRISTDVPLENCMEPISAFADEYEVDWSNSSSATSGSGAPSTDKEKSWLYTLDPILITIIAMSSLGVLLGATCAGLLLYCTCSYSGLSSRSCTTLENYNFELYDGLKHKVKMNHQKCCSEA

SEQ ID NO: 9550 - protein, 197 aa, Homo Sapiens
MQRWKAAALASVLCSSVLSIWMCREGLLLSHRLGPALVPLHRLPRTLDARIARLAQYRALLQGAPDAMELRELTPWAGRPPGPRRRAGPRRRRARARLGARPCGLRELEVRVSELGLGYASDETVLFRYCAGACEAAARVYDLGLRRLRQRRRLRRERVRAQPCCRPTAYEDEVSFLDAHSRYHTVHELSARECACV

SEQ ID NO: 9551 - protein, 214 aa, Homo Sapiens [sequence omitted]

SEQ ID NO: 9552 - protein, 851 aa, Homo Sapiens
GKEEYIATFKGSEYFCYDLSQNPIQSSSDEITLSFKTLQRNGLMLHTGKSADYVNLALKNGAVSLVINLGSGAFEALVEPVNGKFNDNAWHDVKVTRNLRQHSGIGHAMVNKLHCSVTISVDGILTTTGYTQEDYTMLGSDDFFYVGGSPSTADLPGSPVSNNFMGCLKEVVYKNNDVRLELSRLAKQGDPKMKIHGVVAFKCENVATLDPITFETPESFISLPKWNAKKTGSISFDFRTTEPNGLILFSHGKPRHQKDAKHPQMIKVDFFAIEMLDGHLYLLLDMGSGTIKIKALLKKVNDGEWYHVDFQRDGRSGTISVNTLRTPYTAPGESEILDLDDELYLGGLPENKAGLVFPTEVWTALLNYGYVGCIRDLFIDGQSKDIRQMAEVQSTAGVKPSCSKETAKPCLSNPCKNNGMCRDGWNRYVCDCSGTGYLGRSCEREATVLSYDGSMFMKIQLPVVMHTEAEDVSLRFRSQRAYGILMATTSRDSADTLRLELDAGRVKLTVNLDCIRINCNSSKGPETLFAGYNLNDNEWHTVRVVRRGKSLKLTVDDQQAMTGQMAGDHTRLEFHNIETGIITERRYLSSVPSNFIGHLQSLTFNGMAYIDLCKNGDIDYCELNARFGFRNIIADPVTFKTKSSYVALATLQAYTSMHLFFQFKTTSLDGLILYNSGDGNDFIVVELVKGYLHYVFDLGNGANLIKGSSNKPLNDNQWHNVMISRDTSNLHTVKIDTKITTQITAGARNLDLKSDLYIGGVAKETYKSLPKLVHAKEGFQGCLASVDLNGRLPDLISDALFCNGQIERGCEGPSTTCQEDSCSNQGVCLQQWDGFSCDCSMTSFSGPLCND

SEQ ID NO: 9553 - protein, 836 aa, Homo Sapiens
GKEEYIATFKGSEYFCYDLSQNPIQSSSDEITLSFKTLQRNGLMLHTGKSADYVNLALKNGAVSLVINLGSGAFEALVEPVNGKFNDNAWHDVKVTRNLRQVTISVDGILTTTGYTQEDYTMLGSDDFFYVGGSPSTADLPGSPVSNNFMGCLKEVVYKNNDVRLELSRLAKQGDPKMKIHGVVAFKCENVATLDPITFETPESFISLPKWNAKKTGSISFDFRTTEPNGLILFSHGKPRHQKDAKHPQMIKVDFFAIEMLDGHLYLLLDMGSGTIKIKALLKKVNDGEWYHVDFQRDGRSGTISVNTLRTPYTAPGESEILDLDDELYLGGLPENKAGLVFPTEVWTALLNYGYVGCIRDLFIDGQSKDIRQMAEVQSTAGVKPSCSKETAKPCLSNPCKNNGMCRDGWNRYVCDCSGTGYLGRSCEREATVLSYDGSMFMKIQLPVVMHTEAEDVSLRFRSQRAYGILMATTSRDSADTLRLELDAGRVKLTVNLDCIRINCNSSKGPETLFAGYNLNDNEWHTVRVVRRGKSLKLTVDDQQAMTGQMAGDHTRLEFHNIETGIITERRYLSSVPSNFIGHLQSLTFNGMAYIDLCKNGDIDYCELNARFGFRNIIADPVTFKTKSSYVALATLQAYTSMHLFFQFKTTSLDGLILYNSGDGNDFIVVELVKGYLHYVFDLGNGANLIKGSSNKPLNDNQWHNVMISRDTSNLHTVKIDTKITTQITAGARNLDLKSDLYIGGVAKETYKSLPKLVHAKEGFQGCLASVDLNGRLPDLISDALFCNGQIERGCEGPSTTCQEDSCSNQGVCLQQWDGFSCDCSMTSFSGPLCND

SEQ ID NO: 9554 - protein, 198 aa, Homo Sapiens
MAAENDANIAIVGNVRLVGEVPSSMTTESTATAMQSEMSTSIMETTTTLATSTARRGKPPTKEPISQTTDDILVASAECPSDDEDIDPCEPSSGGLANPTRAGGREPYPGSAEVIRESSSTTGMVVGIVAAAALCILILLYAMYKYRNRDEGSYHVDESRNYISNSAQSNGAVVKEKQPSSAKSSNKNKKNKDKEYYV

SEQ ID NO: 9555 - protein, 139 aa, Homo Sapiens
MDMRWHCENLQTTDDILVASAECPSDDEDIDPCEPSSANPTRAGGREPYPGSAEVIRESSSTTGMVVGIVAAAALCILILLYAMYKYRNRDEGSYHVDESRNYISNSAQSNGAVVKEKQPSSAKSSNKNKKNKDKEYYV

SEQ ID NO: 9556 - protein, 142 aa, Homo Sapiens
MDMRWHCENLQTTDDILVASAECPSDDEDIDPCEPSSGGLANPTRAGGREPYPGSAEVIRESSSTTGMVVGIVAAAALCILILLYAMYKYRNRDEGSYHVDESRNYISNSAQSNGAVVKEKQPSSAKSSNKNKKNKDKEYYV

SEQ ID NO: 9557 - protein, 62 aa, Homo Sapiens
MDMRWHCENLQTTDDILVASAECPSDDEDIDPCEPSSGTKQTMWKTSRDHRILPNARRERKD

SEQ ID NO: 9558 - protein, 143 aa, Homo Sapiens
MDMRWHCENLQVTTDDILVASAECPSDDEDIDPCEPSSGGLANPTRAGGREPYPGSAEVIRESSSTTGMVVGIVAAAALCILILLYAMYKYRNRDEGSYHVDESRNYISNSAQSNGAVVKEKQPSSAKSSNKNKKNKDKEYYV

SEQ ID NO: 9559 - protein, 1477 aa, Homo Sapiens
MGTALLQRGGCFLLCLSLLLLGCWAELGSGLEFPGAEGQWTRFPKWNACCESEMSFQLKTRSARGLVLYFDDEGFCDFLELILTRGGRLQLSFSIFCAEPATLLADTPVNDGAWHSVRIRRQFRNTTLFIDQVEAKWVEVKSKRRDMTVFSGLFVGGLPPELRAAALKLTLASVREREPFKGWIRDVRVNSSQVLPVDSGEVKLDDEPPNSGGGSPCEAGEEGEGGVCLNGGVCSVVDDQAVCDCSRTGFRGKDCSQEDNNVEGLAHLMMGDQGKSKGKEEYIATFKGSEYFCYDLSQNPIQSSSDEITLSFKTLQRNGLMLHTGKSADYVNLALKNGAVSLVINLGSGAFEALVEPVNGKFNDNAWHDVKVTRNLRQHSGIGHAMVTISVDGILTTTGYTQEDYTMLGSDDFFYVGGSPSTADLPGSPVSNNFMGCLKEVVYKNNDVRLELSRLAKQGDPKMKIHGVVAFKCENVATLDPITFETPESFISLPKWNAKKTGSISFDFRTTEPNGLILFSHGKPRHQKDAKHPQMIKVDFFAIEMLDGHLYLLLDMGSGTIKIKALLKKVNDGEWYHVDFQRDGRSGTISVNTLRTPYTAPGESEILDLDDELYLGGLPENKAGLVFPTEVWTALLNYGYVGCIRDLFIDGQSKDIRQMAEVQSTAGVKPSCSKETAKPCLSNPCKNNGMCRDGWNRYVCDCSGTGYLGRSCEREATVLSYDGSMFMKIQLPVVMHTEAEDVSLRFRSQRAYGILMATTSRDSADTLRLELDAGRVKLTVNLDCIRINCNSSKGPETLFAGYNLNDNEWHTVRVVRRGKSLKLTVDDQQAMTGQMAGDHTRLEFHNIETGIITERRYLSSVPSNFIGHLQSLTFNGMAYIDLCKNGDIDYCELNARFGFRNIIADPVTFKTKSSYVALATLQAYTSMHLFFQFKTTSLDGLILYNSGDGNDFIVVELVKGYLHYVFDLGNGANLIKGSSNKPLNDNQWHNVMISRDTSNLHTVKIDTKITTQITAGARNLDLKSDLYIGGVAKETYKSLPKLVHAKEGFQGCLASVDLNGRLPDLISDALFCNGQIERGCEGPSTTCQEDSCSNQGVCLQQWDGFSCDCSMTSFSGPLCNDPGTTYIFSKGGGQITYKWPPNDRPSTRADRLAIGFSTVQKEAVLVRVDSSSGLGDYLELHIHQGKIGVKFNVGTDDIAIEESNAIINDGKYHVVRFTRSGGNATLQVDSWPVIERYPAGRQLTIFNSQATIIIGGKEQGQPFQGQLSGLYYNGLKVLNMAAENDANIAIVGNVRLVGEVPSSMTTESTATAMQSEMSTSIMETTTTLATSTARRGKPPTKEPISQTTDDILVASAECPSDDEDIDPCEPSSGGLANPTRAGGREPYPGSAEVIRESSSTTGMVVGIVAAAALCILILLYAMYKYRNRDEGSYHVDESRNYISNSAQSNGAVVKEKQPSSAKSSNKNKKNKDKEYYV

SEQ ID NO: 9560 - protein, 278 aa, Homo Sapiens
MGTALLQRGGCFLLCLSLLLLGCWAELGSGLEFPGAEGQWTRFPKWNACCESEMSFQLKTRSARGLVLYFDDEGFCDFLELILTRGGRLQLSFSIFCAEPATLLADTPVNDGAWHSVRIRRQFRNTTLFIDQVEAKWVEVKSKRRDMTVFSGLFVGGLPPELRAAALKLTLASVREREPFKGWIRDVRVNSSQVLPVDSGEVKLDDEPPNSGGGSPCEAGEEGEGGVCLNGGVCSVVDDQAVCDCSRTGFRGKDCSQEDNNVEGLAHLMMGDQGKSKD

SEQ ID NO: 9561 - protein, 1547 aa, Homo Sapiens
MGTALLQRGGCFLLCLSLLLLGCWAELGSGLEFPGAEGQWTRFPKWNACCESEMSFQLKTRSARGLVLYFDDEGFCDFLELILTRGGRLQLSFSIFCAEPATLLADTPVNDGAWHSVRIRRQFRNTTLFIDQVEAKWVEVKSKRRDMTVFSGLFVGGLPPELRAAALKLTLASVREREPFKGWIRDVRVNSSQVLPVDSGEVKLDDEPPNSGGGSPCEAGEEGEGGVCLNGGVCSVVDDQAVCDCSRTGFRGKDCSQEIKFGLQCVLPVLLHDNDQGKYCCINTAKPLTEKDNNVEGLAHLMMGDQGKSKGKEEYIATFKGSEYFCYDLSQNPIQSSSDEITLSFKTLQRNGLMLHTGKSADYVNLALKNGAVSLVINLGSGAFEALVEPVNGKFNDNAWHDVKVTRNLRQHSGIGHAMVNKLHCSVTISVDGILTTTGYTQEDYTMLGSDDFFYVGGSPSTADLPGSPVSNNFMGCLKEVVYKNNDVRLELSRLAKQGDPKMKIHGVVAFKCENVATLDPITFETPESFISLPKWNAKKTGSISFDFRTTEPNGLILFSHGKPRHQKDAKHPQMIKVDFFAIEMLDGHLYLLLDMGSGTIKIKALLKKVNDGEWYHVDFQRDGRSGTISVNTLRTPYTAPGESEILDLDDELYLGGLPENKAGLVFPTEVWTALLNYGYVGCIRDLFIDGQSKDIRQMAEVQSTAGVKPSCSKETAKPCLSNPCKNNGMCRDGWNRYVCDCSGTGYLGRSCEREATVLSYDGSMFMKIQLPVVMHTEAEDVSLRFRSQRAYGILMATTSRDSADTLRLELDAGRVKLTVNLDCIRINCNSSKGPETLFAGYNLNDNEWHTVRVVRRGKSLKLTVDDQQAMTGQMAGDHTRLEFHNIETGIITERRYLSSVPSNFIGHLQSLTFNGMAYIDLCKNGDIDYCELNARFGFRNIIADPVTFKTKSSYVALATLQAYTSMHLFFQFKTTSLDGLILYNSGDGNDFIVVELVKGYLHYVFDLGNGANLIKGSSNKPLNDNQWHNVMISRDTSNLHTVKIDTKITTQITAGARNLDLKSDLYIGGVAKETYKSLPKLVHAKEGFQGCLASVDLNGRLPDLISDALFCNGQIERGCEGPSTTCQEDSCSNQGVCLQQWDGFSCDCSMTSFSGPLCNDPGTTYIFSKGGGQITYKWPPNDRPSTRADRLAIGFSTVQKEAVLVRVDSSSGLGDYLELHIHQGKIGVKFNVGTDDIAIEESNAIINDGKYHVVRFTRSGGNATLQVDSWPVIERYPAGNNDNERLAIARQRIPYRLGRVVDEWLLDKGRQLTIFNSQATIIIGGKEQGQPFQGQLSGLYYNGLKVLNMAAENDANIAIVGNVRLVGEVPSSMTTESTATAMQSEMSTSIMETTTTLATSTARRGKPPTKEPISQTTDDILVASAECPSDDEDIDPCEPSSGGLANPTRAGGREPYPGSAEVIRESSSTTGMVVGIVAAAALCILILLYAMYKYRNRDEGSYHVDESRNYISNSAQSNGAVVKEKQPSSAKSSNKNKKNKDKEYYV

SEQ ID NO: 9562 - protein, 1495 aa, Homo Sapiens
MGTALLQRGGCFLLCLSLLLLGCWAELGSGLEFPGAEGQWTRFPKWNACCESEMSFQLKTRSARGLVLYFDDEGFCDFLELILTRGGRLQLSFSIFCAEPATLLADTPVNDGAWHSVRIRRQFRNTTLFIDQVEAKWVEVKSKRRDMTVFSGLFVGGLPPELRAAALKLTLASVREREPFKGWIRDVRVNSSQVLPVDSGEVKLDDEPPNSGGGSPCEAGEEGEGGVCLNGGVCSVVDDQAVCDCSRTGFRGKDCSQEDNNVEGLAHLMMGDQGKEEYIATFKGSEYFCYDLSQNPIQSSSDEITLSFKTLQRNGLMLHTGKSADYVNLALKNGAVSLVINLGSGAFEALVEPVNGKFNDNAWHDVKVTRNLRQVTISVDGILTTTGYTQEDYTMLGSDDFFYVGGSPSTADLPGSPVSNNFMGCLKEVVYKNNDVRLELSRLAKQGDPKMKIHGVVAFKCENVATLDPITFETPESFISLPKWNAKKTGSISFDFRTTEPNGLILFSHGKPRHQKDAKHPQMIKVDFFAIEMLDGHLYLLLDMGSGTIKIKALLKKVNDGEWYHVDFQRDGRSGTISVNTLRTPYTAPGESEILDLDDELYLGGLPENKAGLVFPTEVWTALLNYGYVGCIRDLFIDGQSKDIRQMAEVQSTAGVKPSCSKETAKPCLSNPCKNNGMCRDGWNRYVCDCSGTGYLGRSCEREATVLSYDGSMFMKIQLPVVMHTEAEDVSLRFRSQRAYGILMATTSRDSADTLRLELDAGRVKLTVNLDCIRINCNSSKGPETLFAGYNLNDNEWHTVRVVRRGKSLKLTVDDQQAMTGQMAGDHTRLEFHNIETGIITERRYLSSVPSNFIGHLQSLTFNGMAYIDLCKNGDIDYCELNARFGFRNIIADPVTFKTKSSYVALATLQAYTSMHLFFQFKTTSLDGLILYNSGDGNDFIVVELVKGYLHYVFDLGNGANLIKGSSNKPLNDNQWHNVMISRDTSNLHTVKIDTKITTQITAGARNLDLKSDLYIGGVAKETYKSLPKLVHAKEGFQGCLASVDLNGRLPDLISDALFCNGQIERGCEGPSTTCQEDSCSNQGVCLQQWDGFSCDCSMTSFSGPLCNDPGTTYIFSKGGGQITYKWPPNDRPSTRADRLAIGFSTVQKEAVLVRVDSSSGLGDYLELHIHQGKIGVKFNVGTDDIAIEESNAIINDGKYHVVRFTRSGGNATLQVDSWPVIERYPAGNNDNERLAIARQRIPYRLGRVVDEWLLDKGRQLTIFNSQATIIIGGKEQGQPFQGQLSGLYYNGLKVLNMAAENDANIAIVGNVRLVGEVPSSMTTESTATAMQSEMSTSIMETTTTLATSTARRGKPPTKEPISQTTDDILVASAECPSDDEDIDPCEPSSGGLANPTRAGGREPYPGSAEVIRESSSTTGMVVGIVAAAALCILILLYAMYKYRNRDEGSYHVDESRNYISNSAQSNGAVVKEKQPSSAKSSNKNKKNKDKEYYV

SEQ ID NO: 9563 - protein, 1507 aa, Homo Sapiens
MGTALLQRGGCFLLCLSLLLLGCWAELGSGLEFPGAEGQWTRFPKWNACCESEMSFQLKTRSARGLVLYFDDEGFCDFLELILTRGGRLQLSFSIFCAEPATLLADTPVNDGAWHSVRIRRQFRNTTLFIDQVEAKWVEVKSKRRDMTVFSGLFVGGLPPELRAAALKLTLASVREREPFKGWIRDVRVNSSQVLPVDSGEVKLDDEPPNSGGGSPCEAGEEGEGGVCLNGGVCSVVDDQAVCDCSRTGFRGKDCSQEDNNVEGLAHLMMGDQGKSKGKEEYIATFKGSEYFCYDLSQNPIQSSSDEITLSFKTLQRNGLMLHTGKSADYVNLALKNGAVSLVINLGSGAFEALVEPVNGKFNDNAWHDVKVTRNLRQHSGIGHAMVTISVDGILTTTGYTQEDYTMLGSDDFFYVGGSPSTADLPGSPVSNNFMGCLKEVVYKNNDVRLELSRLAKQGDPKMKIHGVVAFKCENVATLDPITFETPESFISLPKWNAKKTGSISFDFRTTEPNGLILFSHGKPRHQKDAKHPQMIKVDFFAIEMLDGHLYLLLDMGSGTIKIKALLKKVNDGEWYHVDFQRDGRSGTISVNTLRTPYTAPGESEILDLDDELYLGGLPENKAGLVFPTEVWTALLNYGYVGCIRDLFIDGQSKDIRQMAEVQSTAGVKPSCSKETAKPCLSNPCKNNGMCRDGWNRYVCDCSGTGYLGRSCEREATVLSYDGSMFMKIQLPVVMHTEAEDVSLRFRSQRAYGILMATTSRDSADTLRLELDAGRVKLTVNLDCIRINCNSSKGPETLFAGYNLNDNEWHTVRVVRRGKSLKLTVDDQQAMTGQMAGDHTRLEFHNIETGIITERRYLSSVPSNFIGHLQSLTFNGMAYIDLCKNGDIDYCELNARFGFRNIIADPVTFKTKSSYVALATLQAYTSMHLFFQFKTTSLDGLILYNSGDGNDFIVVELVKGYLHYVFDLGNGANLIKGSSNKPLNDNQWHNVMISRDTSNLHTVKIDTKITTQITAGARNLDLKSDLYIGGVAKETYKSLPKLVHAKEGFQGCLASVDLNGRLPDLISDALFCNGQIERGCEGPSTTCQEDSCSNQGVCLQQWDGFSCDCSMTSFSGPLCNDPGTTYIFSKGGGQITYKWPPNDRPSTRADRLAIGFSTVQKEAVLVRVDSSSGLGDYLELHIHQGKIGVKFNVGTDDIAIEESNAIINDGKYHVVRFTRSGGNATLQVDSWPVIERYPAGNNDNERLAIARQRIPYRLGRVVDEWLLDKGRQLTIFNSQATIIIGGKEQGQPFQGQLSGLYYNGLKVLNMAAENDANIAIVGNVRLVGEVPSSMTTESTATAMQSEMSTSIMETTTTLATSTARRGKPPTKEPISQTTDDILVASAECPSDDEDIDPCEPSSGGLANPTRAGGREPYPGSAEVIRESSSTTGMVVGIVAAAALCILILLYAMYKYRNRDEGSYHVDESRNYISNSAQSNGAVVKEKQPSSAKSSNKNKKNKDKEYYV

SEQ ID NO: 9564 - protein, 1496 aa, Homo Sapiens
MGTALLQRGGCFLLCLSLLLLGCWAELGSGLEFPGAEGQWTRFPKWNACCESEMSFQLKTRSARGLVLYFDDEGFCDFLELILTRGGRLQLSFSIFCAEPATLLADTPVNDGAWHSVRIRRQFRNTTLFIDQVEAKWVEVKSKRRDMTVFSGLFVGGLPPELRAAALKLTLASVREREPFKGWIRDVRVNSSQVLPVDSGEVKLDDEPPNSGGGSPCEAGEEGEGGVCLNGGVCSVVDDQAVCDCSRTGFRGKDCSQEDNNVEGLAHLMMGDQGKSKGKEEYIATFKGSEYFCYDLSQNPIQSSSDEITLSFKTLQRNGLMLHTGKSADYVNLALKNGAVSLVINLGSGAFEALVEPVNGKFNDNAWHDVKVTRNLRQVTISVDGILTTTGYTQEDYTMLGSDDFFYVGGSPSTADLPGSPVSNNFMGCLKEVVYKNNDVRLELSRLAKQGDPKMKIHGVVAFKCENVATLDPITFETPESFISLPKWNAKKTGSISFDFRTTEPNGLILFSHGKPRHQKDAKHPQMIKVDFFAIEMLDGHLYLLLDMGSGTIKIKALLKKVNDGEWYHVDFQRDGRSGTISVNTLRTPYTAPGESEILDLDDELYLGGLPENKAGLVFPTEVWTALLNYGYVGCIRDLFIDGQSKDIRQMAEVQSTAGVKPSCSKETAKPCLSNPCKNNGMCRDGWNRYVCDCSGTGYLGRSCEREATVLSYDGSMFMKIQLPVVMHTEAEDVSLRFRSQRAYGILMATTSRDSADTLRLELDAGRVKLTVNLDCIRINCNSSKGPETLFAGYNLNDNEWHTVRVVRRGKSLKLTVDDQQAMTGQMAGDHTRLEFHNIETGIITERRYLSSVPSNFIGHLQSLTFNGMAYIDLCKNGDIDYCELNARFGFRNIIADPVTFKTKSSYVALATLQAYTSMHLFFQFKTTSLDGLILYNSGDGNDFIVVELVKGYLHYVFDLGNGANLIKGSSNKPLNDNQWHNVMISRDTSNLHTVKIDTKITTQITAGARNLDLKSDLYIGGVAKETYKSLPKLVHAKEGFQGCLASVDLNGRLPDLISDALFCNGQIERGCEGPSTTCQEDSCSNQGVCLQQWDGFSCDCSMTSFSGPLCNDPGTTYIFSKGGGQITYKWPPNDRPSTRADRLAIGFSTVQKEAVLVRVDSSSGLGDYLELHIHQGKIGVKFNVGTDDIAIEESNAIINDGKYHVVRFTRSGGNATLQVDSWPVIERYPAGNNDNERLAIARQRIPYRLGRVVDEWLLDKGRQLTIFNSQATIIIGGKEQGQPFQGQLSGLYYNGLKVLNMAAENDANIAIVGNVRLVGEVPSSMTTESTATAMQSEMSTSIMETTTTLATSTARRGKPPTKEPISQTTDDILVASAECPSDDEDIDPCEPSSANPTRAGGREPYPGSAEVIRESSSTTGMVVGIVAAAALCILILLYAMYKYRNRDEGSYHVDESRNYISNSAQSNGAVVKEKQPSSAKSSNKNKKNKDKEYYV

SEQ ID NO: 9565 - protein, 459 aa, Homo Sapiens
MGTALLQRGGCFLLCLSLLLLGCWAELGSGLEFPGAEGQWTRFPKWNACCESEMSFQLKTRSARGLVLYFDDEGFCDFLELILTRGGRLQLSFSIFCAEPATLLADTPVNDGAWHSVRIRRQFRNTTLFIDQVEAKWVEVKSKRRDMTVFSGLFVGGLPPELRAAALKLTLASVREREPFKGWIRDVRVNSSQVLPVDSGEVKLDDEPPNSGGGSPCEAGEEGEGGVCLNGGVCSVVDDQAVCDCSRTGFRGKDCSQGKEEYIATFKGSEYFCYDLSQNPIQSSSDEITLSFKTLQRNGLMLHTGKSADYVNLALKNGAVSLVINLGSGAFEALVEPVNGKFNDNAWHDVKVTRNLRQVTISVDGILTTTGYTQEDYTMLGSDDFFYVGGSPSTADLPGSPVSNNFMGCLKEVNIVAIRIIPNSWSHHFRSSMKAPLLKTRCSRVKRHNFKFNILLLFM

SEQ ID NO: 9566 - protein, 277 aa, Homo Sapiens
MGTALLQRGGCFLLCLSLLLLGCWAELGSGLEFPGAEGQWTRFPKWNACCESEMSFQLKTRSARGLVLYFDDEGFCDFLELILTRGGRLQLSFSIFCAEPATLLADTPVNDGAWHSVRIRRQFRNTTLFIDQVEAKWVEVKSKRRDMTVFSGLFVGGLPPELRAAALKLTLASVREREPFKGWIRDVRVNSSQVLPVDSGEVKLDDEPPNSGGGSPCEAGEEGEGGVCLNGGVCSVVDDQAVCDCSRTGFRGKDCSQDNNVEGLAHLMMGDQGKSKD

SEQ ID NO: 9567 - protein, 293 aa, Homo Sapiens
MGTALLQRGGCFLLCLSLLLLGCWAELGSGLEFPGAEGQWTRFPKWNACCESEMSFQLKTRSARGLVLYFDDEGFCDFLELILTRGGRLQLSFSIFCAEPATLLADTPVNDGAWHSVRIRRQFRNTTLFIDQVEAKWVEVKSKRRDMTVFSGLFVGGLPPELRAAALKLTLASVREREPFKGWIRDVRVNSSQVLPVDSGEVKLDDEPPNSGGGSPCEAGEEGEGGVCLNGGVCSVVDDQAVCDCSRTGFRGKDCSQEDNNVEGLAHLMMGDQGKSKEMNDYLNYKKVKICYT

SEQ ID NO: 9568 - protein, 1499 aa, Homo Sapiens
MGTALLQRGGCFLLCLSLLLLGCWAELGSGLEFPGAEGQWTRFPKWNACCESEMSFQLKTRSARGLVLYFDDEGFCDFLELILTRGGRLQLSFSIFCAEPATLLADTPVNDGAWHSVRIRRQFRNTTLFIDQVEAKWVEVKSKRRDMTVFSGLFVGGLPPELRAAALKLTLASVREREPFKGWIRDVRVNSSQVLPVDSGEVKLDDEPPNSGGGSPCEAGEEGEGGVCLNGGVCSVVDDQAVCDCSRTGFRGKDCSQEDNNVEGLAHLMMGDQGKSKGKEEYIATFKGSEYFCYDLSQNPIQSSSDEITLSFKTLQRNGLMLHTGKSADYVNLALKNGAVSLVINLGSGAFEALVEPVNGKFNDNAWHDVKVTRNLRQVTISVDGILTTTGYTQEDYTMLGSDDFFYVGGSPSTADLPGSPVSNNFMGCLKEVVYKNNDVRLELSRLAKQGDPKMKIHGVVAFKCENVATLDPITFETPESFISLPKWNAKKTGSISFDFRTTEPNGLILFSHGKPRHQKDAKHPQMIKVDFFAIEMLDGHLYLLLDMGSGTIKIKALLKKVNDGEWYHVDFQRDGRSGTISVNTLRTPYTAPGESEILDLDDELYLGGLPENKAGLVFPTEVWTALLNYGYVGCIRDLFIDGQSKDIRQMAEVQSTAGVKPSCSKETAKPCLSNPCKNNGMCRDGWNRYVCDCSGTGYLGRSCEREATVLSYDGSMFMKIQLPVVMHTEAEDVSLRFRSQRAYGILMATTSRDSADTLRLELDAGRVKLTVNLDCIRINCNSSKGPETLFAGYNLNDNEWHTVRVVRRGKSLKLTVDDQQAMTGQMAGDHTRLEFHNIETGIITERRYLSSVPSNFIGHLQSLTFNGMAYIDLCKNGDIDYCELNARFGFRNIIADPVTFKTKSSYVALATLQAYTSMHLFFQFKTTSLDGLILYNSGDGNDFIVVELVKGYLHYVFDLGNGANLIKGSSNKPLNDNQWHNVMISRDTSNLHTVKIDTKITTQITAGARNLDLKSDLYIGGVAKETYKSLPKLVHAKEGFQGCLASVDLNGRLPDLISDALFCNGQIERGCEGPSTTCQEDSCSNQGVCLQQWDGFSCDCSMTSFSGPLCNDPGTTYIFSKGGGQITYKWPPNDRPSTRADRLAIGFSTVQKEAVLVRVDSSSGLGDYLELHIHQGKIGVKFNVGTDDIAIEESNAIINDGKYHVVRFTRSGGNATLQVDSWPVIERYPAGNNDNERLAIARQRIPYRLGRVVDEWLLDKGRQLTIFNSQATIIIGGKEQGQPFQGQLSGLYYNGLKVLNMAAENDANIAIVGNVRLVGEVPSSMTTESTATAMQSEMSTSIMETTTTLATSTARRGKPPTKEPISQTTDDILVASAECPSDDEDIDPCEPSSGGLANPTRAGGREPYPGSAEVIRESSSTTGMVVGIVAAAALCILILLYAMYKYRNRDEGSYHVDESRNYISNSAQSNGAVVKEKQPSSAKSSNKNKKNKDKEYYV

SEQ ID NO: 9569 - protein, 56 aa, Homo Sapiens
MTSGSKCPSTDSASLLPRKSRGLMAYILPLVQLTSSVGEDCSFQISTFLFDLSSIS

SEQ ID NO: 9570 - protein, 176 aa, Homo Sapiens
MTSGSKCPSTDSGKEEYIATFKGSEYFCYDLSQNPIQSSSDEITLSFKTLQRNGLMLHTGKSADYVNLALKNGAVSLVINLGSGAFEALVEPVNGKFNDNAWHDVKVTRNLRQVTISVDGILTTTGYTQEDYTMLGSDDFFYVGGSPSTADLPGSPIQHESTFAEDPMFQSQTAQL

SEQ ID NO: 9571 - protein, 903 aa, Homo Sapiens
MTSGSKCPSTDSGKEEYIATFKGSEYFCYDLSQNPIQSSSDEITLSFKTLQRNGLMLHTGKSADYVNLALKNGAVSLVINLGSGAFEALVEPVNGKFNDNAWHDVKVTRNLRQVTISVDGILTTTGYTQEDYTMLGSDDFFYVGGSPSTADLPGSPVSNNFMGCLKEVVYKNNDVRLELSRLAKQGDPKMKIHGVVAFKCENVATLDPITFETPESFISLPKWNAKKTGSISFDFRTTEPNGLILFSHGKPRHQKDAKHPQMIKVDFFAIEMLDGHLYLLLDMGSGTIKIKALLKKVNDGEWYHVDFQRDGRSGTISVNTLRTPYTAPGESEILDLDDELYLGGLPENKAGLVFPTEVWTALLNYGYVGCIRDLFIDGQSKDIRQMAEVQSTAGVKPSCSKETAKPCLSNPCKNNGMCRDGWNRYVCDCSGTGYLGRSCEREATVLSYDGSMFMKIQLPVVMHTEAEDVSLRFRSQRAYGILMATTSRDSADTLRLELDAGRVKLTVNLGKGPETLFAGYNLNDNEWHTVRVVRRGKSLKLTVDDQQAMTGQMAGDHTRLEFHNIETGIITERRYLSSVPSNFIGHLQSLTFNGMAYIDLCKNGDIDYCELNARFGFRNIIADPVTFKTKSSYVALATLQAYTSMHLFFQFKTTSLDGLILYNSGDGNDFIVVELVKGYLHYVFDLGNGANLIKGSSNKPLNDNQWHNVMISRDTSNLHTVKIDTKITTQITAGARNLDLKSDLYIGGVAKETYKSLPKLVHAKEGFQGCLASVDLNGRLPDLISDALFCNGQIERGCEGPSTTCQEDSCSNQGVCLQQWDGFSCDCSMTSFSGPLCNDPGTTYIFSKGGGQITYKWPPNDRPSTRADRLAIGFSTVQKEAVLVRVDSSSGLGDYLELHITLQ

SEQ ID NO: 9572 - protein, 75 aa, Homo Sapiens
MVVGIVAAAALCILILLYAMYKYRNRDEGSYHVDESRNYISNSAQSNGAVVKEKQPSSAKSSNKNKKNKDKEYYV

SEQ ID NO: 9573 - protein, 472 aa, Homo Sapiens
MYQRMLRCGAELGSPGGGGGGGGGGGAGGRLALLWIVPLTLSGLLGVAWGASSLGAHHIHHFHGSSKHHSVPIAIYRSPASLRGGHAGTTYIFSKGGGQITYKWPPNDRPSTRADRLAIGFSTVQKEAVLVRVDSSSGLGDYLELHIHQGKIGVKFNVGTDDIAIEESNAIINDGKYHVVRFTRSGGNATLQVDSWPVIERYPAGNNDNERLAIARQRIPYRLGRVVDEWLLDKGRQLTIFNSQATIIIGGKEQGQPFQGQLSGLYYNGLKVLNMAAENDANIAIVGNVRLVGEVPSSMTTESTATAMQSEMSTSIMETTTTLATSTARRGKPPTKEPISQTTDDILVASAECPSDDEDIDPCEPSSGGLANPTRAGGREPYPGSAEVIRESSSTTGMVVGIVAAAALCILILLYAMYKYRNRDEGSYHVDESRNYISNSAQSNGAVVKEKQPSSAKSSNKNKKNKDKEYYV

SEQ ID NO: 9574 - protein, 469 aa, Homo Sapiens
MYQRMLRCGAELGSPGGGGGGGGGGGAGGRLALLWIVPLTLSGLLGVAWGASSLGAHHIHHFHGSSKHHSVPIAIYRSPASLRGGHAGTTYIFSKGGGQITYKWPPNDRPSTRADRLAIGFSTVQKEAVLVRVDSSSGLGDYLELHIHQGKIGVKFNVGTDDIAIEESNAIINDGKYHVVRFTRSGGNATLQVDSWPVIERYPAGNNDNERLAIARQRIPYRLGRVVDEWLLDKGRQLTIFNSQATIIIGGKEQGQPFQGQLSGLYYNGLKVLNMAAENDANIAIVGNVRLVGEVPSSMTTESTATAMQSEMSTSIMETTTTLATSTARRGKPPTKEPISQTTDDILVASAECPSDDEDIDPCEPSSANPTRAGGREPYPGSAEVIRESSSTTGMVVGIVAAAALCILILLYAMYKYRNRDEGSYHVDESRNYISNSAQSNGAVVKEKQPSSAKSSNKNKKNKDKEYYV

SEQ ID NO: 9575 - protein, 442 aa, Homo Sapiens
MYQRMLRCGAELGSPGGGGGGGGGGGAGGRLALLWIVPLTLSGLLGVAWGASSLGAHHIHHFHGSSKHHSVPIAIYRSPASLRGGHAGTTYIFSKGGGQITYKWPPNDRPSTRADRLAIGFSTVQKEAVLVRVDSSSGLGDYLELHIHQGKIGVKFNVGTDDIAIEESNAIINDGKYHVVRFTRSGGNATLQVDSWPVIERYPAGRQLTIFNSQATIIIGGKEQGQPFQGQLSGLYYNGLKVLNMAAENDANIAIVGNVRLVGEVPSSMTTESTATAMQSEMSTSIMETTTTLATSTARRGKPPTKEPISQTTDDILVASAECPSDDEDIDPCEPSSGGLANPTRAGGREPYPGSAEVIRESSSTTGMVVGIVAAAALCILILLYAMYKYRNRDEGSYHVDESRNYISNSAQSNGAVVKEKQPSSAKSSNKNKKNKDKEYYV

SEQ ID NO: 9576 - protein, 136 aa, Homo Sapiens
SSQVLPVDSGEVKLDDEPPNSGGGSPCEAGEEGEGGVCLNGGVCSVVDDQAVCDCSRTGFRGKDCSQEIKFGLQCVLPVLLHDNDQGKYCCINTAKPLTEKDNNVEGLAHLMMGDQGKSKEKLEIFRWIRKDFTNF

SEQ ID NO: 9577 - protein, 123 aa, Homo Sapiens
TLSGLLGVAWGASSLGAHHIHHFHGSSKHHSVPIAIYRSPASLRGGHAGTTYIFSKGGGQITYKWPPNDRPSTRADRLAIGFSTVQKEAVLVRVDSSSGLGDYLELHIAFESFTASRSSASRC

SEQ ID NO: 9578 - protein, 33 aa, Homo Sapiens
  misc_feature (1)..(1): Xaa can be any naturally occurring amino acid
XFQRDGRSDFPFASSLVPPSTQNSCPGTISVNT

SEQ ID NO: 9579 - protein, 126 aa, Homo Sapiens
  misc_feature (1)..(1): Xaa can be any naturally occurring amino acid
XPELRAAALKLTLASVREREPFKGWIRDVRVNSSQVLPVDSGEVKLDDEPPNSGGGSPCEAGEEGEGGVCLNGGVCSVVDDQAVCDCSRTGFRGKDCSQGLAHLMMGDQGMGSVPFPLCFQCFLVL

SEQ ID NO: 9580 - protein, 169 aa, Homo Sapiens
  misc_feature (1)..(1): Xaa can be any naturally occurring amino acid
XSNNFMGCLKEVVYKNNDVRLELSRLAKQGDPKMKIHGVVAFKCENVATLDPITFETPESFISLPKWNAKKTGSISFDFRTTEPNGLILFSHGKPRHQKDAKHPQMIKVDFFAIEMLDGHLYLLLDMGSGTIKIKALLKKVNDGEWYHVDFQRDGRSGQMAGDHTRLEF

SEQ ID NO: 9581 - protein, 155 aa, Homo Sapiens
  misc_feature (1)..(1): Xaa can be any naturally occurring amino acid
XVFSGLFVGGLPPELRAAALKLTLASVREREPFKGWIRDVRVNSSQVLPVDSGEVKLDDEPPNSGGGSPCEAGEEGEGGVCLNGGVCSVVDDQAVCDCSRTGFRGKDCSQEDNNVEGLAHLMMGDQGKSKELMLILLCSITTQGLETAKSLIMCT

SEQ ID NO: 9582 - protein, 276 aa, Homo Sapiens
LLLLLLGAAEGARVSSSLSTTHHVHHFHSKHGTVPIAINRMPFLTRGGHAGTTYIFGKGGALITYTWPPNDRPSTRMDRLAVGFSTHQRSAVLVRVDSASGLGDYLQLHIDQGTVGVIFNVGTDDITIDEPNAIVSDGKYHVVRFTRSGGNATLQVDSWPVNERYPAGRQLTIFNSQAAIKIGGRDQGRPFQGQVSGLYYNGLKVLALAAESDPNVRTEGHLRLVGEGPSVLLSAETTATTLLADMATTIMETTTTMATTTTRRGRSPTLRDSTTQ

SEQ ID NO: 9583 - protein, 1712 aa, Homo Sapiens
MASGSRWRPTPPPLLLLLLLALAARADGLEFGGGPGQWARYARWAGAASSGELSFSLRTNATRALLLYLDDGGDCDFLELLLVDGRLRLRFTLSCAEPATLQLDTPVADDRWHMVLLTRDARRTALAVDGEARAAEVRSKRREMQVASDLFVGGIPPDVRLSALTLSTVKYEPPFRGLLANLKLGERPPALLGSQGLRGATADPLCAPARNPCANGGLCTVLAPGEVGCDCSHTGFGGKFCSEEEHPMEGPAHLTLNSEVGSLLFSEGGAGRGGAGDVHQPTKGKEEFVATFKGNEFFCYDLSHNPIQSSTDEITLAFRTLQRNGLMLHTGKSADYVNLSLKSGAVWLVINLGSGAFEALVEPVNGKFNDNAWHDVRVTRNLRQHAGIGHAMVNKLHYLVTISVDGILTTTGYTQEDYTMLGSDDFFYIGGSPNTADLPGSPVSNNFMGCLKDVVYKNNDFKLELSRLAKEGDPKMKLQGDLSFRCEDVAALDPVTFESPEAFVALPRWSAKRTGSISLDFRTTEPNGLLLFSQGRRAGGGAGSHSSAQRADYFAMELLDGHLYLLLDMGSGGIKLRASSRKVNDGEWCHVDFQRDGRKGSISVNSRSTPFLATGDSEILDLESELYLGGLPEGGRVDLPLPPEVWTAALRAGYVGCVRDLFIDGRSRDLRGLAEAQGAVGVAPFCSRETLKQCASAPCRNGGVCREGWNRFICDCIGTGFLGRVCEREATVLSYDGSMYMKIMLPNAMHTEAEDVSLRFMSQRAYGLMMATTSRESADTLRLELDGGQMKLTVNLDCLRVGCAPSKGPETLFAGHKLNDNEWHTVRVVRRGKSLQLSVDNVTVEGQMAGAHMRLEFHNIETGIMTERRFISVVPSNFIGHLSGLVFNGQPYMDQCKDGDITYCELNARFGLRAIVADPVTFKSRSSYLALATLQAYASMHLFFQFKTTAPDGLLLFNSGNGNDFIVIELVKGYIHYVFDLGNGPSLMKGNSDKPVNDNQWHNVVVSRDPGNVHTLKIDSRTVTQHSNGARNLDLKGELYIGGLSKNMFSNLPKLVASRDGFQGCLASVDLNGRLPDLIADALHRIGQVERGCDGPSTTCTEESCANQGVCLQQWDGFTCDCTMTSYGGPVCNDPGTTYIFGKGGALITYTWPPNDRPSTRMDRLAVGFSTHQRSAVLVRVDSASGLGDYLQLHIDQGTVGVIFNVGTDDITIDEPNAIVSDGKYHVVRFTRSGGNATLQVDSWPVNERYPAGNFDNERLAIARQRIPYRLGRVVDEWLLDKGRQLTIFNSQAAIKIGGRDQGRPFQGQVSGLYYNGLKVLALAAESDPNVRTEGHLRLVGEGPSVLLSAETTATTLLADMATTIMETTTTMATTTTRRGRSPTLRDSTTQNTDDLLVASAECPSDDEDLEECEPSTGGELILPIITEDSLDPPPVATRSPFVPPPPTFYPFLTGVGATQDTLPPPAARRPPSGGPCQAERDDSDCEEPIEASGFASGEVFDSSLPPTDDEDFYTTFPLVTDRTTLLSPRKPAPRPNLRTDGATGAPGVLFAPSAPAPNLPAGKMNHRDPLQPLLENPPLGPGAPTSFEPRRPPPLRPGVTSAPGFPHLPTANPTGPGERGPPGAVEVIRESSSTTGMVVGIVAAAALCILILLYAMYKYRNRDEGSYQVDQSRNYISNSAQSNGAVVKEKAPAAPKTPSKAKKNKDKEYYV

SEQ ID NO: 9584 - protein, 1642 aa, Homo Sapiens
MASGSRWRPTPPPLLLLLLLALAARADGLEFGGGPGQWARYARWAGAASSGELSFSLRTNATRALLLYLDDGGDCDFLELLLVDGRLRLRFTLSCAEPATLQLDTPVADDRWHMVLLTRDARRTALAVDGEARAAEVRSKRREMQVASDLFVGGIPPDVRLSALTLSTVKYEPPFRGLLANLKLGERPPALLGSQGLRGATADPLCAPARNPCANGGLCTVLAPGEVGCDCSHTGFGGKFCSEEEHPMEGPAHLTLNSEGKEEFVATFKGNEFFCYDLSHNPIQSSTDEITLAFRTLQRNGLMLHTGKSADYVNLSLKSGAVWLVINLGSGAFEALVEPVNGKFNDNAWHDVRVTRNLRQHAGIGHAMVTISVDGILTTTGYTQEDYTMLGSDDFFYIGGSPNTADLPGSPVSNNFMGCLKDVVYKNNDFKLELSRLAKEGDPKMKLQGDLSFRCEDVAALDPVTFESPEAFVALPRWSAKRTGSISLDFRTTEPNGLLLFSQGRRAGGGAGSHSSAQRADYFAMELLDGHLYLLLDMGSGGIKLRASSRKVNDGEWCHVDFQRDGRKGSISVNSRSTPFLATGDSEILDLESELYLGGLPEGGRVDLPLPPEVWTAALRAGYVGCVRDLFIDGRSRDLRGLAEAQGAVGVAPFCSRETLKQCASAPCRNGGVCREGWNRFICDCIGTGFLGRVCEREATVLSYDGSMYMKIMLPNAMHTEAEDVSLRFMSQRAYGLMMATTSRESADTLRLELDGGQMKLTVNLGKGPETLFAGHKLNDNEWHTVRVVRRGKSLQLSVDNVTVEGQMAGAHMRLEFHNIETGIMTERRFISVVPSNFIGHLSGLVFNGQPYMDQCKDGDITYCELNARFGLRAIVADPVTFKSRSSYLALATLQAYASMHLFFQFKTTAPDGLLLFNSGNGNDFIVIELVKGYIHYVFDLGNGPSLMKGNSDKPVNDNQWHNVVVSRDPGNVHTLKIDSRTVTQHSNGARNLDLKGELYIGGLSKNMFSNLPKLVASRDGFQGCLASVDLNGRLPDLIADALHRIGQVERGCDGPSTTCTEESCANQGVCLQQWDGFTCDCTMTSYGGPVCNDPGTTYIFGKGGALITYTWPPNDRPSTRMDRLAVGFSTHQRSAVLVRVDSASGLGDYLQLHIDQGTVGVIFNVGTDDITIDEPNAIVSDGKYHVVRFTRSGGNATLQVDSWPVNERYPAGRQLTIFNSQAAIKIGGRDQGRPFQGQVSGLYYNGLKVLALAAESDPNVRTEGHLRLVGEGPSVLLSAETTATTLLADMATTIMETTTTMATTTTRRGRSPTLRDSTTQNTDDLLVASAECPSDDEDLEECEPSTGGELILPIITEDSLDPPPVATRSPFVPPPPTFYPFLTGVGATQDTLPPPAARRPPSGGPCQAERDDSDCEEPIEASGFASGEVFDSSLPPTDDEDFYTTFPLVTDRTTLLSPRKPAPRPNLRTDGATGAPGVLFAPSAPAPNLPAGKMNHRDPLQPLLENPPLGPGAPTSFEPRRPPPLRPGVTSAPGFPHLPTANPTGPGERGPPGAVEVIRESSSTTGMVVGIVAAAALCILILLYAMYKYRNRDEGSYQVDQSRNYISNSAQSNGAVVKEKAPAAPKTPSKAKKNKDKEYYV

SEQ ID NO: 9585 - protein, 1712 aa, Homo Sapiens; identical to SEQ ID NO: 9583

SEQ ID NO: 9586 - protein, 1705 aa, Homo Sapiens
MASGSRWRPTPPPLLLLLLLALAARADGLEFGGGPGQWARYARWAGAASSGELSFSLRTNATRALLLYLDDGGDCDFLELLLVDGRLRLRFTLSCAEPATLQLDTPVADDRWHMVLLTRDARRTALAVDGEARAAEVRSKRREMQVASDLFVGGIPPDVRLSALTLSTVKYEPPFRGLLANLKLGERPPALLGSQGLRGATADPLCAPARNPCANGGLCTVLAPGEVGCDCSHTGFGGKFCSEEEHPMEGPAHLTLNSEVGSLLFSEGGAGRGGAGDVHQPTKGKEEFVATFKGNEFFCYDLSHNPIQSSTDEITLAFRTLQRNGLMLHTGKSADYVNLSLKSGAVWLVINLGSGAFEALVEPVNGKFNDNAWHDVRVTRNLRQHAGIGHAMVTISVDGILTTTGYTQEDYTMLGSDDFFYIGGSPNTADLPGSPVSNNFMGCLKDVVYKNNDFKLELSRLAKEGDPKMKLQGDLSFRCEDVAALDPVTFESPEAFVALPRWSAKRTGSISLDFRTTEPNGLLLFSQGRRAGGGAGSHSSAQRADYFAMELLDGHLYLLLDMGSGGIKLRASSRKVNDGEWCHVDFQRDGRKGSISVNSRSTPFLATGDSEILDLESELYLGGLPEGGRVDLPLPPEVWTAALRAGYVGCVRDLFIDGRSRDLRGLAEAQGAVGVAPFCSRETLKQCASAPCRNGGVCREGWNRFICDCIGTGFLGRVCEREATVLSYDGSMYMKIMLPNAMHTEAEDVSLRFMSQRAYGLMMATTSRESADTLRLELDGGQMKLTVNLDCLRVGCAPSKGPETLFAGHKLNDNEWHTVRVVRRGKSLQLSVDNVTVEGQMAGAHMRLEFHNIETGIMTERRFISVVPSNFIGHLSGLVFNGQPYMDQCKDGDITYCELNARFGLRAIVADPVTFKSRSSYLALATLQAYASMHLFFQFKTTAPDGLLLFNSGNGNDFIVIELVKGYIHYVFDLGNGPSLMKGNSDKPVNDNQWHNVVVSRDPGNVHTLKIDSRTVTQHSNGARNLDLKGELYIGGLSKNMFSNLPKLVASRDGFQGCLASVDLNGRLPDLIADALHRIGQVERGCDGPSTTCTEESCANQGVCLQQWDGFTCDCTMTSYGGPVCNDPGTTYIFGKGGALITYTWPPNDRPSTRMDRLAVGFSTHQRSAVLVRVDSASGLGDYLQLHIDQGTVGVIFNVGTDDITIDEPNAIVSDGKYHVVRFTRSGGNATLQVDSWPVNERYPAGNFDNERLAIARQRIPYRLGRVVDEWLLDKGRQLTIFNSQAAIKIGGRDQGRPFQGQVSGLYYNGLKVLALAAESDPNVRTEGHLRLVGEGPSVLLSAETTATTLLADMATTIMETTTTMATTTTRRGRSPTLRDSTTQNTDDLLVASAECPSDDEDLEECEPSTGGELILPIITEDSLDPPPVATRSPFVPPPPTFYPFLTGVGATQDTLPPPAARRPPSGGPCQAERDDSDCEEPIEASGFASGEVFDSSLPPTDDEDFYTTFPLVTDRTTLLSPRKPAPRPNLRTDGATGAPGVLFAPSAPAPNLPAGKMNHRDPLQPLLENPPLGPGAPTSFEPRRPPPLRPGVTSAPGFPHLPTANPTGPGERGPPGAVEVIRESSSTTGMVVGIVAAAALCILILLYAMYKYRNRDEGSYQVDQSRNYISNSAQSNGAVVKEKAPAAPKTPSKAKKNKDKEYYV

SEQ ID NO: 9587 - protein, 666 aa, Homo Sapiens
MPPGGSGPGGCPRRPPALAGPLPPPPPPPPPPLLPLLPLLLLLLLGAAEGARVSSSLSTTHHVHHFHSKHGTVPIAINRMPFLTRGGHAGTTYIFGKGGALITYTWPPNDRPSTRMDRLAVGFSTHQRSAVLVRVDSASGLGDYLQLHIDQGTVGVIFNVGTDDITIDEPNAIVSDGKYHVVRFTRSGGNATLQVDSWPVNERYPAGNFDNERLAIARQRIPYRLGRVVDEWLLDKGRQLTIFNSQAAIKIGGRDQGRPFQGQVSGLYYNGLKVLALAAESDPNVRTEGHLRLVGEGPSVLLSAETTATTLLADMATTIMETTTTMATTTTRRGRSPTLRDSTTQNTDDLLVASAECPSDDEDLEECEPSTGGELILPIITEDSLDPPPVATRSPFVPPPPTFYPFLTGVGATQDTLPPPAARRPPSGGPCQAERDDSDCEEPIEASGFASGEVFDSSLPPTDDEDFYTTFPLVTDRTTLLSPRKPAPRPNLRTDGATGAPGVLFAPSAPAPNLPAGKMNHRDPLQPLLENPPLGPGAPTSFEPRRPPPLRPGVTSAPGFPHLPTANPTGPGERGPPGAVEVIRESSSTTGMVVGIVAAAALCILILLYAMYKYRNRDEGSYQVDQSRNYISNSAQSNGAVVKEKAPAAPKTPSKAKKNKDKEYYV

SEQ ID NO: 9588 - protein, 293 aa, Homo Sapiens [sequence omitted]

SEQ ID NO: 9589 - protein, 215 aa, Homo Sapiens
  misc_feature (1)..(1): Xaa can be any naturally occurring amino acid
XADPLCAPARNPCANGGLCTVLAPGEVGCDCSHTGFGGKFCSEEEHPMEVGSLLFSEGGAGRGGAGDVHQPTKGKEEFVATFKGNEFFCYDLSHNPIQSSTDEITLAFRTLQRNGLMLHTGKSADYVNLSLKSGAVWLVINLGSGAFEALVEPVNGKFNDNAWHDVRVTRNLRQVTISVDGILTTTGYTQEDYTMLGSDDFFYIGGSPNTADLPG

SEQ ID NO: 9590 - protein, 206 aa, Homo Sapiens
  misc_feature (1)..(1): Xaa can be any naturally occurring amino acid
XCSEEEHPMEGPAHLTLNSEVGSLLFSEGGAGRGGAGDVHQPTKGKEEFVATFKGNEFFCYDLSHNPIQSSTDEITLAFRTLQRNGLMLHTGKSADYVNLSLKSGAVWLVINLGSGAFEALVEPVNGKFNDNAWHDVRVTRNLRQVTISVDGILTTTGYTQEDYTMLGSDDFFYIGGSPNTADLPGSPVSNNFMGCLKDVVYKNND

SEQ ID NO: 9591 - protein, 331 aa, Homo Sapiens
MDRAAVARVGAVASASVCALVAGVVLAQYIFTLKRKTGRKTKIIEMMPEFQKSSVRIKNPTRVEEIICGLIKGGAAKLQIITDFDMTLSRFSYKGKRCPTCHNIIDNCKLVTDECRKKLLQLKEKYYAIEVDPVLTVEEKYPYMVEWYTKSHGLLVQQALPKAKLKEIVAESDVMLKEGYENFFDKLQQHSIPVFIFSAGIGDVLEEVIRQAGVYHPNVKVVSNFMDFDETGVLKGFKGELIHVFNKHDGALRNTEYFNQLKDNSNIILLGDSQGDLRMADGVANVEHILKIGYLNDRVDELLEKYMDSYDIVLVQDESLEVANSILQKIL

SEQ ID NO: 9592 - protein, 331 aa, Homo Sapiens; identical to SEQ ID NO: 9591

SEQ ID NO: 9593 - protein, 42 aa, Homo Sapiens
MPEFQKSSVRIKNPTRVEEIICGLIKGGAAKLQIITDFDMTL

SEQ ID NO: 9594 - protein, 285 aa, Homo Sapiens
MPEFQKSSVRIKNPTRVEEIICGLIKGGAAKLQIITDFDMTLSRFSYKGKRCPTCHNIIDNCKLVTDECRKKLLQLKEKYYAIEVDPVLTVEEKYPYMVEWYTKSHGLLVQQALPKAKLKEIVAESDVMLKEGYENFFDKLQQHSIPVFIFSAGIGDVLEEVIRQAGVYHPNVKVVSNFMDFDETGVLKGFKGELIHVFNKHDGALRNTEYFNQLKDNSNIILLGDSQGDLRMADGVANVEHILKIGYLNDRVDELLEKYMDSYDIVLVQDESLEVANSILQKIL

SEQ ID NO: 9595 - protein, 285 aa, Homo Sapiens; identical to SEQ ID NO: 9594

SEQ ID NO: 9596 - protein, 54 aa, Homo Sapiens
MRAPSMDRAAVARVGAVASASVCALVAGVVLAQYIFTLKRKTGRKTKIIEMKIG

SEQ ID NO: 9597 - protein, 336 aa, Homo Sapiens
MRAPSMDRAAVARVGAVASASVCALVAGVVLAQYIFTLKRKTGRKTKIIEMMPEFQKSSVRIKNPTRVEEIICGLIKGGAAKLQIITDFDMTLSRFSYKGKRCPTCHNIIDNCKLVTDECRKKLLQLKEKYYAIEVDPVLTVEEKYPYMVEWYTKSHGLLVQQALPKAKLKEIVAESDVMLKEGYENFFDKLQQHSIPVFIFSAGIGDVLEEVIRQAGVYHPNVKVVSNFMDFDETGVLKGFKGELIHVFNKHDGALRNTEYFNQLKDNSNIILLGDSQGDLRMADGVANVEHILKIGYLNDRVDELLEKYMDSYDIVLVQDESLEVANSILQKIL

SEQ ID NO: 9598 - protein, 297 aa, Homo Sapiens
MTNQESAVHVKMMPEFQKSSVRIKNPTRVEEIICGLIKGGAAKLQIITDFDMTLSRFSYKGKRCPTCHNIIDNCKLVTDECRKKLLQLKEKYYAIEVDPVLTVEEKYPYMVEWYTKSHGLLVQQALPKAKLKEIVAESDVMLKEGYENFFDKLQQHSIPVFIFSAGIGDVLEEVIRQAGVYHPNVKVVSNFMDFDETGVLKGFKGELIHVFNKHDGALRNTEYFNQLKDNSNIILLGDSQGDLRMADGVANVEHILKIGYLNDRVDELLEKYMDSYDIVLVQDESLEVANSILQKIL

SEQ ID NO: 9599 - protein, 297 aa, Homo Sapiens; identical to SEQ ID NO: 9598

SEQ ID NO: 9600 - protein, 297 aa, Homo Sapiens; identical to SEQ ID NO: 9598

SEQ ID NO: 9601 - protein, 205 aa, Homo Sapiens
MTNQESAVHVKMMPEFQKSSVRIKNPTRVEEIICGLIKGGAAKLQIITDFDMTLSRFSYKGKRCPTCHNIIDNCKLVTDECRKKLLQLKEKYYAIEVDPVLTVEEKYPYMVEWYTKSHGLLVQQALPKAKLKEIVAESDVMLKEGYENFFDKLQQHSIPVFIFSAGIGDVLEEVIRQAGVYHPNVKVVSNFMDFDETVRISNRSS

SEQ ID NO: 9602 - protein, 548 aa, Homo Sapiens
MTMAAAAVVARGAGARAATAAALRGGCGTAARGRPCAGPARPLCTAPGTAPDMKRYLWERYREAKRSTEELVPSIMSNLLNPDAIFSNNEMSLSDIEIYGFDYDYTLVFYSKHLHTLIFNAARDLLINEHRYPAEIRKYEYDPNFAIRGLHYDVQRAVLMKIDAFHYIQLGTVYRGLSVVPDEEVIEMYEGSHVPLEQMSDFYGKSSHGNTMKQFMDIFSLPEMTLLSCVNEYFLKNNIDYEPVHLYKDVKDSIRDVHIKGIMYRAIEADIEKYICYAEQTRAVLAKLADHGKKMFLITNSPSSFVDKGMSYIVGKDWRDLFDVVIVQAEKPNFFNDKRRPFRKMNEKGVLLWDKIHKLQKGQIYKQGNLYEFLKLTGWRGSRVLYFGDHIYSDLADLTLKHGWRTGAIIPELRSELKIMNTEQYIQTMTWLQTLTGLLEQMQVHRDAESQLVLQEWKKERKEMREMTKSFFNAQFGSLFRTDQNPTYFLRRLSRFADIYMASLSCLLNYDVSHTFYPRRTPLQHELPAWSERPPTFGTPLLQEAQAK

SEQ ID NO: 9603 - protein, 135 aa, Homo Sapiens
  misc_feature (1)..(1): Xaa can be any naturally occurring amino acid
XAKLADHGKKMFLITNSPSSFVDKGMSYIVGKDWRDLFDVVIVQAEKPNFFNDKRRPFRKMNEKGVLLWDKIHKLQKGQIYKQGNLYEFLKLTGWRGSRVLYFGDHIYSDLATMVNDSRPSVSAGVVTHGNYFQN

SEQ ID NO: 9604 - protein, 122 aa, Homo Sapiens
  misc_feature (1)..(1): Xaa can be any naturally occurring amino acid
XTMTWLQTLTGLLEQMQVHRDAESQLVLQEWKKERKEMREMTKSFFNAQFGSLFRTDQNPTYFLRRLSRFADIYMASLSCLLNYDVSHTFYPRRTPLQHELPAWSERPPTFGTPLLQEAQAK

SEQ ID NO: 9605 - protein, 264 aa, Homo Sapiens
MCPRAARAPATLLLALGAVLWPAAGAWELTILHTNDVHSRLEQTSEDSSKCVNASRCMGGVARLFTKVQQIRRAEPNVLLLDAGDQYQGTIWFTVYKGAEVAHFMNALRYDAMALGNHEFDNGVEGLIEPLLKEAKFPILSANIKAKGPLASQISGLYLPYKVLPVGDEVVGIVGYTSKETPFLSNPGTNLVFEDEITALQPEVDKLKTLNVNKIIALGHSGFEMDKLIAQKVRGVDVVVGGHSNTFLYTGNCFKRIAWARMSR

SEQ ID NO: 9606 - protein, 574 aa, Homo Sapiens
MCPRAARAPATLLLALGAVLWPAAGAWELTILHTNDVHSRLEQTSEDSSKCVNASRCMGGVARLFTKVQQIRRAEPNVLLLDAGDQYQGTIWFTVYKGAEVAHFMNALRYDAMALGNHEFDNGVEGLIEPLLKEAKFPILSANIKAKGPLASQISGLYLPYKVLPVGDEVVGIVGYTSKETPFLSNPGTNLVFEDEITALQPEVDKLKTLNVNKIIALGHSGFEMDKLIAQKVRGVDVVVGGHSNTFLYTGNPPSKEVPAGKYPFIVTSDDGRKVPVVQAYAFGKYLGYLKIEFDERGNVISSHGNPILLNSSIPEDPSIKADINKWRIKLDNYSTQELGKTIVYLDGSSQSCRFRECNMGNLICDAMINNNLRHTDEMFWNHVSMCILNGGGIRSPIDERNNGTITWENLAAVLPFGGTFDLVQLKGSTLKKAFEHSVHRYGQSTGEFLQVGGIHVVYDLSRKPGDRVVKLDVLCTKCRVPSYDPLKMDEVYKVILPNFLANGGDGFQMIKDELLRHDSGDQDINVVSTYISKMKVIYPAVEGRIKFSTGSHCHGSFSLIFLSLWAVIFVLYQ

SEQ ID NO: 9607 - protein, 524 aa, Homo Sapiens
MCPRAARAPATLLLALGAVLWPAAGAWELTILHTNDVHSRLEQTSEDSSKCVNASRCMGGVARLFTKVQQIRRAEPNVLLLDAGDQYQGTIWFTVYKGAEVAHFMNALRYDAMALGNHEFDNGVEGLIEPLLKEAKFPILSANIKAKGPLASQISGLYLPYKVLPVGDEVVGIVGYTSKETPFLSNPGTNLVFEDEITALQPEVDKLKTLNVNKIIALGHSGFEMDKLIAQKVRGVDVVVGGHSNTFLYTGNPPSKEVPAGKYPFIVTSDDGRKVPVVQAYAFGKYLGYLKIEFDERGNVISSHGNPILLNSSIPEDPSIKADINKWRIKLDNYSTQELGKTIVYLDGSSQSCRFRECNMGNLICDAMINNNLRHTDEMFWNHVSMCILNGGGIRSPIDERNNGIHVVYDLSRKPGDRVVKLDVLCTKCRVPSYDPLKMDEVYKVILPNFLANGGDGFQMIKDELLRHDSGDQDINVVSTYISKMKVIYPAVEGRIKFSTGSHCHGSFSLIFLSLWAVIFVLYQ

SEQ ID NO: 9608 - protein, 230 aa, Homo Sapiens
  misc_feature (1)..(1): Xaa can be any naturally occurring amino acid
XDVVVGGHSNTFLYTGNPPSKEVPAGKYPFIVTSDDGRKVPVVQAYAFGKYLGYLKIEFDERGNVISSHGNPILLNSSIPEDPSIKADINKWRIKLDNYSTQELGKTIVYLDGSSQSCRFRECNMGNLICDAMINNNLRHTDEMFWNHVSMCILNGGGIRSPIDERNNGIHVVYDLSRKPGDRVVKLDVLCTKCRVPSYDPLKMDEVYKVILPNFLANGGDGFQMIKDEL

SEQ ID NO: 9609 - protein, 179 aa, Homo Sapiens
  misc_feature (1)..(1): Xaa can be any naturally occurring amino acid
XNPILLNSSIPEDPSIKADINKWRIKLDNYSTQELGKTIVYLDGSSQSCRFRECNMGNLICDAMINNNLRHTDEMFWNHVSMCILNGGGIRSPIDERNNGTITWENLAAVLPFGGTFDLVQLKGSTLKKAFEHSVHRYGQSTGEFLQVGDLKECCPICINQDDSWKEQPTAQTYLNTWF

SEQ ID NO: 9610 - protein, 257 aa, Homo Sapiens
MSILFYVIFLAYLRGIQGNNMDQRSLPEDSLNSLIIKLIQADILKNKLSKQMVDVKENYQSTLPKAEAPREPERGGPAKSAFQPVIAMDTELLRQQRRYNSPRVLLSDSTPLEPPPLYLMEDYVGSPVVANRTSRRKRYAEHKSHRGEYSVCDSESLWVTDKSSAIDIRGHQVTVLGEIKTGNSPVKQYFYETRCKEARPVKNGCRGIDDKHWNSQCKTSQTYVRALTSENNKLVGWRWIRIDTSCVCALSRKIGRT

SEQ ID NO: 9611 - protein, 270 aa, Homo Sapiens
MVTFATILQVNKVMSILFYVIFLAYLRGIQGNNMDQRSLPEDSLNSLIIKLIQADILKNKLSKQMVDVKENYQSTLPKAEAPREPERGGPAKSAFQPVIAMDTELLRQQRRYNSPRVLLSDSTPLEPPPLYLMEDYVGSPVVANRTSRRKRYAEHKSHRGEYSVCDSESLWVTDKSSAIDIRGHQVTVLGEIKTGNSPVKQYFYETRCKEARPVKNGCRGIDDKHWNSQCKTSQTYVRALTSENNKLVGWRWIRIDTSCVCALSRKIGRT

SEQ ID NO: 9612 - protein, 143 aa, Homo Sapiens
MLPLPSCSLPILLLFLLPSVPIESQPPPSTLPPFLAPEWDLLSPRVVLSRGAPAGPPLLFLLEAGAFRESAGAPANRSRRGVSETAPASRRGELAVCDAVSGWVTDRRTAVDLRGREVEVLGEVPAAGGSPLRQYFFETRCKA

SEQ ID NO: 9613 - protein, 210 aa, Homo Sapiens
MLPLPSCSLPILLLFLLPSVPIESQPPPSTLPPFLAPEWDLLSPRVVLSRGAPAGPPLLFLLEAGAFRESAGAPANRSRRGVSETAPASRRGELAVCDAVSGWVTDRRTAVDLRGREVEVLGEVPAAGGSPLRQYFFETRCKADNAEEGGPGAGGGGCRGVDRRHWVSECKAKQSYVRALTADAQGRVGWRWIRIDTACVCTLLSRTGRA

SEQ ID NO: 9614 - protein, 316 aa, Homo Sapiens
MGVCGYLFLPWKCLVVVSLRLLFLVPTGVPVRSGDATFPKAMDNVTVRQGESATLRCTIDNRVTRVAWLNRSTILYAGNDKWCLDPRVVLLSNTQTQYSIEIQNVDVYDEGPYTCSVQTDNHPKTSRVHLIVQVSPKIVEISSDISINEGNNISLTCIATGRPEPTVTWRHISPKAVGFVSEDEYLEIQGITREQSGDYECSASNDVAAPVVRRVKVTVNYPPYISEAKGTGVPVGQKGTLQCEASAVPSAEFQWYKDDKRLIEGKKGVKVENRPFLSKLIFFNVSEHDYGNYTCVASNKLGHTNASIMLFGETVL

SEQ ID NO: 9615 - protein, 344 aa, Homo Sapiens
MGVCGYLFLPWKCLVVVSLRLLFLVPTGVPVRSGDATFPKAMDNVTVRQGESATLRCTIDNRVTRVAWLNRSTILYAGNDKWCLDPRVVLLSNTQTQYSIEIQNVDVYDEGPYTCSVQTDNHPKTSRVHLIVQVSPKIVEISSDISINEGNNISLTCIATGRPEPTVTWRHISPKAVGFVSEDEYLEIQGITREQSGDYECSASNDVAAPVVRRVKVTVNYPPYISEAKGTGVPVGQKGTLQCEASAVPSAEFQWYKDDKRLIEGKKGVKVENRPFLSKLIFFNVSEHDYGNYTCVASNKLGHTNASIMLFGPGAVSEVSNGTSRRAGCVWLLPLLVLHLLLKF

SEQ ID NO: 9616 - protein, 355 aa, Homo Sapiens
MGVCGYLFLPWKCLVVVSLRLLFLVPTGVPVRSGDATFPKAMDNVTVRQGESATLRCTIDNRVTRVAWLNRSTILYAGNDKWCLDPRVVLLSNTQTQYSIEIQNVDVYDEGPYTCSVQTDNHPKTSRVHLIVQVSPKIVEISSDISINEGNNISLTCIATGRPEPTVTWRHISPKAVGFVSEDEYLEIQGITREQSGDYECSASNDVAAPVVRRVKVTVNYPPYISEAKGTGVPVGQKGTLQCEASAVPSAEFQWYKDDKRLIEGKKGVKVENRPFLSKLIFFNVSEHDYGNYTCVASNKLGHTNASIMLFEVKTTALTPWKGPGAVSEVSNGTSRRAGCVWLLPLLVLHLLLKF

SEQ ID NO: 9617 - protein, 344 aa, Homo Sapiens
MKTIQPKMHNSISWAIFTGLAALCLFQGVPVRSGDATFPKAMDNVTVRQGESATLRCTIDNRVTRVAWLNRSTILYAGNDKWCLDPRVVLLSNTQTQYSIEIQNVDVYDEGPYTCSVQTDNHPKTSRVHLIVQVSPKIVEISSDISINEGNNISLTCIATGRPEPTVTWRHISPKAVGFVSEDEYLEIQGITREQSGDYECSASNDVAAPVVRRVKVTVNYPPYISEAKGTGVPVGQKGTLQCEASAVPSAEFQWYKDDKRLIEGKKGVKVENRPFLSKLIFFNVSEHDYGNYTCVASNKLGHTNASIMLFGPGAVSEVSNGTSRRAGCVWLLPLLVLHLLLKF

SEQ ID NO: 9618 - protein, 18 aa, Homo Sapiens
MNGKRNGEGGKRWKWKGT

SEQ ID NO: 9619 - protein, 36 aa, Homo Sapiens
MNGKRNGEGGKRWKWKGTGVPVRSGDATFPKAMDNV

SEQ ID NO: 9620 - protein, 191 aa, Homo Sapiens
MNGKRNGEGGKRWKWKGTGVPVRSGDATFPKAMDNVTVRQGESATLRCTIDNRVTRVAWLNRSTILYAGNDKWCLDPRVVLLSNTQTQYSIEIQNVDVYDEGPYTCSVQTDNHPKTSRVHLIVQVSPKIVEISSDISINEGNNISLTCIATGRPEPTVTWRHISPKAVGFVSEDEYLEIQGITREQSGDYE

SEQ ID NO: 9621 - protein, 179 aa, Homo Sapiens
VGFVSEDEYLEIQGITREQSGDYECSASNDVAAPVVRRVKVTVNYPPYISEAKGTGVPVGQKGTLQCEASAVPSAEFQWYKDDKRLIEGKKGVKVENRPFLSKLIFFNVSEHDYGNYTCVASNKLGHTNASIMLFEVKTTALTPWKGPGAVSEVSNGTSRRAGCVWLLPLLVLHLLLKF

SEQ ID NO: 9622 - protein, 168 aa, Homo Sapiens
VGFVSEDEYLEIQGITREQSGDYECSASNDVAAPVVRRVKVTVNYPPYISEAKGTGVPVGQKGTLQCEASAVPSAEFQWYKDDKRLIEGKKGVKVENRPFLSKLIFFNVSEHDYGNYTCVASNKLGHTNASIMLFGPGAVSEVSNGTSRRAGCVWLLPLLVLHLLLKF

SEQ ID NO: 9623 - protein, 119 aa, Homo Sapiens
  misc_feature (1)..(1): Xaa can be any naturally occurring amino acid
XSAEFQWYKDDKRLIEGKKGVKVENRPFLSKLIFFNVSEHDYGNYTCVASNKLGHTNASIMLFELNEPTSSTLLQEVKTTALTPWKGPGAVSEVSNGTSRRAGCVWLLPLLVLHLLLKF

SEQ ID NO: 9624 - protein, 153 aa, Homo Sapiens
HYCKEGYYRDMGKPITHRKACKACDCHPVGAAGKTCNQTTGQCPCKDGVTGITCNRCAKGYQQSRSPIAPCIKIPVAPPTTAASSVEEPEAARQPNTFQAEGLSLLPGAAEKEGARCWGYRRRLGHRVAQAECRGPRSWAWGRITSSFSFASN

SEQ ID NO: 9625 - protein, 604 aa, Homo Sapiens
MMRAVWEALAALAAVACLVGAVRGGPGLSMFAGQAAQPDPCSDENGHPRRCIPDFVNAAFGKDVRVSSTCGRPPARYCVVSERGEERLRSCHLCNASDPKKAHPPAFLTDLNNPHNLTCWQSENYLQFPHNVTLTLSLGKKFEVTYVSLQFCSPRPESMAIYKSMDYGRTWVPFQFYSTQCRKMYNRPHRAPITKQNEQEAVCTDSHTDMRPLSGGLIAFSTLDGRPSAHDFDNSPVLQDWVTATDIRVAFSRLHTFGDENEDDSELARDSYFYAVSDLQVGGRCKCNGHAARCVRDRDDSLVCDCRHNTAGPECDRCKPFHYDRPWQRATAREANECVACNCNLHARRCRFNMELYKLSGRKSGGVCLNCRHNTAGRHCHYCKEGYYRDMGKPITHRKACKACDCHPVGAAGKTCNQTTGQCPCKDGVTGITCNRCAKGYQQSRSPIAPCIKIPVAPPTTAASSVEEPEDCDSYCKASKGKLKINMKKYCKKDYAVQIHILKADKAGDWWKFTVNIISVYKQGTSRIRRGDQSLWIRSRDIACKCPKIKPLKKYLLLGNAEDSPDQSGIVADKSSLVIQWRDTWARRLRKFQQREKKGKCKKA

SEQ ID NO: 9626 - protein, 580 aa, Homo Sapiens
MPGWPWGLLLTAGTLFAALSPGPPAPADPCHDEGGAPRGCVPGLVNAALGREVLASSTCGRPATRACDASDPRRAHSPALLTSPGGTASPLCWRSESLPRAPLNVTLTVPLGKAFELVFVSLRFCSAPPASVALLKSQDHGRSWAPLGFFSSHCDLDYGRLPAPANGPAGPGPEALCFPAPLAQPDGSGLLAFSMQDSSPPGLDLDSSPVLQDWVTATDVRVVLTRPSTAGDPRDMEAVVPYSYAATDLQVGGRCKCNGHASRCLLDTQGHLICDCRHGTEGPDCGRCKPFYCDRPWQRATARESHACLACSCNGHARRCRFNMELYRLSGRRSGGVCLNCRHNTAGRHCHYCREGFYRDPGRALSDRRACRACDCHPVGAAGKTCNQTTGQCPCKDGVTGLTCNRCAPGFQQSRSPVAPCVKTPIPGPTEDSSPVQPQDCDSHCKPARGSYRISLKKFCKKDYAVQVAVGARGEARGAWTRFPVAVLAVFRSGEERARRGSSALWVPAGDAACGCPRLLPGRRYLLLGGGPGAAAGGAGGRGPGLIAARGSLVLPWRDAWTRRLRRLQRRERRGRCSAA

SEQ ID NO: 9627 - protein, 176 aa, Homo Sapiens
MGNLALGRKLWADTTCGQNATELYCFYSENTDLTCRQPKCDKCNAAYPHLAHLPSAMADSSFRFPRTWWQSAEDVHREKIQLDLEAEFYFTHLIVMFKSPRPAAMVLDRSQDFGKTWKPYKYFATNCSATFGLEDDVVKKGAICTSKYSSPFPCTGGEVIFKALSPPYDTENPYSA

SEQ ID NO: 9628 - protein, 591 aa, Homo Sapiens
MGNLALGRKLWADTTCGQNATELYCFYSENTDLTCRQPKCDKCNAAYPHLAHLPSAMADSSFRFPRTWWQSAEDVHREKIQLDLEAEFYFTHLIVMFKSPRPAAMVLDRSQDFGKTWKPYKYFATNCSATFGLEDDVVKKGAICTSKYSSPFPCTGGEVIFKALSPPYDTENPYSAKVQEQLKITNLRVQLLKRQSCPCQRNDLNEEPQHFTHYAIYDFIVKGSCFCNGHADQCIPVHGFRPVKAPGTFHMVHGKCMCKHNTAGSHCQHCAPLYNDRPWEAADGKTGAPNECRTCKCNGHADTCHFDVNVWEASGNRSGGVCDDCQHNTEGQYCQRCKPGFYRDLRRPFSAPDACKPCSCHPVGSAVLPANSVTFCDPSNGDCPCKPGVAGRRCDRCMVGYWGFGDYGCRPCDCAGSCDPITGDCISSHTDIDWYHEVPDFRPVHNKSEPAWEWEDAQGFSALLHSGKCECKEQTLGNAKAFCGMKYSYVLKIKILSAHDKGTHVEVNVKIKKVLKSTKLKIFRGKRTLYPESWTDRGCTCPILNPGLEYLVAGHEDIRTGKLIVNMKSFVQHWKPSLGRKVMDILKRECK

SEQ ID NO: 9629 - protein, 591 aa, Homo Sapiens; identical to SEQ ID NO: 9628

SEQ ID NO: 9630 - protein, 628 aa, Homo Sapiens
MGSCARLLLLWGCTVVAAGLSGVAGVSSRCEKACNPRMGNLALGRKLWADTTCGQNATELYCFYSENTDLTCRQPKCDKCNAAYPHLAHLPSAMADSSFRFPRTWWQSAEDVHREKIQLDLEAEFYFTHLIVMFKSPRPAAMVLDRSQDFGKTWKPYKYFATNCSATFGLEDDVVKKGAICTSKYSSPFPCTGGEVIFKALSPPYDTENPYSAKVQEQLKITNLRVQLLKRQSCPCQRNDLNEEPQHFTHYAIYDFIVKGSCFCNGHADQCIPVHGFRPVKAPGTFHMVHGKCMCKHNTAGSHCQHCAPLYNDRPWEAADGKTGAPNECRTCKCNGHADTCHFDVNVWEASGNRSGGVCDDCQHNTEGQYCQRCKPGFYRDLRRPFSAPDACKPCSCHPVGSAVLPANSVTFCDPSNGDCPCKPGVAGRRCDRCMVGYWGFGDYGCRPCDCAGSCDPITGDCISSHTDIDWYHEVPDFRPVHNKSEPAWEWEDAQGFSALLHSGKCECKEQTLGNAKAFCGMKYSYVLKIKILSAHDKGTHVEVNVKIKKVLKSTKLKIFRGKRTLYPESWTDRGCTCPILNPGLEYLVAGHEDIRTGKLIVNMKSFVQHWKPSLGRKVMDILKRECK

SEQ ID NO: 9631 - protein, 605 aa, Homo Sapiens
MGSCARLLLLWGCTVVAAGLSGVAGVSSRCEKACNPRMGNLALGRKLWADTTCGQNATELYCFYSENTDLTCRQPKCDKCNAAYPHLAHLPSAMADSSFRFPRTWWQSAEDVHREKIQLDLEAEFYFTHLIVMFKSPRPAAMVLDRSQDFGKTWKPYKYFATNCSATFGLEDDVVKKGAICTSKYSSPFPCTGGEVIFKALSPPYDTENPYSAKVQEQLKITNLRVQLLKRQSCPCQRNDLNEEPQHFTHYAIYDFIVKGSCFCNGHADQCIPVHGFRPVKAPGTFHMVHGKCMCKHNTAGSHCQHCAPLYNDRPWEAADGKTGAPNECRTCKCNGHADTCHFDVNVWEASGNRSGGVCDDCQHNTEGQYCQRCKPGFYRDLRRPFSAPDACKPCSCHPVGSAVLPANSVTFCDPSNGDCPCKPGVAGRRCDRCMVGYWGFGDYGCRPCDCAGSCDPITGDCISSHTDIDWYHEVPDFRPVHNKSEPAWEWEDAQGFSALLHSVLKIKILSAHDKGTHVEVNVKIKKVLKSTKLKIFRGKRTLYPESWTDRGCTCPILNPGLEYLVAGHEDIRTGKLIVNMKSFVQHWKPSLGRKVMDILKRECK

SEQ ID NO: 9632 - protein, 75 aa, Homo Sapiens
MPCQRIPEATTTLATTPGAYSSDPQCQNYCNMSDTRVHMSLRRYCQQDHVLRAQVLASEAAGPAWQRLAVRVLAV

SEQ ID NO: 9633 - protein, 489 aa, Homo Sapiens
MPVTFALLLLLGQATADPCYDPQGRPQFCLPPVTQLAAVAASCPQACALSPGNHLGARETCNGSLTLALGGPFLLTSVSLRFCTPGPPALILSAAWASGGPWRLLWHRPAWPGALGGPERVTFHSTPGPKATVAASHLRVEFGGQAGLAAAGLRGRCQCHGHAARCAARARPPRCHCRHHTTGPGCESCRPSHRDWPWRPATPRHPHPCLPCSCNQHARRCRFNSELFRLSGGRSGGVCERCRHHTAGRHCHYCQPGFWRDPSQPIFSRRACRACQCHPIGATGGTCNQTSGQCTCKLGVTGLTCNRCGPGYQQSRSPRMPCQRIPEATTTLATTPGAYSSDPQCQNYCNMSDTRVHMSLRRYCQQDHVLRAQVLASEAAGPAWQRLAVRVLAVYKQRAQPVRRGDQDAWVPRADLTCGCLRLQPGTDYLLLGSAVGDPDPTRLILDRHGLALPWRPRWARPLKRLQQEERAGGCRGVRAPTPSPRPEH

SEQ ID NO: 9634 - protein, 480 aa, Homo Sapiens
MYLSRFLSIHALWVTVSSVMQPYPLVWGHYDLCKTQIYTEEGKVWDYMACQPESTDMTKYLKVKLDPPDITCGDPPETFCAMGNPYMCNNECDASTPELAHPPELMFDFEGRHPSTFWQSATWKEYPKPLQVNITLSWSKTIELTDNIVITFESGRPDQMILEKSLDYGRTWQPYQYYATDCLDAFHMDPKSVKDLSQHTVLEIICTEEYSTGYTTNSKIIHFEIKDRFAFFAGPRLRNMASLYGQLDTTKKLRDFFTVTDLRIRLLRPAVGEIFVDELHLARYFYAISDIKVRGRCKCNLHATVCVYDNSKLTCECEHNTTGPDCGKCKKNYQGRPWSPGSYLPIPKGTANTCIPSISSIGNPPKFNRIWPNISSLEVSNPKQVAPKLALSTVSSVQVANHKRANVCDNELLHCQNGGTCHNNVRCLCPAAYTGILCEKLRCEEAGSCGSDSGQGAPPHGSPALLLLTTLLGTASPLVF

SEQ ID NO: 9635 - protein, 539 aa, Homo Sapiens
MYLSRFLSIHALWVTVSSVMQPYPLVWGHYDLCKTQIYTEEGKVWDYMACQPESTDMTKYLKVKLDPPDITCGDPPETFCAMGNPYMCNNECDASTPELAHPPELMFDFEGRHPSTFWQSATWKEYPKPLQVNITLSWSKTIELTDNIVITFESGRPDQMILEKSLDYGRTWQPYQYYATDCLDAFHMDPKSVKDLSQHTVLEIICTEEYSTGYTTNSKIIHFEIKDRFAFFAGPRLRNMASLYGQLDTTKKLRDFFTVTDLRIRLLRPAVGEIFVDELHLARYFYAISDIKVRGRCKCNLHATVCVYDNSKLTCECEHNTTGPDCGKCKKNYQGRPWSPGSYLPIPKGTANTCIPSISSIGNCECFGHSNRCSYIDLLNTVICVSCKHNTRGQHCELCRLGYFRNASAQLDDENVCIECYCNPLGSIHDRCNGSGFCECKTGTTGPKCDECLPGNSWHYGCQPNVCDNELLHCQNGGTCHNNVRCLCPAAYTGILCEKLRCEEAGSCGSDSGQGAPPHGSPALLLLTTLLGTASPLVF

SEQ ID NO: 9636 - protein, 539 aa, Homo Sapiens; identical to SEQ ID NO: 9635

SEQ ID NO: 9637 - protein, 460 aa, Homo Sapiens
MYLSRFLSIHALWVTVSSVMQPYPLVWGHYDLCKTQIYTEEGKVWDYMACQPESTDMTKYLKVKLDPPDITCGDPPETFCAMGNPYMCNNECDASTPELAHPPELMFDFEGRHPSTFWQSATWKEYPKPLQVNITLSWSKTIELTDNIVITFESGRPDQMILEKSLDYGRTWQPYQYYATDCLDAFHMDPKSVKDLSQHTVLEIICTEEYSTGYTTNSKIIHFEIKDRFAFFAGPRLRNMASLYGQLDTTKKLRDFFTVTDLRIRLLRPAVGEIFVDELHLARYFYAISDIKVRGRCKCNLHATVCVYDNSKLTCECEHNTTGPDCGKCKKNYQGRPWSPGSYLPIPKGTANTCIPSISSIGNPPKFNRIWPNISSLEVSNPKQANVCDNELLHCQNGGTCHNNVRCLCPAAYTGILCEKLRCEEAGSCGSDSGQGAPPHGSPALLLLTTLLGTASPLVF

SEQ ID NO: 9638 - protein, 480 aa, Homo Sapiens; identical to SEQ ID NO: 9634

SEQ ID NO: 9639 - protein, 438 aa, Homo Sapiens
MYLSRFLSIHALWVTVSSVMQPYPLVWGHYDLCKTQIYTEEGKVWDYMACQPESTDMTKYLKVKLDPPDITCGDPPETFCAMGNPYMCNNECDASTPELAHPPELMFDFEGRHPSTFWQSATWKEYPKPLQVNITLSWSKTIELTDNIVITFESGRPDQMILEKSLDYGRTWQPYQYYATDCLDAFHMDPKSVKDLSQHTVLEIICTEEYSTGYTTNSKIIHFEIKDRFAFFAGPRLRNMASLYGQLDTTKKLRDFFTVTDLRIRLLRPAVGEIFVDELHLARYFYAISDIKVRGRCKCNLHATVCVYDNSKLTCECEHNTTGPDCGKCKKNYQGRPWSPGSYLPIPKGTANTCIPSISSIGTNVCDNELLHCQNGGTCHNNVRCLCPAAYTGILCEKLRCEEAGSCGSDSGQGAPPHGSPALLLLTTLLGTASPLVF

SEQ ID NO: 9640 - protein, 494 aa, Homo Sapiens
MYLSRFLSIHALWVTVSSVMQPYPLVWGHYDLCKTQIYTEEGKVWDYMACQPESTDMTKYLKVKLDPPDITCGDPPETFCAMGNPYMCNNECDASTPELAHPPELMFDFEGRHPSTFWQSATWKEYPKPLQVNITLSWSKTIELTDNIVITFESGRPDQMILEKSLDYGRTWQPYQYYATDCLDAFHMDPKSVKDLSQHTVLEIICTEEYSTGYTTNSKIIHFEIKDRFAFFAGPRLRNMASLYGQLDTTKKLRDFFTVTDLRIRLLRPAVGEIFVDELHLARYFYAISDIKVRGRCKCNLHATVCVYDNSKLTCECEHNTTGPDCGKCKKNYQGRPWSPGSYLPIPKGTANTCIPSISSIGNCECFGHSNRCSYIDLLNTVICVSCKHNTRGQHCELCRLGYFRNASAQLDDENVCIANVCDNELLHCQNGGTCHNNVRCLCPAAYTGILCEKLRCEEAGSCGSDSGQGAPPHGSPALLLLTTLLGTASPLVF

SEQ ID NO: 9641 - protein, 422 aa, Homo Sapiens
MLHLLALFLHCLPLASGDYDICKSWVTTDEGPTWEFYACQPKVMRLKDYVKVKVEPSGITCGDPPERFCSHENPYLCSNECDASNPDLAHPPRLMFDKEEEGLATYWQSITWSRYPSPLEANITLSWNKTVELTDDVVMTFEYGRPTVMVLEKSLDNGRTWQPYQFYAEDCMEAFGMSARRARDMSSSSAHRVLCTEEYSRWAGSKKEKHVRFEVRDRFAIFAGPDLRNMDNLYTRLESAKGLKEFFTLTDLRMRLLRPALGGTYVQRENLYKYFYAISNIEVIGRCKCNLHANLCSMREGSLQCECEHNTTGPDCGKCKKNFRTRSWRAGSYLPLPHGSPNACATAGSFGTLQTPPPGRSPSALRGSRRGLANVKEPAGSRPQISEMLLGCTVTLHQGSVGPHIPPKLSLPDPGGPWLGSQ

SEQ ID NO: 9642 - protein, 530 aa, Homo Sapiens
MLHLLALFLHCLPLASGDYDICKSWVTTDEGPTWEFYACQPKVMRLKDYVKVKVEPSGITCGDPPERFCSHENPYLCSNECDASNPDLAHPPRLMFDKEEEGLATYWQSITWSRYPSPLEANITLSWNKTVELTDDVVMTFEYGRPTVMVLEKSLDNGRTWQPYQFYAEDCMEAFGMSARRARDMSSSSAHRVLCTEEYSRWAGSKKEKHVRFEVRDRFAIFAGPDLRNMDNLYTRLESAKGLKEFFTLTDLRMRLLRPALGGTYVQRENLYKYFYAISNIEVIGRCKCNLHANLCSMREGSLQCECEHNTTGPDCGKCKKNFRTRSWRAGSYLPLPHGSPNACATAGSFGNCECYGHSNRCSYIDFLNVVTCVSCKHNTRGQHCQHCRLGYYRNGSAELDDENVCIECNCNQIGSVHDRCNETGFCECREGAAGPKCDDCLPTHYWRQGCYPNVCDDDQLLCQNGGTCLQNQRCACPRGYTGVRCEQPRCDPADDDGGLDCDRAPGAAPRPATLLGCLLLLGLAARLGR

SEQ ID NO: 9643 - protein, 170 aa, Homo Sapiens
MMAGMKIQLVCMLLLAFSSWSLCSDSEEEMKALEADFLTNMHTSKISKAHVPSWKMTLLNVCSLVNNLNSPAEETGEVHEEELVARRKLPTALDGFSLEAMLTIYQLHKICHSRAFQHWELIQEDILDTGNDKNGKEEVIKRKIPYILKRQLYENKPRRPYILKRDSYYY

SEQ ID NO: 9644 - protein, 95 aa, Homo Sapiens
MMAGMKIQLVCMLLLAFSSWSLCSDSEEEMKALEADFLTNMHTSKLIQEDILDTGNDKNGKEEVIKRKIPYILKRQLYENKPRRPYILKRDSYYY

SEQ ID NO: 9645 - protein, 103 aa, Homo Sapiens
MGIWQRLLLFGGVSLRAGGGATAPLGGSRAMVCGRQLSGAGSETLKQRRTQIMSRGLPKQKPIEGVKQVIVVASGKGGVGKSTTAVETGFHRVNQDGLHLLIS

SEQ ID NO: 9646 - protein, 319 aa, Homo Sapiens
MGIWQRLLLFGGVSLRAGGGATAPLGGSRAMVCGRQLSGAGSETLKQRRTQIMSRGLPKQKPIEGVKQVIVVASGKGGVGKSTTAVNLALALAANDSSKAIGLLDVDVYGPSVPKMMNLKGNPELSQSNLMRPLLNYGIACMSMGFLVEESEPVVWRGLMVMSAIEKLLRQVDWGQLDYLVVDMPPGTGDVQLSVSQNIPITGAVIVSTPQDIALMDAHKGAEMFRRVHVPVLGLVQNMSVFQCPKCKHKTHIFGADGARKLAQTLGLEVLGDIPLHLNIREASDTGQPIVFSQPESDEAKAYLRIAVEVVRRLPSPSE

SEQ ID NO: 9647 - protein, 173 aa, Homo Sapiens
MGIWQRLLLFGGVSLRAGGGATAPLGGSRAMVCGRQLSGAGSETLKQRRTQIMSRGLPKQKPIEGVKQVIVVASGKGGVGKSTTAVNLALALAANDSSKAIGLLDVDVYGPSVPKMMNLKGNPELSQSNLMRPLLNYGIACMSMGFLVEESEPVVWRGLMVMSAIEKLLRQVL

SEQ ID NO: 9648 - protein, 167 aa, Homo Sapiens
MGIWQRLLLFGGVSLRAGGGATAPLGGSRAMVCGRQLSGAGSETLKQRRTQIMSRGLPKQKPIEGVKQVIVVASGKGGVGKSTTAVNLALALAANDSVLGLVQNMSVFQCPKCKHKTHIFGADGARKLAQTLGLEVLGDIPLHLNIREASDTGQPIVFSQPESDEAK

SEQ ID NO: 9649 - protein, 54 aa, Homo Sapiens
MMRIEVKVKMMLSGAGSETLKQRRTQIMSRGLPKQKPIEGVKQVIVVASGKGGV

SEQ ID NO: 9650 - protein, 133 aa, Homo Sapiens
MSRGLPKQKPIEGVKQVIVVASGKGGVGKSTTAVNLALALAANDSSKAIGLLDVDVYGPSVPKMMNLKGNPELSQSNLMRPLLNYGIACMSMGFLVEESEPVVWRGLMVMSAIEKLLRQVDWGQLDYLVVDMP

SEQ ID NO: 9651 - protein, 130 aa, Homo Sapiens
VSLRAGGGATAPLGGSRAMVCGRQLSGAGSETLKQRRTQIMSRGLPKQKPIEGVKQVIVVASGKGGVGKSTTAVNLALALAANDSSKAIGLLDVDVYGPSVPKMMNLKGNPELSQSISQRCCRSCSRPPQ

SEQ ID NO: 9652 - protein, 111 aa, Homo Sapiens
MPPSGPRGTLLLLPLLLLLLLRAVLAVPLERGAPNKEETPATESPDTGLYYHRYLQEVIDVLETDGHFREKLQAANAEDIKSGKLSRELDFVSHHVRTKLDELKRQEVSRL

SEQ ID NO: 9653 - protein, 124 aa, Homo Sapiens
MPPSGPRGTLLLLPLLLLLLLRAVLAVPLERGAPNKEETPATESPDTGLYYHRYLQEVIDVLETDGHFREKLQAANAEDIKSGKLSRELDFVSHHVRTKLDELKRQEVSRLRMLLKAKMDAEQD

SEQ ID NO: 9654 - protein, 268 aa, Homo Sapiens
MPPSGPRGTLLLLPLLLLLLLRAVLAVPLERGAPNKEETPATESPDTGLYYHRYLQEVIDVLETDGHFREKLQAANAEDIKSGKLSRELDFVSHHVRTKLDELKRQEVSRLRMLLKAKMDAEQDPNVQVDHLNLLKQFEHLDPQNQHTFEARDLELLIQTATRDLAQYDAAHHEEFKRYEMLKEHERRRYLESLGEEQRKEAERKLEEQQRRHREHPKVNVPGSQAQLKEVWEELDGLDPNRDLTHPVLGPLRYLAILFPSDINSDGV

SEQ ID NO: 9655 - protein, 461 aa, Homo Sapiens
MPPSGPRGTLLLLPLLLLLLLRAVLAVPLERGAPNKEETPATESPDTGLYYHRYLQEVIDVLETDGHFREKLQAANAEDIKSGKLSRELDFVSHHVRTKLDELKRQEVSRLRMLLKAKMDAEQDPNVQVDHLNLLKQFEHLDPQNQHTFEARDLELLIQTATRDLAQYDAAHHEEFKRYEMLKEHERRRYLESLGEEQRKEAERKLEEQQRRHREHPKVNVPGSQAQLKEVWEELDGLDPNRFNPKTFFILHDINSDGVLDEQELEALFTKELEKVYDPKNEEDDMREMEEERLRMREHVMKNVDTNQDRLVTLEEFLASTQRKEFGDTGEGWETVEMHPAYTEEELRRFEEELAAREAELNAKAQRLSQETEALGRSQGRLEAQKRELQQAVLHMEQRKQQQQQQQGHKAPAAHPEGQLKFHPDTDDVPVPAPAGDQKEVDTSEKKLLERLPEVEVPQHL

SEQ ID NO: 9656 - protein, 461 aa, Homo Sapiens; identical to SEQ ID NO: 9655

SEQ ID NO: 9657 - protein, 75 aa, Homo Sapiens
MPPSGPRGTLLLLPLLLLLLLRAVLAVPLERGAPNKEETPATESPVSGPALLSSQVFAVVLQLLQTPVPVGRMLQ

SEQ ID NO: 9658 - protein, 295 aa, Homo Sapiens
  misc_feature (1)..(1): Xaa can be any naturally occurring amino acid
XPPSGPRGTLLLLPLLLLLLLRAVLAVPLERGAPNKEETPATESPDTGLYYHRYLQEVIDVLETDGHFREKLQAANAEDIKSGKLSRELDFVSHHVRTKLDELKRQEFEHLDPQNQHTFEARDLELLIQTATRDLAQYDAAHHEEFKRYEMLKEHERRRYLESLGEEQRKEAERKLEEQQRRHREHPKVNVPGSQAQLKEVWEELDGLDPNRFNPKTFFILHDINSDGVLDEQELEALFTKELEKVYDPKNEEDDMREMEEERLRMREHVMKNVDTNQDRLVTLEEFLASTQRKE

SEQ ID NO: 9659 - protein, 34 aa, Homo Sapiens
MRWRTILLQYCFLLITCLLTALEAVPIDIDKTKV

SEQ ID NO: 9660 - protein, 34 aa, Homo Sapiens; identical to SEQ ID NO: 9659

SEQ ID NO: 9661 - protein, 39 aa, Homo Sapiens
MRWRTILLQYCFLLITCLLTALEAVPIDIDKTKVQNIHP

SEQ ID NO: 9662 - protein, 69 aa, Homo Sapiens
MRWRTILLQYCFLLITCLLTALEAVPIDIDKTKVQNIHPVESAKIEPPDTGLYYDEYLKQVIDVLETDK

SEQ ID NO: 9663 - protein, 69 aa, Homo Sapiens; identical to SEQ ID NO: 9662

SEQ ID NO: 9664 - protein, 90 aa, Homo Sapiens
MRWRTILLQYCFLLITCLLTALEAVPIDIDKTKVQNIHPVESAKIEPPDTGLYYDEYLKQVIDVLETDKHFREKLQKADIEEIKSGRLSK

SEQ ID NO: 9665 - protein, 195 aa, Homo Sapiens
MRWRTILLQYCFLLITCLLTALEAVPIDIDKTKVQNIHPVESAKIEPPDTGLYYDEYLKQVIDVLETDKHFREKLQKADIEEIKSGRLSKELDLVSHHVRTKLDELKRQEVGRLRMLIKAKLDSLQDIGMDHQALLKQFDHLNHLNPDKFESTDLDMLIKAATSDLEHYDKTRHEEFKKYEMMKEHERREYLKTL

SEQ ID NO: 9666 - protein, 198 aa, Homo Sapiens
MRWRTILLQYCFLLITCLLTALEAVPIDIDKTKVQNIHPVESAKIEPPDTGLYYDEYLKQVIDVLETDKHFREKLQKADIEEIKSGRLSKELDLVSHHVRTKLDELKRQEVGRLRMLIKAKLDSLQDIGMDHQALLKQFDHLNHLNPDKFESTDLDMLIKAATSDLEHYDKTRHEEFKKYEMMKEHERREYLKTLNEE

SEQ ID NO: 9667 - protein, 420 aa, Homo Sapiens
MRWRTILLQYCFLLITCLLTALEAVPIDIDKTKVQNIHPVESAKIEPPDTGLYYDEYLKQVIDVLETDKHFREKLQKADIEEIKSGRLSKELDLVSHHVRTKLDELKRQEVGRLRMLIKAKLDSLQDIGMDHQALLKQFDHLNHLNPDKFESTDLDMLIKAATSDLEHYDKTRHEEFKKYEMMKEHERREYLKTLNEEKRKEEESKFEEMKKKHENHPKVNHPGSKDQLKEVWEETDGLDPNDFDPKTFFKLHDVNSDGFLDEQELEALFTKELEKVYDPKNEEDDMVEMEEERLRMREHVMNEVDTNKDRLVTLEEFLKATEKKEFLEPDSWETLDQQQFFTEEELKEYENIIALQENELKKKADELQKQKEELQRQHDQLEAQKLEYHQVIQQMEQKKLQQGIPPSGPAGELKFEPRV

SEQ ID NO: 9668 - protein, 390 aa, Homo Sapiens
MRWRTILLQYCFLLITCLLTALEAVPIDIDKTKVQNIHPVESAKIEPPDTGLYYDEYLKQVIDVLETDKHFREKLQKADIEEIKSGRLSKELDLVSHHVRTKLDELKRQEVGRLRMLIKAKLDSLQDIGMDHQALLKQFDHLNHLNPDKFESTDLDMLIKAATSDLEHYDKTRHEEFKKYEMMKEHERREYLKTLNEEKRKEEESKFEEMKKKHENHPKVNHPGSKDQLKEVWEETDGLDPNDFDPKTFFKLHDVNSDGFLDEQELEALFTKELEKVYDPKNEEDDMVEMEEERLRMREHVMNETLDQQQFFTEEELKEYENIIALQENELKKKADELQKQKEELQRQHDQLEAQKLEYHQVIQQMEQKKLQQGIPPSGPAGELKFEPHI

SEQ ID NO: 9669 - protein, 420 aa, Homo Sapiens
MRWRTILLQYCFLLITCLLTALEAVPIDIDKTKVQNIHPVESAKIEPPDTGLYYDEYLKQVIDVLETDKHFREKLQKADIEEIKSGRLSKELDLVSHHVRTKLDELKRQEVGRLRMLIKAKLDSLQDIGMDHQALLKQFDHLNHLNPDKFESTDLDMLIKAATSDLEHYDKTRHEEFKKYEMMKEHERREYLKTLNEEKRKEEESKFEEMKKKHENHPKVNHPGSKDQLKEVWEETDGLDPNDFDPKTFFKLHDVNSDGFLDEQELEALFTKELEKVYDPKNEEDDMVEMEEERLRMREHVMNEVDTNKDRLVTLEEFLKATEKKEFLEPDSWETLDQQQFFTEEELKEYENIIALQENELKKKADELQKQKEELQRQHDQLEAQKLEYHQVIQQMEQKKLQQGIPPSGPAGELKFEPHI

SEQ ID NO: 9670 - protein, 338 aa, Homo Sapiens
MRWRTILLQYCFLLITCLLTALEAVPIDIDKTKVQNIHPVESAKIEPPDTGLYYDEYLKQVIDVLETDKHFREKLQKADIEEIKSGRLSKELDLVSHHVRTKLDELKRQEVGRLRMLIKAKLDSLQDIGMDHQALLKQFDHLNHLNPDKFESTDLDMLIKAATSDLEHYDKTRHEEFKKYEMMKEHERREYLKTLNEEKRKEEESKFEEMKKKHENHPKVNHPGSKDQLKEVWEETDGLDPNDFDPKTFFKLHDVNSDGFLDEQELEALFTKELEKVYDPKNEEDDMVEMEEERLRMREHVMNEVDTNKDRLVTLEEFLKATEKKEFLEPDSWESPSI

SEQ ID NO: 9671 - protein, 420 aa, Homo Sapiens; identical to SEQ ID NO: 9669

SEQ ID NO: 9672 - protein, 231 aa, Homo Sapiens
MRWRTILLQYCFLLITCLLTALEAVPIDIDKTKVQNIHPVESAKIEPPDTGLYYDEYLKQVIDVLETDKHFREKLQKADIEEIKSGRLSKELDLVSHHVRTKLDELKRQEVGRLRMLIKAKLDSLQDIGMDHQALLKQFDHLNHLNPDKFESTDLDMLIKAATSDLEHYDKTRHEEFKKYEMMKEHERREYLKTLNEEKRKEEESKFEEMKKKHENHPKVNHPVHREAKIN

SEQ ID NO: 9673 - protein, 73 aa, Homo Sapiens
  misc_feature (1)..(1): Xaa can be any naturally occurring amino acid
XEERLRMREHVMNEVDTNKDRLVTLEEFLKATEKKEFLEPDSWEVIQQMEQKKLQQGIPPSGPAGELKFEPHI

SEQ ID NO: 9674 - protein, 198 aa, Homo Sapiens
  misc_feature (1)..(1): Xaa can be any naturally occurring amino acid
XTLNEEKRKEEESKFEEMKKKHENHPKVNHPGSKDQLKEVWEETDGLDPNDFDPKTFFKLHDVNSDGFLDEQELEALFTKELEKVYDPKNEEDDMVEMEEERLRMREHVMNETLDQQQFFTEEELKEYENIIALQENELKKKADELQKQKEELQRQHDQLEAQKLEYHQVIQQMEQKKLQQGIPPSGPAGELKFEPHI

SEQ ID NO: 9675 - protein, 375 aa, Homo Sapiens
MSSSLRPGPSRWRRAASIVLAAGWSRPETATPPSRPPPAEGFRLLLLQRSPHQGFMPGAHVFSGGVLDAADRSADWLGLFAPHHGPPRFGLGPAPFSRTAFPSLPDTDDHKTDNTGTLPEDVAFRICAVREAFEEAGVLLLRPRTSPPGPAPGPGLALEPPPGLASWRDRVRQDPRHFLRLCAHLDCTPDIWALHNWSAWLTPFLRGTTRRFDTAFFLCCLREPPPVYPDLAEVVGYQWSSPSEATESFLSKEIWLPPPQFYEVRRLANFASLSDLHKFCLGRALEGLERWLPIILLTADGMVHLLPGDELYLEDSDFLENLMSTEKKTEEIMKEGKQFHRIVTYHRHLYDIHVTVQPKYKHVYPKNSVVRKSHL

SEQ ID NO: 9676 - protein, 77 aa, Homo Sapiens
MAGRLLGKALAAVSLSLALASVTIRSSRCRGIQAFRNPAGRTGLVGRGLLGRWGPNHAADPIITRGWWIQERRLVPH

SEQ ID NO: 9677 - protein, 284 aa, Homo Sapiens
MAGRLLGKALAAVSLSLALASVTIRSSRCRGIQAFRNSFSSSWFHLNTNVMSGSNGSKENSHNKARTSPYPGSKVERSQVPNEKVGWLVEWQDYKPVEYTAVSVLAGPRWADPQIRNPAGRTGLVGRGLLGRWGPNHAADPIITRWKRDSSGNKIMHPVSGKHILQFVAIKRKDCGEWAIPGGMVDPGEKISATLKREFGEEALNSLQKTSAEKREIEEKLHKLFSQDHLVIYKGYVDDPRNTDNAWMETEAVNYHDETGEIMDNLMLEAGDDAGKVKWVDIND

SEQ ID NO: 9678 - protein, 350 aa, Homo Sapiens
MAGRLLGKALAAVSLSLALASVTIRSSRCRGIQAFRNSFSSSWFHLNTNVMSGSNGSKENSHNKARTSPYPGSKVERSQVPNEKVGWLVEWQDYKPVEYTAVSVLAGPRWADPQISESNFSPKFNEKDGHVERKSKNGLYEIENGRPRNPAGRTGLVGRGLLGRWGPNHAADPIITRWKRDSSGNKIMHPVSGKHILQFVAIKRKDCGEWAIPGGMVDPGEKISATLKREFGEEALNSLQKTSAEKREIEEKLHKLFSQDHLVIYKGYVDDPRNTDNAWMETEAVNYHDETGEIMDNLMLEAGDDAGKVKWVDINDKLKLYASHSQFIKLVAEKRDAHWSEDSEADCHAL

SEQ ID NO: 9679 - protein, 206 aa, Homo Sapiens
MSGSNGSKENSHNKARTSPYPGSKVERSQVPNEKVGWLVEWQDYKPVEYTAVSVLAGPRWADPQISESNFSPKFNEKDGHVERKSKNGLYEIENGRPRNPAGRTGLVGRGLLGRWGPNHAADPIITRWKRDSSGNKIMHPVSGKHILQFVAIKRKDCGEWAIPGGMVDPGEKISATLKREFGEEALNSLQKTSAEKREIEEKLHKL

SEQ ID NO: 9680 - protein, 300 aa, Homo Sapiens
MSGSNGSKENSHNKARTSPYPGSKVERSQVPNEKVGWLVEWQDYKPVEYTAVSVLAGPRWADPQISESNFSPKFNEKDGHVERKSKNGLYEIENGRPRNPAGRTGLVGRGLLGRWGPNHAADPIITRWKRDSSGNKIMHPVSGKHILQFVAIKRKDCGEWAIPGGMVDPGEKISATLKREFGEEALNSLQKTSAEKREIEEKLHKLFSQDHLVIYKGYVDDPRNTDNAWMETEAVNYHDETGEIMDNLMLEAGDDAGKVKWVDINDKLKLYASHSQFIKLVAEKRDAHWSEDSEADCHAL

SEQ ID NO: 9681 - protein, 1391 aa, Homo Sapiens
MPSSLLGAAMPASTSAAALQEALENAGRLIDRQLQEDRMYPDLSELLMVSAPNNPTVSGMSDMDYPLQGPGLLSVPNLPEISSIRRVPLPPELVEQFGHMQCNCMMGVFPPISRAWLTIDSDIFMWNYEDGGDLAYFDGLSETILAVGLVKPKAGIFQPHVRHLLVLATPVDIVILGLSYANLQTGSGVLNDSLSGGMQLLPDPLYSLPTDNTYLLTITSTDNGRIFLAGKDGCLYEVAYQAEAGWFSQRCRKINHSKSSLSFLVPSLLQFTFSEDDPILQIAIDNSRNILYTRSEKGVIQVYDLGQDGQGMSRVASVSQNAIVSAAGNIARTIDRSVFKPIVQIAVIENSESLDCQLLAVTHAGVRLYFSTCPFRQPLARPNTLTLVHVRLPPGFSASSTVEKPSKVHRALYSKGILLMAASENEDNDILWCVNHDTFPFQKPMMETQMTAGVDGHSWALSAIDELKVDKIITPLNKDHIPITDSPVVVQQHMLPPKKFVLLSAQGSLMFHKLRPVDQLRHLLVSNVGGDGEEIERFFKLHQEDQACATCLILACSTAACDREVSAWATRAFFRYGGEAQMRFPTTLPPPSNVGPILGSPVYSSSPVPSGSPYPNPSFLGTPSHGIQPPAMSTPVCALGNPATQATNMSCVTGPEIVYSGKHNGICIYFSRIMGNIWDASLVVERIFKSGNREITAIESSVPCQLLESVLQELKGLQEFLDRNSQFAGGPLGNPNTTAKVQQRLIGFMRPENGNPQQMQQELQRKFHEAQLSEKISLQAIQQLVRKSYQALALWKLLCEHQFTIIVAELQKELQEQLKITTFKDLVIRDKELTGALIASLINCYIRDNAAVDGISLHLQDICPLLYSTDDAICSKANELLQRSRQVQNKTEKERMLRESLKEYQKISNQVDLSNVCAQYRQVRFYEGVVELSLTAAEKKDPQGLGLHFYKHGEPEEDIVGLQAFQERLNSYKCITDTLQELVNQSKAAPQSPSVPKKPGPPVLSSDPNMLSNEEAGHHFEQMLKLSQRSKDELFSIALYNWLIQVDLADKLLQVASPFLEPHLVRMAKVDQNRVRYMDLLWRYYEKNRSFSNAARVLSRLADMHSTEISLQQRLEYIARAILSAKSSTAISSIAADGEFLHELEEKMEVARIQLQIQETLQRQYSHHSSVQDAVSQLDSELMDITKLYGEFADPFKLAECKLAIIHCAGYSDPILVQTLWQDIIEKELSDSVTLSSSDRMHALSLKIVLLGKIYAGTPRFFPLDFIVQFLEQQVCTLNWDVGFVIQTMNEIGVPLPRLLEVYDQLFKSRDPFWNRMKKPLHLLDCIHVLLIRYVENPSQVLNCERRRFTNLCLDAVCGYLVELQSMSSSVAVQAITGNFKSLQAKLERLH

SEQ ID NO: 9682 - protein, 1327 aa, Homo Sapiens
MPSSLLGAAMPASTSAAALQEALENAGRLIDRQLQEDRMYPDLSELLMVSAPNNPTVSGMSDMDYPLQGPGLLSVPNLPEISSIRRVPLPPELVEQFGHMQCNCMMGVFPPISRAWLTIDSDIFMWNYEDGGDLAYFDGLSETILAVGLVKPKAGIFQPHVRHLLVLATPVDIVILGLSYANLQTGSGVLNDSLSGGMQLLPDPLYSLPTDNTYLLTITSTDNGRIFLAGKDGCLYEVAYQAEAGWFSQRCRKINHSKSSLSFLVPSLLQFTFSEDDPILQIAIDNSRNILYTRSEKGVIQVYDLGQDGQGMSRVASVSQNAIVSAAGNIARTIDRSVFKPIVQIAVIENSESLDCQLLAVTHAGVRLYFSTCPFRQPLARPNTLTLVHVRLPPGFSASSTVEKPSKVHRALYSKGILLMAASENEDNDILWCVNHDTFPFQKPMMETQMTAGVDGHSWALSAIDELKVDKIITPLNKDHIPITDSPVVVQQHMLPPKKFVLLSAQGSLMFHKLRPVDQLRHLLVSNVGGDGEEIERFFKLHQEDQACATCLILACSTAACDREVSAWATRAFFRYGGEAQMRFPTTLPPPSNVGPILGSPVYSSSPVPSGSPYPNPSFLGTPSHGIQPPAMSTPVCALGNPATQATNMSCVTGPEIVYSGKHNGICIYFSRIMGNIWDASLVVERIFKSGNREITAIESSVPCQLLESVLQELKGLQEFLDRNSQFAGGPLGNPNTTAKVQQRLIGFMRPENGNPQQMQQELQRKFHEAQLSEKISLQAIQQLVRKSYQALALWKLLCEHQFTIIVAELQKANELLQRSRQVQNKTEKERMLRESLKEYQKISNQVDLSNVCAQYRQVRFYEGVVELSLTAAEKKDPQGLGLHFYKHGEPEEDIVGLQAFQERLNSYKCITDTLQELVNQSKAAPQSPSVPKKPGPPVLSSDPNMLSNEEAGHHFEQMLKLSQRSKDELFSIALYNWLIQVDLADKLLQVASPFLEPHLVRMAKVDQNRVRYMDLLWRYYEKNRSFSNAARVLSRLADMHSTEISLQQRLEYIARAILSAKSSTAISSIAADGEFLHELEEKMEVARIQLQIQETLQRQYSHHSSVQDAVSQLDSELMDITKLYGEFADPFKLAECKLAIIHCAGYSDPILVQTLWQDIIEKELSDSVTLSSSDRMHALSLKIVLLGKIYAGTPRFFPLDFIVQFLEQQVCTLNWDVGFVIQTMNEIGVPLPRLLEVYDQLFKSRDPFWNRMKKPLHLLDCIHVLLIRYVENPSQVLNCERRRFTNLCLDAVCGYLVELQSMSSSVAVQAITGNFKSLQAKLERLH

SEQ ID NO: 9683 - protein, 54 aa, Homo Sapiens
MPSSLLGAAMPASTSAAALQEALENAGRLIDRQLQEDRMYPDLSELLMVSAPSE

SEQ ID NO: 9684 - protein, 1332 aa, Homo Sapiens
MSDMDYPLQGPGLLSVPNLPEISSIRRVPLPPELVEQFGHMQCNCMMGVFPPISRAWLTIDSDIFMWNYEDGGDLAYFDGLSETILAVGLVKPKAGIFQPHVRHLLVLATPVDIVILGLSYANLQTGSGVLNDSLSGGMQLLPDPLYSLPTDNTYLLTITSTDNGRIFLAGKDGCLYEVAYQAEAGWFSQRCRKINHSKSSLSFLVPSLLQFTFSEDDPILQIAIDNSRNILYTRSEKGVIQVYDLGQDGQGMSRVASVSQNAIVSAAGNIARTIDRSVFKPIVQIAVIENSESLDCQLLAVTHAGVRLYFSTCPFRQPLARPNTLTLVHVRLPPGFSASSTVEKPSKVHRALYSKGILLMAASENEDNDILWCVNHDTFPFQKPMMETQMTAGVDGHSWALSAIDELKVDKIITPLNKDHIPITDSPVVVQQHMLPPKKFVLLSAQGSLMFHKLRPVDQLRHLLVSNVGGDGEEIERFFKLHQEDQACATCLILACSTAACDREVSAWATRAFFRYGGEAQMRFPTTLPPPSNVGPILGSPVYSSSPVPSGSPYPNPSFLGTPSHGIQPPAMSTPVCALGNPATQATNMSCVTGPEIVYSGKHNGICIYFSRIMGNIWDASLVVERIFKSGNREITAIESSVPCQLLESVLQELKGLQEFLDRNSQFAGGPLGNPNTTAKVQQRLIGFMRPENGNPQQMQQELQRKFHEAQLSEKISLQAIQQLVRKSYQALALWKLLCEHQFTIIVAELQKELQEQLKITTFKDLVIRDKELTGALIASLINCYIRDNAAVDGISLHLQDICPLLYSTDDAICSKANELLQRSRQVQNKTEKERMLRESLKEYQKISNQVDLSNVCAQYRQVRFYEGVVELSLTAAEKKDPQGLGLHFYKHGEPEEDIVGLQAFQERLNSYKCITDTLQELVNQSKAAPQSPSVPKKPGPPVLSSDPNMLSNEEAGHHFEQMLKLSQRSKDELFSIALYNWLIQVDLADKLLQVASPFLEPHLVRMAKVDQNRVRYMDLLWRYYEKNRSFSNAARVLSRLADMHSTEISLQQRLEYIARAILSAKSSTAISSIAADGEFLHELEEKMEVARIQLQIQETLQRQYSHHSSVQDAVSQLDSELMDITKLYGEFADPFKLAECKLAIIHCAGYSDPILVQTLWQDIIEKELSDSVTLSSSDRMHALSLKIVLLGKIYAGTPRFFPLDFIVQFLEQQVCTLNWDVGFVIQTMNEIGVPLPRLLEVYDQLFKSRDPFWNRMKKPLHLLDCIHVLLIRYVENPSQVLNCERRRFTNLCLDAVCGYLVELQSMSSSVAVQAITGNFKSLQAKLERLH

SEQ ID NO: 9685 - protein, 140 aa, Homo Sapiens
CKDDEAVVQAPRHAPVVRTPSIQPSLLPHAAPFAKSHLVHGSSPGVMGTSVATSASKIIPQGADSTMLATKTVKHGAPSPSHPISAPQAAAAAALRRQMASQAPAVNTLTESTLKNVPQVVNVQELKNNPATPSTAMGGL

SEQ ID NO: 9686 - protein, 78 aa, Homo Sapiens
GEGTAAASAGGFGFGSSSNTTSFGTLASQNAPTFGSLSQQTSGFGTQSSGFSGFGSGTGGFSFGSNNSSVQGFGGWRS

SEQ ID NO: 9687 - protein, 113 aa, Homo Sapiens
LQCLAALLLLGDPLGLEGCQHSVQPQPLQALWARREAKCSERALQLPAQEDSGLGAAATPHPSARSRVRMPPLSDHCPNRLLVLGPRVADSLVLDQAQEGSALGQITRKYPPF

SEQ ID NO: 9688 - protein, 2090 aa, Homo Sapiens
MGDEMDAMIPEREMKDFQFRALKKVRIFDSPEELPKERSSLLAVSNKYGLVFAGGASGLQIFPTKNLLIQNKPGDDPNKIVDKVQGLLVPMKFPIHHLALSCDNLTLSACMMSSEYGSIIAFFDVRTFSNEAKQQKRPFAYHKLLKDAGGMVIDMKWNPTVPSMVAVCLADGSIAVLQVTETVKVCATLPSTVAVTSVCWSPKGKQLAVGKQNGTVVQYLPTLQEKKVIPCPPFYESDHPVRVLDVLWIGTYVFAIVYAAADGTLETSPDVVMALLPKKEEKHPEIFVNFMEPCYGSCTERQHHYYLSYIEEWDLVLAASAASTEVSILARQSDQINWESWLLEDSSRAELPVTDKSDDSLPMGVVVDYTNQVEITISDEKTLPPAPVLMLLSTDGVLCPFYMINQNPGVKSLIKTPERLSLEGERQPKSPGSTPTTPTSSQAPQKLDASAAAAPASLPPSSPAAPIATFSLLPAGGAPTVFSFGSSSLKSSATVTGEPPSYSSGSDSSKAAPGPGPSTFSFVPPSKASLAPTPAASPVAPSAASFSFGSSGFKPTLESTPVPSVSAPNIAMKPSFPPSTSAVKVNLSEKFTAAATSTPVSSSQSAPPMSPFSSASKPAASGPLSHPTPLSAPPSSVPLKSSVLPSPSGRSAQGSSSPVPSMVQKSPRITPPAAKPGSPQAKSLQPAVAEKQGHQWKDSDPVMAGIGEEIAHFQKELEELKARTSKACFQVGTSEEMKMLRTESDDLHTFLLEIKETTESLHGDISSLKTTLLEGFAGVEEAREQNERNRDSGYLHLLYKRPLDPKSEAQLQEIRRLHQYVKFAVQDVNDVLDLEWDQHLEQKKKQRHLLVPERETLFNTLANNREIINQQRKRLNHLVDSLQQLRLYKQTSLWSLSSAVPSQSSIHSFDSDLESLCNALLKTTIESHTKSLPKVPAKLSPMKQAQLRNFLAKRKTPPVRSTAPASLSRSAFLSQRYYEDLDEVSSTSSVSQSLESEDARTSCKDDEAVVQAPRHAPVVRTPSIQPSLLPHAAPFAKSHLVHGSSPGVMGTSVATSASKIIPQGADSTMLATKTVKHGAPSPSHPISAPQAAAAAALRRQMASQAPAVNTLTESTLKNVPQVVNVQELKNNPATPSTAMGSSVPYSTAKTPHPVLTPVAANQAKQGSLINSLKPSGPTPASGQLSSGDKASGTAKIETAVTSTPSASGQFSKPFSFSPSGTGFNFGIITPTPSSNFTAAQGATPSTKESSQPDAFSSGGGSKPSYEAIPESSPPSGITSASNTTPGEPAASSSRPVAPSGTALSTTSSKLETPPSKLGELLFPSSLAGETLGSFSGLRVGQADDSTKPTNKASSTSLTSTQPTKTSGVPSGFNFTAPPVLGKHTEPPVTSSATTTSVAPPAATSTSSTAVFGSLPVTSAGSSGVISFGGTSLSAGKTSFSFGSQQTNSTVPPSAPPPTTAATPLPTSFPTLSFGSLLSSATTPSLPMSAGRSTEEATSSALPEKPGDSEVSASAASLLEEQQSAQLPQAPPQTSDSVKKEPVLAQPAVSNSGTAASSTSLVALSAEATPATTGVPDARTEAVPPASSFSVPGQTAVTAAAISSAGPVAVETSSTPIASSTTSIVAPGPSAEAAAFGTVTSGSSVFAQPPAASSSSAFNQLTNNTATAPSATPVFGQVAASTAPSLFGQQTGSTASTAAATPQVSSSGFSSPAFGTTAPGVFGQTTFGQASVFGQSASSAASVFSFSQPGFSSVPAFGQPASSTPTSTSGSVFGAASSTSSSSSFSFGQSSPNTGGGLFGQSNAPAFGQSPGFGQGGSVFGGTSAATTTAATSGFSFCQASGFGSSNTGSVFGQAASTGGIVFGQQSSSSSGSVFGSGNTGRGGGFFSGLGGKPSQDAANKNPFSSASGGFGSTATSNTSNLFGNSGAKTFGGFASSSFGEQKPTGTFSSGGGSVASQGFGFSSPNKTGGFGAAPVFGSPPTFGGSPGFGGVPAFGSAPAFTSPLGSTGGKVFGEGTAAASAGGFGFGSSSNTTSFGTLASQNAPTFGSLSQQTSGFGTQSSGFSGFGSGTGGFSFGSNNSSVQGFGGWRS

SEQ ID NO: 9689 - protein, 2080 aa, Homo Sapiens
MGDEMDAMIPEREMKDFQFRALKKVRIFDSPEELPKERSSLLAVSNKYGLVFAGGASGLQIFPTKNLLIQNKPGDDPNKIVDKVQGLLVPMKFPIHHLALSCDNLTLSACMMSSEYGSIIAFFDVRTFSNEAKQQKRPFAYHKLLKDAGGMVIDMKWNPTVPSMVAVCLADGSIAVLQVTETVKVCATLPSTVAVTSVCWSPKGKQLAVGKQNGTVVQYLPTLQEKKVIPCPPFYESDHPVRVLDVLWIGTYVFAIVYAAADGTLETSPDVVMALLPKKEEKHPEIFVNFMEPCYGSCTERQHHYYLSYIEEWDLVLAASAASTEVSILARQSDQINWESWLLEDSSRAELPVTDKSDDSLPMGVVVDYTNQVEITISDEKTLPPAPVLMLLSTDGVLCPFYMINQNPGVKSLIKTPERLSLEGERQPKSPGSTPTTPTSSQAPQKLDASAAAAPASLPPSSPAAPIATFSLLPAGGAPTVFSFGSSSLKSSATVTGEPPSYSSGSDSSKAAPGPGPSTFSFVPPSKASLAPTPAASPVAPSAASFSFGSSGFKPTLESTPVPSVSAPNIAMKPSFPPSTSAVKVNLSENSSQSAPPMSPFSSASKPAASGPLSHPTPLSAPPSSVPLKSSVLPSPSAGRSAQGSSSPVPSMVQKSPRITPPAAKPGSPQAKSLQPAVAEKQGHQWKDSDPVMAGIGEEIAHFQKELEELKARTSKACFQVGTSEEMKMLRTESDDLHTFLLEIKETTESLHGDISSLKTTLLEGFAGVEEAREQNERNRDSGYLHLLYKRPLDPKSEAQLQEIRRLHQYVKFAVQDVNDVLDLEWDQHLEQKKKQRHLLVPERETLFNTLANNREIINQQRKRLNHLVDSLQQLRLYKQTSLWSLSSAVPSQSSIHSFDSDLESLCNALLKTTIESHTKSLPKVPAKLSPMKQAQLRNFLAKRKTPPVRSTAPASLSRSAFLSQRYYEDLDEVSSTSSVSQSLESEDARTSCKDDEAVVQAPRHAPVVRTPSIQPSLLPHAAPFAKSHLVHGSSPGVMGTSVATSASKIIPQGADSTMLATKTVKHGAPSPSHPISAPQAAAAAALRRQMASQAPAVNTLTESTLKNVPQVVNVQELKNNPATPSTAMGSSVPYSTAKTPHPVLTPVAANQAKQGSLINSLKPSGPTPASGQLSSGDKASGTAKIETAVTSTPSASGQFSKPFSFSPSGTGFNFGIITPTPSSNFTAAQGATPSTKESSQPDAFSSGGGSKPSYEAIPESSPPSGITSASNTTPGEPAASSSRPVAPSGTALSTTSSKLETPPSKLGELLFPSSLAGETLGSFSGLRVGQADDSTKPTNKASSTSLTSTQPTKTSGVPSGFNFTAPPVLGKHTEPPVTSSATTTSVAPPAATSTSSTAVFGSLPVTSAGSSGVISFGGTSLSAGKTSFSFGSQQTNSTVPPSAPPPTTAATPLPTSFPTLSFGSLLSSATTPSLPMSAGRSTEEATSSALPEKPGDSEVSASAASLLEEQQSAQLPQAPPQTSDSVKKEPVLAQPAVSNSGTAASSTSLVALSAEATPATTGVPDARTEAVPPASSFSVPGQTAVTAAAISSAGPVAVETSSTPIASSTTSIVAPGPSAEAAAFGTVTSGSSVFAQPPAASSSSAFNQLTNNTATAPSATPVFGQVAASTAPSLFGQQTGSTASTAAATPQVSSSGFSSPAFGTTAPGVFGQTTFGQASVFGQSASSAASVFSFSQPGFSSVPAFGQPASSTPTSTSGSVFGAASSTSSSSSFSFGQSSPNTGGGLFGQSNAPAFGQSPGFGQGGSVFGGTSAATTTAATSGFSFCQASGFGSSNTGSVFGQAASTGGIVFGQQSSSSSGSVFGSGNTGRGGGFFSGLGGKPSQDAANKNPFSSASGGFGSTATSNTSNLFGNSGAKTFGGFASSSFGEQKPTGTFSSGGGSVASQGFGFSSPNKTGGFGAAPVFGSPPTFGGSPGFGGVPAFGSAPAFTSPLGSTGGKVFGEGTAAASAGGFGFGSSSNTTSFGTLASQNAPTFGSLSQQTSGFGTQSSGFSGFGSGTGGFSFGSNNSSVQGFGGWRS

SEQ ID NO: 9690 - protein, 52 aa, Homo Sapiens
MKFPIHHLALSCDNLTLSACMMSSEYGSIIAFFDVRTFSNEAKQQKRPFAYH

SEQ ID NO: 9691 - protein, 1519 aa, Homo Sapiens
MKPSFPPSTSAVKVNLSEKFTAAATSTPVSSSQSAPPMSPFSSASKPAASGPLSHPTPLSAPPSSVPLKSSVLPSPSGRSAQGSSSPVPSMVQKSPRITPPAAKPGSPQAKSLQPAVAEKQGHQWKDSDPVMAGIGEEIAHFQKELEELKARTSKACFQVGTSEEMKMLRTESDDLHTFLLEIKETTESLHGDISSLKTTLLEGFAGVEEAREQNERNRDSGYLHLLYKRPLDPKSEAQLQEIRRLHQYVKFAVQDVNDVLDLEWDQHLEQKKKQRHLLVPERETLFNTLANNREIINQQRKRLNHLVDSLQQLRLYKQTSLWSLSSAVPSQSSIHSFDSDLESLCNALLKTTIESHTKSLPKVPAKLSPMKQAQLRNFLAKRKTPPVRSTAPASLSRSAFLSQRYYEDLDEVSSTSSVSQSLESEDARTSCKDDEAVVQAPRHAPVVRTPSIQPSLLPHAAPFAKSHLVHGSSPGVMGTSVATSASKIIPQGADSTMLATKTVKHGAPSPSHPISAPQAAAAAALRRQMASQAPAVNTLTESTLKNVPQVVNVQELKNNPATPSTAMGSSVPYSTAKTPHPVLTPVAANQAKQGSLINSLKPSGPTPASGQLSSGDKASGTAKIETAVTSTPSASGQFSKPFSFSPSGTGFNFGIITPTPSSNFTAAQGATPSTKESSQPDAFSSGGGSKPSYEAIPESSPPSGITSASNTTPGEPAASSSRPVAPSGTALSTTSSKLETPPSKLGELLFPSSLAGETLGSFSGLRVGQADDSTKPTNKASSTSLTSTQPTKTSGVPSGFNFTAPPVLGKHTEPPVTSSATTTSVAPPAATSTSSTAVFGSLPVTSAGSSGVISFGGTSLSAGKTSFSFGSQQTNSTVPPSAPPPTTAATPLPTSFPTLSFGSLLSSATTPSLPMSAGRSTEEATSSALPEKPGDSEVSASAASLLEEQQSAQLPQAPPQTSDSVKKEPVLAQPAVSNSGTAASSTSLVALSAEATPATTGVPDARTEAVPPASSFSVPGQTAVTAAAISSAGPVAVETSSTPIASSTTSIVAPGPSAEAAAFGTVTSGSSVFAQPPAASSSSAFNQLTNNTATAPSATPVFGQVAASTAPSLFGQQTGSTASTAAATPQVSSSGFSSPAFGTTAPGVFGQTTFGQASVFGQSASSAASVFSFSQPGFSSVPAFGQPASSTPTSTSGSVFGAASSTSSSSSFSFGQSSPNTGGGLFGQSNAPAFGQSPGFGQGGSVFGGTSAATTTAATSGFSFCQASGFGSSNTGSVFGQAASTGGIVFGQQSSSSSGSVFGSGNTGRGGGFFSGLGGKPSQDAANKNPFSSASGGFGSTATSNTSNLFGNSGAKTFGGFASSSFGEQKPTGTFSSGGGSVASQGFGFSSPNKTGGFGAAPVFGSPPTFGGSPGFGGVPAFGSAPAFTSPLGSTGGKVFGEGTAAASAGGFGFGSSSNTTSFGTLASQNAPTFGSLSQQTSGFGTQSSGFSGFGSGTGGFSFGSNNSSVQGFGGWRS

SEQ ID NO: 9692 - protein, 495 aa, Homo Sapiens
MKSSLLLRGVHFCFHLPGATPSTKESSQPDAFSSGGGSKPSYEAIPESSPPSGITSASNTTPGEPAASSSRPVAPSGTALSTTSSKLETPPSKLGELLFPSSLAGETLGSFSGLRVGQADDSTKPTNKASSTSLTSTQPTKTSGVPSGFNFTAPPVLGKHTEPPVTSSATTTSVAPPAATSTSSTAVFGSLPVTSAGSSGVISFGGTSLSAGKTSFSFGSQQTNSTVPPSAPPPTTAATPLPTSFPTLSFGSLLSSATTPSLPMSAGRSTEEATSSALPEKPGDSEVSASAASLLEEQQSAQLPQAPPQTSDSVKKEPVLAQPAVSNSGTAASSTSLVALSAEATPATTGVPDARTEAVPPASSFSVPGQTAVTAAAISSAGPVAVETSSTPIASSTTSIVAPGPSAEAAAFGTVTSGSSVFAQPPAASSSSAFNQLTNNTATAPSATPVFGQVAASTAPSLFGQQTGSTASTAAATPQVSSSGFSSPAFGTTAP

SEQ ID NO: 9693 - protein, 916 aa, Homo Sapiens
MKSSLLLRGVHFCFHLPGTAKIETAVTSTPSASGQFSKPFSFSPSGTGFNFGIITPTPSSNFTAAQGATPSTKESSQPDAFSSGGGSKPSYEAIPESSPPSGITSASNTTPGEPAASSSRPVAPSGTALSTTSSKLETPPSKLGELLFPSSLAGETLGSFSGLRVGQADDSTKPTNKASSTSLTSTQPTKTSGVPSGFNFTAPPVLGKHTEPPVTSSATTTSVAPPAATSTSSTAVFGSLPVTSAGSSGVISFGGTSLSAGKTSFSFGSQQTNSTVPPSAPPPTTAATPLPTSFPTLSFGSLLSSATTPSLPMSAGRSTEEATSSALPEKPGDSEVSASAASLLEEQQSAQLPQAPPQTSDSVKKEPVLAQPAVSNSGTAASSTSLVALSAEATPATTGVPDARTEAVPPASSFSVPGQTAVTAAAISSAGPVAVETSSTPIASSTTSIVAPGPSAEAAAFGTVTSGSSVFAQPPAASSSSAFNQLTNNTATAPSATPVFGQVAASTAPSLFGQQTGSTASTAAATPQVSSSGFSSPAFGTTAPGVFGQTTFGQASVFGQSASSAASVFSFSQPGFSSVPAFGQPASSTPTSTSGSVFGAASSTSSSSSFSFGQSSPNTGGGLFGQSNAPAFGQSPGFGQGGSVFGGTSAATTTAATSGFSFCQASGFGSSNTGSVFGQAASTGGIVFGQQSSSSSGSVFGSGNTGRGGGFFSGLGGKPSQDAANKNPFSSASGGFGSTATSNTSNLFGNSGAKTFGGFASSSFGEQKPTGTFSSGGGSVASQGFGFSSPNKTGGFGAAPVFGSPPTFGGSPGFGGVPAFGSAPAFTSPLGSTGGKVFGEGTAAASAGGFGFGSSSNTTSFGTLASQNAPTFGSLSQQTSGFGTQSSGFSGFGSGTGGFSFGSNNSSVQGFGGWRS

SEQ ID NO: 9694 - protein, 187 aa, Homo Sapiens
  misc_feature (1)..(1): Xaa can be any naturally occurring amino acid
XARQSDQINWESWLLEDSSRAELPVTDKSDDSLPMGVVVDYTNQVEITISDEKTLPPAPVLMLLSTDGVLCPFYMINQNPGVKSLIKTPERLSLEGERQPKSPASLAPTPAASPVAPSAASFSFGSSGFKPTLESTPVPSVSAPNIAMKPSFPPSTSAVKVNLSEKFTAAATSTPVSSSQSAPPMSP

SEQ ID NO: 9695 - protein, 145 aa, Homo Sapiens
  misc_feature (1)..(1): Xaa can be any naturally occurring amino acid
XGVPAFGSAPAFTSPLGSTGGKVFGEGTAAASAGGFGFGSSSNTTSFGTLASQNAPTFGSLSQQTSGFGTQSSGFSGFGSGTGGLSRVLVAGEAEGVSAGLSIPGTNRILSFFPEKCWSRLFRPTLPSKHIHPERNNRNQNSQGA

SEQ ID NO: 9696 - protein, 967 aa, Homo Sapiens
  misc_feature (1)..(1): Xaa can be any naturally occurring amino acid
XKTPHPVLTPVAANQAKQGSLINSLKPSGPTPASGQLSSGDKASGTAKIETAVTSTPSASGQFSKPFSFSPSGTGFNFGIITPTPSSNFTAAQGATPSTKESSQPDAFSSGGGSKPSYEAIPESSPPSGITSASNTTPGEPAASSSRPVAPSGTALSTTSSKLETPPSKLGELLFPSSLAGETLGSFSGLRVGQADDSTKPTNKASSTSLTSTQPTKTSGVPSGFNFTAPPVLGKHTEPPVTSSATTTSVAPPAATSTSSTAVFGSLPVTSAGSSGVISFGGTSLSAGKTSFSFGSQQTNSTVPPSAPPPTTAATPLPTSFPTLSFGSLLSSATTPSLPMSAGRSTEEATSSALPEKPGDSEVSASAASLLEEQQSAQLPQAPPQTSDSVKKEPVLAQPAVSNSGTAASSTSLVALSAEATPATTGVPDARTEAVPPASSFSVPGQTAVTAAAISSAGPVAVETSSTPIASSTTSIVAPGPSAEAAAFGTVTSGSSVFAQPPAASSSSAFNQLTNNTATAPSATPVFGQVAASTAPSLFGQQTGSTASTAAATPQVSSSGFSSPAFGTTAPGVFGQTTFGQASVFGQSASSAASVFSFSQPGFSSVPAFGQPASSTPTSTSGSVFGAASSTSSSSSFSFGQSSPNTGGGLFGQSNAPAFGQSPGFGQGGSVFGGTSAATTTAATSGFSFCQASGFGSSNTGSVFGQAASTGGIVFGQQSSSSSGSVFGSGNTGRGGGFFSGLGGKPSQDAANKNPFSSASGGFGSTATSNTSNLFGNSGAKTFGGFASSSFGEQKPTGTFSSGGGSVASQGFGFSSPNKTGGFGAAPVFGSPPTFGGSPGFGGVPAFGSAPAFTSPLGSTGGKVFGEGTAAASAGGFGSLAMSLSPTLKGRLLLMRPKAGGGREQAAPGRKSNESRSLGHLCMERALTSPLKVWEQQQHHILRHARESECPHFRITVPTDFWFWDPE

SEQ ID NO: 9697 - protein, 114 aa, Homo Sapiens
AMMLSDRLTFLGKYREFHRMYGEKRFADAASLLLSLMTSRIAPRSFWMTLLTDALPLLEQKQVIFSAEQTYELMRCLEDLTSRRPVHGESDTEQLQYGPLVLLSFTSIICWKLL

SEQ ID NO: 9698 - protein, 191 aa, Homo Sapiens
LDWVRLHVCEVDSLSADVLGSENPSKHDSFWNLGRLDEARQMLSKEADASPASAGICRIMGDLMRTMPILSPGNTQTLTELELKWQHWHEECERYLQDSTFATSPHLESLLKIMLGDEAALLEQKELLSNWYHFLVTRLLYSNPTVKPIDLHYYAQSSLDLFLGGESSPEPLDNILLAAFEFDIHQVIKEC

SEQ ID NO: 9699 - protein, 19 aa, Homo Sapiens
LLAAFEFDIHQVIKECSFL

SEQ ID NO: 9700 - protein, 18 aa, Homo Sapiens
LTDALPLLEQKQQNRLMS

SEQ ID NO: 9701 - protein, 611 aa, Homo Sapiens
MEELDGEPTVTLIPGVNSKKNQMYFDWGPGEMLVCETSFNKKEKSEMVPSCPFIYIIRKDVDVYSQILRKLFNESHGIFLGLQRIDEELTGKSRKSQLVRVSKNYRSVIRACMEEMHQVAIAAKDPANGRQFSSQVSILSAMELIWNLCEILFIEVAPAGPLLLHLLDWVRLHVCEVDSLSADVLGSENPSKHDSFWNLPGNTQTLTELELKWQHWHEECERYLQDSTFATSPHLESLLKIMLGDEAALLEQKELLSNWYHFLVTRLLYSNPTVKPIDLHYYAQSSLDLFLGGESSPEPLDNILLAAFEFDIHQVIKECSIALSNWWFVAHLTDLLDHCKLLQSHNLYFGSNMREFLLLEYASGLFAHPSLWQLGVDYFDYCPELGRVSLELHIERIPLNTEQKALKVLRICEQRQMTEQVRSICKILAMKAVRNNRLGSALSWSIRAKDAAFATLVSDRFLRDYCERGCFSDLDLIDNLGPAMMLSDRLTFLGKYREFHRMYGEKRFADAASLLLSLMTSRIAPRSFWMTLLTDALPLLEQKQVIFSAEQTYELMRCLEDLTSRRPVHGESDTEQLQDDDIETTKVEMLRLSLARNLARAIIREGSLEGS

SEQ ID NO: 9702 - protein, 656 aa, Homo Sapiens
MEELDGEPTVTLIPGVNSKKNQMYFDWGPGEMLVCETSFNKKEKSEMVPSCPFIYIIRKDVDVYSQILRKLFNESHGIFLGLQRIDEELTGKSRKSQLVRVSKNYRSVIRACMEEMHQVAIAAKDPANGRQFSSQVSILSAMELIWNLCEILFIEVAPAGPLLLHLLDWVRLHVCEVDSLSADVLGSENPSKHDSFWNLVTILVLQGRLDEARQMLSKEADASPASAGICRIMGDLMRTMPILSPGNTQTLTELELKWQHWHEECERYLQDSTFATSPHLESLLKIMLGDEAALLEQKELLSNWYHFLVTRLLYSNPTVKPIDLHYYAQSSLDLFLGGESSPEPLDNILLAAFEFDIHQVIKECSIALSNWWFVAHLTDLLDHCKLLQSHNLYFGSNMREFLLLEYASGLFAHPSLWQLGVDYFDYCPELGRVSLELHIERIPLNTEQKALKVLRICEQRQMTEQVRSICKILAMKAVRNNRLGSALSWSIRAKDAAFATLVSDRFLRDYCERGCFSDLDLIDNLGPAMMLSDRLTFLGKYREFHRMYGEKRFADAASLLLSLMTSRIAPRSFWMTLLTDALPLLEQKQVIFSAEQTYELMRCLEDLTSRRPVHGESDTEQLQDDDIETTKVEMLRLSLARNLARAIIREGSLEGS

SEQ ID NO: 9703 - protein, 169 aa, Homo Sapiens
MEELDGEPTVTLIPGVNSKKNQMYFDWGPGEMLVCETSFNKKEKSEMVPSCPFIYIIRKDVDVYSQILRKLFNESHGIFLGLQRIDEELTGKSRKSQLVRVSKNYRSVIRACMEEMHQVAIAAKDPANGRQFSSQVSILSAMELIWNLCEILFIEVAPGDHLGAAGPAG

SEQ ID NO: 9704 - protein, 544 aa, Homo Sapiens
MEEMHQVAIAAKDPANGRQFSSQVSILSAMELIWNLCEILFIEVAPAGPLLLHLLDWVRLHVCEVDSLSADVLGSENPSKHDSFWNLVTILVLQGRLDEARQMLSKEADASPASAGICRIMGDLMRTMPILSPGNTQTLTELELKWQHWHEECERYLQDSTFATSPHLESLLKIMLGDEAALLEQKELLSNWYHFLVTRLLYSNPTVKPIDLHYYAQSSLDLFLGGESSPEPLDNILLAAFEFDIHQVIKECSIALSNWWFVAHLTDLLDHCKLLQSHNLYFGSNMREFLLLEYASGLFAHPSLWQLGVDYFDYCPELGRVSLELHIERIPLNTEQKALKVLRICEQRQMTEQVRSICKILAMKAVRNNRLGSALSWSIRAKDAAFATLVSDRFLRDYCERGCFSDLDLIDNLGPAMMLSDRLTFLGKYREFHRMYGEKRFADAASLLLSLMTSRIAPRSFWMTLLTDALPLLEQKQVIFSAEQTYELMRCLEDLTSRRPVHGESDTEQLQDDDIETTKVEMLRLSLARNLARAIIREGSLEGS

SEQ ID NO: 9705 - protein, 259 aa, Homo Sapiens
MREFLLLEYASGLFAHPSLWQLGVDYFDYCPELGRVSLELHIERIPLNTEQKALKVLRICEQRQMTEQVRSICKILAMKAVRNNRLGSALSWSIRAKDAAFATLVSDRFLRDYCERGCFSDLDLIDNLGPAMMLSDRLTFLGKYREFHRMYGEKRFADAASLLLSLMTSRIAPRSFWMTLLTDALPLLEQKQVIFSAEQTYELMRCLEDLTSRRPVHGESDTEQLQDDDIETTKVEMLRLSLARNLARAIIREGSLEGS

SEQ ID NO: 9706 - protein, 120 aa, Homo Sapiens
MYFDWGPGEMLVCETSFNKKEKSEMVPSCPFIYIIRKDVDVYSQILRKLFNESHGIFLGLQRIDEELTGKSRKSQLVRVSKNYRSVIRACMEEMHQVAIAAKDPANGRQFSSQVSILSAM

SEQ ID NO: 9707 - protein, 272 aa, Homo Sapiens
VTILVLQGRLDEARQMLSKEADASPASAGICRIMGDLMRTMPILSPGNTQTLTELELKWQHWHEECERYLQDSTFATSPHLESLLKIMLGDEAALLEQKELLSNWYHFLVTRLLYSNPTVKPIDLHYYAQSSLDLFLGGESSPEPLDNILLAAFEFDIHQVIKECSFGSNMREFLLLEYASGLFAHPSLWQLGVDYFDYCPELGRVSLELHIERIPLNTEQKALKVLRICEQRQMTEQVRSICKILAMKAVRNNRLGSALSWSIRAKDAAFA

SEQ ID NO: 9708 - protein, 46 aa, Homo Sapiens
  misc_feature (1)..(1): Xaa can be any naturally occurring amino acid
XEKRFADAASLLLSLMTSRIAPRSFWMTLLTDALPLLEQKQNRLMS

SEQ ID NO: 9709 - protein, 302 aa, Homo Sapiens
  misc_feature (1)..(1): Xaa can be any naturally occurring amino acid
XHEECERYLQDSTFATSPHLESLLKSSLDLFLGGESSPEPLDNILLAAFEFDIHQVIKECSIALSNWWFVAHLTDLLDHCKLLQSHNLYFGSNMREFLLLEYASGLFAHPSLWQLGVDYFDYCPELGRVSLELHIERIPLNTEQKALKVLRICEQRQMTEQVRSICKILAMKAVRNNRLGSALSWSIRAKDAAFATLVSDRFLRDYCERGCFSDLDLIDNLGPAMMLSDRLTFLGKYREFHRMYGEKRFADAASLLLSLMTSRIAPRSFWMTLLTDALPLLEQKQVIFSAEQTYELMRCLED

SEQ ID NO: 9710 - protein, 100 aa, Homo Sapiens
  misc_feature (1)..(1): Xaa can be any naturally occurring amino acid
XLFIEVAPAGPLLLHLLDWVRLHVCEVDSLSADVLGSENPSKHDSFWNLIMLGDEAALLEQKELLSNWYHFLVTRLLYSNPTVKPIDLHYYAQPGPVSGR

SEQ ID NO: 9711 - protein, 98 aa, Homo Sapiens
  misc_feature (1)..(1): Xaa can be any naturally occurring amino acid
XSLMTSRIAPRSFWMTLLTDALPLLEQKQVKVIFSAEQTYELMRCLEDLTSRRPVHGESDTEQLQDDDIETTKVEMLRLSLARNLARAIIREGSLEGS

SEQ ID NO: 9712 - protein, 89 aa, Homo Sapiens
MPVNSSGPDWVTVIPRRIKETNSLELSQGSGTFPSGYYYKDQWRPRKFKMRQFNDPTTLQSAYKEKWCIYLVTQQSGNGLNTLLHLFQI

SEQ ID NO: 9713 - protein, 53 aa, Homo Sapiens
MWTNFFKLRLFCCLLAVLMVVVLVINVTQVEYLDHETVSATFIDSSGQFVSSQ

SEQ ID NO: 9714 - protein, 559 aa, Homo Sapiens
MWTNFFKLRLFCCLLAVLMVVVLVINVTQVEYLDHETVSATFIDSSGQFVSSQVTGISRNPYCGYDQQTLSSQERMEEDSLLAALHRQVPDVGPVPFVKSTDPSSSYFVILNSAAFFKVGSQLEVLVHVQDFQRKPKKYGGDYLQARIHSLKLQAGAVGRVVDYQNGFYKVFFTLLWPGKVKVSVSLVHPSEGIRVLQRLQEDKPDRVYFKSLFRSGRISETTECNVCLPGNLPLCNFTDLYTGEPWFCFKPKKLPCSSRITHFKGGYLKGLLTAAESAFFQSGVNIKMPVNSSGPDWVTVIPRRIKETNSLELSQGSGTFPSGYYYKDQWRPRKFKMRQFNDPDNITECLQRKVVHLFGDSTIRQWFEYLTTFVPDLVEFNLGSPKNVGPFLAVDQKHNILLKYRCHGPPIRFTTVFSNELHYVANELNGIVGGKNTVVAIAVWSHFSTFPLEVYIRRLRNIRRAVVRLLDRSPKTVVVIRTANAQELGPEVSLFNSDWYNFQLDTILRRMFSGVGVYLVDAWEMTLAHYLPHKLHPDEVIVKNQLDMFLSFVCPLET

SEQ ID NO: 9715 - protein, 559 aa, Homo Sapiens; identical to SEQ ID NO: 9714

SEQ ID NO: 9716 - protein, 559 aa, Homo Sapiens; identical to SEQ ID NO: 9714

SEQ ID NO: 9717 - protein, 260 aa, Homo Sapiens
MEKFNTISVSKCNKETVAMKEKCKFGMTSTIPSGHVWRNTWNPVSCSLATVKMKECLRGKLIYLMGDSTIRQWMEYFKASINTLKSVDLHESGKLQHQLAVDLDRNINIQWQKYCYPLIGSMTYSVKEMEYLTRAIDRTGGEKNTVIVISLGQHFRPFPIDVFIRRALNVHKAIQHLLLRSPDTMVIIKTENIREMYNDAERFSDFHGYIQYLIIKDIFQDLSVSIIDAWDITIAYGTNNVHPPQHVVGNQINILLNYIC

SEQ ID NO: 9718 - protein, 544 aa, Homo Sapiens
MKISMINYKSLLALLFILASWIIFTVFQNSTKVWSALNLSISLHYWNNSTKSLFPKTPLISLKPLTETELRIKEIIEKLDQQIPPRPFTHVNTTTSATHSTATILNPRDTYCRGDQLHILLEVRDHLGRRKQYGGDFLRARMSSPALMAGASGKVTDFNNGTYLVSFTLFWEGQVSLSLLLIHPSEGVSALWSARNQGYDRVIFTGQFVNGTSQVHSECGLILNTNAELCQYLDNRDQEGFYCVRPQHMPCAALTHMYSKNKKVSYLSKQEKSLFERSNVGVEIMEKFNTISVSKCNKETVAMKEKCKFGMTSTIPSGHVWRNTWNPVSCSLATVKMKECLRGKLIYLMGDSTIRQWMEYFKASINTLKSVDLHESGKLQHQLAVDLDRNINIQWQKYCYPLIGSMTYSVKEMEYLTRAIDRTGGEKNTVIVISLGQHFRPFPIDVFIRRALNVHKAIQHLLLRSPDTMVIIKTENIREMYNDAERFSDFHGYIQYLIIKDIFQDLSVSIIDAWDITIAYGTNNVHPPQHVVGNQINILLNYIC

SEQ ID NO: 9719 - protein, 139 aa, Homo Sapiens
MQAACWYVLFLLQPTVYLVTCANLTNGGKSELLKSGSSKSTLKHIWTESSKDLSISRLLSQTFRGKENDTDLDLRYDTPEPYSEQDLWDWLRNSTDLQEPRPRAKRRPIVKTGKFKKMFGWGDFHSNIKTVKLNLLITG

SEQ ID NO: 9720 - protein, 143 aa, Homo Sapiens
MQAACWYVLFLLQPTVYLVTCANLTNGGKSELLKSGSSKSTLKHIWTESSKDLSISRLLSQTFRGKENDTDLDLRYDTPEPYSEQDLWDWLRNSTDLQEPRPRAKRRPIVKTGKFKKMFGWGDFHSNIKTVKLNLLITGKIVD

SEQ ID NO: 9721 - protein, 271 aa, Homo Sapiens
MQAACWYVLFLLQPTVYLVTCANLTNGGKSELLKSGSSKSTLKHIWTESSKDLSISRLLSQTFRGKENDTDLDLRYDTPEPYSEQDLWDWLRNSTDLQEPRPRAKRRPIVKTGKFKKMFGWGDFHSNIKTVKLNLLITGKIVDHGNGTFSVYFRHNSTGQGNVSVSLVPPTKIVEFDLAQQTVIDAKDSKSFNCRIEYEKVDKATKNTLCNYDPSKTCYQEQTQSHVSWLCSKPFKVICIYISFYSTDYKLVQKVCPDYNYHSDTPYFPSG

SEQ ID NO: 9722 - protein, 253 aa, Homo Sapiens
VTCANLTNGGKSELLKSGSSKSTLKHIWTESSKDLSISRLLSQTFRGKENDTDLDLRYDTPEPYSEQDLWDWLRNSTDLQEPRPRAKRRPIVKTGKFKKMFGWGDFHSNIKTVKLNLLITGKIVDHGNGTFSVYFRHNSTGQGNVSVSLVPPTKIVEFDLAQQTVIDAKDSKSFNCRIEYEKVDKATKNTLCNYDPSKTCYQEQTQSHVSWLCSKPFKVICIYISFYSTDYKLVQKVCPDYNYHSDTPYFPSG

SEQ ID NO: 9723 - protein, 264 aa, Homo Sapiens
MRLRPLPLVVVPGLLQLLFCDSKEVVHATEGLDWEDKDAPGTLVGNVVHSRIISPLRLFVKQSPVPKPGPMAYADSMENFWDWLANITEIQEPLARTKRRPIVKTGKFKKMFGWGDFHSNIKTVKLNLLITGKIVDHGNGTFSVYFRHNSTGLGNVSVSLVPPSKVVEFEVSPQSTLETKESKSFNCRIEYEKTDRAKKTALCNFDPSKICYQEQTQSHVSWLCSKPFKVICIYIAFYSVDYKLVQKVCPDYNYHSETPYLSSG

SEQ ID NO: 9724 - protein, 354 aa, Homo Sapiens
MQLTRCCFVFLVQGSLYLVICGQDDGPPGSEDPERDDHEGQPRPRVPRKRGHISPKSRPMANSTLLGLLAPPGEAWGILGQPPNRPNHSPPPSAKVKKIFGWGDFYSNIKTVALNLLVTGKIVDHGNGTFSVHFQHNATGQGNISISLVPPSKAVEFHQEQQIFIEAKASKIFNCRMEWEKVERGRRTSLCTHDPAKICSRDHAQSSATWSCSQPFKVVCVYIAFYSTDYRLVQKGPSLLSGDVRHTPLLQTTLRSPPWRLETAGTGAAHQWTPTVCRSASHSAVETAGRRRKQWGQRPWAPSPPPLAELSAGTGGTLTPLLLLSSCGEPDAGDSWRARPSWHTVLPAPGMDSF

SEQ ID NO: 9725 - protein, 252 aa, Homo Sapiens
MQLTRCCFVFLVQGSLYLVICGQDDGPPGSEDPERDDHEGQPRPRVPRKRGHISPKSRPMANSTLLGLLAPPGEAWGILGQPPNRPNHSPPPSAKVKKIFGWGDFYSNIKTVALNLLVTGKIVDHGNGTFSVHFQHNATGQGNISISLVPPSKAVEFHQEQQIFIEAKASKIFNCRMEWEKVERGRRTSLCTHDPAKICSRDHAQSSATWSCSQPFKVVCVYIAFYSTDYRLVQKVCPDYNYHSDTPYYPSG

SEQ ID NO: 9726 - protein, 308 aa, Homo Sapiens
MRLLPEWFLLLFGPWLLRKAVSAQIPESGRPQYLGLRPAAAGAGAPGQQLPEPRSSDGLGVGRAWSWAWPTNHTGALARAGAAGALPAQRTKRKPSIKAARAKKIFGWGDFYFRVHTLKFSLLVTGKIVDHVNGTFSVYFRHNSSSLGNLSVSIVPPSKRVEFGGVWLPGPVPHPLQSTLALEGVLPGLGPPLGMAAAAAGPGLGGSLGGALAGPLGGALGVPGAKESRAFNCHVEYEKTNRARKHRPCLYDPSQVCFTEHTQSQAAWLCAKPFKVICIFVSFLSFDYKLVQKVCPDYNFQSEHPYFG

SEQ ID NO: 9727 - protein, 36 aa, Homo Sapiens
MRLLPEWFLLLFGPWLLRKPRPGLSLPPARSWEHPA

SEQ ID NO: 9728 - protein, 481 aa, Homo Sapiens
MKGRGMLVLLLHAVVLGLPSAWAVGACARACPAACACSTVERGCSVRCDRAGLLRVPAELPCEAVSIDLDRNGLRFLGERAFGTLPSLRRLSLRHNNLSFITPGAFKGLPRLAELRLAHNGDLRYLHARTFAALSRLRRLDLAACRLFSVPERLLAELPALRELAAFDNLFRRVPGALRGLANLTHAHLERGRIEAVASSSLQGLRRLRSLSLQANRVRAVHAGAFGDCGVLEHLLLNDNLLAELPADAFRGLRRLRTLNLGGNALDRVARAWFADLAELELLYLDRNSIAFVEEGAFQNLSGLLALHLNGNRLTVLAWVAFQPGFFLGRLFLFRNPWCCDCRLEWLRDWMEGSGRVTDVPCASPGSVAGLDLSQVTFGRSSDGLCVDPEELNLTTSSPGPSPEPAATTVSRFSSLLSKLLAPRVPVEEAANTTGGLANASLSDSLSSRGVGGAGRQPWFLLASCLLPSVAQHVVFGLQMD

SEQ ID NO: 9729 - protein, 481 aa, Homo Sapiens; identical to SEQ ID NO: 9728

SEQ ID NO: 9730 - protein, 157 aa, Homo Sapiens
MAKLRQKNPRAVRQAEEVRGLEHLHMDVAVNFSQGALLSPHLHNVCAEAVDAIYTRQEDVRFWLEQGVDSSVFEALPKASEQAELPRCRQVGDHGKPCVCRYGLSLAWYPCMLKYCHSRDRPTPYKCGIRSCQKSYSFDFYVPQRQLCLWDEDPYPG

SEQ ID NO: 9731 - protein, 273 aa, Homo Sapiens
MRLPGVPLARPALLLLLPLLAPLLGTGAPAELRVRVRLPDGQVTEESLQADSDADSISLELRKPDGTLVSFTADFKKDVKVFRALILGELEKGQSQFQALCFVTQLQHNEIIPSEAMAKLRQKNPRAVRQAEEVRGLEHLHMDVAVNFSQGALLSPHLHNVCAEAVDAIYTRQEDVRFWLEQGVDSSVFEALPKASEQAELPRCRQVGDHGKPCVCRYGLSLAWYPCMLKYCHSRDRPTPYKCGIRSCQKSYSFDFYVPQRQLCLWDEDPYPG

SEQ ID NO: 9732 - protein, 85 aa, Homo Sapiens
MKTLFLGVTLGLAAALSFTLEEEDEGGSVHPEENPDAEDGGAWQIQRLWGQEAHIPAGAARDGRLRLLLQRPAPWGPALHGKACG

SEQ ID NO: 9733 - protein, 147 aa, Homo Sapiens
MKTLFLGVTLGLAAALSFTLEEEDEGGSVHPEENPDAEDGGAWQIQRLWGQEAHIPAGAARDGRLRLLLQRPAPWGPALHGKACGICSLQGRAAVPTLAHLATSPAGRNPNTNLEALEEFKKLVQHKGLSEEDIFMPLQTGSCVLEH

SEQ ID NO: 9734 - protein, 228 aa, Homo Sapiens
MKTLFLGVTLGLAAALSFTLEEEDITGTWYVKAMVVDKDFPEDRRPRKVSPVKVTALGGGNLEATFTFMREDRCIQKKILMRKTEEPGKFSAYGGRKLIYLQELPGTDDYVFYCKDQRRGGLRYMGKLVASAPCRAVPLSPPWLTWPPHLQVGILIPTWRPWKNLRNWCSTRDSRRRTFSCPCRREAAFSNTRQPPGLHLQSPPYHQTQSPDHLDLPSSHDPSLLPPT

SEQ ID NO: 9735 - protein, 220 aa, Homo Sapiens
MKTLFLGVTLGLAAALSFTLEEEDITGTWYVKAMVVDKDFPEDRRPRKVSPVKVTALGGGNLEATFTFMREDRCIQKKILMRKTEEPGKFSAYGGRKLIYLQELPGTDDYVFYCKDQRRGGLRYMGKLVASAPCRAVPLSPPWLTWPPHLQVGILIPTWRPWKNLRNWCSTRDSRRRTFSCPCRREAAFSNTRVTPGSAPPEPTLPPDTEPGPPGPTLQP

SEQ ID NO: 9736 - protein, 146 aa, Homo Sapiens
MKTLFLGVTLGLAAALSFTLEEEDITGTWYVKAMVVDKDFPEDRRPRKVSPVKVTALGGGNLEATFTFMREDRCIQKKILMRKTEEPGKFSAYGGRKLIYLQELPGTDDYVFYCKDQRRGGLRYMGKLVGPCRCPHLGSPGHLTCR

SEQ ID NO: 9737 - protein, 170 aa, Homo Sapiens
MKTLFLGVTLGLAAALSFTLEEEDITGTWYVKAMVVDKDFPEDRRPRKVSPVKVTALGGGNLEATFTFMREDRCIQKKILMRKTEEPGKFSAYGGRKLIYLQELPGTDDYVFYCKDQRRGGLRYMGKLVGRNPNTNLEALEEFKKLVQHKGLSEEDIFMPLQTGSCVLEH

SEQ ID NO: 9738 - protein, 170 aa, Homo Sapiens; identical to SEQ ID NO: 9737

SEQ ID NO: 9739 - protein, 165 aa, Homo Sapiens
MKTLFLGVTLGLAAALSFTLEEEDITGTWYVKAMVVDKDFPEDRRPRKVSPVKVTALGGGKLEATFTFMREDRCIQKKILMRKTEEPGKYSACLSAVEMDQITPALWEALAIDTLRKLRIGTRRPRIRWGQEAHVPAGAAQEGPLHLLLQRPAPWGPAPHGKACG

SEQ ID NO: 9740 - protein, 220 aa, Homo Sapiens [sequence omitted]

SEQ ID NO: 9741 - protein, 170 aa, Homo Sapiens
MKTLFLGVTLGLAAALSFTLEEEDITGTWYVKAMVVDKDFPEDRRPRKVSPVKVTALGGGKLEATFTFMREDRCIQKKILMRKTEEPGKYSAYGGRKLMYLQELPRRDHYIFYCKDQHHGGLLHMGKLVGRNSDTNREALEEFKKLVQRKGLSEEDIFTPLQTGSCVPEH

SEQ ID NO: 9742 - protein, 170 aa, Homo Sapiens; identical to SEQ ID NO: 9741

SEQ ID NO: 9743 - protein, 477 aa, Homo Sapiens
MIAFLLTSVLMIPHAGGHPLDTPHLPQELPPGLPNNINITFFSGMFKNVESVAEIFDCLGPHFTWLQAVFTNFPVLIQFVNGMKCVAGLCPRDFEDYGCTCRFEMEGLPVDESDSCCFQHRRCYEEAAEMDCLQDPAKLSTEVNCVSKKIICESKDNCEHLLCTCDKAAIECLARSSLNSSLNLLDTSFCLAQTPETTIKEDLTTLLPRVVPVEPTDTSLTALSGEEAGHDQEGVGAARATSPPGSAEIVATRVTAKIVTLVPAGIKSLGLAVSSVENDPEETTEKACDRFTFLHLGSGDNMQVMPQLGEMLFCLTSRCPEEFESYGCYCGQEGRGEPRDDLDRCCLSHHCCLEQVRRLGCLLERLPWSPVVCVDHTPKCGGQSLCEKLLCACDQTAAECMTSASFNQSLKSPSRLGCPGQPAACEDSLHPVPAAPTLGSSSEEDSEEDPPQEDLGRAKRFLRKSLGPLGIGPLHGR

SEQ ID NO: 9744 - protein, 271 aa, Homo Sapiens
MIIVAFALIIFFAVKTRRKMDRYDKSNILWDKEHIYDEQPPNVEEWVKNVSAGTQDVPSPPSDYVERVDSPMAYSSNGKVNDKRFYPESSYKSTPVPEVVQELPLTSPVDDFRQPRYSSGGNFETPSKRAPAKGRAGRSKRTEQDHYETDYTTGGESCDELEEDWIREYPPITSDQQRQLYKRNFDTGLQEYKSLQSELDEINKELSRLDKELDDYREESEEYMAAADEYNRLKQVKGSADYKSKKNHCKQLKSKLSHIKKMVGDYDRQKT

SEQ ID NO: 9745 - protein, 522 aa, Homo Sapiens
MSSRPLESPPPYRPDEFKPNHYAPSNDIYGGEMHVRPMLSQPAYSFYPEDEILHFYKWTSPPGVIRILSMLIIVMCIAIFACVASTLAWDRGYGTSLLGGSVGYPYGGSGFGSYGSGYGYGYGYGYGYGGYTDPRAAKGFMLAMAAFCFIAALVIFVTSVIRSEMSRTRRYYLSVIIVSAILGIMVFIATIVYIMGVNPTAQSSGSLYGSQIYALCNQFYTPAATGLYVDQYLYHYCVVDPQEAIAIVLGFMIIVAFALIIFFAVKTRRKMDRYDKSNILWDKEHIYDEQPPNVEEWVKNVSAGTQDVPSPPSDYVERVDSPMAYSSNGKVNDKRFYPESSYKSTPVPEVVQELPLTSPVDDFRQPRYSSGGNFETPSKRAPAKGRAGRSKRTEQDHYETDYTTGGESCDELEEDWIREYPPITSDQQRQLYKRNFDTGLQEYKSLQSELDEINKELSRLDKELDDYREESEEYMAAADEYNRLKQVKGSADYKSKKNHCKQLKSKLSHIKKMVGDYDRQKT

SEQ ID NO: 9746 - protein, 522 aa, Homo Sapiens; identical to SEQ ID NO: 9745

SEQ ID NO: 9747 - protein, 216 aa, Homo Sapiens
GPLNSWIPPFSGILQQQQQAQIPGLSQFSLSALDQFAGLLPNQIPLTGEASFAQGAQAGQVDPLQLQTPPQTQPGPSHVMPYVFSFKMPQEQGQMFQYYPVYMVLPWEQPQQTVPRSPQQTRQQQYEEQAISGGQQQLAFDPQLGTAPEIAVMSTGEEIPYLQKEAINFRHDSAGVFMPSTSPKPSTTNVFTSAVDQTITPELPEEKDKTDSLREP

SEQ ID NO: 9748 - protein, 279 aa, Homo Sapiens
MKIIILLGFLGATLSAPLIPQRLMSASNSNELLLNLNNGQLLPLQLQGPLNSWIPPFSGILQQQQQAQIPGLSQFSLSALDQFAGLLPNQIPLTGEASFAQGAQAGQVDPLQLQTPPQTQPGPSHVMPYVFSFKMPQEQGQMFQYYPVYMVLPWEQPQQTVPRSPQQTRQQQYEEQIPFYAQFGYIPQLAEPAISGGQQQLAFDPQLGTAPEIAVMSTGEEIPYLQKEAINFRHDSAGVFMPSTSPKPSTTNVFTSAVDQTITPELPEEKDKTDSLREP

SEQ ID NO: 9749 - protein, 253 aa, Homo Sapiens
MKIIILLGFLGATLSAPLLLNLNNGQLLPLQLQGPLNSWIPPFSGILQQQQQAQIPGLSQFSLSALDQFAGLLPNQIPLTGEASFAQGAQAGQVDPLQLQTPPQTQPGPSHVMPYVFSFKMPQEQGQMFQYYPVYMVLPWEQPQQTVPRSPQQTRQQQYEEQIPFYAQFGYIPQLAEPAISGGQQQLAFDPQLGTAPEIAVMSTGEEIPYLQKEAINFRHDSAGVFMPSTSPKPSTTNVFTSAVDQTITPELP

SEQ ID NO: 9750 - protein, 30 aa, Homo Sapiens
QTPPQTQPGPSHVMPYVFSFKMPQEQGQNI

SEQ ID NO: 9751 - protein, 176 aa, Homo Sapiens
MARRHCFSYWLLVCWLVVTVAEALSTFYLQQHINLHMDKKRYLRLLEIHKIMRTLPTARSLHSPLHLPRGVRSQGPSPSQRHPGVPSIFFHEGPESILGFQTDLSSLQGVTTVFHSSHFIGHTVTLLIGISPEEDSREEAHLRKAEREEKPKHTEAKKSLSFRKKQQKDFCFIFRN

SEQ ID NO: 9752 - protein, 130 aa, Homo Sapiens
MARRHCFSYWLLVCWLVVTVAEGQEEVFTPPGDSQNNADATDCQIFTLTPPPAPRSPVTRAQPITKTPRCPFHFFPRRPRIHFRFPNRPFVPSRCNHRFPFQPFYWPHRYLTYRYFPRRRLQRGSSSEES

SEQ ID NO: 9753 - protein, 85 aa, Homo Sapiens
MARRHCFSYWLLVCWLVVTVAEGQEEVFTPPGDSQNNADATDCQIFTLTPPPAPRSPVTRAQPITKTPRYFPRRRLQRGSSSEES

SEQ ID NO: 9754 - protein, 40 aa, Homo Sapiens
MARRHCFSYWLLVCWLVVTVAEVETGFHHVSQDGLDLLTS

SEQ ID NO: 9755 - protein, 52 aa, Homo Sapiens
MPARALLPRRMGHRTLASTPALWASIPCPRSELRLDLVLPSGQSFRWLTASA

SEQ ID NO: 9756 - protein, 357 aa, Homo Sapiens
MPARALLPRRMGHRTLASTPALWASIPCPRSELRLDLVLPSGQSFRWREQSPAHWSGVLADQVWTLTQTEEQLHCTVYRGDKSQASRPTPDELEAVRKYFQLDVTLAQLYHHWGSVDSHFQEVAQKFQGVRLLRQDPIECLFSFICSSNNNIARITGMVERLCQAFGPRLIQLDDVTYHGFPSLQALAGPEVEAHLRKLGLGYRARYVSASARAILEEQGGLAWLQQLRESSYEEAHKALCILPGVGTKGLLGNAFDGHQLLRPLIFCQDHLREGPPIGRGDSQGEELEPQLPSSLSSIPYGFCDHCWTKDVDDPPLVTHPSPGSRDGHMTQAWPVKVVSPLATVIGHVMQASLLAL

SEQ ID NO: 9757 - protein, 424 aa, Homo Sapiens
MPARALLPRRMGHRTLASTPALWASIPCPRSELRLDLVLPSGQSFRWREQSPAHWSGVLADQVWTLTQTEEQLHCTVYRGDKSQASRPTPDELEAVRKYFQLDVTLAQLYHHWGSVDSHFQEVAQKFQGVRLLRQDPIECLFSFICSSNNNIARITGMVERLCQAFGPRLIQLDDVTYHGFPSLQALAGPEVEAHLRKLGLGYRARYVSASARAILEEQGGLAWLQQLRESSYEEAHKALCILPGVGTKVADCICLMALDKPQAVPVDVHMWHIAQRDYSWHPTTSQAKGPSPQTNKELGNFFRSLWGPYAGWAQAGLLGNAFDGHQLLRPLIFCQDHLREGPPIGRGDSQGEELEPQLPSSLSSIPYGFCDHCWTKDVDDPPLVTHPSPGSRDGHMTQAWPVKVVSPLATVIGHVMQASLLAL

SEQ ID NO: 9758 - protein, 410 aa, Homo Sapiens
MPARALLPRRMGHRTLASTPALWASIPCPRSELRLDLVLPSGQSFRWREQSPAHWSGVLADQVWTLTQTEEQLHCTVYRGDKSQASRPTPDELEAVRKYFQLDVTLAQLYHHWGSVDSHFQEVAQKFQGVRLLRQDPIECLFSFICSSNNNIARITGMVERLCQAFGPRLIQLDDVTYHGFPSLQALAGPEVEAHLRKLGLGYRARYVSASARAILEEQGGLAWLQQLRESSYEEAHKALCILPGVGTKVADCICLMALDKPQAVPVDVHMWHIAQRDYSWHPTTSQAKGPSPQTNKELGNFFRSLWGPYAGWAQATPPSYRCCSVPTCANPAMLRSHQQSAERVPKGRKARWGTLDKEIPQAPSPPFPTSLSPSPPSLMLGRGLPVTTSKARHPQIKQSVCTTRWGGGY

SEQ ID NO: 9759 - protein, 356 aa, Homo Sapiens
MPARALLPRRMGHRTLASTPALWASIPCPRSELRLDLVLPSGQSFRWREQSPAHWSGVLADQVWTLTQTEEQLHCTVYRGDKSQASRPTPDELEAVRKYFQLDVTLAQLYHHWGSVDSHFQEVAQKFQGVRLLRQDPIECLFSFICSSNNNIARITGMVERLCQAFGPRLIQLDDVTYHGFPSLQALAGPEVEAHLRKLGLGYRARYVSASARAILEEQGGLAWLQQLRESSYEEAHKALCILPGVGTKVADCICLMALDKPQAVPVDVHMWHIAQRDYSWHPTTSQAKGPSPQTNKELGNFFRSLWGPYAGWAQALCQVITTFMTFLGPHRLDQMPPEELQTSSSRLGGPPWQCI

SEQ ID NO: 9760 - protein, 324 aa, Homo Sapiens
MPARALLPRRMGHRTLASTPALWASIPCPRSELRLDLVLPSGQSFRWREQSPAHWSGVLADQVWTLTQTEEQLHCTVYRGDKSQASRPTPDELEAVRKYFQLDVTLAQLYHHWGSVDSHFQEVAQKFQGVRLLRQDPIECLFSFICSSNNNIARITGMVERLCQAFGPRLIQLDDVTYHGFPSLQALAGPEVEAHLRKLGLGYRARYVSASARAILEEQGGLAWLQQLRESSYEEAHKALCILPGVGTKVADCICLMALDKPQAVPVDVHMWHIAQRDYSWHPTTSQAKGPSPQTNKELGNFFRSLWGPYAGWAQAVSVPRCPP

SEQ ID NO: 9761 - protein, 345 aa, Homo Sapiens
MPARALLPRRMGHRTLASTPALWASIPCPRSELRLDLVLPSGQSFRWREQSPAHWSGVLADQVWTLTQTEEQLHCTVYRGDKSQASRPTPDELEAVRKYFQLDVTLAQLYHHWGSVDSHFQEVAQKFQGVRLLRQDPIECLFSFICSSNNNIARITGMVERLCQAFGPRLIQLDDVTYHGFPSLQALAGPEVEAHLRKLGLGYRARYVSASARAILEEQGGLAWLQQLRESSYEEAHKALCILPGVGTKVADCICLMALDKPQAVPVDVHMWHIAQRDYSWHPTTSQAKGPSPQTNKELGNFFRSLWGPYAGWAQAVLFSADLRQSRHAQEPPAKRRKGSKGPEG

SEQ ID NO: 9762 - protein, 322 aa, Homo Sapiens
MPARALLPRRMGHRTLASTPALWASIPCPRSELRLDLVLPSGQSFRWREQSPAHWSGVLADQVWTLTQTEEQLHCTVYRGDKSQASRPTPDELEAVRKYFQLDVTLAQLYHHWGSVDSHFQEVAQKFQGVRLLRQDPIECLFSFICSSNNNIARITGMVERLCQAFGPRLIQLDDVTYHGFPSLQALAGPEVEAHLRKLGLGYRARYVSASARAILEEQGGLAWLQQLRESSYEEAHKALCILPGVGTKVADCICLMALDKPQAVPVDVHMWHIAQRDYSWHPTTSQAKGPSPQTNKELGNFFRSLWGPYAGWAQAAGSDAS

SEQ ID NO: 9763 - protein, 195 aa, Homo Sapiens
MPARALLPRRMGHRTLASTPALWASIPCPRSELRLDLVLPSGQSFRWREQSPAHWSGVLADQVWTLTQTEEQLHCTVYRGDKSQASRPTPDELEAVRKYFQLDVTLAQLYHHWGSVDSHFQEVAQKFQGVRLLRQDPIECLFSFICSSNNNIARITGMVERLCQAFGPRLIQLDDVTYHGFPSLQALAGPPWQCI

SEQ ID NO: 9764 - protein, 168 aa, Homo Sapiens
  misc_feature (1)..(1): Xaa can be any naturally occurring amino acid
XASIPCPRSELRLDLVLPSGQSFRWREQSPAHWSGVLADQVWTLTQTEEQLHCTVYRGDKSQASRPTPDELEAVRKYFQLDVTLAQLYHHWGSVDSHFQEVAQKFQGVRLLRQDPIECLFSFICSSNNNIARITGMVERLCQAFGPRLIQLDDVTYHGFPSLQALAGG

SEQ ID NO: 9765 - protein, 128 aa, Homo Sapiens
  misc_feature (1)..(1): Xaa can be any naturally occurring amino acid
XELEAVRKYFQLDVTLAQLYHHWGSVDSHFQEVAQKFQGVRLLRQDPIECLFSFICSSNNNIARITGMVERLCQAFGPRLIQLDDVTYHGFPSLQALAGVPVPAEGLLTSASAFQSPLRSRQPEADRR

SEQ ID NO: 9766 - protein, 132 aa, Homo Sapiens
  misc_feature (1)..(1): Xaa can be any naturally occurring amino acid
XMMSPTMASPACRPWLVADCICLMALDKPQAVPVDVHMWHIAQRDYSWHPTTSQAKGPSPQTNKELGNFFRSLWGPYAGWAQATPPSYRCCSVPTCANPAMLRSHQQSAERVPKGRKARWGTLDKEIPQAPS

SEQ ID NO: 9767 - protein, 222 aa, Homo Sapiens
  misc_feature (1)..(1): Xaa can be any naturally occurring amino acid
XPCGPPSRALALSCAWTWFCLLDNLSGVRLLRQDPIECLFSFICSSNNNIARITGMVERLCQAFGPRLIQLDDVTYHGFPSLQALAGPEVEAHLRKLGLGYRARYVSASARAILEEQGGLAWLQQLRESSYEEAHKALCILPGVGTKVADCICLMALDKPQAVPVDVHMWHIAQRDYSWHPTTSQAKGPSPQTNKELGNFFRSLWGPYAGWAQAVSVPRCPP

SEQ ID NO: 9768 - protein, 263 aa, Homo Sapiens
  misc_feature (1)..(1): Xaa can be any naturally occurring amino acid
XVRKYFQLDVTLAQLYHHWGSVDSHFQEVAQKFQGVRLLRQDPIECLFSFICSSNNNIARITGMVERLCQAFGPRLIQLDDVTYHGFPSLQALAGPEVEAHLRKLGLGYRARYVSASARAILEEQGGLAWLQQLRESSYEEAHKALCILPGVGTKGLLGNAFDGHQLLRPLIFCQDHLREGPPIGRGDSQGEELEPQLPSSLSSIPYGFCDHCWTKDVDDPPLVTHPSPGSRDGHMTQAWPVKVVSPLATVIGHVMQASLLAL

SEQ ID NO: 9769 - protein, 298 aa, Homo Sapiens
MKTLQSTLLLLLLVPLIKPAPPTQQDSRIIYDYGTDNFEESIFSQDYEDKYLDGKNIKEKETVIIPNEKSLQLQKDEAITPLPPKKENDEMPTCLLCVCLSGSVYCEEVDIDAVPPLPKESAYLYARFNKIKKLTAKDFADIPNLRRLDFTGNLIEDIEDGTFSKLSLLEELSLAENQLLKLPVLPPKLTLFNAKYNKIKSRGIKANAFKKLNNLTFLYLDHNALESVPLNLPESLRVIHLQFNNIASITDDTFCKANDTSYIRDRIEEIRLEGNPIVLGKHPNSFICLKRLPIGSYF

SEQ ID NO: 9770 - protein, 298 aa, Homo Sapiens; identical to SEQ ID NO: 9769

SEQ ID NO: 9771 - protein, 268 aa, Homo Sapiens
MLAKISTTWKLFLKLLGPEILLSSLKSRHSFSHSPSHLGLMHRHEHLLRKTTKNFKTATTTLQSTLLLLLLVPLIKPAPPTQQDSRIIYDYGTDNFEESIFSQDYEDKYLDGKNIKEKETVIIPNEKSLQLQKDEAITPLPPKKENDEMPTCLLCVCLSGSVYCEEVDIDAVPPLPKESAYLYARFNKIKKLTAKDFADIPNLRRLDFTGNLIEDIEDGTFSKLSLLEELSLAENQLLKLPVLPPKLTLFNAKYNKIKSRGIKANAFK

SEQ ID NO: 9772 - protein, 545 aa, Homo Sapiens
MPPFLLLTCLFITGTSVSPVALDPCSAYISLNEPWRNTDHQLDESQGPPLCDNHVNGEWYHFTGMAGDAMPTFCIPENHCGTHAPVWLNGSHPLEGDGIVQRQACASFNGNCCLWNTTVEVKACPGGYYVYRLTKPSVCFHVYCGHFYDICDEDCHGSCSDTSECTCAPGTVLGPDRQTCFDENECEQNNGGCSEICVNLKNSYRCECGVGRVLRSDGKTCEDVEGCHNNNGGCSHSCLGSEKGYQCECPRGLVLSEDNHTCQVPVLCKSNAIEVNIPRELVGGLELFLTNTSCRGVSNGTHVNILFSLKTCGTVVDVVNDKIVASNLVTGLPKQTPGSSGDFIIRTSKLLIPVTCEFPRLYTISEGYVPNLRNSPLEIMSRNHGIFPFTLEIFKDNEFEEPYREALPTLKLRDSLYFGIEPVVHVSGLESLVESCFATPTSKIDEVLKYYLIRDGCVSDDSVKQYTSRDHLAKHFQVPVFKFVGKDHKEVFLHCRVLVCGVLDERSRCAQGCHRRMRRGAGGEDSAGLQGQTLTGGPIRIDWED

SEQ ID NO: 9773 - protein, 321 aa, Homo Sapiens
MPPFLLLTCLFITGTSVSPVALDPCSAYISLNEPWRNTDHQLDESQGPPLCDNHVNGEWYHFTGMAGDAMPTFCIPENHCGTHAPVWLNGSHPLEGDGIVQRQACASFNGNCCLWNTTVEVKACPGGYYVYRLTKPSVCFHVYCGHFYDICDEDCHGSCSDTSECTCAPGTVLGPDRQTCFDENECEQNNGGCSEICVNLKNSYRCECGVGRVLRSDGKTCEDVEGCHNNNGGCSHSCLGSEKGYQCECPRGLVLSEDNHTCQVPVLCKSNAIEVNIPRELVGGLELFLTNTSCRGVSNGTHVNILFSLKTCGTVVDLCFR

SEQ ID NO: 9774 - protein, 129 aa, Homo Sapiens
MCSRDARTKQLRQLLEKVQNMSQSIEVLDRRTQRDLQYVEKMENQMKGLESKFKQVEESHKQHLARQFKAIKAKMDELRPLIPVLEEYKADAKLVLQFKEEVQNLTSVLNELQEEIGAYDYDELQSRVS

SEQ ID NO: 9775 - protein, 163 aa, Homo Sapiens
MEGPGGSGFHLRLEAFCKCKSPINVFDPVRPALQVGLTRVLPTNPEESWQVYSSAQDSEGRCICTVVAPQQTMCSRDARTKQLRQLLEKVQNMSQSIEVLDRRTQRDLQYVEKMENQMKGLESKFKQVEESHKQHLARQFKAIKAKMDELRPLIPVLEEYKAD

SEQ ID NO: 9776 - protein, 458 aa, Homo Sapiens
MGEAPGREGRGPCPQLESPRRRRVLPTNPEESWQVYSSAQDSEGRCICTVVAPQQTMCSRDARTKQLRQLLEKVQNMSQSIEVLDRRTQRDLQYVEKMENQMKGLESKFKQVEESHKQHLARQFKAIKAKMDELRPLIPVLEEYKADAKLVLQFKEEVQNLTSVLNELQEEIGAYDYDELQSRVSNLEERLRACMQKLACGKLTGISDPVTVKTSGSRFGSWMTDPLAPEGDNRVWYMDGYHNNRFVREYKSMVDFMNTDNFTSHRLPHPWSGTGQVVYNGSIYFNKFQSHIIIRFDLKTETILKTRSLDYAGYNNMYHYAWGGHSDIDLMVDESGLWAVYATNQNAGNIVVSRLDPVSLQTLQTWNTSYPKRSAGEAFIICGTLYVTNGYSGGTKVHYAYQTNASTYEYIDIPFQNKYSHISMLDYNPKDRALYAWNNGHQILYNVTLFHVIRSDEL

SEQ ID NO: 9777 - protein, 129 aa, Homo Sapiens
MPGRWRWQRDMHPARKLLSLLFLILMGTELTQDSAAPDSLLRSSKGSTRGSLAAIVIWRGKSESRIAKTPGIFRGGGTLVLPPTHTPEWLILPLGITLPLGAPETGGGDCAAETWKGSQRAGQLCALLA

SEQ ID NO: 9778 - protein, 167 aa, Homo Sapiens
MPGRWRWQRDMHPARKLLSLLFLILMGTELTQNKRENKAEKMGGPESERKTTGEKTLNELPLFCLEAHAGSLALPRMCSPNPNPAVGLCRPAYPQSPSPGAAQTISQSLLERFCMASRRGFLGPRKAWWRVVVVHCCWTDAFIHVHTHTHTCTHRGADTCREEPTRS

SEQ ID NO: 9779 - protein, 467 aa, Homo Sapiens
MPGRWRWQRDMHPARKLLSLLFLILMGTELTQVLPTNPEESWQVYSSAQDSEGRCICTVVAPQQTMCSRDARTKQLRQLLEKVQNMSQSIEVLDRRTQRDLQYVEKMENQMKGLESKFKQVEESHKQHLARQFKAIKAKMDELRPLIPVLEEYKADAKLVLQFKEEVQNLTSVLNELQEEIGAYDYDELQSRVSNLEERLRACMQKLACGKLTGISDPVTVKTSGSRFGSWMTDPLAPEGDNRVWYMDGYHNNRFVREYKSMVDFMNTDNFTSHRLPHPWSGTGQVVYNGSIYFNKFQSHIIIRFDLKTETILKTRSLDYAGYNNMYHYAWGGHSDIDLMVDESGLWAVYATNQNAGNIVVSRLDPVSLQTLQTWNTSYPKRSAGEAFIICGTLYVTNGYSGGTKVHYAYQTNASTYEYIDIPFQNKYSHISMLDYNPKDRALYAWNNGHQILYNVTLFHVIRSDEL

SEQ ID NO: 9780 - protein, 135 aa, Homo Sapiens
MPGRWRWQRDMHPARKLLSLLFLILMGTELTQVLPTNPEESWQVYSSAQDSEGRCICTVVAPQQTMCSRDARTKQLRQLLEKVQNMSQSIEVLDRRTQRDLQYVEKMENQMKGLESKFKQVEESHKQHLARQFKG

SEQ ID NO: 9781 - protein, 208 aa, Homo Sapiens
MSQSIEVLDRRTQRDLQYVEKMENQMKGLESKFKQVEESHKQHLARQFKAIKAKMDELRPLIPVLEEYKADAKLVLQFKEEVQNLTSVLNELQEEIGAYDYDELQSRVSNLEERLRACMQKLACGKLTGISDPVTVKTSGSRFGSWMTDPLAPEGDNRVWYMDGYHNNRFVREYKSMVDFMNTDNFTSHRLPHPWSGTGQVVYNGSIY

SEQ ID NO: 9782 - protein, 485 aa, Homo Sapiens
MSVPLLKIGVVLSTMAMITNWMSQTLPSLVGLNTTKLSAAGGGTLDRSTGVLPTNPEESWQVYSSAQDSEGRCICTVVAPQQTMCSRDARTKQLRQLLEKVQNMSQSIEVLDRRTQRDLQYVEKMENQMKGLESKFKQVEESHKQHLARQFKAIKAKMDELRPLIPVLEEYKADAKLVLQFKEEVQNLTSVLNELQEEIGAYDYDELQSRVSNLEERLRACMQKLACGKLTGISDPVTVKTSGSRFGSWMTDPLAPEGDNRVWYMDGYHNNRFVREYKSMVDFMNTDNFTSHRLPHPWSGTGQVVYNGSIYFNKFQSHIIIRFDLKTETILKTRSLDYAGYNNMYHYAWGGHSDIDLMVDESGLWAVYATNQNAGNIVVSRLDPVSLQTLQTWNTSYPKRSAGEAFIICGTLYVTNGYSGGTKVHYAYQTNASTYEYIDIPFQNKYSHISMLDYNPKDRALYAWNNGHQILYNVTLFHVIRSDEL

SEQ ID NO: 9783 - protein, 153 aa, Homo Sapiens
MSVPLLKIGVVLSTMAMITNWMSQTLPSLVGLNTTKLSAAGGGTLDRSTGVLPTNPEESWQVYSSAQDSEGRCICTVVAPQQTMCSRDARTKQLRQLLEKVQNMSQSIEVLDRRTQRDLQYVEKMENQMKGLESKFKQVEESHKQHLARQFKG

SEQ ID NO: 9784 - protein, 99 aa, Homo Sapiens
  misc_feature (1)..(1): Xaa can be any naturally occurring amino acid
XSHKQHLARQFKAIKAKMDELRPLIPVLEEYKADAKLVLQFKEEVQNLTSVLNELQEEIGAYDYDELQSRVSNLEERLRACMQKLGVVHGRLSQQPLRT

SEQ ID NO: 9785 - protein, 78 aa, Homo Sapiens
MEVLELRTYRDLQYVRGMETLMRSLDARLRAADGSLSAKSFQELKDRMTELLPLSSVLEQYKADTRTIVRLREEAVGS

SEQ ID NO: 9786 - protein, 376 aa, Homo Sapiens
MEVLELRTYRDLQYVRGMETLMRSLDARLRAADGSLSAKSFQELKDRMTELLPLSSVLEQYKADTRTIVRLREEVRNLSGSLAAIQEEMGAYGYEDLQQRVMALEARLHACAQKLGCGKLTGVSNPITVRAMGSRFGSWMTDTMAPSADSRVWYMDGYYKGRRVLEFRTLGDFIKGQNFIQHLLPQPWAGTGHVVYNGSLFYNKYQSNVVVKYHFRSRSVLVQRSLPGAGYNNTFPYSWGGFSDMDFMVDESGLWAVYTTNQNAGNIVVSRLDPHTLEVMRSWDTGYPKRSAGEAFMICGVLYVTNSHLAGAKVYFAYFTNTSSYEYTDVPFHNQYSHISMLDYNPRERALYTWNNGHQVLYNVTLFHVISTSGDP

SEQ ID NO: 9787 - protein, 336 aa, Homo Sapiens
MSVPLLKIGAVLSTMAMVTNWMSQTLPSLVGLNGTVSRAGASEKITLFQNPEEGWQLYTSAQAPDGKCICTAVIPAQSTCSRDGRSRELRQLMEKVQNVSQSMEVLELRTYRDLQYVRGMETLMRSLDARLRAADGSLSAKSFQELKDRMTELLPLSSVLEQYKADTRTIVRLREEVRNLSGSLAAIQEEMGAYGYEDLQQRVMALEARLHACAQKLGCGKLTGVSNPITVRAMGSRFGSWMTDTMAPSADSRVWYMDGYYKGRRVLEFRTLGDFIKGQNFIQHLLPQPWAGTGHVVYNGSLFYNKYQSNVVVKYHFRSRSVLVQRSLPGAGYNNT

SEQ ID NO: 9788 - protein, 454 aa, Homo Sapiens
MWPLTVPPPLLLLLCSGLAGQTLFQNPEEGWQLYTSAQAPDGKCICTAVIPAQSTCSRDGRSRELRQLMEKVQNVSQSMEVLELRTYRDLQYVRGMETLMRSLDARLRAADGSLSAKSFQELKDRMTELLPLSSVLEQYKADTRTIVRLREEVRNLSGSLAAIQEEMGAYGYEDLQQRVMALEARLHACAQKLGCGKLTGVSNPITVRAMGSRFGSWMTDTMAPSADSRVWYMDGYYKGRRVLEFRTLGDFIKGQNFIQHLLPQPWAGTGHVVYNGSLFYNKYQSNVVVKYHFRSRSVLVQRSLPGAGYNNTFPYSWGGFSDMDFMVDESGLWAVYTTNQNAGNIVVSRLDPHTLEVMRSWDTGYPKRSAGEAFMICGVLYVTNSHLAGAKVYFAYFTNTSSYEYTDVPFHNQYSHISMLDYNPRERALYTWNNGHQVLYNVTLFHVISTSGDP

SEQ ID NO: 9789 - protein, 458 aa, Homo Sapiens
MQATSNLLNLLLLSLFAGLDPSKTQISPKEGWQVYSSAQDPDGRCICTVVAPEQNLCSRDAKSRQLRQLLEKVQNMSQSIEVLNLRTQRDFQYVLKMETQMKGLKAKFRQIEDDRKTLMTKHFQELKEKMDELLPLIPVLEQYKTDAKLITQFKEEIRNLSAVLTGIQEEIGAYDYEELHQRVLSLETRLRDCMKKLTCGKLMKITGPVTVKTSGTRFGAWMTDPLASEKNNRVWYMDSYTNNKIVREYKSIADFVSGAESRTYNLPFKWAGTNHVVYNGSLYFNKYQSNIIIKYSFDMGRVLAQRSLEYAGFHNVYPYTWGGFSDIDLMADEIGLWAVYATNQNAGNIVISQLNQDTLEVMKSWSTGYPKRSAGESFMICGTLYVTNSHLTGAKVYYSYSTKTSTYEYTDIPFHNQYFHISMLDYNARDRALYAWNNGHQVLFNVTLFHIIKTEDDT

SEQ ID NO: 9790 - protein, 478 aa, Homo Sapiens
MSPPLLKLGAVLSTMAMISNWMSQTLPSLVGLNTTRLSTPDTLTQISPKEGWQVYSSAQDPDGRCICTVVAPEQNLCSRDAKSRQLRQLLEKVQNMSQSIEVLNLRTQRDFQYVLKMETQMKGLKAKFRQIEDDRKTLMTKHFQELKEKMDELLPLIPVLEQYKTDAKLITQFKEEIRNLSAVLTGIQEEIGAYDYEELHQRVLSLETRLRDCMKKLTCGKLMKITGPVTVKTSGTRFGAWMTDPLASEKNNRVWYMDSYTNNKIVREYKSIADFVSGAESRTYNLPFKWAGTNHVVYNGSLYFNKYQSNIIIKYSFDMGRVLAQRSLEYAGFHNVYPYTWGGFSDIDLMADEIGLWAVYATNQNAGNIVISQLNQDTLEVMKSWSTGYPKRSAGESFMICGTLYVTNSHLTGAKVYYSYSTKTSTYEYTDIPFHNQYFHISMLDYNARDRALYAWNNGHQVLFNVTLFHIIKTEDDT

SEQ ID NO: 9791 - protein, 140 aa, Homo Sapiens
MSQSIEVLNLRTQRDFQYVLKMETQMKGLKAKFRQIEDDRKTLMTKHFQELKEKMDELLPLIPVLEQYKTDAKLITQFKEEIRNLSAVLTGIQEEIGAYDYEELHQRVLSLETRLRDCMKKLIDLKKRKEEEKRQQKGEA

SEQ ID NO: 9792 - protein, 510 aa, Homo Sapiens
MRPGLSFLLALLFFLGQAAGDLGDVGPPIPSPGFSSFPGVDSSSSFSSSSRSGSSSSRSLGSGGSVSQLFSNFTGSVDDRGTCQCSVSLPDTTFPVDRVERLEFTAHVLSQKFEKELSKVREYVQLISVYEKKLLNLTVRIDIMEKDTISYTELDFELIKVEVKEMEKLVIQLKESFGGSSEIVDQLEVEIRNMTLLVEKLETLDKNNVLAIRREIVALKTKLKECEASKDQNTPVVHPPPTPGSCGHGGVVNISKPSVVQLNWRGFSYLYGAWGRDYSPQHPNKGLYWVAPLNTDGRLLEYYRLYNTLDDLLLYINARELRITYGQGSGTAVYNNNMYVNMYNTGNIARVNLTTNTIAVTQTLPNAAYNNRFSYANVAWQDIDFAVDENGLWVIYSTEASTGNMVISKLNDTTLQVLNTWYTKQYKPSASNAFMVCGVLYATRTMNTRTEEIFYYYDTNTGKEGKLDIVMHKMQEKVQSINYNPFDQKLYVYNDGYLLNYDLSVLQKPQ

SEQ ID NO: 9793 - protein, 68 aa, Homo Sapiens
MMVALRGASALLVLFLAAFLPPPQCTQDPAMVHYIYQRFRVLEGWKNVPKQRGHTFKNSKSSQKIYLS

SEQ ID NO: 9794 - protein, 402 aa, Homo Sapiens
MMVALRGASALLVLFLAAFLPPPQCTQDPAMVHYIYQRFRVLEQGLEKCTQATRAYIQEFQEFSKNISVMLGRCQTYTSEYKSAVGNLALRVERAQREIDYIQYLREADECIESEDKTLAEMLLQEAEEEKKIRTLLNASCDNMLMGIKSLKIVKKMMDTHGSWMKDAVYNSPKVYLLIGSRNNTVWEFANIRAFMEDNTKPAPRKQILTLSWQGTGQVIYKGFLFFHNQATSNEIIKYNLQKRTVEDRMLLPGGVGRALVYQHSPSTYIDLAVDEHGLWAIHSGPGTHSHLVLTKIEPGTLGVEHSWDTPCRSQDAEASFLLCGVLYVVYSTGGQGPHRITCIYDPLGTISEEDLPNLFFPKRPRSHSMIHYNPRDKQLYAWNEGNQIIYKLQTKRKLPLK

SEQ ID NO: 9795 - protein, 402 aa, Homo Sapiens; identical to SEQ ID NO: 9794

SEQ ID NO: 9796 - protein, 56 aa, Homo Sapiens
MMVALRGASALLVLFLAAFLPPPQCTQDPAMVHYIYQRFRVLEQGLEKCTQAVTTC

SEQ ID NO: 9797 - protein, 652 aa, Homo Sapiens
MAAAALPPRPLLLLPLVLLLSGRPTRADSKVFGDLDQVRMTSEGSDCRCKCIMRPLSKDACSRVRSGRARVEDFYTVETVSSGTDCRCSCTAPPSSLNPCENEWKMEKLKKQAPELLKLQSMVDLLEGTLYSMDLMKVHAYVHKVASQMNTLEESIKANLSRENEVVKDSVRHLSEQLRHYENHSAIMLGIKKELSRLGLQLLQKDAAAAPATPATGTGSKAQDTARGKGKDISKYGSVQKSFADRGLPKPPKEKLLQVEKLRKESGKGSFLQPTAKPRALAQQQAVIRGFTYYKAGKQEVTEAVADNTLQGTSWLEQLPPKVEGRSNSAEPNSAEQDEAEPRSSERVDLASGTPTSIPATTTTATTTPTPTTSLLPTEPPSGPEVSSQGREASCEGTLRAVDPPVRHHSYGRHEGAWMKDPAARDDRIYVTNYYYGNSLVEFRNLENFKQGRWSNMYKLPYNWIGTGHVVYQGAFYYNRAFTKNIIKYDLRQRFVASWALLPDVVYEDTTPWKWRGHSDIDFAVDESGLWVIYPAVDDRDEAQPEVIVLSRLDPGDLSVHRETTWKTRLRRNSYGNCFLVCGILYAVDTYNQQEGQVAYAFDTHTGTDARPQLPFLNEHAYTTQIDYNPKERVLYAWDNGHQLTYTLHFVV

SEQ ID NO: 9798 - protein, 318 aa, Homo Sapiens
MAAAALPPRPLLLLPLVLLLSGRPTRADSKVFGDLDQVRMTSEGSDCRCKCIMRPLSKDACSRVRSGRARVEDFYTVETVSSGTDCRCSCTAPPSSLNPCENEWKMEKLKKQAPELLKSIKANLSRENEVVKDSVRHLSEQLRHYENHSAIMLGIKKELSRLGLQLLQKDAAAAPATPATGTGSKAQDTARGKGKDISKYGSVQKSFADRGLPKPPKEKLLQVEKLRKESGKGSFLQPTAKPRALAQQQAVIRGFTYYKAGKQEVTEAVADNTLQGTSWLEQLPPKVEGRSNSAEPNSAEQDEAEPRSSERVDLASGT

SEQ ID NO: 9799 - protein, 438 aa, Homo Sapiens
MSKRDKAGKDTARGKGKDISKYGSVQKSFADRGLPKPPKEKLLQVEKLRKESGKGSFLQPTAKPRALAQQQAVIRGFTYYKAGKQEVTEAVADNTLQGTSWLEQLPPKVEGRSNSAEPNSAEQDEAEPRSSERVDLASGTPTSIPATTTTATTTPTPTTSLLPTEPPSGPEVSSQGREASCEGTLRAVDPPVRHHSYGRHEGAWMKDPAARDDRIYVTNYYYGNSLVEFRNLENFKQGRWSNMYKLPYNWIGTGHVVYQGAFYYNRAFTKNIIKYDLRQRFVASWALLPDVVYEDTTPWKWRGHSDIDFAVDESGLWVIYPAVDDRDEAQPEVIVLSRLDPGDLSVHRETTWKTRLRRNSYGNCFLVCGILYAVDTYNQQEGQVAYAFDTHTGTDARPQLPFLNEHAYTTQIDYNPKERVLYAWDNGHQLTYTLHFVV

SEQ ID NO: 9800 - protein, 90 aa, Homo Sapiens
ETTWRTGLRRNFYGNCFVICGVLYAVDSYNQRNANISYAFDTHTNTQIVPRLLFENEYSYTTQIDYNPKDRLLYAWDNGHQVTYHVIFAY

SEQ ID NO: 9801 - protein, 751 aa, Homo Sapiens
MAKPRLLVLYFALIVVPAWVSSIVLTGTSEPPDAQTVAPAEDETLQNEADNQENVLSQLLGDYDKVKAMSEGSDCQCKCVVRPLGRDACQRINAGASRKEDFYTVETITSGSSCKCACVAPPSALNPCEGDFRLQKLREADSQDLKLSTIIDMLEGAFYGLDLLKLHSVTTKLVGRVDKLEEEVSKNLTKENEQIKEDMEEIRTEMNKRGKENCSENILDSMPDIRSALQRDAAAAYAHPEQYEERFLQEETVSQQINSIELLQTRPLALPEVVKSQRPLQRQVHLRGRPASQPTVIRGITYYKAKVSEEENDIEEQQDEFFSGDNGVDLLIEDQLLRHNGLMTSVTRRPAATRQGHSTAVTSDLNARTAPWSSALPQPSTSDPSIANHASVGPTLQTTSVSPDPTRESVLQPSPQVPATTVAHTATQQPAAPAPPAVSPREALMEAMHTVPVPPTTVRTDSLGKDAPAGWGTTPASPTLSPEEEDDIRNVIGRCKDTLSTITGPTTQNTYGRNEGAWMKDPLAKDERIYVTNYYYGNTLVEFRNLENFKQGRWSNSYKLPYSWIGTGHVVYNGAFYYNRAFTRNIIKYDLKQRYVAAWAMLHDVAYEEATPWRWQGHSDVDFAVDENGLWLIYPALDDEGFSQEVIVLSKLNAADLSTQKETTWRTGLRRNFYGNCFVICGVLYAVDSYNQRNANISYAFDTHTNTQIVPRLLFENEYSYTTQIDYNPKDRLLYAWDNGHQVTYHVIFAY

SEQ ID NO: 9802 - protein, 750 aa, Homo Sapiens
MAKPRLLVLYFALIVVPAWVSSIVLTGTSEPPDAQTVAPAEDETLQNEADNQENVLSQLLGDYDKVKAMSEGSDCQCKCVVRPLGRDACQRINAGASRKEDFYTVETITSGSSCKCACVAPPSALNPCEGDFRLQKLREADSQDLKLSTIIDMLEGAFYGLDLLKLHSVTTKLVGRVDKLEEEVSKNLTKENEQIKEDMEEIRTEMNKRGKENCSENILDSMPDIRSALQRDAAAAYAHPEYEERFLQEETVSQQINSIELLQTRPLALPEVVKSQRPLQRQVHLRGRPASQPTVIRGITYYKAKVSEEENDIEEQQDEFFSGDNGVDLLIEDQLLRHNGLMTSVTRRPAATRQGHSTAVTSDLNARTAPWSSALPQPSTSDPSIANHASVGPTLQTTSVSPDPTRESVLQPSPQVPATTVAHTATQQPAAPAPPAVSPREALMEAMHTVPVPPTTVRTDSLGKDAPAGWGTTPASPTLSPEEEDDIRNVIGRCKDTLSTITGPTTQNTYGRNEGAWMKDPLAKDERIYVTNYYYGNTLVEFRNLENFKQGRWSNSYKLPYSWIGTGHVVYNGAFYYNRAFTRNIIKYDLKQRYVAAWAMLHDVAYEEATPWRWQGHSDVDFAVDENGLWLIYPALDDEGFSQEVIVLSKLNAADLSTQKETTWRTGLRRNFYGNCFVICGVLYAVDSYNQRNANISYAFDTHTNTQIVPRLLFENEYSYTTQIDYNPKDRLLYAWDNGHQVTYHVIFAY

SEQ ID NO: 9803 - protein, 233 aa, Homo Sapiens
MKDPLAKDERIYVTNYYYGNTLVEFRNLENFKQGRWSNSYKLPYSWIGTGHVVYNGAFYYNRAFTRNIIKYDLKQRYVAAWAMLHDVAYEEATPWRWQGHSDVDFAVDENGLWLIYPALDDEGFSQEVIVLSKLNAADLSTQKETTWRTGLRRNFYGNCFVICGVLYAVDSYNQRNANISYAFDTHTNTQIVPRLLFENEYSYTTQIDYNPKDRLLYAWDNGHQVTYHVIFAY

SEQ ID NO: 9804 - protein, 88 aa, Homo Sapiens
TWRTGLRRNFYGNCFVICGVLYAVDSYNQRNANISYAFDTHTNTQIVPRLLFENEYSYTTQIDYNPKDRLLYAWDNGHQVTYHVIFAY

SEQ ID NO: 9805 - protein, 386 aa, Homo Sapiens
MAQWHCSQRTQAGGHGVGERLAQCQDQSSRHAAELRDFKNKMLPLLEVAEKEREALRTEADTISGRVDRLEREVDYLETQNPALPCVEFDEKVTGGPGTKGKGRRNEKYDMVTDCGYTISQVRSMKILKRFGGPAGLWTKDPLGQTEKIYVLDGTQNDTAFVFPRLRDFTLAMAARKASRVRVPFPWVGTGQLVYGGFLYFARRPPGRPGGGGEMENTLQLIKFHLANRTVVDSSVFPAEGLIPPYGLTADTYIDLAADEEGLWAVYATREDDRHLCLAKLDPQTLDTEQQWDTPCPRENAEAAFVICGTLYVVYNTRPASRARIQCSFDASGTLTPERAALPYFPRRYGAHASLRYNPRERQLYAWDDGYQIVYKLEMRKKEEEV

SEQ ID NO: 9806 - protein, 406 aa, Homo Sapiens
MGPSTPLLILFLLSWSGPLQGQQHHLVEYMERRLAALEERLAQCQDQSSRHAAELRDFKNKMLPLLEVAEKEREALRTEADTISGRVDRLEREVDYLETQNPALPCVEFDEKVTGGPGTKGKGRRNEKYDMVTDCGYTISQVRSMKILKRFGGPAGLWTKDPLGQTEKIYVLDGTQNDTAFVFPRLRDFTLAMAARKASRVRVPFPWVGTGQLVYGGFLYFARRPPGRPGGGGEMENTLQLIKFHLANRTVVDSSVFPAEGLIPPYGLTADTYIDLAADEEGLWAVYATREDDRHLCLAKLDPQTLDTEQQWDTPCPRENAEAAFVICGTLYVVYNTRPASRARIQCSFDASGTLTPERAALPYFPRRYGAHASLRYNPRERQLYAWDDGYQIVYKLEMRKKEEEV

SEQ ID NO: 9807 - protein, 345 aa, Homo Sapiens
MLPLLEVAEKEREALRTEADTISGRVDRLEREVDYLETQNPALPCVEFDEKVTGGPGTKGKGRRNEKYDMVTDCGYTISQVRSMKILKRFGGPAGLWTKDPLGQTEKIYVLDGTQNDTAFVFPRLRDFTLAMAARKASRVRVPFPWVGTGQLVYGGFLYFARRPPGRPGGGGEMENTLQLIKFHLANRTVVDSSVFPAEGLIPPYGLTADTYIDLAADEEGLWAVYATREDDRHLCLAKLDPQTLDTEQQWDTPCPRENAEAAFVICGTLYVVYNTRPASRARIQCSFDASGTLTPERAALPYFPRRYGAHASLRYNPRERQLYAWDDGYQIVYKLEMRKKEEEV

SEQ ID NO: 9808 - protein, 421 aa, Homo Sapiens
MGFLSPIYVIFFFFGVKVHCQYETYQWDEDYDQEPDDDYQTGFPFRQNVDYGVPFHQYTLGCVSECFCPTNFPSSMYCDNRKLKTIPNIPMHIQQLYLQFNEIEAVTANSFINATHLKEINLSHNKIKSQKIDYGVFAKLPNLLQLHLEHNNLEEFPFPLPKSLERLLLGYNEISKLQTNAMDGLVNLTMLDLCYNYLHDSLLKDKIFAKMEKLMQLNLCSNRLESMPPGLPSSLMYLSLENNSISSIPEKYFDKLPKLHTLRMSHNKLQDIPYNIFNLPNIVELSVGHNKLKQAFYIPRNLEHLYLQNNEIEKMNLTVMCPSIDPLHYHHLTYIRVDQNKLKEPISSYIFFCFPHIHTIYYGEQRSTNGQTIQLKTQVFRRFPDDDDESEDHDDPDNAHESPEQEGAEGHFDLHYYENQE

SEQ ID NO: 9809 - protein, 440 aa, Homo Sapiens
MEYQILKMSLCLFILLFLTPGILCICPLQCICTERHRHVDCSGRNLSTLPSGLQENIIHLNLSYNHFTDLHNQLTQYTNLRTLDISNNRLESLPAHLPRSLWNMSAANNNIKLLDKSDTAYQWNLKYLDVSKNMLEKVVLIKNTLRSLEVLNLSSNKLWTVPTNMPSKLHIVDLSNNSLTQILPGTLINLTNLTHLYLHNNKFTFIPDQSFDQLFQLQEITLYNNRWSCDHKQNITYLLKWMMETKAHVIGTPCSTQISSLKEHNMYPTPSGFTSSLFTVSGMQTVDTINSLSVVTQPKVTKIPKQYRTKETTFGATLSKDTTFTSTDKAFVPYPEDTSTETINSHEAAAATLTIHLQDGMVTNTSLTSSTKSSPTPMTLSITSGMPNNFSEMPQQSTTLNLWREETTTNVKTPLPSVANAWKVNASFLLLLNVVVMLAV

SEQ ID NO: 9810 - protein, 158 aa, Homo Sapiens
MALEVLMLLAVLIWTGAENLHVKISCSLDWLMVSVIPVAESRNLYIFADELHLGMGCPANRIHTYVYEFIYLVRDCGIRTRVVSEETLLFQTELYFTPRNIDHDPQEIHLECSTSRKSVWLTPVSTENEIKLDPSPFIADFQTTAEELGLLSSSPNLL

SEQ ID NO: 9811 - protein, 86 aa, Homo Sapiens
MVSVIPVAESRNLYIFADELHLGMGCPANRIHTYVYEFIYLVRDCGIRTRVVSEETLLFQTELYFTPRNIDHDPQEIHLECSTSSV

SEQ ID NO: 9812 - protein, 304 aa, Homo Sapiens
MDNVTVRQGESATLRCTIDDRVTRVAWLNRSTILYAGNDKWSIDPRVIILVNTPTQYSIMIQNVDVYDEGPYTCSVQTDNHPKTSRVHLIVQVPPQIMNISSDITVNEGSSVTLLCLAIGRPEPTVTWRHLSVKEGQGFVSEDEYLEISDIKRDQSGEYECSALNDVAAPDVRKVKITVNYPPYISKAKNTGVSVGQKGILSCEASAVPMAEFQWFKEETRLATGLDGMRIENKGRMSTLTFFNVSEKDYGNYTCVATNKLGNTNASITLYGPGAVIDGVNSASRALACLWLSGTLLAHFFIKF

SEQ ID NO: 9813 - protein, 345 aa, Homo Sapiens
MGVCGYLFLPWKCLVVVSLRLLFLVPTGVPVRSGDATFPKAMDNVTVRQGESATLRCTIDDRVTRVAWLNRSTILYAGNDKWSIDPRVIILVNTPTQYSIMIQNVDVYDEGPYTCSVQTDNHPKTSRVHLIVQVPPQIMNISSDITVNEGSSVTLLCLAIGRPEPTVTWRHLSVKEGQGFVSEDEYLEISDIKRDQSGEYECSALNDVAAPDVRKVKITVNYPPYISKAKNTGVSVGQKGILSCEASAVPMAEFQWFKEETRLATGLDGMRIENKGRMSTLTFFNVSEKDYGNYTCVATNKLGNTNASITLYGPGAVIDGVNSASRALACLWLSGTLLAHFFIKF

SEQ ID NO: 9814 - protein, 354 aa, Homo Sapiens
MGVCGYLFLPWKCLVVVSLRLLFLVPTGVPVRSGDATFPKAMDNVTVRQGESATLRCTIDDRVTRVAWLNRSTILYAGNDKWSIDPRVIILVNTPTQYSIMIQNVDVYDEGPYTCSVQTDNHPKTSRVHLIVQVPPQIMNISSDITVNEGSSVTLLCLAIGRPEPTVTWRHLSVKEGQGFVSEDEYLEISDIKRDQSGEYECSALNDVAAPDVRKVKITVNYPPYISKAKNTGVSVGQKGILSCEASAVPMAEFQWFKEETRLATGLDGMRIENKGRMSTLTFFNVSEKDYGNYTCVATNKLGNTNASITLYEISPSSAVAGPGAVIDGVNSASRALACLWLSGTLLAHFFIKF

SEQ ID NO: 9815 - protein, 345 aa, Homo Sapiens; identical to SEQ ID NO: 9813

SEQ ID NO: 9816 - protein, 338 aa, Homo Sapiens
MYHPAYWVVFSATTALLFIPGVPVRSGDATFPKAMDNVTVRQGESATLRCTIDDRVTRVAWLNRSTILYAGNDKWSIDPRVIILVNTPTQYSIMIQNVDVYDEGPYTCSVQTDNHPKTSRVHLIVQVPPQIMNISSDITVNEGSSVTLLCLAIGRPEPTVTWRHLSVKEGQGFVSEDEYLEISDIKRDQSGEYECSALNDVAAPDVRKVKITVNYPPYISKAKNTGVSVGQKGILSCEASAVPMAEFQWFKEETRLATGLDGMRIENKGRMSTLTFFNVSEKDYGNYTCVATNKLGNTNASITLYGPGAVIDGVNSASRALACLWLSGTLLAHFFIKF

SEQ ID NO: 9817 - protein, 248 aa, Homo Sapiens
MKLTFFLGLLALISCFTPSESQRFSRRPYLPGQLPPPPLYRPRWVPPSPPPPYDSRLNSPLSLPFVPGRVPPSSFSRFSQAVILSQLFPLESIRQPRLFPGYPNLHFPLRPYYVGPIRILKPPFPPIPFFLAIYLPISNPEPQINITTADTTITTNPPTTATATTSTSTKPTMTISSSTVPISSTPEPATSISAATPAASTENTTQILANRPHTVLLNATVQVTTSNQTILSSPAFKSFWQKLFAIFG

SEQ ID NO: 9818 - protein, 174 aa, Homo Sapiens
MRLLAFLSLLALVLQETGTASLPRKERKRREEQMPREGDSFEVLPLRNDVLNPDNYGEVIDLSNYEELTDYGDQLPEVKVTSLAPATSISPAKSTTAPGTPSSNPTMTRPTTAGLLLSSQPNHEDIPPLPRRTAYLYARFNRISRIRAEDFKGLTKLKRIDLSNNLISSIDNDA

SEQ ID NO: 9819 - protein, 332 aa, Homo Sapiens
MRLLAFLSLLALVLQETGTASLPRKERKRREEQMPREGDSFEVLPLRNDVLNPDNYGEVIDLSNYEELTDYGDQLPEVKVTSLAPATSISPAKSTTAPGTPSSNPTMTRPTTAGLLLSSQPNHGLPTCLVCVCLGSSVYCDDIDLEDIPPLPRRTAYLYARFNRISRIRAEDFKGLTKLKRIDLSNNLISSIDNDAFRLLHALQDLILPENQLEALPVLPSGIEFLDVRLNRLQSSGIQPAAFRAMEKLQFLYLSDNLLDSIPGPLPLSLRSVHLQNNLIETMQRDVFCDPEEHKHTRRQLEDIRLDGNPINLSLFPSAYFCLPRLPIGRFT

SEQ ID NO: 9820 - protein, 301 aa, Homo Sapiens
MHPEPAPPPSRSSPELPPSGGSTTSGSRRSRRRSGDGEPPGAPPPPPSAVTYPDWIGQSYSEVMSLNEHSMQALSWRKLYLSRAKLKASSRTSALLSGFAMVAMVEVQLDADHDYPPGLLIAFSACTTVLVAVHLFALMISTCILPNIEAVSNVHNLNSVKESPHERMHRHIELAWAFSTVIGTLLFLAEVVLLCWVKFLPLKKQPGQPRPTSKPPASGAAANVSTSGITPGQAAAIASTTIMVPFGLIFIVFAVHFYRSLVSHKTDRQFQELNELAEFARLQDQLDHRGDHPLTPGSHYA

SEQ ID NO: 9821 - protein, 201 aa, Homo Sapiens
MALSWVLTVLSLLPLLEAQIPLCANLVPVPITNATLDRITGKWFYIASAFRNEEYNKSVQEIQATFFYFTPNKTEDTIFLREYQTRQDQCIYNTTYLNVQRENGTISRYVGGQEHFAHLLILRDTKTYMLAFDVNDEKNWGLSVYADKPETTKEQLGEFYEALDCLRIPKSDVVYTDWKKDKCEPLEKQHEKERKQEEGES

SEQ ID NO: 9822 - protein, 201 aa, Homo Sapiens
MALSWVLTVLSLLPLLEAQIPLCANLVPVPITNATLDRITGKWFYIASAFRNEEYNKSVQEIQATFFYFTPNKTEDTIFLREYQTRQNQCFYNSSYLNVQRENGTVSRYEGGREHVAHLLFLRDTKTLMFGSYLDDEKNWGLSFYADKPETTKEQLGEFYEALDCLCIPRSDVMYTDWKKDKCEPLEKQHEKERKQEEGES

SEQ ID NO: 9823 - protein, 65 aa, Homo Sapiens
MDYGLQFTSSRKFLSISPIVLYLLASFYTKYDAAHFLINTASLLSVLLPKLPQFHGVRVFGINKY

SEQ ID NO: 9824 - protein, 153 aa, Homo Sapiens
MNVGVAHSEVNPNTRVMNSRGIWLAYIILVGLLHMVLLSIPFFSIPVVWTLTNVIHNLATYVFLHTVKGTPFETPDQGKARLLTHWEQMDYGLQFTSSRKFLSISPIVLYLLASFYTKYDAAHFLINTASLLSVLLPKLPQFHGVRVFGINKY

SEQ ID NO: 9825 - protein, 153 aa, Homo Sapiens; identical to SEQ ID NO: 9824

SEQ ID NO: 9826 - protein, 119 aa, Homo Sapiens
MVLLSIPFFSIPVVWTLTNVIHNLATYVFLHTVKGTPFETPDQGKARLLTHWEQMDYGLQFTSSRKFLSISPIVLYLLASFYTKYDAAHFLINTASLLSVLLPKLPQFHGVRVFGINKY

SEQ ID NO: 9827 - protein, 75 aa, Homo Sapiens
MAAETLLSSLLGLLLLGLLLPASLTGGVGSLNLEELSEMRYGIEILPLPVMGGQPFFASLPPDPPFFPRANLRTW

SEQ ID NO: 9828 - protein, 75 aa, Homo Sapiens; identical to SEQ ID NO: 9827

SEQ ID NO: 9829 - protein, 125 aa, Homo Sapiens
MAAETLLSSLLGLLLLGLLLPASLTGGVGSLNLEELSEMRYGIEILPLPVMGGQSQSSDVVIVSSKYKQRYECRLPAGAIHFQREREEETPAYQGPGIPELLSPMRDAPCLLKGGMERPQVENRL

SEQ ID NO: 9830 - protein, 406 aa, Homo Sapiens
MAAETLLSSLLGLLLLGLLLPASLTGGVGSLNLEELSEMRYGIEILPLPVMGGQSQSSDVVIVSSKYKQRYECRLPAGAIHFQREREEETPAYQGPGIPELLSPMRDAPCLLKTKDWWTYEFCYGRHIQQYHMEDSASGAPNDFQNNVQVKVIRSPADLIRFIEELKGGTKKGKPNIGQEQPVDDAAEVPQREPEKERGDPERQREMEEEEDEDEDEDEDEDERQLLGEFEKELEGILLPSDRDRLRSEVKAGMERELENIIQETEKELDPDGLKKESERDRAMLALTSTLNKLIKRLEEKQSPELVKKHKKKRVVPKKPPPSPQPTGKIEIKIVRPWAEGTEEGARWLTDEDTRNLKEIFFNILVPGAEEAQKERQRQKELESNYRRVWGSPGGEGTGDLDEFDF

SEQ ID NO: 9831 - protein, 560 aa, Homo Sapiens
MAAETLLSSLLGLLLLGLLLPASLTGGVGSLNLEELSEMRYGIEILPLPVMGGQSQSSDVVIVSSKYKQRYECRLPAGAIHFQREREEETPAYQGPGIPELLSPMRDAPCLLKTKDWWTYEFCYGRHIQQYHMEDSEIKGEFLCDEGAGISGDYIDRVDEPLSCSYVLTIRTPRLCPHPLLRPPPSAAPQAILCHPSLQPEEYMAYVQRQADSKQYGDKIIEELQDLGPQVWSETKSGVAPQKMAGASPTKDDSKDSDFWKMLNEPEDQAPGGEEVPAEEQDPSPEAADSASGAPNDFQNNVQVKVIRSPADLIRFIEELKGGTKKGKPNIGQEQPVDDAAEVPQREPEKERGDPERQREMEEEEDEDEDEDEDEDERQLLGEFEKELEGILLPSDRDRLRSEVKAGMERELENIIQETEKELDPDGLKKESERDRAMLALTSTLNKLIKRLEEKQSPELVKKHKKKRVVPKKPPPSPQPTGKIEIKIVRPWAEGTEEGARWLTDEDTRNLKEIFFNILVPGAEEAQKERQRQKELESNYRRVWGSPGGEGTGDLDEFDF

SEQ ID NO: 9832 - protein, 613 aa, Homo Sapiens
MAAETLLSSLLGLLLLGLLLPASLTGGVGSLNLEELSEMRYGIEILPLPVMGGQSQSSDVVIVSSKYKQRYECRLPAGAIHFQREREEETPAYQGPGIPELLSPMRDAPCLLKTKDWWTYEFCYGRHIQQYHMEDSEIKGEVLYLGYYQSAFDWDDETAKASKQHRLKRYHSQTYGNGSKCDLNGRPREAEVRFLCDEGAGISGDYIDRVDEPLSCSYVLTIRTPRLCPHPLLRPPPSAAPQAILCHPSLQPEEYMAYVQRQAVDSKQYGDKIIEELQDLGPQVWSETKSGVAPQKMAGASPTKDDSKDSDFWKMLNEPEDQAPGGEEVPAEEQDPSPEAADSASGAPNDFQNNVQVKVIRSPADLIRFIEELKGGTKKGKPNIGQEQPVDDAAEVPQREPEKERGDPERQREMEEEEDEDEDEDEDEDERQLLGEFEKELEGILLPSDRDRLRSEVKAGMERELENIIQETEKELDPDGLKKESERDRAMLALTSTLNKLIKRLEEKQSPELVKKHKKKRVVPKKPPPSPQPTGKIEIKIVRPWAEGTEEGARWLTDEDTRNLKEIFFNILVPGAEEAQKERQRQKELESNYRRVWGSPGGEGTGDLDEFDF

SEQ ID NO: 9833 - protein, 667 aa, Homo Sapiens
MAAETLLSSLLGLLLLGLLLPASLTGGVGSLNLEELSEMRYGIEILPLPVMGGQSQSSDVVIVSSKYKQRYECRLPAGAIHFQREREEETPAYQGPGIPELLSPMRDAPCLLKTKDWWTYEFCYGRHIQQYHMEDSEIKGEVLYLGYYQSAFDWDDETAKASKQHRLKRYHSQTYGNGSKCDLNGRPREAEVRFLCDEGAGISGDYIDRVDEPLSCSYVLTIRTPRLCPHPLLRPPPSAAPQAILCHPSLQPEEYMAYVQRQADSKQYGDKIIEELQDLGPQVWSETKSGVAPQKMAGASPTKDDSKDSDFWKMLNEPEDQAPGGEEVPAEEQDPSPEAADSASGAPNDFQNNVQVKVIRSPADLIRFIEELKGGTKKGKPNIGQEQPVDDAAEVPQREPEKERGDPERQREMEEEEDEDEDEDEDEDERQLLGEFEKELEGILLPSDRDRLRSEVKAGMERELENIIQETEKELDPDGLKKESERDRAMLALTSTLNKLIKRLEEKQSPELVKKHKKKRVVPKKPPPSPQPTEEDPEHRVRVRVTKLRLGGPNQDLTVLEMKRENPQLKQIEGLVKELLEREGLTAAGKIEIKIVRPWAEGTEEGARWLTDEDTRNLKEIFFNILVPGAEEAQKERQRQKELESNYRRVWGSPGGEGTGDLDEFDF

SEQ ID NO: 9834 - protein, 597 aa, Homo Sapiens
MAAETLLSSLLGLLLLGLLLPASLTGGVGSLNLEELSEMRYGIEILPLPVMGGQSQSSDVVIVSSKYKQRYECRLPAGAIHFQREREEETPAYQGPGIPELLSPMRDAPCLLKTKDWWTYEFCYGRHIQQYHMEDSEIKGEVLYLGYYQSAFDWDDETAKASKQHRLKRYHSQTYGNGSKCDLNGRPREAEVRFLCDEGAGISGDYIDRVDEPLSCSYVLTIRTPRLCPHPLLRPPPSAAPQAILCHPSLQPEEYMAYVQRQADSKQYGDKIIEELQDLGPQVWSETKSGVAPQKMAGASPTKDDSKDSDFWKMLNEPEDQAPGGEEVPAEEQDPSPEAADSASGAPNDFQNNVQVKVIRSPADLIRFIEELKGGTKKGKPNIGQEQPVDDAAEVPQREPEKERGDPERQREMEEEEDEDEDEDEDEDERQLLGEFEKELEGILLPSDRDRLRSETEKELDPDGLKKESERDRAMLALTSTLNKLIKRLEEKQSPELVKKHKKKRVVPKKPPPSPQPTGKIEIKIVRPWAEGTEEGARWLTDEDTRNLKEIFFNILVPGAEEAQKERQRQKELESNYRRVWGSPGGEGTGDLDEFDF

SEQ ID NO: 9835 - protein, 652 aa, Homo Sapiens
MAAETLLSSLLGLLLLGLLLPASLTGGVGSLNLEELSEMRYGIEILPLPVMGGQSQSSDVVIVSSKYKQRYECRLPAGAIHFQREREEETPAYQGPGIPELLSPMRDAPCLLKTKDWWTYEFCYGRHIQQYHMEDSEIKGEVLYLGYYQSAFDWDDETAKASKQHRLKRYHSQTYGNGSKCDLNGRPREAEVRFLCDEGAGISGDYIDRVDEPLSCSYVLTIRTPRLCPHPLLRPPPSAAPQAILCHPSLQPEEYMAYVQRQADSKQYGDKIIEELQDLGPQVWSETKSGVAPQKMAGASPTKDDSKDSDFWKMLNEPEDQAPGGEEVPAEEQDPSPEAADSASGAPNDFQNNVQVKVIRSPADLIRFIEELKGGTKKGKPNIGQEQPVDDAAEVPQREPEKERGDPERQREMEEEEDEDEDEDEDEDERQLLGEFEKELEGILLPSDRDRLRSETEKELDPDGLKKESERDRAMLALTSTLNKLIKRLEEKQSPELVKKHKKKRVVPKKPPPSPQPTEEDPEHRVRVRVTKLRLGGPNQDLTVLEMKRENPQLKQIEGLVKELLEREGLTAAGKIEIKIVRPWAEGTEEGARWLTDEDTRNLKEIFFNILVPGAEEAQKERQRQKELESNYRRVWGSPGGEGTGDLDEFDF

SEQ ID NO: 9836 - protein, 612 aa, Homo Sapiens
MAAETLLSSLLGLLLLGLLLPASLTGGVGSLNLEELSEMRYGIEILPLPVMGGQSQSSDVVIVSSKYKQRYECRLPAGAIHFQREREEETPAYQGPGIPELLSPMRDAPCLLKTKDWWTYEFCYGRHIQQYHMEDSEIKGEVLYLGYYQSAFDWDDETAKASKQHRLKRYHSQTYGNGSKCDLNGRPREAEVRFLCDEGAGISGDYIDRVDEPLSCSYVLTIRTPRLCPHPLLRPPPSAAPQAILCHPSLQPEEYMAYVQRQADSKQYGDKIIEELQDLGPQVWSETKSGVAPQKMAGASPTKDDSKDSDFWKMLNEPEDQAPGGEEVPAEEQDPSPEAADSASGAPNDFQNNVQVKVIRSPADLIRFIEELKGGTKKGKPNIGQEQPVDDAAEVPQREPEKERGDPERQREMEEEEDEDEDEDEDEDERQLLGEFEKELEGILLPSDRDRLRSEVKAGMERELENIIQETEKELDPDGLKKESERDRAMLALTSTLNKLIKRLEEKQSPELVKKHKKKRVVPKKPPPSPQPTGKIEIKIVRPWAEGTEEGARWLTDEDTRNLKEIFFNILVPGAEEAQKERQRQKELESNYRRVWGSPGGEGTGDLDEFDF

SEQ ID NO: 9837 - protein, 580 aa, Homo Sapiens
MAAETLLSSLLGLLLLGLLLPASLTGGVGSLNLEELSEMRYGIEILPLPVMGGQSQSSDVVIVSSKYKQRYECRLPAGAIHFQREREEETPAYQGPGIPELLSPMRDAPCLLKTKDWWTYEFCYGRHIQQYHMEDSEIKGEVLYLGYYQSAFDWDDETAKFLCDEGAGISGDYIDRVDEPLSCSYVLTIRTPRLCPHPLLRPPPSAAPQAILCHPSLQPEEYMAYVQRQAVDSKQYGDKIIEELQDLGPQVWSETKSGVAPQKMAGASPTKDDSKDSDFWKMLNEPEDQAPGGEEVPAEEQDPSPEAADSASGAPNDFQNNVQVKVIRSPADLIRFIEELKGGTKKGKPNIGQEQPVDDAAEVPQREPEKERGDPERQREMEEEEDEDEDEDEDEDERQLLGEFEKELEGILLPSDRDRLRSEVKAGMERELENIIQETEKELDPDGLKKESERDRAMLALTSTLNKLIKRLEEKQSPELVKKHKKKRVVPKKPPPSPQPTGKIEIKIVRPWAEGTEEGARWLTDEDTRNLKEIFFNILVPGAEEAQKERQRQKELESNYRRVWGSPGGEGTGDLDEFDF

SEQ ID NO: 9838 - protein, 146 aa, Homo Sapiens
MAAETLLSSLLGLLLLGLLLPASLTGGVGSLNLEELSEMRYGIEILPLPVMGGQSQSSDVVIVSSKYKQRYECRLPAGAIHFQREREEETPAYQGPGIPELLSPMRDAPCLLKTKDWWTYEFCYGRHIQQYHMEDSEIKGLQAASS

SEQ ID NO: 9839 - protein, 186 aa, Homo Sapiens
MAAETLLSSLLGLLLLGLLLPASLTGGVGSLNLEELSEMRYGIEILPLPVMGGQSQSSDVVIVSSKYKQRYECRLPAGAIHFQREREEETPAYQGPGIPELLSPMRDAPCLLKTKDWWTYEFCYGRHIQQYHMEGILLPSDRDRLRSEVKAGMERELENIIQETEKELDPDGLKKESERDRAMLAL

SEQ ID NO: 9840 - protein, 162 aa, Homo Sapiens
MAAETLLSSLLGLLLLGLLLPASLTGGVGSLNLEELSEMRYGIEILPLPVMGGQSQSSDVVIVSSKYKQRYECRLPAGAIHFQREREEETPAYQGPGIPELLSPMRDAPCLLKTYGNGSKCDLNGRPREAEVRFLCDEGAGISGDYIDRVDEPLSCSYVLTI

SEQ ID NO: 9841 - protein, 538 aa, Homo Sapiens
MAAETLLSSLLGLLLLGLLLPASLTGGVGSLNLEELSEMRYGIEILPLPVMGGQTKDWWTYEFCYGRHIQQYHMEDSEIKGEVLYLGYYQSAFDWDDETAKASKQHRLKRYHSQTYGNGSKCDLNGRPREAEVRFLCDEGAGISGDYIDRVDEPLSCSYVLTIRTPRLCPHPLLRPPPSAAPQAILCHPSLQPEEYMAYVQRQADSKQYGDKIIEELQDLGPQVWSETKSGVAPQKMAGASPTKDDSKDSDFWKMLNEPEDQAPGGEEVPAEEQDPSPEAADSASGAPNDFQNNVQVKVIRSPADLIRFIEELKGGTKKGKPNIGQEQPVDDAAEVPQREPEKERGDPERQREMEEEEDEDEDEDEDEDERQLLGEFEKELEGILLPSDRDRLRSETEKELDPDGLKKESERDRAMLALTSTLNKLIKRLEEKQSPELVKKHKKKRVVPKKPPPSPQPTGKIEIKIVRPWAEGTEEGARWLTDEDTRNLKEIFFNILVPGAEEAQKERQRQKELESNYRRVWGSPGGEGTGDLDEFDF

SEQ ID NO: 9842 - protein, 252 aa, Homo Sapiens
MALVLILQLLTLFPPASYHPKPWLGAQPATVVTPGVNVTLRCRAPQPAWRFGLFKPGEIAPLLFRDVSSELAEFFLEEVTPAQGGSYRCCYRRPDWGPGVWSQPSDVLELLVTEELPRPSLVALPGPVVGPGANVSLRCAGRLRNMSFVLYREGVAAPLQYRHSAQPWADFTLLGARAPGTYSCYYHTPSAPYVLSQRSEVLVISWEDSGSSDYTRGNLVRLGLAGLVLISLGALVTFDWRSQNRAPAGIRP

SEQ ID NO: 9843 - protein, 271 aa, Homo Sapiens
MALVLILQLLTLFPPASYHPKPWLGAQPATVVTPGVNVTLRCRAPQPAWRFGLFKPGEIAPLLFRDVSSELAEFFLEEVTPAQGGSYRCCYRRPDWGPGVWSQPSDVLELLVTEELPRPSLVALPGPVVGPGANVSLRCAGRLRNMSFVLYREGVAAPLQYRHSAQPWADFTLLGARAPGTYSCYYHTPSAPYVLSQRSEVLVISWEGEGPEARPASSAPGMQAPGPPPSDPGAQAPSLSSFRPRGLVLQPLLPQTQDSWDPAPPPSDPGV

SEQ ID NO: 9844 - protein, 271 aa, Homo Sapiens; identical to SEQ ID NO: 9843

SEQ ID NO: 9845 - protein, 268 aa, Homo Sapiens [sequence omitted]

SEQ ID NO: 9846 - protein, 161 aa, Homo Sapiens
MALVLILQLLTLWPLCHTDITPSAGRILSGGGDSSPRGKLPLLLPKARLGAGCLVPAQRCPGAAGDRGAAAAVAGGAARAGGGSWRQREPALRGPPAEHELRAVPRGRGGPAAVPPLRAALGRLHAAGRPRPRHLQLLLSHALRALRAVAAQRGAGHQLGR

SEQ ID NO: 9847 - protein, 267 aa, Homo Sapiens
MALVLILQLLTLWPLCHTDITPSVAIIVPPASYHPKPWLGAQPATVVTPGVNVTLRCRAPQPAWRFGLFKPGEIAPLLFRDVSSELAEFFLEEVTPAQGGSYRCCYRRPDWGPGVWSQPSDVLELLVTEELPRPSLVALPGPVVGPGANVSLRCAGRLRNMSFVLYREGVAAPLQYRHSAQPWADFTLLGARAPGTYSCYYHTPSAPYVLSQRSEVLVISWEDSGSSDYTRGNLVRLGLAGLVLISLGALVTFDWRSQNRAPAGIRP

SEQ ID NO: 9848 - protein, 267 aa, Homo Sapiens; identical to SEQ ID NO: 9847

SEQ ID NO: 9849 - protein, 286 aa, Homo Sapiens
MALVLILQLLTLWPLCHTDITPSVAIIVPPASYHPKPWLGAQPATVVTPGVNVTLRCRAPQPAWRFGLFKPGEIAPLLFRDVSSELAEFFLEEVTPAQGGSYRCCYRRPDWGPGVWSQPSDVLELLVTEELPRPSLVALPGPVVGPGANVSLRCAGRLRNMSFVLYREGVAAPLQYRHSAQPWADFTLLGARAPGTYSCYYHTPSAPYVLSQRSEVLVISWEGEGPEARPASSAPGMQAPGPPPSDPGAQAPSLSSFRPRGLVLQPLLPQTQDSWDPAPPPSDPGV

SEQ ID NO: 9850 - protein, 286 aa, Homo Sapiens; identical to SEQ ID NO: 9849

SEQ ID NO: 9851 - protein, 263 aa, Homo Sapiens
MALVLILQLLTLWPLCHTDITPSVPPASYHPKPWLGAQPATVVTPGVNVTLRCRAPQPAWRFGLFKPGEIAPLLFRDVSSELAEFFLEEVTPAQGGSYRCCYRRPDWGPGVWSQPSDVLELLVTEELPRPSLVALPGPVVGPGANVSLRCAGRLRNMSFVLYREGVAAPLQYRHSAQPWADFTLLGARAPGTYSCYYHTPSAPYVLSQRSEVLVISWEDSGSSDYTRGNLVRLGLAGLVLISLGALVTFDWRSQNRAPAGIRP

SEQ ID NO: 9852 - protein, 282 aa, Homo Sapiens
MALVLILQLLTLWPLCHTDITPSVPPASYHPKPWLGAQPATVVTPGVNVTLRCRAPQPAWRFGLFKPGEIAPLLFRDVSSELAEFFLEEVTPAQGGSYRCCYRRPDWGPGVWSQPSDVLELLVTEELPRPSLVALPGPVVGPGANVSLRCAGRLRNMSFVLYREGVAAPLQYRHSAQPWADFTLLGARAPGTYSCYYHTPSAPYVLSQRSEVLVISWEGEGPEARPASSAPGMQAPGPPPSDPGAQAPSLSSFRPRGLVLQPLLPQTQDSWDPAPPPSDPGV

SEQ ID NO: 9853 - protein, 231 aa, Homo Sapiens
MASMAAIGSCSKEYRVLLGQLQKQTDLMQDTSRLLDPYIRIQGLDVPKLREHCRERPGAFPSEETLRGLGRRGFLQTLNATLGCVLHRLADLEQRLPKAQDLERSGLNIEDLEKLQMARPNILGLRNNIYCMAQLLDNSDTAEPTKAGRGASQPPTPTPASDAFQRKLEGCRFLHGYHRFMHSVGRVFSKWGESPNRSRRHSPHQALRKGVRRTRPSRKGKRLMTRGQLPR

SEQ ID NO: 9854 - protein, 20 aa, Homo Sapiens
MGVLLTQRTLLNTYPRPGCS

SEQ ID NO: 9855 - protein, 252 aa, Homo Sapiens
MGVLLTQRTLLSLVLALLFPSMASMAAIGSCSKEYRVLLGQLQKQTDLMQDTSRLLDPYIRIQGLDVPKLREHCRERPGAFPSEETLRGLGRRGFLQTLNATLGCVLHRLADLEQRLPKAQDLERSGLNIEDLEKLQMARPNILGLRNNIYCMAQLLDNSDTAEPTKAGRGASQPPTPTPASDAFQRKLEGCRFLHGYHRFMHSVGRVFSKWGESPNRSRRHSPHQALRKGVRRTRPSRKGKRLMTRGQLPR

SEQ ID NO: 9856 - protein, 188 aa, Homo Sapiens
LEPATEYMARVRCADASHFWKWSEWSGQNFTTLEAAPSEAPDVWRIVSLEPGNHTVTLFWKPLSKLHANGKILFYNVVVENLDKPSSSELHSIPAPANSTKLILDRCSYQICVIANNSVGASPASVIVISADPENSVSTCFSGTVPSVWGEGDFSHGSGHFCPGDSSTYMGNYLKFIQVTATLTNSHH

SEQ ID NO: 9857 - protein, 979 aa, Homo Sapiens
MALFAVFQTTFFLTLLSLRTYQSEVLAERLPLTPVSLKVSTNSTRQSLHLQWTVHNLPYHQELKMVFQIQISRIETSNVIWVGNYSTTVKWNQVLHWSWESELPLECATHFVRIKSLVDDAKFPEPNFWSNWSSWEEVSVQDSTGQDILFVFPKDKLVEEGTNVTICYVSRNIQNNVSCYLEGKQIHGEQLDPHVTAFNLNSVPFIRNKGTNIYCEASQGNVSEGMKGIVLFVSKVLEEPKDFSCETEDFKTLHCTWDPGTDTALGWSKQPSQSYTLFESFSGEKKLCTHKNWCNWQITQDSQETYNFTLIAENYLRKRSVNILFNLTHRVYLMNPFSVNFENVNATNAIMTWKVHSIRNNFTYLCQIELHGEGKMMQYNVSIKVNGEYFLSELEPATEYMARVRCADASHFWKWSEWSGQNFTTLEAAPSEAPDVWRIVSLEPGNHTVTLFWKPLSKLHANGKILFYNVVVENLDKPSSSELHSIPAPANSTKLILDRCSYQICVIANNSVGASPASVIVISADPENKEVEEERIAGTEGGFSLSWKPQPGDVIGYVVDWCDHTQDVLGDFQWKNVGPNTTSTVISTDAFRPGVRYDFRIYGLSTKRIACLLEKKTGYSQELAPSDNPHVLVDTLTSHSFTLSWKDYSTESQPGFIQGYHVYLKSKARQCHPRFEKAVLSDGSECCKYKIDNPEEKALIVDNLKPESFYEFFITPFTSAGEGPSATFTKVTTPDEHSSMLIHILLPMVFCVLLIMVMCYLKSQWIKETCYPDIPDPYKSSILSLIKFKENPHLIIMNVSDCIPDAIEVVSKPEGTKIQFLGTRKSLTETELTKPNYLYLLPTEKNHSGPGPCICFENLTYNQAASDSGSCGHVPVSPKAPSMLGLMTSPENVLKALEKNYMNSLGEIPAGETSLNYVSQLASPMFGDKDSLPTNPVEAPHCSEYKMQMAVSLRLALPPPTENSSLSSITLLDPGEHYC

SEQ ID NO: 9858 - protein, 342 aa, Homo Sapiens
MALFAVFQTTFFLTLLSLRTYQSEVLAERLPLTPVSLKVSTNSTRQSLHLQWTVHNLPYHQELKMVFQIQISRIETSNVIWVGNYSTTVKWNQVLHWSWESELPLECATHFVRIKSLVDDAKFPEPNFWSNWSSWEEVSVQDSTGQDILFVFPKDKLVEEGTNVTICYVSRNIQNNVSCYLEGKQIHGEQLDPHVTAFNLNSVPFIRNKGTNIYCEASQGNVSEGMKGIVLFVSKVLEEPKDFSCETEDFKTLHCTWDPGTDTALGWSKQPSQSYTLFESFSGEKKLCTHKNWCNWQITQDSQETYNFTLIAENYLRKRSVNILFNLTHRGETRVVTAHRGH

SEQ ID NO: 9859 - protein, 35 aa, Homo Sapiens
  misc_feature (1)..(1): Xaa can be any naturally occurring amino acid
XIKETCYPDIPDPYKSSILSLIKFKISSKVWLNRR

SEQ ID NO: 9860 - protein, 62 aa, Homo Sapiens
  misc_feature (1)..(1): Xaa can be any naturally occurring amino acid
XSMLIHILLPMVFCVLLIMVMCYLKSQWIKETCYPDIPDPYKSSILSLIKFKISSKVWLNRR

SEQ ID NO: 9861 - protein, 111 aa, Homo Sapiens
MLDWRLASAHFILAVTLTLWSSGKVLSVDVTTTEAFDSGVIDVQSTPTVREEKSATDLTAKLLLLDELVSLENDVIETKKKRSFSGFGSPLDRLSAGSVDHKGKQRCNFLG

SEQ ID NO: 9862 - protein, 133 aa, Homo Sapiens
MLDWRLASAHFILAVTLTLWSSGKVLSVDVTTTEAFDSGVIDVQSTPTVREEKSATDLTAKLLLLDELVSLENDVIETKKKRSFSGFGSPLDRLSAGSVDHKGKQRKVVDHPKRRFGIPMDRIGRNRLSNSRG

SEQ ID NO: 9863 - protein, 815 aa, Homo Sapiens
MFRLGLLVCFYNDLELLDATVAQVLLYQMIKCSHLRGFQAGVQKLKAELLDIAMENQTLNETLGSLSDAVVGLTYSQLESLSPEAVHGAISTLNQVSGWAKSQVIILSAKYLAHEKVLSFYNVSQMGALLAGVSTQAFCSMKRKDISQVLRSAVSQYVSDLSPAQQQGILSKMVQAEDTAPGIVEIQGAFFKEVSLFDLRRQPGFNSTVLKDKELGRSQALFLYELLLKTTRRPEELLSAGQLVKGVTCSHIDAMSTDFFLAHFQDFQNNFALLSPYQVNCLAWKYWEVSRLSMPPFLLAALPARYLASVPASQCVPFLISLGKSWLDSLVLDSHKKTSVLRKVQQCLDDSIADEYTVDIMGNLLCHLPAAIIDRGISPRAWATALHGLRDCPDLNPEQKAAVRLKLLGQYGLPQHWTAETTKDLGPFLVLFSGDELSSIATKFPEILLQAASKMARTLPTKEFLWAVFQSVRNSSDKIPSYDPMPGCHGVVAPSSDDIFKLAEANACWALEDLRCMEEDTFIRTVELLGAVQGFSRPQLMTLKEKAIQVWDMPSYWREHHIVSLGRIALALNESELEQLDLSSIDTVASLSWQTEWTPGQAESILQGYLDDSGYSIQDLKSFHLVGLGATLCAINITEIPLIKISEFRVVVARIGTLLCSTHVLAEFKRKAEVVFGDPTEWTSSVLQELGTIAAGLTKAELRMLDKDLMPYFQPSAIKCLPDEIFKELSAEQIASLGPENAAAVTHAQRRRLSPLQLQSLQQALDGAKTHSWQDAPASAGPTRTSSSRSPAGALQSWGLWLGCPLLVLMAKLLW

SEQ ID NO: 9864 - protein, 1060 aa, Homo Sapiens
MGNSITYRDQAAVENHLEQRLHQPQKLLEDLRKTDAQQFRTAMKCLLEDKKDGLDLKDIIIDLGEIRERALQSPGVNRSLFLITLERCFQMLNSLECVEILGKVLRGSSGSFLQPDITERLPRDLREDAFKNLSAVFKDLYDKTSAHSQRALYSWMTGILQTSSNATDDSASWVSAEHLWVLGRYMVHLSFEEITKISPIEIGLFISYDNATKQLDMVYDITPELAQAFLERISSSNFNMRNTSTIHRLGLLVCFYNDLELLDATVAQVLLYQMIKCSHLRGFQAGVQKLKAELLDIAMENQTLNETLGSLSDAVVGLTYSQLESLSPEAVHGAISTLNQVSGWAKSQVIILSAKYLAHEKVLSFYNVSQMGALLAGVSTQAFCSMKRKDISQVLRSAVSQYVSDLSPAQQQGILSKMVQAEDTAPGIVEIQGAFFKEVSLFDLRRQPGFNSTVLKDKELGRSQALFLYELLLKTTRRPEELLSAGQLVKGVTCSHIDAMSTDFFLAHFQDFQNNFALLSPYQVNCLAWKYWEVSRLSMPPFLLAALPARYLASVPASQCVPFLISLGKSWLDSLVLDSHKKTSVLRKVQQCLDDSIADEYTVDIMGNLLCHLPAAIIDRGISPRAWATALHGLRDCPDLNPEQKAAVRLKLLGQYGLPQHWTAETTKDLGPFLVLFSGDELSSIATKFPEILLQAASKMARTLPTKEFLWAVFQSVRNSSDKIPSYDPMPGCHGVVAPSSDDIFKLAEANACWALEDLRCMEEDTFIRTVELLGAVQGFSRPQLMTLKEKAIQVWDMPSYWREHHIVSLGRIALALNESELEQLDLSSIDTVASLSWQTEWTPGQAESILQGYLDDSGYSIQDLKSFHLVGLGATLCAINITEIPLIKISEFRVVVARIGTLLCSTHVLAEFKRKAEVVFGDPTEWTSSVLQELGTIAAGLTKAELRMLDKDLMPYFQPSAIKCLPDEIFKELSAEQIASLGPENAAAVTHAQRRRLSPLQLQSLQQALDGAKTHSWQDAPASAGPTRTSSSRSPAGALQSWGLWLGCPLLVLMAKLLW

SEQ ID NO: 9865 - protein, 1153 aa, Homo Sapiens
MSQEPTTYSLFLFLFLSHGVSSYTVPNSRQDLHPLLQNMAEEIIDGSYLNALLDLIQFQSSHVWTDDLSHRVLAYLNSRNVAFTIPSLQAAVENHLEQRLHQPQKLLEDLRKTDAQQFRTAMKCLLEDKKDGLDLKDIIIDLGEIRERALQSPGVNRSLFLITLERCFQMLNSLECVEILGKVLRGSSGSFLQPDITERLPRDLREDAFKNLSAVFKDLYDKTSAHSQRALYSWMTGILQTSSNATDDSASWVSAEHLWVLGRYMVHLSFEEITKISPIEIGLFISYDNATKQLDMVYDITPELAQAFLERISSSNFNMRNTSTIHRQAHELWALEPFPKMLGLLVCFYNDLELLDATVAQVLLYQMIKCSHLRGFQAGVQKLKAELLDIAMENQTLNETLGSLSDAVVGLTYSQLESLSPEAVHGAISTLNQVSGWAKSQVIILSAKYLAHEKVLSFYNVSQMGALLAGVSTQAFCSMKRKDISQVLRSAVSQYVSDLSPAQQQGILSKMVQAEDTAPGIVEIQGAFFKEVSLFDLRRQPGFNSTVLKDKELGRSQALFLYELLLKTTRRPEELLSAGQLVKGVTCSHIDAMSTDFFLAHFQDFQNNFALLSPYQVNCLAWKYWEVSRLSMPPFLLAALPARYLASVPASQCVPFLISLGKSWLDSLVLDSHKKTSVLRKVQQCLDDSIADEYTVDIMGNLLCHLPAAIIDRGISPRAWATALHGLRDCPDLNPEQKAAVRLKLLGQYGLPQHWTAETTKDLGPFLVLFSGDELSSIATKFPEILLQAASKMARTLPTKEFLWAVFQSVRNSSDKIPSYDPMPGCHGVVAPSSDDIFKLAEANACWALEDLRCMEEDTFIRTVELLGAVQGFSRPQLMTLKEKAIQVWDMPSYWREHHIVSLGRIALALNESELEQLDLSSIDTVASLSWQTEWTPGQAESILQGYLDDSGYSIQDLKSFHLVGLGATLCAINITEIPLIKISEFRVVVARIGTLLCSTHVLAEFKRKAEVVFGDPTEWTSSVLQELGTIAAGLTKAELRMLDKDLMPYFQPSAIKCLPDEIFKELSAEQIASLGPENAAAVTHAQRRRLSPLQLQSLQQALDGAKTHSWQDAPASAGPTRTSSSRSPAGALQSWGLWLGCPLLVLMAKLLW

SEQ ID NO: 9866 - protein, 1139 aa, Homo Sapiens
MSQEPTTYSLFLFLFLSHGVSSYTVPNSRQDLHPLLQNMAEEIIDGSYLNALLDLIQFQSSHVWTDDLSHRVLAYLNSRNVAFTIPSLQAAVENHLEQRLHQPQKLLEDLRKTDAQQFRTAMKCLLEDKKDGLDLKDIIIDLGEIRERALQSPGVNRSLFLITLERCFQMLNSLECVEILGKVLRGSSGSFLQPDITERLPRDLREDAFKNLSAVFKDLYDKTSAHSQRALYSWMTGILQTSSNATDDSASWVSAEHLWVLGRYMVHLSFEEITKISPIEIGLFISYDNATKQLDMVYDITPELAQAFLERISSSNFNMRNTSTIHRLGLLVCFYNDLELLDATVAQVLLYQMIKCSHLRGFQAGVQKLKAELLDIAMENQTLNETLGSLSDAVVGLTYSQLESLSPEAVHGAISTLNQVSGWAKSQVIILSAKYLAHEKVLSFYNVSQMGALLAGVSTQAFCSMKRKDISQVLRSAVSQYVSDLSPAQQQGILSKMVQAEDTAPGIVEIQGAFFKEVSLFDLRRQPGFNSTVLKDKELGRSQALFLYELLLKTTRRPEELLSAGQLVKGVTCSHIDAMSTDFFLAHFQDFQNNFALLSPYQVNCLAWKYWEVSRLSMPPFLLAALPARYLASVPASQCVPFLISLGKSWLDSLVLDSHKKTSVLRKVQQCLDDSIADEYTVDIMGNLLCHLPAAIIDRGISPRAWATALHGLRDCPDLNPEQKAAVRLKLLGQYGLPQHWTAETTKDLGPFLVLFSGDELSSIATKFPEILLQAASKMARTLPTKEFLWAVFQSVRNSSDKIPSYDPMPGCHGVVAPSSDDIFKLAEANACWALEDLRCMEEDTFIRTVELLGAVQGFSRPQLMTLKEKAIQVWDMPSYWREHHIVSLGRIALALNESELEQLDLSSIDTVASLSWQTEWTPGQAESILQGYLDDSGYSIQDLKSFHLVGLGATLCAINITEIPLIKISEFRVVVARIGTLLCSTHVLAEFKRKAEVVFGDPTEWTSSVLQELGTIAAGLTKAELRMLDKDLMPYFQPSAIKCLPDEIFKELSAEQIASLGPENAAAVTHAQRRRLSPLQLQSLQQALDGAKTHSWQDAPASAGPTRTSSSRSPAGALQSWGLWLGCPLLVLMAKLLW

SEQ ID NO: 9867 - protein, 1139 aa, Homo Sapiens; identical to SEQ ID NO: 9866

SEQ ID NO: 9868 - protein, 353 aa, Homo Sapiens
MSQEPTTYSLFLFLFLSHGVSSYTVPNSRQDLHPLLQNMAEEIIDGSYLNALLDLIQFQSSHVWTDDLSHRVLAYLNSRNVAFTIPSLQAAVENHLEQRLHQPQKLLEDLRKTDAQQFRTAMKCLLEDKKDGLDLKDIIIDLGEIRERALQSPGVNRSLFLITLERCFQMLNSLECVEILGKVLRGSSGSFLQPDITERLPRDLREDAFKNLSAVFKDLYDKTSAHSQRALYSWMTGILQTSSNATDDSASWVSAEHLWVLGRYMVHLSFEEITKISPIEIGLFISYDNATKQLDMVYDITPELAQAFLERISSSNFNMRNTSTIHSSKQNSWTLPWRTRPSMRPWVLCRMQL

SEQ ID NO: 9869 - protein, 94 aa, Homo Sapiens
AMGDKATVVGGQAEAPDSVAMSSWERRLHRAKCAPSYLFSCFNGGECVHPAFCDCRRFNATGPRCQMVYNAGPERDSICRAWGQHHVETFDGLY

SEQ ID NO: 9870 - protein, 2913 aa, Homo Sapiens
MGVLASALCWLLCVWLPWGEQAAESLRVQRLAAAPVLWGSAEPQPEPAGQPSSSHQEATLAMGDKATVVGGQQAEAPDSVAMSSWERRLHRAKCAPSYLFSCFNGGECVHPAFCDCRRFNATGPRCQMVYNAGPERDSICRAWGQHHVETFDGLYYYLSGKGSYTLVGRHEPEGQSFSIQVHNDPQCGSSPYTCSRAVSLFFVGEQEIHLAKEVTHGGMRVQLPHVMGSARLQQLAGYVIVRHQSAFTLAWDGASAVYIKMSPELLGWTHGLCGNNNADPKDDLVTSSGKLTDDVVEFVHSWQEQAPNQPPGPTTSSLPRPPCLQQNPGTMQGVYEQCEALLRPPFDACHAYVSPLPFTASCTSDLCQSMGDVATWCRALAEYARACAQAGRPLQGWRTQLRQCTVHCKEKAFTYNECIACCPASCHPRASCVDSEIACVDGCYCPNGLIFEDGGCVAPAECPCEFHGTLYPPGSVVKEDCNTCTCTSGKWECSTAVCPAECSVTGDIHFTTFDGRRYTFPATCQYILAKSRSSGTFTVTLQNAPCGLNQDGACVQSVSVILHQDPRRQVTLTQAGDVLLFDQYKIIPPYTDDAFEIRRLSSVFLRVRTNVGVRVLYDREGLRLYLQVDQRWVEDTVGLCGTFNGNTQDDFLSPVGVPESTPQLFGNSWKTLSACSPLVSGSPLDPCDVHLQAASYSVQACSVLTGEMFAPCSAFLSPVPYFEQCRRDACRCGQPCLCATLAHYAHLCRRHGLPVDFRARLPACALSCEASKEYSPCVAPCGRTCQDLASPEACGVDGGDDLSRDECVEGCACPPDTYLDTQADLCVPRNQCSCHFQGVDYPPGDSDIPSLGHCHCKDGVMSCDSRAPAAACPAGQVFVNCSDLHTDLELSRERTCEQQLLNLSVSARGPCLSGCACPQGLLRHGDACFLPEECPCTWKGKEYFPGDQVMSPCHTCVCQRGSFQCTLHPCASTCTAYGDRHYRTFDGLPFDFVGACKVHLVKSTSDVSFSVIVENVNCYSSGMICRKFISINVGNSLIVFDDDSGNPSPESFLDDKQEVHTWRVGFFTLVHFPQEHITLLWDQRTTVHVQAGPQWQGQLAGLCGNFDLKTINEMRTPENLELTNPQEFGSSWAAVECPDTLDPRDMCVLNPLREPFAKKECSILLSEVFEICHPVVDVTWFYSNCLTDTCGCSQGGDCECFCASVSAYAHQCCQHGVAVDWRTPRLCPYDCDFFNKVLGKGPYQLSSLAAGGALVGMKAVGDDIVLVRTEDVAPADIVSFLLTAALYKAKAHDPDVVSLEAADRPNFFLHVTANGSLELAKWQGRDTFQQHASFLLHRGTRQAGLVALESLAKPSSFLYVSGAVLALRLYEHTEVFRRGTLFRLLDAKPSGAAYPICEWRYDACASPCFQTCRDPRAASCRDVPRVEGCVPVCPTPQVLDEVTQRCVYLEDCVEPAVWVPTEALGNETLPPSQGLPTPSDEEPQLSQESPRTPTHRPALTPAAPLTTALNPPVTATEEPVVSPGPTQTTLQQPLELTASQLPAGPTESPASKGVTASLLAIPHTPESSSLPVALQTPTPGMVSGAMETTRVTVIFAGSPNITVSSRSPPAPRFPLMTKAVTVRGHGSLPVRTTPPQPSLTASPSSRPVASPGAISRSPTSSGSHKAVLTPAVTKVISRTGVPQPTQAQSASSPSTPLTVAGTAAEQVPVSPLATRSLEIVLSTEKGEAGHSQPMGSPASPQPHPLPSAPPRPAQHTTMATRSPALPPETPAAASLSTATDGLAATPFMSLESTRPSQLLSGLPPDTSLPLAKVGTSAPVATPGPKASVITTPLQPQATTLPAQTLSPVLPFTPAAMTQAHPPTHIAPPAAGTAPGLLLGATLPTSGVLPVAEGTASMVSVVPRKSTTGKVAILSKQVSLPTSMYGSAEGGPTELTPATSHPLTPLVAEPEGAQAGTALPVPTSYALSRVSARTAPQDSMLVLLPQLAEAHGTSAGPHLAAEPVDEATTEPSGRSAPALSIVEGLAEALATTTEANTSTTCVPIAEQDCVRHICLEGQLIRVNQSQHCPQGAAPPRCGILGLAVRVGGDRCCPLWECACRCSIFPDLSFVTFDGSHVALFKEAIYILSQSPDEMLTVHVLDCKSANLGHLNWPPFCLVMLNMTHLAHQVTIDRFNRKVTVDLQPVWPPVSRYGFRIEDTGHMYMILTPSDIQIQWLHSSGLMIVEASKTSKAQGHGLCGICDGDAANDLTLKDGSVVGGAEDPAPFLDSWQVPSSLTSVGQTRFRPDSCATTDCSPCLRMVSNRTFSACHRFVPPESFCELWIRDTKYVQQPCVALTVYVAMCHKFHVCIEWRRSDYCPFLCSSDSTYQACVTACEPPKTCQDGILGPLDPEHCQVLGEGCVCSEGTILHRRHSALCIPEAKCACTDSMGVPRALGETWNSSLSGCCQHQCQAPDTIVPVDLGCPSPRPESCLRFGEVALLLPTKDPCCLGTVCVCNQTLCEGLAPTCRPGHRLLTHFQEDSCCPSYSCECDPDLCEAELVPSCRQDQILITGRLGDSCCTSYFCACGDCPDSIPECQEGEALTVHRNTTELCCPLYQCVCENFRCPQVQCGLGTALVEVWSPDRCCPYKSCECDCDTIPVPRCHLWEKSQLDEEFMHSVENVCGCAKYECVKAPVCLSRELGVMQPGQTVVELSADGVCHTSRCTTVLDPLTNFYQINTTSVLCDIHCEANQEYEHPRDLAACCGSCRNVSCLFTFPNGTTSLFLPGASWIADCARHHCSSTPLGAVLVRSPISCPPLNETECAKVGGSVVPSLEGCCRTCKEDGRSCKKVTIRMTIRKNECRSSTPVNLVSCDGRCPSASIYNYNINTYARFCKCCREVGLQRRSVQLFCATNATWVPYTVQEPTDCACQWS

SEQ ID NO: 9871 - protein, 2925 aa, Homo Sapiens
MGVLASALCWLLCVWLPWGEQAAESLRVQRLGERVVDSGRSGARGMRNVKGMRNGPAQTRVSSSSSHQEATLAMGDKATVVGGQQAEAPDSVAMSSWERRLHRAKCAPSYLFSCFNGGECVHPAFCDCRRFNATGPRCQMVYNAGPERDSICRAWGQHHVETFDGLYYYLSGKGSYTLVGRHEPEGQSFSIQVHNDPQCGSSPYTCSRAVSLFFVGEQEIHLAKEVTHGGMRVQLPHVMGSARLQQLAGYVIVRHQSAFTLAWDGASAVYIKMSPELLGWTHGLCGNNNADPKDDLVTSSGKLTDDVVEFVHSWQEQAPNQPPGPTTSSLPRPPCLQQNPGTMQGVYEQCEALLRPPFDACHAYVSPLPFTASCTSDLCQSMGDVATWCRALAEYARACAQAGRPLQGWRTQLRQCTVHCKEKAFTYNECIACCPASCHPRASCVDSEIACVDGCYCPNGLIFEDGGCVAPAECPCEFHGTLYPPGSVVKEDCNTCTCTSGKWECSTAVCPAECSVTGDIHFTTFDGRRYTFPATCQYILAKSRSSGTFTVTLQNAPCGLNQDGACVQSVSVILHQDPRRQVTLTQAGDVLLFDQYKIIPPYTDDAFEIRRLSSVFLRVRTNVGVRVLYDREGLRLYLQVDQRWVEDTVGLCGTFNGNTQDDFLSPVGVPESTPQLFGNSWKTLSACSPLVSGSPLDPCDVHLQAASYSVQACSVLTGEMFAPCSAFLSPVPYFEQCRRDACRCGQPCLCATLAHYAHLCRRHGLPVDFRARLPACALSCEASKEYSPCVAPCGRTCQDLASPEACGVDGGDDLSRDECVEGCACPPDTYLDTQADLCVPRNQCSCHFQGVDYPPGDSDIPSLGHCHCKDGVMSCDSRAPAAACPAGQVFVNCSDLHTDLELSRERTCEQQLLNLSVSARGPCLSGCACPQGLLRHGDACFLPEECPCTWKGKEYFPGDQVMSPCHTCVCQRGSFQCTLHPCASTCTAYGDRHYRTFDGLPFDFVGACKVHLVKSTSDVSFSVIVENVNCYSSGMICRKFISINVGNSLIVFDDDSGNPSPESFLDDKQEVHTWRVGFFTLVHFPQEHITLLWDQRTTVHVQAGPQWQGQLAGLCGNFDLKTINEMRTPENLELTNPQEFGSSWAAVECPDTLDPRDMCVLNPLREPFAKKECSILLSEVFEICHPVVDVTWFYSNCLTDTCGCSQGGDCECFCASVSAYAHQCCQHGVAVDWRTPRLCPYDCDFFNKVLGKGPYQLSSLAAGGALVGMKAVGDDIVLVRTEDVAPADIVSFLLTAALYKAKAHDPDVVSLEAADRPNFFLHVTANGSLELAKWQGRDTFQQHASFLLHRGTRQAGLVALESLAKPSSFLYVSGAVLALRLYEHTEVFRRGTLFRLLDAKPSGAAYPICEWRYDACASPCFQTCRDPRAASCRDVPRVEGCVPVCPTPQVLDEVTQRCVYLEDCVEPAVWVPTEALGNETLPPSQGLPTPSDEEPQLSQESPRTPTHRPALTPAAPLTTALNPPVTATEEPVVSPGPTQTTLQQPLELTASQLPAGPTESPASKGVTASLLAIPHTPESSSLPVALQTPTPGMVSGAMETTRVTVIFAGSPNITVSSRSPPAPRFPLMTKAVTVRGHGSLPVRTTPPQPSLTASPSSRPVASPGAISRSPTSSGSHKAVLTPAVTKVISRTGVPQPTQAQSASSPSTPLTVAGTAAEQVPVSPLATRSLEIVLSTEKGEAGHSQPMGSPASPQPHPLPSAPPRPAQHTTMATRSPALPPETPAAASLSTATDGLAATPFMSLESTRPSQLLSGLPPDTSLPLAKVGTSAPVATPGPKASVITTPLQPQATTLPAQTLSPVLPFTPAAMTQAHPPTHIAPPAAGTAPGLLLGATLPTSGVLPVAEGTASMVSVVPRKSTTGKVAILSKQVSLPTSMYGSAEGGPTELTPATSHPLTPLVAEPEGAQAGTALPVPTSYALSRVSARTAPQDSMLVLLPQLAEAHGTSAGPHLAAEPVDEATTEPSGRSAPALSIVEGLAEALATTTEANTSTTCVPIAEQDCVRHICLEGQLIRVNQSQHCPQGAAPPRCGILGLAVRVGGDRCCPLWECACRCSIFPDLSFVTFDGSHVALFKEAIYILSQSPDEMLTVHVLDCKSANLGHLNWPPFCLVMLNMTHLAHQVTIDRFNRKVTVDLQPVWPPVSRYGFRIEDTGHMYMILTPSDIQIQWLHSSGLMIVEASKTSKAQGHGLCGICDGDAANDLTLKDGSVVGGAEDPAPFLDSWQVPSSLTSVGQTRFRPDSCATTDCSPCLRMVSNRTFSACHRFVPPESFCELWIRDTKYVQQPCVALTVYVAMCHKFHVCIEWRRSDYCPFLCSSDSTYQACVTACEPPKTCQDGILGPLDPEHCQVLGEGCVCSEGTILHRRHSALCIPEAKCACTDSMGVPRALGETWNSSLSGCCQHQCQAPDTIVPVDLGCPSPRPESCLRFGEVALLLPTKDPCCLGTVCVCNQTLCEGLAPTCRPGHRLLTHFQEDSCCPSYSCECDPDLCEAELVPSCRQDQILITGRLGDSCCTSYFCACGDCPDSIPECQEGEALTVHRNTTELCCPLYQCVCENFRCPQVQCGLGTALVEVWSPDRCCPYKSCECDCDTIPVPRCHLWEKSQLDEEFMHSVENVCGCAKYECVKAPVCLSRELGVMQPGQTVVELSADGVCHTSRCTTVLDPLTNFYQINTTSVLCDIHCEANQEYEHPRDLAACCGSCRNVSCLFTFPNGTTSLFLPGASWIADCARHHCSSTPLGAVLVRSPISCPPLNETECAKVGGSVVPSLEGCCRTCKEDGRSCKKVTIRMTIRKNECRSSTPVNLVSCDGRCPSASIYNYNINTYARFCKCCREVGLQRRSVQLFCATNATWVPYTVQEPTDCACQWS

SEQ ID NO: 9872 - protein, 71 aa, Homo Sapiens
GEFLTVDLNSTHFCCPQYYCVCEPNLCPMPLLNCAEDMNLVKENVSGQCCPTWHCECNCENLIMPTCEVIS

SEQ ID NO: 9873 - protein, 2344 aa, Homo Sapiens
MIPWSIFLLHVLLFSLQEYICASSILMGTSKNGFNENRQKRALLAAQFEATSPRYFFHDAINWGESKIKGSCPYECLNGAFCSKTGTCDCQIFQALGTRCQIIPNMGNGRDGICKTWGQYHFETFDGIYYYFPGNCSYIFAKDCGDLEPRYTVWVHNSPKCLGSVYSCYRSISLFFSNQEEIRIYGHEIKKNGISLTLPQTIGQIFIEKLADYILVKTTFGFSLAWDGISGIYLKLSEDHKGKSCGLCGNYNDIQSDDFIILQEDYTEDIAMFANSWSVQTPDDTKCVLTPSDFPNPCSSGMPAFEAIFFKCQILLQFPFLSCHEYIDPYLYIASCVNDLCKTDDDETYCRAATEYARACSHAGYPIQDWRDDFPACTDKCDDSFVHRDCISCCPPTCTFEKQCLGSNLHCLDGCYCPDGLVMDNGTCISLENCPCGFHGLAYSVGSKIEQECTECVCVGGVWNCTEQDCPVQCSVVGDSHFTTFDGRHYSFIGMCQYILVKGTGKDKFTITLQKAPCEQNLGLVCLQSITLILEDDFNKQVTLGRGGQILTSPNQGFNLNGIVEIQTLSSLFILLKTTFGLKILFAIDGERIYIQLTSAWKRRTLGLCGTFNGNIRDDFLSPSGMIEGTPQLHANAWRVSSTCFAPVHVPVVDPCNINQQNIGYAAHCDVIHQELFAPCHIYISPGLYYQLCRHDACKCGSSCLCNALAHYAYLCGQHGVPIDFRTQISFCAVVCQKGMLYHHCSSFCLHSCISLSSPEQCSDDCAEGCNCPEGKFYEDTLNFCVPIFHCRCHYRGSVYQPGELIPTPSGLCQCSNGTVKCDELATPSAVHICPEGKEYFDCRFPDPELPAGGVNCETTCANLAMNFTCTPSSPCISGCVCAPGMAEHRGKCYVPESCPCIWKDWEYLSGEVIATPCYTCVCRRGMFNCTYYPCPAVCTIYGDRHYYSFDGLEYDYISDCQVFLIKSADDSDISVIAQNKKCFDNDIVCSKSVLISVGDTEIYLNDTPYKQKQSGFFLENKSTYQLWKAGYYIVVYFPEKDITILWDRKTTIHIKVGPQWKNKLSGLCGNFDKCTSNDMTTSNNLEVRNARVFGDSWALGQCESPDETIKPCEAHQNKFPYAKKECSILYSDIFASCRNVIDVTSFAKNCHEDTCNCNLGGDCECLCTSIAAYAYKCCQEGISIHWRSSTVCSLDCEYYNEGLGEGPYMLASYGQSGLVLGANMTSRSVFCLPRSSVHTSLFFYFMITPGLFKEKVSSLALVSLESAERPNYFLYVHDNDTLSLELWEANSAFHRRATFFHHQGLWIPGYSAFELYSKKGFFIIFTDSSVKASKYDDSEEFKHSSSFSIEEIQAAVPYRKMCEWRYEPCATPCFKTCSDPEALACKFLPPVEGCLPYCPKNMILDEVTLKCVYPRDCIPVIPTEPTLMPPAKPTVPMFTVWEMITPSDITVFDMLTPTTGLECEPQKFDPVYDCSQYICLNMEWQLYNWSLNCPKDVEMPDCGFRGRPVQVNSDICCPEWECPCRCSMLSELSIITFDGNNAALYSMASYILVRIPGEIIVAHIEKCSMNQNGNSLKKLAPSGRISGLCFKKLNVTTPIHKIIVNRLARKVEVDSIVVPLPFSSQELSIEDSGSMYVITTPAGLIIKWSHLTGIIDIHFGFRFNLSSYTEGLCGICNEDPDDDLRMQNGTIITNMEDIGLFIESWEIEKSFEVTMRRPVRNCTEHDCSQCIDLLNRRIFIPCHDKVSPEDFCEKMWINYTYFWNYECDALSAYVALCNKFDICIQWRTPDYCSLSCPEGKEYQPCVRPCEARTCLNQWFYGHTSCLNLREDCVCKVGTILHRPHSAQCIPEKECACTDSEDQPRTAGEIWNGGIDECTLYKCLENGSIIPIEPDCDEEPTPVCEREAEVVMGIIDKWTCCSKEVCGCDTTLCETSIPTCTNSQKLIVGHSPLSCCPQYKCECDPLKCPSISTPECREDQFMIQVRQEEPCCFSPFCVCESCTKPVPLCHDGEFLTVDLNSTHFCCPQYYCVCEPNLCPMPLLNCAEDMNLVKENVSGQCCPTWHCECNCENLIMPTCEVGEFTAIDHNFQSDCGCIQYLCEKDDVCVFQEVSVLNPGQSMIKYLEEDFCYAIECLEEKDNHTGFHTLNFTLVNCSKKCDVHQVYTPSPSDYGCCGTCKNVSCKFHMENGTSVVYAVGSTWHYNCTTYECVKTDEGAIILNYTMVCPPFNETECKMNEGIVKLYNEGCCKICKREERICQKVIIKSVIRKQDCMSQSPINVASCDGKCPSATIYNINIESHLRFCKCCRENGVRNLSVPLYCSGNGTEIMYTLQEPIDCTCQWN

SEQ ID NO: 9874 - protein, 2353 aa, Homo Sapiens
MNIVRKLNLMIPWSIFLLHVLLFSLQEYICASSILMGTSKNGFNENRQKRALLAAQFEATSPRYFFHDAINWGESKIKGSCPYECLNGAFCSKTGTCDCQIFQALGTRCQIIPNMGNGRDGICKTWGQYHFETFDGIYYYFPGNCSYIFAKDCGDLEPRYTVWVHNSPKCLGSVYSCYRSISLFFSNQEEIRIYGHEIKKNGISLTLPQTIGQIFIEKLADYILVKTTFGFSLAWDGISGIYLKLSEDHKGKSCGLCGNYNDIQSDDFIILQEDYTEDIAMFANSWSVQTPDDTKCVLTPSDFPNPCSSGMPAFEAIFFKCQILLQFPFLSCHEYIDPYLYIASCVNDLCKTDDDETYCRAATEYARACSHAGYPIQDWRDDFPACTDKCDDSFVHRDCISCCPPTCTFEKQCLGSNLHCLDGCYCPDGLVMDNGTCISLENCPCGFHGLAYSVGSKIEQECTECVCVGGVWNCTEQDCPVQCSVVGDSHFTTFDGRHYSFIGMCQYILVKGTGKDKFTITLQKAPCEQNLGLVCLQSITLILEDDFNKQVTLGRGGQILTSPNQGFNLNGIVEIQTLSSLFILLKTTFGLKILFAIDGERIYIQLTSAWKRRTLGLCGTFNGNIRDDFLSPSGMIEGTPQLHANAWRVSSTCFAPVHVPVVDPCNINQQNIGYAAHCDVIHQELFAPCHIYISPGLYYQLCRHDACKCGSSCLCNALAHYAYLCGQHGVPIDFRTQISFCAVVCQKGMLYHHCSSFCLHSCISLSSPEQCSDDCAEGCNCPEGKFYEDTLNFCVPIFHCRCHYRGSVYQPGELIPTPSGLCQCSNGTVKCDELATPSAVHICPEGKEYFDCRFPDPELPAGGVNCETTCANLAMNFTCTPSSPCISGCVCAPGMAEHRGKCYVPESCPCIWKDWEYLSGEVIATPCYTCVCRRGMFNCTYYPCPAVCTIYGDRHYYSFDGLEYDYISDCQVFLIKSADDSDISVIAQNKKCFDNDIVCSKSVLISVGDTEIYLNDTPYKQKQSGFFLENKSTYQLWKAGYYIVVYFPEKDITILWDRKTTIHIKVGPQWKNKLSGLCGNFDKCTSNDMTTSNNLEVRNARVFGDSWALGQCESPDETIKPCEAHQNKFPYAKKECSILYSDIFASCRNVIDVTSFAKNCHEDTCNCNLGGDCECLCTSIAAYAYKCCQEGISIHWRSSTVCSLDCEYYNEGLGEGPYMLASYGQSGLVLGANMTSRSVFCLPRSSVHTSLFFYFMITPGLFKEKVSSLALVSLESAERPNYFLYVHDNDTLSLELWEANSAFHRRATFFHHQGLWIPGYSAFELYSKKGFFIIFTDSSVKASKYDDSEEFKHSSSFSIEEIQAAVPYRKMCEWRYEPCATPCFKTCSDPEALACKFLPPVEGCLPYCPKNMILDEVTLKCVYPRDCIPVIPTEPTLMPPAKPTVPMFTVWEMITPSDITVFDMLTPTTGLECEPQKFDPVYDCSQYICLNMEWQLYNWSLNCPKDVEMPDCGFRGRPVQVNSDICCPEWECPCRCSMLSELSIITFDGNNAALYSMASYILVRIPGEIIVAHIEKCSMNQNGNSLKKLAPSGRISGLCFKKLNVTTPIHKIIVNRLARKVEVDSIVVPLPFSSQELSIEDSGSMYVITTPAGLIIKWSHLTGIIDIHFGFRFNLSSYTEGLCGICNEDPDDDLRMQNGTIITNMEDIGLFIESWEIEKSFEVTMRRPVRNCTEHDCSQCIDLLNRRIFIPCHDKVSPEDFCEKMWINYTYFWNYECDALSAYVALCNKFDICIQWRTPDYCSLSCPEGKEYQPCVRPCEARTCLNQWFYGHTSCLNLREDCVCKVGTILHRPHSAQCIPEKECACTDSEDQPRTAGEIWNGGIDECTLYKCLENGSIIPIEPDCDEEPTPVCEREAEVVMGIIDKWTCCSKEVCGCDTTLCETSIPTCTNSQKLIVGHSPLSCCPQYKCECDPLKCPSISTPECREDQFMIQVRQEEPCCFSPFCVCESCTKPVPLCHDGEFLTVDLNSTHFCCPQYYCVCEPNLCPMPLLNCAEDMNLVKENVSGQCCPTWHCECNCENLIMPTCEVGEFTAIDHNFQSDCGCIQYLCEKDDVCVFQEVSVLNPGQSMIKYLEEDFCYAIECLEEKDNHTGFHTLNFTLVNCSKKCDVHQVYTPSPSDYGCCGTCKNVSCKFHMENGTSVVYAVGSTWHYNCTTYECVKTDEGAIILNYTMVCPPFNETECKMNEGIVKLYNEGCCKICKREERICQKVIIKSVIRKQDCMSQSPINVASCDGKCPSATIYNINIESHLRFCKCCRENGVRNLSVPLYCSGNGTEIMYTLQEPIDCTCQWN

SEQ ID NO: 9875 - protein, 2308 aa, Homo Sapiens
MNIVRKLNLMIPWSIFLLHVLLFSLQEYICASSILMGTSKNGFNENRQKRALLAAQFEATSPRYFFHDAINWGESKIKGSCPYECLNGAFCSKTGTCDCQIFQALGTRCQIIPNMGNGRDGICKTWGQYHFETFDGIYYYFPGNCSYIFAKDCGDLEPRYTVWVHNSPKCLGSVYSCYRSISLFFSNQEEIRIYGHEIKKNGISLTLPQTIGQIFIEKLADYILVKTTFGFSLAWDGISGIYLKLSEDHKGKSCGLCGNYNDIQSDDFIILQEDYTEDIAMFANSWSVQTPDDTKCVLTPSDFPNPCSSGMPAFEAIFFKCQILLQFPFLSCHEYIDPYLYIASCVNDLCKTDDDETYCRAATEYARACSHAGYPIQDWRDDFPACTDKCDDSFVHRDCISCCPPTCTFEKQCLGSNLHCLDGCYCPDGLVMDNGTCISLENCPCGFHGLAYSVGSKIEQECTECVCVGGVWNCTEQDCPVQCSVVGDSHFTTFDGRHYSFIGMCQYILVKGTGKDKFTITLQKAPCEQNLGLVCLQSITLILEDDFNKQVTLGRGGQILTSPNQGFNLNGIVEIQTLSSLFILLKTTFGLKILFAIDGERIYIQLTSAWKRRTLGLCGTFNGNIRDDFLSPSGMIEGTPQLHANAWRVSSTCFAPVHVPVVDPCNINQQNIGYAAHCDVIHQELFAPCHIYISPGLYYQLCRHDACKCGSSCLCNALAHYAYLCGQHGVPIDFRTQISFCAVVCQKGMLYHHCSSFCLHSCISLSSPEQCSDDCAEGCNCPEGKFYEDTLNFCVPIFHCRCHYRGSVYQPGELIPTPSGLCQCSNGTVKCDELATPSAVHICPEGKEYFDCRFPDPELPAGGVNCETTCANLAMNFTCTPSSPCISGCVCAPGMAEHRGKCYVPESCPCIWKDWEYLSGEVIATPCYTCVCRRGMFNCTYYPCPAVCTIYGDRHYYSFDGLEYDYISDCQVFLIKKQSGFFLENKSTYQLWKAGYYIVVYFPEKDITILWDRKTTIHIKVGPQWKNKLSGLCGNFDKCTSNDMTTSNNLEVRNARVFGDSWALGQCESPDETIKPCEAHQNKFPYAKKECSILYSDIFASCRNVIDVTSFAKNCHEDTCNCNLGGDCECLCTSIAAYAYKCCQEGISIHWRSSTVCSLDCEYYNEGLGEGPYMLASYGQSGLVLGANMTSRSVFCLPRSSVHTSLFFYFMITPGLFKEKVSSLALVSLESAERPNYFLYVHDNDTLSLELWEANSAFHRRATFFHHQGLWIPGYSAFELYSKKGFFIIFTDSSVKASKYDDSEEFKHSSSFSIEEIQAAVPYRKMCEWRYEPCATPCFKTCSDPEALACKFLPPVEGCLPYCPKNMILDEVTLKCVYPRDCIPVIPTEPTLMPPAKPTVPMFTVWEMITPSDITVFDMLTPTTGLECEPQKFDPVYDCSQYICLNMEWQLYNWSLNCPKDVEMPDCGFRGRPVQVNSDICCPEWECPCRCSMLSELSIITFDGNNAALYSMASYILVRIPGEIIVAHIEKCSMNQNGNSLKKLAPSGRISGLCFKKLNVTTPIHKIIVNRLARKVEVDSIVVPLPFSSQELSIEDSGSMYVITTPAGLIIKWSHLTGIIDIHFGFRFNLSSYTEGLCGICNEDPDDDLRMQNGTIITNMEDIGLFIESWEIEKSFEVTMRRPVRNCTEHDCSQCIDLLNRRIFIPCHDKVSPEDFCEKMWINYTYFWNYECDALSAYVALCNKFDICIQWRTPDYCSLSCPEGKEYQPCVRPCEARTCLNQWFYGHTSCLNLREDCVCKVGTILHRPHSAQCIPEKECACTDSEDQPRTAGEIWNGGIDECTLYKCLENGSIIPIEPDCDEEPTPVCEREAEVVMGIIDKWTCCSKEVCGCDTTLCETSIPTCTNSQKLIVGHSPLSCCPQYKCECDPLKCPSISTPECREDQFMIQVRQEEPCCFSPFCVCESCTKPVPLCHDGEFLTVDLNSTHFCCPQYYCVCEPNLCPMPLLNCAEDMNLVKENVSGQCCPTWHCECNCENLIMPTCEVGEFTAIDHNFQSDCGCIQYLCEKDDVCVFQEVSVLNPGQSMIKYLEEDFCYAIECLEEKDNHTGFHTLNFTLVNCSKKCDVHQVYTPSPSDYGCCGTCKNVSCKFHMENGTSVVYAVGSTWHYNCTTYECVKTDEGAIILNYTMVCPPFNETECKMNEGIVKLYNEGCCKICKREERICQKVIIKSVIRKQDCMSQSPINVASCDGKCPSATIYNINIESHLRFCKCCRENGVRNLSVPLYCSGNGTEIMYTLQEPIDCTCQWN

SEQ ID NO: 9876 - protein, 101 aa, Homo Sapiens
NFTLVNCSKKCDVHQVYTPSPSDYGCCGTCKNVSCKFHMENGTSVVYAVGSTWHYNCTTYECVKTDEGAIILNYTMVCPPFNETECKMVCTLLYLRKFIII

SEQ ID NO: 9877 - protein, 752 aa, Homo Sapiens
  misc_feature (1)..(1): Xaa can be any naturally occurring amino acid
XEIIVAHIEKCSMNQNGNSLKKLAPSGRISGLCFKKLNVTTPIHKIIVNRLARKVEVDSIVVPLPFSSQELSIEDSGSMYVITTPAGLIIKWSHLTGIIDIHFGFRFNLSSYTEGLCGICNEDPDDDLRMQNGTIITNMEDIGLFIESWEIEKSFEVTMRRPVRNCTEHDCSQCIDLLNRRIFIPCHDKVSPEDFCEKMWINYTYFWNYECDALSAYVALCNKFDICIQWRTPDYCSLSCPEGKEYQPCVRPCEARTCLNQWFYGHTSCLNLREDCVCKVGTILHRPHSAQCIPEKECACTDSEDQPRTAGEIWNGGIDECTLYKCLENGSIIPIEPDCDEEPTPVCEREAEVVMGIIDKWTCCSKEVCGCDTTLCETSIPTCTNSQKLIVGHSPLSCCPQYKCECDPLKCPSISTPECREDQFMIQVRQEEPCCFSPFCVCESCTKPVPLCHDGEFLTVDLNSTHFCCPQYYCVCEPNLCPMPLLNCAEDMNLVKENVSGQCCPTWHCEKDDVCVFQEVSVLNPGQSMIKYLEEDFCYAIECLEEKDNHTGFHTLNFTLVNCSKKCDVHQVYTPSPSDYGCCGTCKNVSCKFHMENGTSVVYAVGSTWHYNCTTYECVKTDEGAIILNYTMVCPPFNETECKMNEGIVKLYNEGCCKICKREERICQKVIIKSVIRKQDCMSQSPINVASCDGKCPSATIYNINIESHLRFCKCCRENGVRNLSVPLYCSGNGTEIMYTLQEPIDCTCQWN

SEQ ID NO: 9878 - protein, 166 aa, Homo Sapiens
  misc_feature (1)..(1): Xaa can be any naturally occurring amino acid
XHSPLSCCPQYKCECDPLKCPSISTPECREDQFMIQVRQEEPCCFSPFCVCESCTKPVPLCHDGEFLTVDLNSTHFCCPQYYCVCEPNLCPMPLLNCAEDMNLVKENVSGQCCPTWHCECNCENLIMPTCEVQPCADADIRTLGCLGRADQEHFHEAKFLRENLLQ

SEQ ID NO: 9879 - protein, 477 aa, Homo Sapiens
MWMFSWLCAILIILAIAGMNTIAKTTPHTKFTKKSEEREMPKGLKPSSGPPPEEEETLFTEMAEMAEPITKPSALDSVFGTATLSPFENFTLDPADFFLNCCDCCSPVPGQKGEPGETGQPGPKGEAGNLGIPGPPGVVGPQGPRGYKGEKGLKGERGDQGVPGYPGKPGAQGEPGPKGDKGNIGLGGVKGQKGSKGDTCGNCTKGEKGDQGAMGSPGLHGGPGAKGEKGEMGEKGEMGDKGCCGDSGERGGKGQKGEGGMKGEKGSKGDSGMEGKSGRNGLPGAKGDPGIKGEKGELGPPGLLGPTGPKGDIGNKGVRGPTGKKGSRGFKGSKGELARVPRSAFSAGLSKPFPPPNIPIKFEKILYNDQGNYSPVTGKFNCSIPGTYVFSYHITVRGRPARISLVAQNKKQFKSRETLYGQEIDQASLLVILKLSAGDQVWLEVSKDWNGVYVSAEDDSIFTGFLLYPEETSGISP

SEQ ID NO: 9880 - protein, 128 aa, Homo Sapiens
MARILLLFLPGLVAVCAVHGIFMDRLASKKLCADDECVYTISLASAQEDYNAPDCRFINVKKGQQIYVYSKLVKENGAGEFWAGSVYGDGQDEMGVVGYFPRNLVKEQRVYQEATKEVPTTDIDFFCE

SEQ ID NO: 9881 - protein, 89 aa, Homo Sapiens
MQACMVPGLALCLLLGPLAGAKPVQEEGDPYAELPAMPYWPFSTSDFWNYVQHFQALGAYPQIEDMARTFFAHFPLGSTLGFHVPYQED

SEQ ID NO: 9882 - protein, 89 aa, Homo Sapiens; identical to SEQ ID NO: 9881

SEQ ID NO: 9883 - protein, 1134 aa, Homo Sapiens
MGLLASAGLLLLLVIGHPRSLGLKCGIRMVNMKSKEPAVGSRFFSRISSWRNSTVTGHPWQVSLKSDEHHFCGGSLIQEDRVVTAAHCLDSLSEKQLKNITVTSGEYSLFQKDKQEQNIPVSKIITHPEYNSREYMSPDIALLYLKHKVKFGNAVQPICLPDSDDKVEPGILCLSSGWGKISKTSEYSNVLQEMELPIMDDRACNTVLKSMNLPPLGRTMLCAGFPDWGMDACQGDSGGPLVCRRGGGIWILAGITSWVAGCAGGSVPVRNNHVKASLGIFSKVSELMDFITQNLFTGLDRGQPLSKVGSRYITKALSSVQEVNGSQRGKGILDMEKQVGCDHDYVSLRSSSGVLFNQRSLMEDDGKQNKRVCGKILPSPLLAETSEAMVPFVSDTEDSGSGFELTVTAVQKSEAGSGCGSLAILVEEGTNHSAKYPDLYPSNTRCHWFICAPEKHIIKLTFEDFAVKFSPNCIYDAVVIYGDSEEKHKLAKLCGMLTITSIFSSSNMTVIYFKSDGKNRLQGFKARFTILPSESLNKFEPKLPPQNNPVSTVKAILHDVCGIPPFSPQWLSRRIAGGEEACPHCWPWQVGLRFLGDYQCGGAIINPVWILTAAHCVQLKNNPLSWTIIAGDHDRNLKESTEQVRRAKHIIVHEDFNTLSYDSDIALIQLSSPLEYNSVVRPVCLPHSAEPLFSSEICAVTGWGSISADGGLASRLQQIQVHVLEREVCEHTYYSAHPGGITEKMICAGFAASGEKDFCQGDSGGPLVCRHENGPFVLYGIVSWGAGCVQPWKPGVFARVMIFLDWIQSKINGPASLQTNNKCKTLKQQLPPPTPSPDSASWPGCCSEAELEKPRGFFPTPRYLLDYRGRLECSWVLRVSASSMAKFTIEYLSLLGSPVCQDSVLIIYEERHSKRKTAGGLHGRRLYSMTFMSPGPLVRVTFHALVRGAFGISYIVLKVLGPKDSKITRLSQSSNREHLVPCEDVLLTKPEGIMQIPRNSHRTTMGCQWRLVAPLNHIIQLNIINFPMKPTTFVCHGHLRVYEGFGPGKKLIASFAGTLAMILTKDILKREKLNFINTYIMHIWENSVYDNVRSVGKRKQKKFASNLSYSMEAEKSRIQVPADLVPAKGSLSGS

SEQ ID NO: 9884 - protein, 80 aa, Homo Sapiens
REHLVPCEDVLLTKPEGIMQIPRNSHRTTMGCQWRLVAPLNHIIQLNIINFPMKPTTFVCHGHLRVYEGFGPGKKLIGEC

SEQ ID NO: 9885 - protein, 121 aa, Homo Sapiens
  misc_feature (1)..(1): Xaa can be any naturally occurring amino acid
XKITRLSQSSNREHLVPCEDVLLTKPEGIMQIPRNSHRTTMGCQWRLVAPLNHIIQLNIINFPMKPTTFVCHGHLRVYEGFGPGKKLIAHLHGSKKEFILISSAAYLTVHFKTDESERKRF

SEQ ID NO: 9886 - protein, 565 aa, Homo Sapiens
MLISRNKLILLLGIVFFERGKSATLSLPKAPSCGQSLVKVQPWNYFNIFSRILGGSQVEKGSYPWQVSLKQRQKHICGGSIVSPQWVITAAHCIANRNIVSTLNVTAGEYDLSQTDPGEQTLTIETVIIHPHFSTKKPMDYDIALLKMAGAFQFGHFVGPICLPELREQFEAGFICTTAGWGRLTEGGVLSQVLQEVNLPILTWEECVAALLTLKRPISGKTFLCTGFPDGGRDACQGDSGGSLMCRNKKGAWTLAGVTSWGLGCGRGWRNNVRKSDQGSPGIFTDISKVLPWIHEHIQTGNRRKSSRAWCSEQDVIVSGAEGKLHFPESLHLYYESKQRCVWTLLVPEEMHVLLSFSHLDVESCHHSYLSMYSLEDRPIGKFCGESLPSSILIGSNSLRLKFVSDATDNAAGFNLTYKALKPNYIPDSGCSYLTVLFEEGLIQSLNYPENYSDKANCDWIFQASKHHLIKLSFQSLEIEESGDCTSDYVTVHSDVERKKEIARLCGYDVPTPVLSPSSIMLISFQSDENGTCRGFQATVSFIPKAVYPDLNISISEDESMFLET

SEQ ID NO: 9887 - protein, 565 aa, Homo Sapiens; identical to SEQ ID NO: 9886

SEQ ID NO: 9888 - protein, 678 aa, Homo Sapiens
MWKLLLWVGLVLVLKHHDGAAHKLVCYFTNWAHSRPGPASILPHDLDPFLCTHLIFAFASMNNNQIVAKDLQDEKILYPEFNKLKERNRELKTLLSIGGWNFGTSRFTTMLSTFANREKFIASVISLLRTHDFDGLDLFFLYPGLRGSPMHDRWTFLFLIEELLFAFRKEALLTMRPRLLLSAAVSGVPHIVQTSYDVRFLGRLLDFINVLSYDLHGSWERFTGHNSPLFSLPEDPKSSAYAMNYWRKLGAPSEKLIMGIPTYGRTFRLLKASKNGLQARAIGPASPGKYTKQEGFLAYFEICSFVWGAKKHWIDYQYVPYANKGKEWVGYDNAISFSYKAWFIRREHFGGAMVWTLDMDDVRGTFCGTGPFPLVYVLNDILVRAEFSSTSLPQFWLSSAVNSSSTDPERLAVTTAWTTDSKILPPGGEAGVTEIHGKCENMTITPRGTTVTPTKETVSLGKHTVALGEKTEITGAMTMTSVGHQSMTPGEKALTPVGHQSVTTGQKTLTSVGYQSVTPGEKTLTPVGHQSVTPVSHQSVSPGGTTMTPVHFQTETLRQNTVAPRRKAVAREKVTVPSRNISVTPEGQTMPLRGENLTSEVGTHPRMGNLGLQMEAENRMMLSSSPVIQLPEQTPLAFDNRFVPIYGNHSSVNSVTPQTSPLSLKKEIPENSAVDEEA

SEQ ID NO: 9889 - protein, 520 aa, Homo Sapiens
MAALKLLSSGLRLCASARGSGATWYKGCVCSFSTSAHRHTKFYTDPVEAVKDIPDGATVLVGGFGLCGIPENLIDALLKTGVKGLTAVSNNAGVDNFGLGLLLRSKQIKRMVSSYVGENAEFERQYLSGELEVELTPQGTLAERIRAGGAGVPAFYTPTGYGTLVQEGGSPIKYNKDGSVAIASKPREVREFNGQHFILEEAITGDFALVKAWKADRAGNVIFRKSARNFNLPMCKAAETTVVEVEEIVDIGAFAPEDIHIPQIYVHRLIKGEKYEKRIERLSIRKEGDGEAKSAKPGDDVRERIIKRAALEFEDGMYANLGIGIPLLASNFISPNITVHLQSENGVLGLGPYPRQHEADADLINAGKETVTILPGASFFSSDESFAMIRGGHVDLTMLGAMQVSKYGDLANWMIPGKMVKGMGGAMDLVSSAKTKVVVTMEHSAKGNAHKIMEKCTLPLTGKQCVNRIITEKAVFDVDKKKGLTLIELWEGLTVDDVQKSTGCDFAVSPKLMPMQQIAN

SEQ ID NO: 9890 - protein, 123 aa, Homo Sapiens
MLGAMQVSKYGDLANWMIPGKMVKGMGGAMDLVSSAKTKVVVTMEHSAKGNAHKIMEKCTLPLTGKQCVNRIITEKAVFDVDKKKGLTLIELWEGLTVDDVQKSTGCDFAVSPKLMPMQQIAN

SEQ ID NO: 9891 - protein, 123 aa, Homo Sapiens; identical to SEQ ID NO: 9890

SEQ ID NO: 9892 - protein, 334 aa, Homo Sapiens
MMVREFNGQHFILEEAITGDFALVKAWKADRAGNVIFRKSARNFNLPMCKAAETTVVEVEEIVDIGAFAPEDIHIPQIYVHRLIKGEKYEKRIERLSIRKEGDGEAKSAKPGDDVRERIIKRAALEFEDGMYANLGIGIPLLASNFISPNITVHLQSENGVLGLGPYPRQHEADADLINAGKETVTILPGASFFSSDESFAMIRGGHVDLTMLGAMQVSKYGDLANWMIPGKMVKGMGGAMDLVSSAKTKVVVTMEHSAKGNAHKIMEKCTLPLTGKQCVNRIITEKAVFDVDKKKGLTLIELWEGLTVDDVQKSTGCDFAVSPKLMPMQQIAN

SEQ ID NO: 9893 - protein, 517 aa, Homo Sapiens
MAALRLLASVLGRGVPAGGSGLALSQGCARCFATSPRLRAKFYADPVEMVKDISDGATVMIGGFGLCGIPENLIAALLRTRVKDLQVVSSNVGVEDFGLGLLLAARQVRRIVCSYVGENTLCESQYLAGELELELTPQGTLAERIRAGGAGVPAFYTPTGYGTLVQEGGAPIRYTPDGHLALMSQPREVREFNGDHFLLERAIRADFALVKGWKADRAGNVVFRRSARNFNVPMCKAADVTAVEVEEIVEVGAFPPEDIHVPNIYVDRVIKGQKYEKRIERLTILKEEDGDAGKEEDARTRIIRRAALEFEDGMYANLGIGIPLLASNFISPSMTVHLHSENGILGLGPFPTEDEVDADLINAGKQTVTVLPGGCFFASDDSFAMIRGGHIQLTMLGAMQVSKYGDLANWMIPGKKVKGMGGAMDLVSSQKTRVVVTMQHCTKDNTPKIMEKCTMPLTGKRCVDRIITEKAVFDVHRKKELTLRELWEGLTVDDIKKSTGCAFAVSPNLRPMQQVAP

SEQ ID NO: 9894 - protein, 56 aa, Homo Sapiens
MACAAVMIPGLLRCSVGAIRIEAASLRLTLSTLRHLTLTRLCQQLRCVELPVSHRQ

SEQ ID NO: 9895 - protein, 312 aa, Homo Sapiens
MACAAVMIPGLLRCSVGAIRIEAASLRLTLSTLRHLTLTSIMKSKRKTDHMERTASVLRREIVSAAKVCGAASESPSVKSLRLLVADQDFSFKAGQWVDFFIPGVSVVGGFSICSSPRLLEQERVIELAVKYTNHPPALWVHNTCTLDCEVAVRVGGEFFFDPQPADASRNLVLIAGGVGINPLLSILRHAADLLREQANKRNGYEIGTIKLFYSAKNTSELLFKKNILDLVNEFPEKIACSLHVTKQTTQINAELKPYITEGRITEKEIRDHISKETLFYICGPPPMTDFFSKQLENNHVPKEHICFEKWW

SEQ ID NO: 9896 - protein, 312 aa, Homo Sapiens; identical to SEQ ID NO: 9895

SEQ ID NO: 9897 - protein, 311 aa, Homo Sapiens
MACAAVMIPGLLRCSVGAIRIEAASLRLTLSTLRHLTLTSIMKSKRKTDHMERTASVLRREIVSAAKVCGAASESPSVKSLRLLVADQDFSFKAGQWVDFFIPGVSVVGGFSICSSPRLLEQERVIELAVKYTNHPPALWVHNTCTLDCEVAVRVGGEFFFDPQPADASRNLVLIAGGVGINPLLSILRHAADLLREQANKRNGYEIGTIKLFYSAKNTSELLFKKNILDLVNEFPEKIACSLHVTKQTTQINAELKPYITGRITEKEIRDHISKETLFYICGPPPMTDFFSKQLENNHVPKEHICFEKWW

SEQ ID NO: 9898 - protein, 71 aa, Homo Sapiens
MACAAVMIPGLLRCSVGAIRIEAASLRLTLSTLRHLTLTSIMKSKRKTDHMERTASVLRRESNLFHQGRKH

SEQ ID NO: 9899 - protein, 330 aa, Homo Sapiens
MTPKISWTSKFSVCPESAMACAAVMIPGLLRCSVGAIRIEAASLRLTLSTLRHLTLTSIMKSKRKTDHMERTASVLRREIVSAAKVCGAASESPSVKSLRLLVADQDFSFKAGQWVDFFIPGVSVVGGFSICSSPRLLEQERVIELAVKYTNHPPALWVHNTCTLDCEVAVRVGGEFFFDPQPADASRNLVLIAGGVGINPLLSILRHAADLLREQANKRNGYEIGTIKLFYSAKNTSELLFKKNILDLVNEFPEKIACSLHVTKQTTQINAELKPYITEGRITEKEIRDHISKETLFYICGPPPMTDFFSKQLENNHVPKEHICFEKWW

SEQ ID NO: 9900 - protein, 330 aa, Homo Sapiens; identical to SEQ ID NO: 9899

SEQ ID NO: 9901 - protein, 125 aa, Homo Sapiens
MAGPSLACCLLGLLALTSACYIQNCPLGGKRAAPDLDVRKCLPCGPGGKGRCFGPNICCAEELGCFVGTAEALRCQEENYLPSPCQSGQKACGSGGRCAVLGLCCSPDGCHADPACDAEATFSQR

SEQ ID NO: 9902 - protein, 207 aa, Homo Sapiens
MAVRALKLLTTLLAVVAAASQAEVESEAGWGMVTPDLLFAEGTAAYARGDWPGVVLSMERALRSRAALRALRLRCRTQCAADFPWELDPDWSPSPAQASGAAALRDLSFFGGLLRRAACLRRCLGPPAAHSLSEEMELEFRKRSPYNYLQVAYFKDLETQPHMQEFRLGVRLYSEEQPQEAVPHLEAALQEYFVAYEECRALCEGPY

SEQ ID NO: 9903 - protein, 804 aa, Homo Sapiens
MAVRALKLLTTLLAVVAAASQAEVESEAGWGMVTPDLLFAEGTAAYARGDWPGVVLSMERALRSRAALRALRLRCRTQCAADFPWELDPDWSPSPAQASGAAALRDLSFFGGLLRRAACLRRCLGPPAAHSLSEEMELEFRKRSPYNYLQVAYFKINKLEKAVAAAHTFFVGNPEHMEMQQNLDYYQTMSGVKEADFKDLETQPHMQEFRLGVRLYSEEQPQEAVPHLEAALQEYFVAYEECRALCEGPYDYDGYNYLEYNADLFQAITDHYIQVLNCKQNCVTELASHPSREKPFEDFLPSHYNYLQFAYYNIGNYTQAVECAKTYLLFFPNDEVMNQNLAYYAAMLGEEHTRSIGPRESAKEYRQRSLLEKELLFFAYDVFGIPFVDPDSWTPEEVIPKRLQEKQKSERETAVRISQEIGNLMKEIETLVEEKTKESLDVSRLTREGGPLLYEGISLTMNSKLLNGSQRVVMDGVISDHECQELQRLTNVAATSGDGYRGQTSPHTPNEKFYGVTVFKALKLGQEGKVPLQSAHLYYNVTEKVRRIMESYFRLDTPLYFSYSHLVCRTAIEEVQAERKDDSHPVHVDNCILNAETLVCVKEPPAYTFRDYSAILYLNGDFDGGNFYFTELDAKTVTAEVQPQCGRAVGFSSGTENPHGVKAVTRGQRCAIALWFTLDPRHSERVRAARAGESSWCCGDPFPERPWFAFLFPKSHCQWLRHERSTWDTSSNALSLWSHCLVLPGPAVNGIQVGKEVKTGSDAEFLVPSLGPTSAVLFQRVGPAGKEMSLGPLRNLPCPLGSSS

SEQ ID NO: 9904 - protein, 736 aa, Homo Sapiens
MAVRALKLLTTLLAVVAAASQAEVESEAGWGMVTPDLLFAEGTAAYARGDWPGVVLSMERALRSRAALRALRLRCRTQCAADFPWELDPDWSPSPAQASGAAALRDLSFFGGLLRRAACLRRCLGPPAAHSLSEEMELEFRKRSPYNYLQVAYFKINKLEKAVAAAHTFFVGNPEHMEMQQNLDYYQTMSGVKEADFKDLETQPHMQEFRLGVRLYSEEQPQEAVPHLEAALQEYFVAYEECRALCEGPYDYDGYNYLEYNADLFQAITDHYIQVLNCKQNCVTELASHPSREKPFEDFLPSHYNYLQFAYYNIGNYTQAVECAKTYLLFFPNDEVMNQNLAYYAAMLGEEHTRSIGPRESAKEYRQRSLLEKELLFFAYDVFGIPFVDPDSWTPEEVIPKRLQEKQKSERETAVRISQEIGNLMKEIETLVEEKTKESLDVSRLTREGGPLLYEGISLTMNSKLLNGSQRVVMDGVISDHECQELQRLTNVAATSGDGYRGQTSPHTPNEKFYGVTVFKALKLGQEGKVPLQSAHLYYNVTEKVRRIMESYFRLDTPLYFSYSHLVCRTAIEEVQAERKDDSHPVHVDNCILNAETLVCVKEPPAYTFRDYSAILYLNGDFDGGNFYFTELDAKTVTAEVQPQCGRAVGFSSGTENPHGVKAVTRGQRCAIALWFTLDPRHSERDRVQADDLVKMLFSPEEMDLSQEQPLDAQQGPPEPAQESLSGSESKPKDEL

SEQ ID NO: 9905 - protein, 697 aa, Homo Sapiens
MAVRALKLLTTLLAVVAAASQAEVESEAGWGMVTPDLLFAEGTAAYARGDWPGVVLSMERALRSRAALRALRLRCRTQCAADFPWELDPDWSPSPAQASGAAALRDLSFFGGLLRRAACLRRCLGPPAAHSLSEEMELEFRKRSPYNYLQVAYFKINKLEKAVAAAHTFFVGNPEHMEMQQNLDYYQTMSGVKEADFKDLETQPHMQEFRLGVRLYSEEQPQEAVPHLEAALQEYFVAYEECRALCEGPYDYDGYNYLEYNADLFQAITDHYIQVLNCKQNCVTELASHPSREKPFEDFLPSHYNYLQFAYYNIGNYTQAVECAKTYLLFFPNDEVMNQNLAYYAAMLGEEHTRSIGPRESAKEYRQRSLLEKELLFFAYDVFGIPFVDPDSWTPEEVIPKRLQEKQKSERETAVRISQEIGNLMKEIETLVEEKTKESLDVSRLTREGGPLLYEGISLTMNSKLLNGSQRVVMDGVISDHECQELQRLTNVAATSGDGYRGQTSPHTPNEKFYGVTVFKALKLGQEGKVPLQSAHLYYNVTEKVRRIMESYFRLDTPLYFSYSHLVCRTAIEEVQAERKDDSHPVHVDNCILNAETLVCVKEPPAYTFRDYSAILYLNGDFDGGNFYFTELDAKTVTAEVQPQCGRAVGFSSGTENPHGVKAVTRGQRCAIALWFTLDPRHSERVRAARAGQGAGR

SEQ ID NO: 9906 - protein, 222 aa, Homo Sapiens
  misc_feature (1)..(1): Xaa can be any naturally occurring amino acid
XTPEEVIPKRLQEKQKSERETAVRISQEIGNLMKEIETLVEEKTKESLDVSRLTREGGPLLYEGISLTMNSKLLNGSQRVVMDGVISDHECQELQRLTNVAATSGDGYRGQTSPHTPNEKFYGVTVFKALKFHVAGEASQSWWKAKRSKSHLTWMAAGKERTSAAGARRQSSSAECPPVLQRDGEGAAHHGVLLPPGYAPLLFLLSSGVPHCHRRGPGREEG

SEQ ID NO: 9907 - protein, 134 aa, Homo Sapiens
MEMQQNIENYRATAGVEALQLVDREAKPHMESYNAGVKHYEADDFEMAIRHFEQALREYFVEDTECRTLCEGPQRFEEYEYLGYKAGLYEAIADHYMQVLVCQHECVRELATRPGRLSPIENFLPLHYDYLQFA

SEQ ID NO: 9908 - protein, 137 aa, Homo Sapiens
MEMQQNIENYRATAGVEALQLVDREAKPHMESYNAGVKHYEADDFEMAIRHFEQALREYFVEDTECRTLCEGPQRFEEYEYLGYKAGLYEAIADHYMQVLVCQHECVRELATRPGRLSPIENFLPLHYDYLQFAYYR

SEQ ID NO: 9909 - protein, 527 aa, Homo Sapiens
MEMQQNIENYRATAGVEALQLVDREAKPHMESYNAGVKHYEADDFEMAIRHFEQALREYFVEDTECRTLCEGPQRFEEYEYLGYKAGLYEAIADHYMQVLVCQHECVRELATRPGRLSPIENFLPLHYDYLQFAYYRVGEYVKALECAKAYLLCHPDDEDVLDNVDYYESLLDDSIDPASIEAREDLTMFVKRHKLESELIKSAAEGLGFSYTEPNYWIRYGGRQDENRVPSGVNVEGAEVHGFSMGKKLSPKIDRDLREGGPLLYENITFVYNSEQLNGTQRVLLDNVLSEEQCRELHSVASGIMLVGDGYRGKTSPHTPNEKFEGATVLKALKSGYEGRVPLKSARLFYDISEKARRIVESYFMLNSTLYFSYTHMVCRTALSGQQDRRNDLSHPIHADNCLLDPEANECWKEPPAYTFRDYSALLYMNDDFEGGEFIFTEMDAKTVTASIKPKCGRMISFSSGGENPHGVKAVTKGKRCAVALWFTLDPLYRELERIQADEVIAILDQEQQGKHELNINPKDEL

SEQ ID NO: 9910 - protein, 708 aa, Homo Sapiens
MRERIWAPPLLLLLPLLLPPPLWGGPPDSPRRELELEPGPLQPFDLLYASGAAAYYSGDYERAVRDLEAALRSHRRLREIRTRCARHCAARHPLPPPPPGEGPGAELPLFRSLLGRARCYRSCETQRLGGPASRHRVSEDVRSDFQRRVPYNYLQRAYIKLNQLEKAVEAAHTFFVANPEHMEMQQNIENYRATAGVEALQLVDREAKPHMESYNAGVKHYEADDFEMAIRHFEQALREYFVEDTECRTLCEGPQRFEEYEYLGYKAGLYEAIADHYMQVLVCQHECVRELATRPGRLSPIENFLPLHYDYLQFAYYRVGEYVKALECAKAYLLCHPDDEDVLDNVDYYESLLDDSIDPASIEAREDLTMFVKRHKLESELIKSAAEGLGFSYTEPNYWIRYGGRQDENRVPSGVNVEGAEVHGFSMGKKLSPKIDRDLREGGPLLYENITFVYNSEQLNGTQRVLLDNVLSEEQCRELHSVASGIMLVGDGYRGKTSPHTPNEKFEGATVLKALKSGYEGRVPLKSARLFYDISEKARRIVESYFMLNSTLYFSYTHMVCRTALSGQQDRRNDLSHPIHADNCLLDPEANECWKEPPAYTFRDYSALLYMNDDFEGGEFIFTEMDAKTVTASIKPKCGRMISFSSGGENPHGVKAVTKGKRCAVALWFTLDPLYRELERIQADEVIAILDQEQQGKHELNINPKDEL

SEQ ID NO: 9911 - protein, 736 aa, Homo Sapiens
MLRLLRPLLLLLLLPPPGSPEPPGLTQLSPGAPPQAPDLLYADGLRAYAAGAWAPAVALLREALRSQAALGRVRLDCGASCAADPGAALPAVLLGAPEPDSGPGPTQGSWERQLLRAALRRADCLTQCAARRLGPGGAARLRVGSALRDAFRRREPYNYLQRAYYQLKKLDLAAAAAHTFFVANPMHLQMREDMAKYRRMSGVRPQSFRDLETPPHWAAYDTGLELLGRQEAGLALPRLEEALQGSLAQMESCRADCEGPEEQQGAEEEEDGAASQGGLYEAIAGHWIQVLQCRQRCVGETATRPGRSFPVPDFLPNQLRRLHEAHAQVGNLSQAIENVLSVLLFYPEDEAAKRALNQYQAQLGEPRPGLGPREDIQRFILRSLGEKRQLYYAMEHLGTSFKDPDPWTPAALIPEALREKLREDQEKRPWDHEPVKPKPLTYWKDVLLLEGVTLTQDSRQLNGSERAVLDGLLTPAECGVLLQLAKDAAGAGARSGYRGRRSPHTPHERFEGLTVLKAAQLARAGTVGSQGAKLLLEVSERVRTLTQAYFSPERPLHLSFTHLVCRSAIEGEQEQRMDLSHPVHADNCVLDPDTGECWREPPAYTYRDYSGLLYLNDDFQGGDLFFTEPNALTVTARVRPRCGRLVAFSSGVENPHGVWAVTRGRRCALALWHTWAPEHREQEWIEAKELLQESQEEEEEEEEEMPSKDPSPEPPSRRHQRVQDKTGRAPRVREEL

SEQ ID NO: 9912 - protein, 85 aa, Homo Sapiens
MARVAWGLLWLLLGSAGAQYEKYSFRGFPPEDLMPLAAAYGHALEQYEGESWRESARYLEAALRLHRLLRDSEAFCHANCSGPAP

SEQ ID NO: 9913 - protein, 437 aa, Homo Sapiens
MARVAWGLLWLLLGSAGAQYEKYSFRGFPPEDLMPLAAAYGHALEQYEGESWRESARYLEAALRLHRLLRDSEAFCHANCSGPAPAAKPDPDGGRADEWACELRLFGRVLERAACLRRCKRTLPAFQVPYPPRQLLRDFQSRLPYQYLHYALFKANRLEKAVAAAYTFLQRNPKHELTAKYLNYYQGMLDVADESLTDLEAQPYEAVFLRAVKLYNSGDFRSSTEDMERALSEYLAVFARCLAGCEGAHEQVDFKDFYPAIADLFAESLQCKVDCEANLTPNVGGYFVDKFVATMYHYLQFAYYKLNDVRQAARSAASYMLFDPKDSVMQQNLVYYRFHRARWGLEEEDFQPREEAMLYHNQTAELRELLEFTHMYLQSDDEMELEETEPPLEPEDALSDAEFEGEGDYEEGMYADWWQEPDAKGDEAEAEPEPELA

SEQ ID NO: 9914 - protein, 437 aa, Homo Sapiens; identical to SEQ ID NO: 9913

SEQ ID NO: 9915 - protein, 221 aa, Homo Sapiens
  misc_feature (1)..(1): Xaa can be any naturally occurring amino acid
XKRTLPAFQVPYPPRQLLRDFQSRLPYQYLHYALFKANRLEKAVAAAYTFLQRNPKHELTAKYLNYYQGMLDVADESLTDLEAQPYEAVFLRAVKLYNSGDFRSSTEDMERALSEYLAVFARCLAGCEGAHEQVDFKDFYPAIAVNDVRQAARSAASYMLFDPKDSVMQQNLVYYRFHRARWGLEEEDFQPREEAMLYHNQTAELRELLEFTHMYLQSDDE

SEQ ID NO: 9916 - protein, 73 aa, Homo Sapiens
  misc_feature (1)..(1): Xaa can be any naturally occurring amino acid
XLRELLEFTHMYLQSDDEMELEETEPPLEPEDALSDAEFEGEGDYEEGMYADWWQEPDAKGDEAEAEPEPELA

SEQ ID NO: 9917 - protein, 534 aa, Homo Sapiens
MIWYILIIGILLPQSLAHPGFFTSIGQMTDLIHTEKDLVTSLKDYIKAEEDKLEQIKKWAEKLDRLTSTATKDPEGFVGHPVNAFKLMKRLNTEWSELENLVLKDMSDGFISNLTIQRQYFPNDEDQVGAAKALLRLQDTYNLDTDTISKGNLPGVKHKSFLTAEDCFELGKVAYTEADYYHTELWMEQALRQLDEGEISTIDKVSVLDYLSYAVYQQGDLDKALLLTKKLLELDPEHQRANGNLKYFEYIMAKEKDVNKSASDDQSDQKTTPKKKGVAVDYLPERQKYEMLCRGEGIKMTPRRQKKLFCRYHDGNRNPKFILAPAKQEDEWDKPRIIRFHDIISDAEIEIVKDLAKPRLSRATVHDPETGKLTTAQYRVSKSAWLSGYENPVVSRINMRIQDLTGLDVSTAEELQVANYGVGGQYEPHFDFARKDEPDAFKELGTGNRIATWLFYMSDVSAGGATVFPEVGASVWPKKGTAVFWYNLFASGEGDYSTRHAACPVLVGNKWVSNKWLHERGQEFRRPCTLSELE

SEQ ID NO: 9918 - protein, 534 aa, Homo Sapiens
MIWYILIIGILLPQSLAHPGFFTSIGQMTDLIHTEKDLVTSLKDYIKAEEDKLEQIKKWAEKLDRLTSTATKDPEGFVGHPVNAFKLMKRLNTEWSELENLVLKDMSDGFISNLTIQRQYFPNDEDQVGAAKALLRLQDTYNLDTDTISKGNLPGVKHKSFLTAEDCFELGKVAYTEADYYHTELWMEQALRQLDEGEISTIDKVSVLDYLSYAVYQQGDLDKALLLTKKLLELDPEHQRANGNLKYFEYIMAKEKDVNKSASDDQSDQKTTPKKKGVAVDYLPERQKYEMLCRGEGIKMTPRRQKKLFCRYHDGNRNPKFILAPAKQEDEWDKPRIIRFHDIISDAEIEIVKDLAKPRLRRATISNPITGDLETVHYRISKSAWLSGYENPVVSRINMRIQDLTGLDVSTAEELQVANYGVGGQYEPHFDFARKDEPDAFKELGTGNRIATWLFYMSDVSAGGATVFPEVGASVWPKKGTAVFWYNLFASGEGDYSTRHAACPVLVGNKWVSNKWLHERGQEFRRPCTLSELE

SEQ ID NO: 9919 - protein, 534 aa, Homo Sapiens; identical to SEQ ID NO: 9917

SEQ ID NO: 9920 - protein, 516 aa, Homo Sapiens
MIWYILIIGILLPQSLAHPGFFTSIGQMTDLIHTEKDLVTSLKDYIKAEEDKLEQIKKWAEKLDRLTSTATKDPEGFVGHPVNAFKLMKRLNTEWSELENLVLKDMSDGFISNLTIQRQYFPNDEDQVGAAKALLRLQDTYNLDTDTISKGNLPGVKHKSFLTAEDCFELGKVAYTEADYYHTELWMEQALRQLDEGEISTIDKVSVLDYLSYAVYQQGDLDKALLLTKKLLELDPEHQRANGNLKYFEYIMAKEKDVNKSASDDQSDQKTTPKKKGVAVDYLPERQKYEMLCRGEGIKMTPRRQKKLFCRYHDGNRNPKFILAPAKQEDEWDKPRIIRFHDIISDAEIEIVKDLAKPRLSRATVHDPETGKLTTAQYRVSKSAWLSGYENPVVSRINMRIQDLTGLDVSTAEELQKDEPDAFKELGTGNRIATWLFYMSDVSAGGATVFPEVGASVWPKKGTAVFWYNLFASGEGDYSTRHAACPVLVGNKWVSNKWLHERGQEFRRPCTLSELE

SEQ ID NO: 9921 - protein, 534 aa, Homo Sapiens; identical to SEQ ID NO: 9918

SEQ ID NO: 9922 - protein, 50 aa, Homo Sapiens
MKLWVSALLMAWFGVLSCVQAEFFTSIGHMTDLIYAEKELVQSLKEYILV

SEQ ID NO: 9923 - protein, 101 aa, Homo Sapiens
MKLWVSALLMAWFGVLSCVQAEFFTSIGHMTDLIYAEKELVQSLKEYILVEEAKLSKIKSWANKMEALTSKSAADAEGYLAHPVNAYKLVKRLNTDWPALE

SEQ ID NO: 9924 - protein, 114 aa, Homo Sapiens
MKLWVSALLMAWFGVLSCVQAEFFTSIGHMTDLIYAEKELVQSLKEYILVEEAKLSKIKSWANKMEALTSKSAADAEGYLAHPVNAYKLVKRLNTDWPALEDLVLQDSAAGFIA

SEQ ID NO: 9925 - protein, 147 aa, Homo Sapiens
MKLWVSALLMAWFGVLSCVQAEFFTSIGHMTDLIYAEKELVQSLKEYILVEEAKLSKIKSWANKMEALTSKSAADAEGYLAHPVNAYKLVKRLNTDWPALEDLVLQDSAAGFIANLSVQRQFFPTDEDEIGAAKALMRLQDTYRLDP

SEQ ID NO: 9926 - protein, 153 aa, Homo Sapiens
MKLWVSALLMAWFGVLSCVQAEFFTSIGHMTDLIYAEKELVQSLKEYILVEEAKLSKIKSWANKMEALTSKSAADAEGYLAHPVNAYKLVKRLNTDWPALEDLVLQDSAAGFIANLSVQRQFFPTDEDEIGAAKALMRLQDTYRLDPGTISRG

SEQ ID NO: 9927 - protein, 167 aa, Homo Sapiens
MKLWVSALLMAWFGVLSCVQAEFFTSIGHMTDLIYAEKELVQSLKEYILVEEAKLSKIKSWANKMEALTSKSAADAEGYLAHPVNAYKLVKRLNTDWPALEDLVLQDSAAGFIANLSVQRQFFPTDEDEIGAAKALMRLQDTYRLDPGTISRGELPGTKYQAMLSVD

SEQ ID NO: 9928 - protein, 184 aa, Homo Sapiens
MKLWVSALLMAWFGVLSCVQAEFFTSIGHMTDLIYAEKELVQSLKEYILVEEAKLSKIKSWANKMEALTSKSAADAEGYLAHPVNAYKLVKRLNTDWPALEDLVLQDSAAGFIANLSVQRQFFPTDEDEIGAAKALMRLQDTYRLDPGTISRGELPGTKYQAMLSVDDCFGMGRSAYNEGDYYH

SEQ ID NO: 9929 - protein, 204 aa, Homo Sapiens
MKLWVSALLMAWFGVLSCVQAEFFTSIGHMTDLIYAEKELVQSLKEYILVEEAKLSKIKSWANKMEALTSKSAADAEGYLAHPVNAYKLVKRLNTDWPALEDLVLQDSAAGFIANLSVQRQFFPTDEDEIGAAKALMRLQDTYRLDPGTISRGELPGTKYQAMLSVDDCFGMGRSAYNEGDYYHTVLWMEQVLKQLDAGEEATT

SEQ ID NO: 9930 - protein, 535 aa, Homo Sapiens
MKLWVSALLMAWFGVLSCVQAEFFTSIGHMTDLIYAEKELVQSLKEYILVEEAKLSKIKSWANKMEALTSKSAADAEGYLAHPVNAYKLVKRLNTDWPALEDLVLQDSAAGFIANLSVQRQFFPTDEDEIGAAKALMRLQDTYRLDPGTISRGELPGTKYQAMLSVDDCFGMGRSAYNEGDYYHTVLWMEQVLKQLDAGEEATTTKSQVLDYLSYAVFQLGDLHRALELTRRLLSLDPSHERAGGNLRYFEQLLEEEREKTLTNQTEAELATPEGIYERPVDYLPERDVYESLCRGEGVKLTPRRQKRLFCRYHHGNRAPQLLIAPFKEEDEWDSPHIVRYYDVMSDEEIERIKEIAKPKLARATVRDPKTGVLTVASYRVSKSSWLEEDDDPVVARVNRRMQHITGLTVKTAELLQVANYGVGGQYEPHFDFSRNDERDTFKHLGTGNRVATFLNYMSDVEAGGATVFPDLGAAIWPKKGTAVFWYNLLRSGEGDYRTRHAACPVLVGCKWVSNKWFHERGQEFLRPCGSTEVD

SEQ ID NO: 9931 - protein, 533 aa, Homo Sapiens
MKLWVSALLMAWFGVLSCVQAEFFTSIGHMTDLIYAEKELVQSLKEYILVEEAKLSKIKSWANKMEALTSKSAADAEGYLAHPVNAYKLVKRLNTDWPALEDLVLQDSAAGFIANLSVQRQFFPTDEDEIGAAKALMRLQDTYRLDPGTISRGELPGTKYQAMLSVDDCFGMGRSAYNEGDYYHTVLWMEQVLKQLDAGEEATTTKSQVLDYLSYAVFQLGDLHRALELTRRLLSLDPSHERAGGNLRYFEQLLEEEREKTLTNQTEAELATPEGIYERPVDYLPERDVYESLCRGEGVKLTPRRQKRLFCRYHHGNRAPQLLIAPFKEEDEWDSPHIVRYYDVMSDEEIERIKEIAKPKLARATVRDPKTGVLTVASYRVSKSSWLEEDDDPVVARVNRRMQHITGLTVKTAELLQVANYGVGGQYEPHFDFSRRPFDSGLKTEGNRLATFLNYMSDVEAGGATVFPDLGAAIWPKKGTAVFWYNLLRSGEGDYRTRHAACPVLVGCKWVSNKWFHERGQEFLRPCGSTEVD

SEQ ID NO: 9932 - protein, 533 aa, Homo Sapiens; identical to SEQ ID NO: 9931

SEQ ID NO: 9933 - protein, 533 aa, Homo Sapiens; identical to SEQ ID NO: 9931

SEQ ID NO: 9934 - protein, 535 aa, Homo Sapiens; identical to SEQ ID NO: 9930

SEQ ID NO: 9935 - protein, 535 aa, Homo Sapiens; identical to SEQ ID NO: 9930

SEQ ID NO: 9936 - protein, 236 aa, Homo Sapiens
MKRQLVTNSFLHHLLIGQKRPRNAPRTLPSVTMKLWVSALLMAWFGVLSCVQAEFFTSIGHMTDLIYAEKELVQSLKEYILVEEAKLSKIKSWANKMEALTSKSAADAEGYLAHPVNAYKLVKRLNTDWPALEDLVLQDSAAGFIANLSVQRQFFPTDEDEIGAAKALMRLQDTYRLDPGTISRGELPGTKYQAMLSVDDCFGMGRSAYNEGDYYHTVLWMEQVLKQLDAGEEATT

SEQ ID NO: 9937 - protein, 104 aa, Homo Sapiens
MGPGARLAALLAVLALGTGDPERAAARGDTFSALTSVARALAPERRLLGLLRRYLRGEEARLRDLTRFYDKVLSLHEDSTTPVANPLLAFTLIKRLQSDWRNVL

SEQ ID NO: 9938 - protein, 544 aa, Homo Sapiens
MGPGARLAALLAVLALGTGDPERAAARGDTFSALTSVARALAPERRLLGLLRRYLRGEEARLRDLTRFYDKVLSLHEDSTTPVANPLLAFTLIKRLQSDWRNVVHSLEASENIRALKDGYEKVEQDLPAFEDLEGAARALMRLQDVYMLNVKGLARGVFQRVTGSAITDLYSPKRLFSLTGDDCFQVGKVAYDMGDYYHAIPWLEEAVSLFRGSYGEWKTEDEASLEDALDHLAFAYFRAGNVSCALSLSREFLLYSPDNKRMARNVLKYERLLAESPNHVVAEAVIQRPNIPHLQTRDTYEGLCQTLGSQPTLYQIPSLYCSYETNSNAYLLLQPIRKEVIHLEPYIALYHDFVSDSEAQKIRELAEPWLQRSVVASGEKQLQVEYRISKSAWLKDTVDPKLVTLNHRIAALTGLDVRPPYAEYLQVVNYGIGGHYEPHFDHATSPSSPLYRMKSGNRVATFMIYLSSVEAGGATAFIYANLSVPVVRNAALFWWNLHRSGEGDSDTLHAGCPVLVGDKWVANKWIHEYGQEFRRPCSSSPED

SEQ ID NO: 9939 - protein, 604 aa, Homo Sapiens
MGPGARLAALLAVLALGTGDPERAAARGDTFSALTSVARALAPERRLLGLLRRYLRGEEARLRDLTRFYDKVLSLHEDSTTPVANPLLAFTLIKRLQSDWRNVVHSLEASENIRALKDGYEKVEQDLPAFEDLEGAARALMRLQDVYMLNVKGLARGVFQRVTGSAITDLYSPKRLFSLTGDDCFQVGKVAYDMGDYYHAIPWLEEAVSLFRGSYGEWKTEDEASLEDALDHLAFAYFRAGNVSCALSLSREFLLYSPDNKRMARNVLKYERLLAESPNHVVAEAVIQRPNIPHLQTRDTYEGLCQTLGSQPTLYQIPSLYCSYETNSNAYLLLQPIRKEVIHLEPYIALYHDFVSDSEAQKIRELAEPWLQRSVVASGEKQLQVEYRISKSAWLKDTVDPKLVTLNHRIAALTGLDVRPPYAEYLQVVNYGIGGHYEPHFDHATSPSSPLYRMKSGNRVATFMIYLSSVEAGGATAFIYANLSVPVVRHCFGGTCTGVVKGTVTHFMLAVLSWWEISGWPTSGYMSMDRNSADPAAPALKTELLAERSWWSPVAFQRSQEPKAGVGEEKAEQPPGRRPCQLCLCLANQRQGRGCYQGTLRMYI

SEQ ID NO: 9940 - protein, 257 aa, Homo Sapiens
MGPGARLAALLAVLALGTGDPERAAARGDTFSALTSVARALAPERRLLGLLRRYLRGEEARLRDLTRFYDKVLSLHEDSTTPVANPLLAFTLIKRLQSDWRNVVHSLEASENIRALKDGYEKVEQDLPAFEDLEGAARALMRLQDVYMLNVKGLARGVFQRVTGSAITDLYSPKRLFSLTGDDCFQVGKVAYDMGDYYHAIPWLEEAVSLFRGSYGEWKTEDEASLEDALDHLAFAYFRAGNVSCALSLSREFLLYR

SEQ ID NO: 9941 - protein, 61 aa, Homo Sapiens
SVPVVRNAALFWWNLHRSGEGDSDTLHAGCPVLVGDKWVANKWIHEYGQEFRRPCSSSPED

SEQ ID NO: 9942 - protein, 200 aa, Homo Sapiens
METRLPPRNIQDVESDSAKQFLQAAEAIDDIPFGITSNSDVFSKYQLDKDGVVLFKKFDEGRNNFEGEVTKENLLDFIKHNQLPLVIEFTEQTAPKIFGGEIKTHILLFLPKSVSDYDGKLSNFKTAAESFKGKILFIFIDSDHTDNQRILEFFGLKKEECPAVRLITLEEEMTKYKPESEELTAERITEFCHRFLEGKI

SEQ ID NO: 9943 - protein, 117 aa, Homo Sapiens
METRLPPRNIQFDEGRNNFEGEVTKENLLDFIKHNQLPLVIEFTEQTAPKIFGGEIKTHILLFLPKSVSDYDGKLSNFKTAAESFKGKILFIFIDSDHTDNQRILEFFGLKKEECPA

SEQ ID NO: 9944 - protein, 54 aa, Homo Sapiens
MLRRALLCLAVAALVRADAPEEEDHVLVLRKSNFAEALAAHKCPLVWPLQGSGP

SEQ ID NO: 9945 - protein, 156 aa, Homo Sapiens
MLRRALLCLAVAALVRADAPEEEDHVLVLRKSNFAEALAAHKYLLVDATEESDLAQQYGVRGYPTIKFFRNGDTASPKEYTAGREADDIVNWLKKRTGPAATTLPDGAAAESLVESSEVAVIGFFKDVESDSAKQFLQAAEAIDDIPFGITSNSDV

SEQ ID NO: 9946 - protein, 208 aa, Homo Sapiens
MLRRALLCLAVAALVRADAPEEEDHVLVLRKSNFAEALAAHKYLLVEFSGREADDIVNWLKKRTGPAATTLPDGAAAESLVESSEVAVIGFFKDVESDSAKQFLQAAEAIDDIPFGITSNSDVFSKYQLDKDGVVLFKKFDEGRNNFEGEVTKENLLDFIKHNQLPLVIEFTEQTAPKIFGGEIKTHILLFLPKSVSDYDGKLSNFKT

SEQ ID NO: 9947 - protein, 148 aa, Homo Sapiens
MLRRALLCLAVAALVRADAPEEEDHVLVLRKSNFAEALAAHKYLLVEFYAPWCGHCKALAPEYAKAAGKLKAEGSEIRLAKMDSTANEVEAVKVHSFPTLKFFPASADRTVIDYNGERTLDGFKKFLESGGQDGAGDDDDLEDLEEAE

SEQ ID NO: 9948 - protein, 188 aa, Homo Sapiens
MLRRALLCLAVAALVRADAPEEEDHVLVLRKSNFAEALAAHKYLLVEFYAPWCGHCKALAPEYAKAAGKLKAEGSEIRLAKVDATEESDLAQQYGVRGYPTIKFFRNGDTASPKEYTAAESLVESSEVAVIGFFKDVESDSAKQFLQAAEAIDDIPFGITSNSDVFSKYQLDKDGVVLFKKFDEGRNN

SEQ ID NO: 9949 - protein, 508 aa, Homo Sapiens
MLRRALLCLAVAALVRADAPEEEDHVLVLRKSNFAEALAAHKYLLVEFYAPWCGHCKALAPEYAKAAGKLKAEGSEIRLAKVDATEESDLAQQYGVRGYPTIKFFRNGDTASPKEYTAGREADDIVNWLKKRTGPAATTLPDGAAAESLVESSEVAVIGFFKDVESDSAKQFLQAAEAIDDIPFGITSNSDVFSKYQLDKDGVVLFKKFDEGRNNFEGEVTKENLLDFIKHNQLPLVIEFTEQTAPKIFGGEIKTHILLFLPKSVSDYDGKLSNFKTAAESFKGKILFIFIDSDHTDNQRILEFFGLKKEECPAVRLITLEEEMTKYKPESEELTAERITEFCHRFLEGKIKPHLMSQELPEDWDKQPVKVLVGKNFEDVAFDEKKNVFVEFYAPWCGHCKQLAPIWDKLGETYKDHENIVIAKMDSTANEVEAVKVHSFPTLKFFPASADRTVIDYNGERTLDGFKKFLESGGQDGAGDDDDLEDLEEAEEPDMEEDDDQKAVKDEL

SEQ ID NO: 9950 - protein, 464 aa, Homo Sapiens
MLRRALLCLAVAALVRADAPEEEDHVLVLRKSNFAEALAAHKYLLVEFYAPWCGHCKALAPEYAKAAGKLKAEGSEIRLAKVDATEESDLAQQYGVRGYPTIKFFRNGDTASPKEYTGDVESDSAKQFLQAAEAIDDIPFGITSNSDVFSKYQLDKDGVVLFKKFDEGRNNFEGEVTKENLLDFIKHNQLPLVIEFTEQTAPKIFGGEIKTHILLFLPKSVSDYDGKLSNFKTAAESFKGKILFIFIDSDHTDNQRILEFFGLKKEECPAVRLITLEEEMTKYKPESEELTAERITEFCHRFLEGKIKPHLMSQELPEDWDKQPVKVLVGKNFEDVAFDEKKNVFVEFYAPWCGHCKQLAPIWDKLGETYKDHENIVIAKMDSTANEVEAVKVHSFPTLKFFPASADRTVIDYNGERTLDGFKKFLESGGQDGAGDDDDLEDLEEAEEPDMEEDDDQKAVKDEL

SEQ ID NO: 9951 - protein, 166 aa, Homo Sapiens
MLRRALLCLAVAALVRADAPEEEDHVLVLRKSNFAEALAAHKYLLVEFYAPWCGHCKALAPEYAKAAGKLKAEGSEIRLAKVDATEESDLAQQYGVRGYPTIKFFRNGDTASPKEYTGFDEGRNNFEGEVTKENLLDFIKHNQLPLVIEFTEQTAPKIFGGEIKTH

SEQ ID NO: 9952 - protein, 106 aa, Homo Sapiens
MLRRALLCLAVAALVRADAPEEEDHVLVLRKSNFAEALAAHKYLLVEFYAPWCGHCKALAPEYAKAAGKLKAEGSEIRPPRRSLSPVWEGRSRTGHGHSVPPAVSP

SEQ ID NO: 9953 - protein, 274 aa, Homo Sapiens
  misc_feature (1)..(1): Xaa can be any naturally occurring amino acid
XFEGEVTKENLLDFIKHNQLPLVIEFTEQSVSDYDGKLSNFKTAAESFKGKILFIFIDSDHTDNQRILEFFGLKKEECPAVRLITLEEEMTKYKPESEELTAERITEFCHRFLEGKIKPHLMSQELPEDWDKQPVKVLVGKNFEDVAFDEKKNVFVEFYAPWCGHCKQLAPIWDKLGETYKDHENIVIAKMDSTANEVEAVKVHSFPTLKFFPASADRTVIDYNGERTLDGFKKFLESGGQDGAGDDDDLEDLEEAEEPDMEEDDDQKAVKDEL

SEQ ID NO: 9954 - protein, 132 aa, Homo Sapiens
LMATLKAPLRVHITSLLPTPEDNLEIVLHRWENNSCVEKKVLGEKTENPKKFKINYTVANEATLLDTDYDNFLFLCLQDTTTPIQSMMCQYLARVLVEDDEIMQGFIRAFRPLPRHLWYLLDLKQMEEPCRF

SEQ ID NO: 9955 - protein, 143 aa, Homo Sapiens
MLCLLLTLGVALVCGVPAMDIPQTKQDLELPKLAGTWHSMAMATNNISLMATLKAPLRVHITSLLPTPEDNLEIVLHRWENNSCVEKKVLGEKTENPKKFKINSRVLVEDDEIMQGFIRAFRPLPRHLWYLLDLKQMEEPCRF

SEQ ID NO: 9956 - protein, 180 aa, Homo Sapiens
MLCLLLTLGVALVCGVPAMDIPQTKQDLELPKLAGTWHSMAMATNNISLMATLKAPLRVHITSLLPTPEDNLEIVLHRWENNSCVEKKVLGEKTENPKKFKINYTVANEATLLDTDYDNFLFLCLQDTTTPIQSMMCQYLARVLVEDDEIMQGFIRAFRPLPRHLWYLLDLKQMEEPCRF

SEQ ID NO: 9957 - protein, 180 aa, Homo Sapiens; identical to SEQ ID NO: 9956

SEQ ID NO: 9958 - protein, 180 aa, Homo Sapiens; identical to SEQ ID NO: 9956

SEQ ID NO: 9959 - protein, 169 aa, Homo Sapiens
MLCLLLTLGVALVCGVPAMDIPQTKQDLELPKLAGTWHSMAMATNNISLMATLKAPLRVHITSLLPTPEDNLEIVLHRWENNSCVEKKVLGEKTENPKKFKINYTVANEATLLDTDYDNFLFLCLQDTTTPIQSMMCQYLESWWRTMRSCRDSSGLSGPCPGTYGTCWT

SEQ ID NO: 9960 - protein, 33 aa, Homo Sapiens
  misc_feature (1)..(1): Xaa can be any naturally occurring amino acid
XEIMQGFIRAFRPLPRHLWYLLDLKQMEEPCRF

SEQ ID NO: 9961 - protein, 126 aa, Homo Sapiens
  misc_feature (1)..(1): Xaa can be any naturally occurring amino acid
XPLRVHITSLLPTPEDNLEIVLHRWENNSCVEKKVLGEKTENPKKFKINYTVANEATLLDTDYDNFLFLCLQDTTTPIQSMMCQYLARVLVEDDEIMQGFIRAFRPLPRHLWYLLDLKQMEEPCRF

SEQ ID NO: 9962 - protein, 131 aa, Homo Sapiens
  misc_feature (1)..(1): Xaa can be any naturally occurring amino acid
XVPAMDIPQTKQDLELPKAPLRVHITSLLPTPEDNLEIVLHRWENNSCVEKKVLGEKTENPKKFKINCKASGAPQLSWKPQGPRTDPASSTARVLVEDDEIMQGFIRAFRPLPRHLWYLLDLKQMEEPCRF

SEQ ID NO: 9963 - protein, 25 aa, Homo Sapiens
MAGRVPSLLVLLVFPSSCLAFRSPL

SEQ ID NO: 9964 - protein, 28 aa, Homo Sapiens
MAGRVPSLLVLLVFPSSCLAFRSPLSVF

SEQ ID NO: 9965 - protein, 29 aa, Homo Sapiens
MAGRVPSLLVLLVFPSSCLAFRSPLSVFK

SEQ ID NO: 9966 - protein, 42 aa, Homo Sapiens
MAGRVPSLLVLLVFPSSCLAFRSPLSVFKRFKETTRPFSNEC

SEQ ID NO: 9967 - protein, 53 aa, Homo Sapiens
MAGRVPSLLVLLVFPSSCLAFRSPLSVFKRFKETTRPFSNECLGTTRPVVPID

SEQ ID NO: 9968 - protein, 68 aa, Homo Sapiens
MAGRVPSLLVLLVFPSSCLAFRSPLSVFKRFKETTRPFSNECLGTTRPVVPIDSSDFALDIRMPGVTP

SEQ ID NO: 9969 - protein, 175 aa, Homo Sapiens
MAGRVPSLLVLLVFPSSCLAFRSPLSVFKRFKETTRPFSNECLGTTRPVVPIDSSDFALDIRMPGVTPKQLTSSLEPAWILSITCYFLDAICLHPLEVTGFVMKEPVQIKPIFCMPGREMLPLPGSPKVLDSELEERLEVNTLYYRYTMGILVLLEIITRTVLVCPYTSHVCHSL

SEQ ID NO: 9970 - protein, 974 aa, Homo Sapiens
MAGRVPSLLVLLVFPSSCLAFRSPLSVFKRFKETTRPFSNECLGTTRPVVPIDSSDFALDIRMPGVTPKQSDTYFCMSMRIPVDEEAFVIDFKPRASMDTVHHMLLFGCNMPSSTGSYWFCDEGTCTDKANILYAWARNAPPTRLPKGVGFRVGGETGSKYFVLQVHYGDISAFRDNNKDCSGVSLHLTRLPQPLIAGMYLMMSVDTVIPAGEKVVNSDISCHYKNYPMHVFAYRVHTHHLGKVVSGYRVRNGQWTLIGRQSPQLPQAFYPVGHPVDVSFGDLLAARCVFTGEGRTEATHIGGTSSDEMCNLYIMYYMEAKHAVSFMTCTQNVAPDMFRTIPPEANIPIPVKSDMVMMHEHHKETEYKDKIPLLQQPKREEEEVLDQGDFYSLLSKLLGEREDVVHVHKYNPTEKAESESDLVAEIANVVQKKDLGRSDAREGAEHERGNAILVRDRIHKFHRLVSTLRPPESRVFSLQQPPPGEGTWEPEHTGDFHMEEALDWPGVYLLPGQVSGVALDPKNNLVIFHRGDHVWDGNSFDSKFVYQQIGLGPIEEDTILVIDPNNAAVLQSSGKNLFYLPHGLSIDKDGNYWVTDVALHQVFKLDPNNKEGPVLILGRSMQPGSDQNHFCQPTDVAVDPGTGAIYVSDGYCNSRIVQFSPSGKFITQWGEESSGSSPLPGQFTVPHSLALVPLLGQLCVADRENGRIQCFKTDTKEFVREIKHSSFGRNVFAISYIPGLLFAVNGKPHFGDQEPVQGFVMNFSNGEIIDIFKPVRKHFDMPHDIVASEDGTVYIGDAHTNTVWKFTLTEKLEHRSVKKAGIEVQEIKEAEAVVETKMENKPTSSELQKMQEKQKLIKEPGSGVPVVLITTLLVIPVVVLLAIAIFIRWKKSRAFGADSEHKLETSSGRVLGRFRGKGSGGLNLGNFFASRKGYSRKGFDRLSTEGSDQEKEDDGSESEEEYSAPLPALAPSSS

SEQ ID NO: 9971 - protein, 887 aa, Homo Sapiens
MAGRVPSLLVLLVFPSSCLAFRSPLSVFKRFKETTRPFSNECLGTTRPVVPIDSSDFALDIRMPGVTPKQSDTYFCMSMRIPVDEEAFVIDFKPRASMDTVHHMLLFGCNMPSSTGSYWFCDEGTCTDKANILYAWARNAPPTRLPKGVGFRVGGETGSKYFVLQVHYGDISAFRDNNKDCSGVSLHLTRLPQPLIAGMYLMMSVDTVIPAGEKVVNSDISCHYKNYPMHVFAYRVHTHHLGKVVSGYRVRNGQWTLIGRQSPQLPQAFYPVGHPVDVSFGDLLAARCVFTGEGRTEATHIGGTSSDEMCNLYIMYYMEAKHAVSFMTCTQNVAPDMFRTIPPEANIPIPVKSDMVMMHEHHKETEYKDKIPLLQQPKREEEEVLDQGDFYSLLSKLLGEREDVVHVHKYNPTEKAESESDLVAEIANVVQKKDLGRSDAREGAEHERGNAILVRDRIHKFHRLVSTLRPPESRVFSLQQPPPGEGTWEPEHTGDFHMEEALDWPGVYLLPGQVSGVALDPKNNLVIFHRGDHVWDGNSFDSKFVYQQIGLGPIEEDTILVIDPNNAAVLQSSGKNLFYLPHGLSIDKDGNYWVTDVALHQVFKLDPNNKEGPVLILGRSMQPGSDQNHFCQPTDVAVDPGTGAIYVSDGYCNSRIVQFSPSGKFITQWGEESSGSSPLPGQFTVPHSLALVPLLGQLCVADRENGRIQCFKTDTKEFVREIKHSSFGRNVFAISYIPGLLFAVNGKPHFGDQEPVQGFVMNFSNGEIIDIFKPVRKHFDMPHDIVASEDGTVYIGDAHTNTVWKFTLTEKLEHRSVKKAGIEVQEIKGKGSGGLNLGNFFASRKGYSRKGFDRLSTEGSDQEKEDDGSESEEEYSAPLPALAPSSS

SEQ ID NO: 9972 - protein, 866 aa, Homo Sapiens
MAGRVPSLLVLLVFPSSCLAFRSPLSVFKRFKETTRPFSNECLGTTRPVVPIDSSDFALDIRMPGVTPKQSDTYFCMSMRIPVDEEAFVIDFKPRASMDTVHHMLLFGCNMPSSTGSYWFCDEGTCTDKANILYAWARNAPPTRLPKGVGFRVGGETGSKYFVLQVHYGDISAFRDNNKDCSGVSLHLTRLPQPLIAGMYLMMSVDTVIPAGEKVVNSDISCHYKNYPMHVFAYRVHTHHLGKVVSGYRVRNGQWTLIGRQSPQLPQAFYPVGHPVDVSFGDLLAARCVFTGEGRTEATHIGGTSSDEMCNLYIMYYMEAKHAVSFMTCTQNVAPDMFRTIPPEANIPIPVKSDMVMMHEHHKETEYKDKIPLLQQPKREEEEVLDQDFHMEEALDWPGVYLLPGQVSGVALDPKNNLVIFHRGDHVWDGNSFDSKFVYQQIGLGPIEEDTILVIDPNNAAVLQSSGKNLFYLPHGLSIDKDGNYWVTDVALHQVFKLDPNNKEGPVLILGRSMQPGSDQNHFCQPTDVAVDPGTGAIYVSDGYCNSRIVQFSPSGKFITQWGEESSGSSPLPGQFTVPHSLALVPLLGQLCVADRENGRIQCFKTDTKEFVREIKHSSFGRNVFAISYIPGLLFAVNGKPHFGDQEPVQGFVMNFSNGEIIDIFKPVRKHFDMPHDIVASEDGTVYIGDAHTNTVWKFTLTEKLEHRSVKKAGIEVQEIKEAEAVVETKMENKPTSSELQKMQEKQKLIKEPGSGVPVVLITTLLVIPVVVLLAIAIFIRWKKSRAFGDSEHKLETSSGRVLGRFRGKGSGGLNLGNFFASRKGYSRKGFDRLSTEGSDQEKEDDGSESEEEYSAPLPALAPSSS

SEQ ID NO: 9973 - protein, 905 aa, Homo Sapiens
MAGRVPSLLVLLVFPSSCLAFRSPLSVFKRFKETTRPFSNECLGTTRPVVPIDSSDFALDIRMPGVTPKQSDTYFCMSMRIPVDEEAFVIDFKPRASMDTVHHMLLFGCNMPSSTGSYWFCDEGTCTDKANILYAWARNAPPTRLPKGVGFRVGGETGSKYFVLQVHYGDISAFRDNNKDCSGVSLHLTRLPQPLIAGMYLMMSVDTVIPAGEKVVNSDISCHYKNYPMHVFAYRVHTHHLGKVVSGYRVRNGQWTLIGRQSPQLPQAFYPVGHPVDVSFGDLLAARCVFTGEGRTEATHIGGTSSDEMCNLYIMYYMEAKHAVSFMTCTQNVAPDMFRTIPPEANIPIPVKSDMVMMHEHHKETEYKDKIPLLQQPKREEEEVLDQGDFYSLLSKLLGEREDVVHVHKYNPTEKAESESDLVAEIANVVQKKDLGRSDAREGAEHERGNAILVRDRIHKFHRLVSTLRPPESRVFSLQQPPPGEGTWEPEHTGDFHMEEALDWPGVYLLPGQVSGVALDPKNNLVIFHRGDHVWDGNSFDSKFVYQQIGLGPIEEDTILVIDPNNAAVLQSSGKNLFYLPHGLSIDKDGNYWVTDVALHQVFKLDPNNKEGPVLILGRSMQPGSDQNHFCQPTDVAVDPGTGAIYVSDGYCNSRIVQFSPSGKFITQWGEESSGSSPLPGQFTVPHSLALVPLLGQLCVADRENGRIQCFKTDTKEFVREIKHSSFGRNVFAISYIPGLLFAVNGKPHFGDQEPVQGFVMNFSNGEIIDIFKPVRKHFDMPHDIVASEDGTVYIGDAHTNTVWKFTLTEKLEHRSVKKAGIEVQEIKDSEHKLETSSGRVLGRFRGKGSGGLNLGNFFASRKGYSRKGFDRLSTEGSDQEKEDDGSESEEEYSAPLPALAPSSS

SEQ ID NO: 9974 - protein, 973 aa, Homo Sapiens [sequence omitted]

SEQ ID NO: 9975 - protein, 679 aa, Homo Sapiens
  misc_feature (1)..(1): Xaa can be any naturally occurring amino acid
XMHVFAYRVHTHHLGKVVSGYRVRNGQWTLIGRQSPQLPQAFYPVGHPVDVSFGDLLAARCVFTGEGRTEATHIGGTSSDEMCNLYIMYYMEAKHAVSFMTCTQNVAPDMFRTIPPEANIPIPVKSDMVMMHEHHKETEYKDKIPLLQQPKREEEEVLDQGDFYSLLSKLLGEREDVVHVHKYNPTEKAESESDLVAEIANVVQKKDLGRSDAREGAEHERGNAILVRDRIHKFHRLVSTLRPPESRVFSLQQPPPGEGTWEPEHTGDFHMEEALDWPGVYLLPGQVSGVALDPKNNLVIFHRGDHVWDGNSFDSKFVYQQIGLGPIEEDTILVIDPNNAAVLQSSGKNLFYLPHGLSIDKDGNYWVTDVALHQVFKLDPNNKEGPVLILGRSMQPGSDQNHFCQPTDVAVDPGTGAIYVSDGYCNSRIVQFSPSGKFITQWGEESSGSSPLPGQFTVPHSLALVPLLGQLCVADRENGRIQCFKTDTKEFVREIKHSSFGRNVFAISYIPGLLFAVNGKPHFGDQEPVQGFVMNFSNGEIIDIFKPVRKHFDMPHDIVASEDGTVYIGDAHTNTVWKFTLTEKLEHRSVKKAGIEVQEIKADSEHKLETSSGRVLGRFRGKGSGGLNLGNFFASRKGYSRKGFDRLSTEGSDQEKEDDGSESEEEYSAPLPALAPSSS

SEQ ID NO: 9976 - protein, 250 aa, Homo Sapiens
  misc_feature (1)..(1): Xaa can be any naturally occurring amino acid
XRIQCFKTDTKEFVREIKHSSFGRNVFAISYIPGLLFAVNGKPHFGDQEPVQGFVMNFSNGEIIDIFKPVRKHFDMPHDIVASEDGTVYIGDAHTNTVWKFTLTEKLEHRSVKKAGIEVQEIKEAEAVVETKMENKPTSSELQKMQEKQKLIKEPGSGVPVVLITTLLVIPVVVLLAIAIFIRWKKSRAFGGKGSGGLNLGNFFASRKGYSRKGFDRLSTEGSDQEKEDDGSESEEEYSAPLPALAPSSS

SEQ ID NO: 9977 - protein, 675 aa, Homo Sapiens
MCRECCEYDQIECVCPGKREVVGYTIPCCRNEENECDSCLIHPGCTIFENCKSCRNGSWGGTLDDFYVKGFYCAECRAGWYGGDCMRCGQVLRAPKGQILLESYPLNAHCEWTIHAKPGFVIQLRFVMLSLEFDYMCQYDYVEVRDGDNRDGQIIKRVCGNERPAPIQSIGSSLHVLFHSDGSKNFDGFHAIYEEITACSSSPCFHDGTCVLDKAGSYKCACLAGYTGQRCENLLEAGKSKIKASEDSLSVLEERNCSDPGGPVNGYQKITGGPGLINGRHAKIGTVVSFFCNNSYVLSGNEKRTCQQNGEWSGKQPICIKACREPKISDLVRRRVLPMQVQSRETPLHQLYSAAFSKQKLQSAPTKKPALPFGDLPMGYQHLHTQLQYECISPFYRRLGSSRRTCLRTGKWSGRAPSCIPICGKIENITAPKTQGLRWPWQAAIYRRTSGVHDGSLHKGAWFLVCSGALVNERTVVVAAHCVTDLGKVTMIKTADLKVVLGKFYRDDDRDEKTIQSLQISAIILHPNYDPILLDADIAILKLLDKARISTRVQPICLAASRDLSTSFQESHITVAGWNVLADVRSPGFKNDTLRSGVVSVVDSLLCEEQHEDHGIPVSVTDNMFCASWEPTAPSDICTAETGGIAAVSFPGRASPEPRWHLMGLVSWSYDKTCS

SEQ ID NO: 9978 - protein, 680 aa, Homo Sapiens
MCRECCEYDQIECVCPGKREVVGYTIPCCRNEENECDSCLIHPGCTIFENCKSCRNGSWGGTLDDFYVKGFYCAECRAGWYGGDCMRCGQVLRAPKGQILLESYPLNAHCEWTIHAKPGFVIQLRFVMLSLEFDYMCQYDYVEVRDGDNRDGQIIKRVCGNERPAPIQSIGSSLHVLFHSDGSKNFDGFHAIYEEITACSSSPCFHDGTCVLDKAGSYKCACLAGYTGQRCENLLEERNCSDPGGPVNGYQKITGGPGLINGRHAKIGTVVSFFCNNSYVLSGNEKRTCQQNGEWSGKQPICIKACREPKISDLVRRRVLPMQVQSRETPLHQLYSAAFSKQKLQSAPTKKPALPFGDLPMGYQHLHTQLQYECISPFYRRLGSSRRTCLRTGKWSGRAPSCIPICGKIENITAPKTQGLRWPWQAAIYRRTSGVHDGSLHKGAWFLVCSGALVNERTVVVAAHCVTDLGKVTMIKTADLKVVLGKFYRDDDRDEKTIQSLQISAIILHPNYDPILLDADIAILKLLDKARISTRVQPICLAASRDLSTSFQESHITVAGWNVLADVRSPGFKNDTLRSGVVSVVDSLLCEEQHEDHGIPVSVTDNMFCASWEPTAPSDICTAETGGIAAVSFPGRASPEPRWHLMGLVSWSYDKTCSHRLSTAFTKVLPFKDWIERNMK

SEQ ID NO: 9979 - protein, 178 aa, Homo Sapiens
MELGCWTQLGLTFLQLLLISSLPREYTVINEACPGAEWNIMCRECCEYDQIECVCPGKREVVGYTIPCCRNEENECDSCLIHPGCTIFENCKSCRNGSWGGTLDDFYVKGFYCAECRAGWYGGDCMPCSSSPCFHDGTCVLDKAGSYKCACLAGYTGQRCENLLEERNCSDPGGPVNG

SEQ ID NO: 9980 - protein, 609 aa, Homo Sapiens
MELGCWTQLGLTFLQLLLISSLPREYTVINEACPGAEWNIMCRECCEYDQIECVCPGKREVVGYTIPCCRNEENECDSCLIHPGCTIFENCKSCRNGSWGGTLDDFYVKGFYCAECRAGWYGGDCMPCSSSPCFHDGTCVLDKAGSYKCACLAGYTGQRCENLLEERNCSDPGGPVNGYQKITGGPGLINGRHAKIGTVVSFFCNNSYVLSGNEKRTCQQNGEWSGKQPICIKACREPKISDLVRRRVLPMQVQSRETPLHQLYSAAFSKQKLQSAPTKKPALPFGDLPMGYQHLHTQLQYECISPFYRRLGSSRRTCLRTGKWSGRAPSCIPICGKIENITAPKTQGLRWPWQAAIYRRTSGVHDGSLHKGAWFLVCSGALVNERTVVVAAHCVTDLGKVTMIKTADLKVVLGKFYRDDDRDEKTIQSLQISAIILHPNYDPILLDADIAILKLLDKARISTRVQPICLAASRDLSTSFQESHITVAGWNVLADVRSPGFKNDTLRSGVVSVVDSLLCEEQHEDHGIPVSVTDNMFCASWEPTAPSDICTAETGGIAAVSFPGRASPEPRWHLMGLVSWSYDKTCSHRLSTAFTKVLPFKDWIERNMK

SEQ ID NO: 9981 - protein, 737 aa, Homo Sapiens
MELGCWTQLGLTFLQLLLISSLPREYTVINEACPGAEWNIMCRECCEYDQIECVCPGKREVVGYTIPCCRNEENECDSCLIHPGCTIFENCKSCRNGSWGGTLDDFYVKGFYCAECRAGWYGGDCMRCGQVLRAPKGQILLESYPLNAHCEWTIHAKPGFVIQLRFVMLSLEFDYMCQYDYVEVRDGDNRDGQIIKRVCGNERPAPIQSIGSSLHVLFHSDGSKNFDGFHAIYEEITACSSSPCFHDGTCVLDKAGSYKCACLAGYTGQRCENLLEAGKSKIKASEDSLSVLEERNCSDPGGPVNGYQKITGGPGLINGRHAKIGTVVSFFCNNSYVLSGNEKRTCQQNGEWSGKQPICIKACREPKISDLVRRRVLPMQVQSRETPLHQLYSAAFSKQKLQSAPTKKPALPFGDLPMGYQHLHTQLQYECISPFYRRLGSSRRTCLRTGKWSGRAPSCIPICGKIENITAPKTQGLRWPWQAAIYRRTSGVHDGSLHKGAWFLVCSGALVNERTVVVAAHCVTDLGKVTMIKTADLKVVLGKFYRDDDRDEKTIQSLQISAIILHPNYDPILLDADIAILKLLDKARISTRVQPICLAASRDLSTSFQESHITVAGWNVLADVRSPGFKNDTLRSGVVSVVDSLLCEEQHEDHGIPVSVTDNMFCASWEPTAPSDICTAETGGIAAVSFPGRASPEPRWHLMGLVSWSYDKTCSHRLSTAFTKVLPFKDWIERNMK

SEQ ID NO: 9982 - protein, 720 aa, Homo Sapiens
MELGCWTQLGLTFLQLLLISSLPREYTVINEACPGAEWNIMCRECCEYDQIECVCPGKREVVGYTIPCCRNEENECDSCLIHPGCTIFENCKSCRNGSWGGTLDDFYVKGFYCAECRAGWYGGDCMRCGQVLRAPKGQILLESYPLNAHCEWTIHAKPGFVIQLRFVMLSLEFDYMCQYDYVEVRDGDNRDGQIIKRVCGNERPAPIQSIGSSLHVLFHSDGSKNFDGFHAIYEEITACSSSPCFHDGTCVLDKAGSYKCACLAGYTGQRCENLLEERNCSDPGGPVNGYQKITGGPGLINGRHAKIGTVVSFFCNNSYVLSGNEKRTCQQNGEWSGKQPICIKACREPKISDLVRRRVLPMQVQSRETPLHQLYSAAFSKQKLQSAPTKKPALPFGDLPMGYQHLHTQLQYECISPFYRRLGSSRRTCLRTGKWSGRAPSCIPICGKIENITAPKTQGLRWPWQAAIYRRTSGVHDGSLHKGAWFLVCSGALVNERTVVVAAHCVTDLGKVTMIKTADLKVVLGKFYRDDDRDEKTIQSLQISAIILHPNYDPILLDADIAILKLLDKARISTRVQPICLAASRDLSTSFQESHITVAGWNVLADVRSPGFKNDTLRSGVVSVVDSLLCEEQHEDHGIPVSVTDNMFCASWEPTAPSDICTAETGGIAAVSFPGRASPEPRWHLMGLVSWSYDKTCSHRLSTAFTKVLPFKDWIERNMK

SEQ ID NO: 9983 - protein, 416 aa, Homo Sapiens
MLKLAPWCLSFVTTPMFLVAMRKELASRMEWSGKQPICIKACREPKISDLVRRRVLPMQVQSRETPLHQLYSAAFSKQKLQSAPTKKPALPFGDLPMGYQHLHTQLQYECISPFYRRLGSSRRTCLRTGKWSGRAPSCIPICGKIENITAPKTQGLRWPWQAAIYRRTSGVHDGSLHKGAWFLVCSGALVNERTVVVAAHCVTDLGKVTMIKTADLKVVLGKFYRDDDRDEKTIQSLQISAIILHPNYDPILLDADIAILKLLDKARISTRVQPICLAASRDLSTSFQESHITVAGWNVLADVRSPGFKNDTLRSGVVSVVDSLLCEEQHEDHGIPVSVTDNMFCASWEPTAPSDICTAETGGIAAVSFPGRASPEPRWHLMGLVSWSYDKTCSHRLSTAFTKVLPFKDWIERNMK

SEQ ID NO: 9984 - protein, 1251 aa, Homo Sapiens
MRLLLLVPLLLAPAPGSSAPKVRRQSDTWGPWSQWSPCSRTCGGGVSFRERPCYSQRRDGGSSCVGPARSHRSCRTESCPDGARDFRAEQCAEFDGAEFQGRRYRWLPYYSAPNKCELNCIPKGENFYYKHREAVVDGTPCEPGKRDVCVDGSCRVVGCDHELDSSKQEDKCLRCGGDGTTCYPVAGTFDANDLSRAVKNVRGEYYLNGHWTIEAARALPAASTILHYERGAEGDLAPERLHARGPTSEPLVIELISQEPNPGVHYEYHLPLRRPSPGFSWSHGSWSDCSAECGGGHQSRLVFCTIDHEAYPDHMCQRQPRPADRRSCNLHPCPETKRWKAGPWAPCSASCGGGSQSRSVYCISSDGAGIQEAVEEAECAGLPGKPPAIQACNLQRCAAWSPEPWGECSVSCGVGVRKRSVTCRGERGSLLHTAACSLEDRPPLTEPCVHEDCPLLSDQAWHVGTWGLCSKSCSSGTRRRQVICAIGPPSHCGSLQHSKPVDVEPCNTQPCHLPQEVPSMQDVHTPASNPWMPLGPQESPASDSRGQWWAAQEHPSARGDHRGERGDPRGDQGTHLSALGPAPSLQQPPYQQPLRSGSGPHDCRHSPHGCCPDGHTASLGPQWQGCPGAPCQQSRYGCCPDRVSVAEGPHHAGCTKSYGGDSTGGMPRSRAVASTVHNTHQPQAQQNEPSECRGSQFGCCYDNVATAAGPLGEGCVGQPSHAYPVRCLLPSAHGSCADWAARWYFVASVGQCNRFWYGGCHGNANNFASEQECMSSCQGSLHGPRRPQPGASGRSTHTDGGGSSPAGEQEPSQHRTGAAVQRKPWPSGGLWRQDQQPGPGEAPHTQAFGEWPWGQELGSRAPGLGGDAGSPAPPFHSSSYRISLAGVEPSLVQAALGQLVRLSCSDDTAPESQAAWQKDGQPISSDRHRLQFDGSLIIHPLQAEDAGTYSCGSTRPGRDSQKIQLRIIGGDMAVLSEAELSRFPQPRDPAQDFGQAGAAGPLGAIPSSHPQPANRLRLDQNQPRVVDASPGQRIRMTCRAEGFPPPAIEWQRDGQPVSSPRHQLQPDGSLVISRVAVEDGGFYTCVAFNGQDRDQRWVQLRVLGELTISGLPPTVTVPEGDTARLLCVVAGESVNIRWSRNGLPVQADGHRVHQSPDGTLLIYNLRARDEGSYTCSAYQGSQAVSRSTEVKVVSPAPTAQPRDPGRDCVDQPELANCDLILQAQLCGNEYYSSFCCASCSRFQPHAQPIWQ

SEQ ID NO: 9985 - protein, 929 aa, Homo Sapiens
MRLLLLVPLLLAPAPGSSAPKVRRQSDTWGPWSQWSPCSRTCGGGVSFRERPCYSQRRDGGSSCVGPARSHRSCRTESCPDGARDFRAEQCAEFDGAEFQGRRYRWLPYYSAPNKCELNCIPKGENFYYKHREAVVDGTPCEPGKRDVCVDGSCRVVGCDHELDSSKQEDKCLRCGGDGTTCYPVAGTFDANDLSRAVKNVRGEYYLNGHWTIEAARALPAASTILHYERGAEGDLAPERLHARGPTSEPLVIELISQEPNPGVHYEYHLPLRRPSPGFSWSHGSWSDCSAECGGGHQSRLVFCTIDHEAYPDHMCQRQPRPADRRSCNLHPCPETKRWKAGPWAPCSASCGGGSQSRSVYCISSDGAGIQEAVEEAECAGLPGKPPAIQACNLQRCAAWSPEPWGECSVSCGVGVRKRSVTCRGERGSLLHTAACSLEDRPPLTEPCVHEDCPLLSDQAWHVGTWGLCSKSCSSGTRRRQVICAIGPPSHCGSLQHSKPVDVEPCNTQPCHLPQEVPSMQDVHTPASNPWMPLGPQESPASDSRGQWWAAQEHPSARGDHRGERGDPRGDQGTHLSALGPAPSLQQPPYQQPLRSGSGPHDCRHSPHGCCPDGHTASLGPQWQGCPGAPCQQSRYGCCPDRVSVAEGPHHAGCTKSYGGDSTGGMPRSRAVASTVHNTHQPQAQQNEPSECRGSQFGCCYDNVATAAGPLGEGCVGQPSHAYPVRCLLPSAHGSCADWAARWYFVASVGQCNRFWYGGCHGNANNFASEQECMSSCQGSLHGPRRPQPGASGRSTHTDGGGSSPAGEQEPSQHRTGAAVQRKPWPSGGLWRQDQQPGPGEAPHTQAFGEWPWGQELGSRAPGLGGDAGSPAPPFHSSSYRISLAGVEPSLVQAALGQLVRLSCSDDTAPESQAAWQKDGQPISSDRFT

SEQ ID NO: 9986 - protein, 808 aa, Homo Sapiens
MRLLLLVPLLLAPAPGSSAPKVRRQSDTWGPWSQWSPCSRTCGGGVSFRERPCYSQRRDGGSSCVGPARSHRSCRTESCPDGARDFRAEQCAEFDGAEFQGRRYRWLPYYSAPNKCELNCIPKGENFYYKHREAVVDGTPCEPGKRDVCVDGSCRVVGCDHELDSSKQEDKCLRCGGDGTTCYPVAGTFDANDLSRGYNQILIVPMGATSILIDEAAASRNFLAVKNVRGEYYLNGHWTIEAARALPAASTILHYERGAEGDLAPERLHARGPTSEPLVIELISQEPNPGVHYEYHLPLRRPSPGFSWSHGSWSDCSAECGGGHQSRLVFCTIDHEAYPDHMCQRQPRPADRRSCNLHPCPETKRWKAGPWAPCSASCGGGSQSRSVYCISSDGAGIQEAVEEAECAGLPGKPPAIQACNLQRCAAWSPEPWGECSVSCGVGVRKRSVTCRGERGSLLHTAACSLEDRPPLTEPCVHEDCPLLSDQAWHVGTWGLCSKSCSSGTRRRQVICAIGPPSHCGSLQHSKPVDVEPCNTQPCHLPQEVPSMQDVHTPASNPWMPLGPQESPASDSRGQWWAAQEHPSARGDHRGERGDPRGDQGTHLSALGPAPSLQQPPYQQPLRSGSGPHDCRHSPHGCCPDGHTASLGPQWQGCPGAPCQQSRYGCCPDRVSVAEGPHHAGCTKSYGGDSTGGMPRSRAVASTVHNTHQPQAQQNEPSECRGSQFGCCYDNVATAAGPLGEGCVGQPSHGLAWQVWSPRWCRQPWGSWCGSPAQTTLPRNPRLPGRKMASPSPLTGVCDGPPTSSDRCV

SEQ ID NO: 9987 - protein, 1262 aa, Homo Sapiens
MRLLLLVPLLLAPAPGSSAPKVRRQSDTWGPWSQWSPCSRTCGGGVSFRERPCYSQRRDGGSSCVGPARSHRSCRTESCPDGARDFRAEQCAEFDGAEFQGRRYRWLPYYSAPNKCELNCIPKGENFYYKHREAVVDGTPCEPGKRDVCVDGSCRVVGCDHELDSSKQEDKCLRCGGDGTTCYPVAGTFDANDLSRGYNQILIVPMGATSILIDEAAASRNFLAVKNVRGEYYLNGHWTIEAARALPAASTILHYERGAEGDLAPERLHARGPTSEPLVIELISQEPNPGVHYEYHLPLRRPSPGFSWSHGSWSDCSAECGGGHQSRLVFCTIDHEAYPDHMCQRQPRPADRRSCNLHPCPETKRWKAGPWAPCSASCGGGSQSRSVYCISSDGAGIQEAVEEAECAGLPGKPPAIQACNLQRCAAWSPEPWGECSVSCGVGVRKRSVTCRGERGSLLHTAACSLEDRPPLTEPCVHEDCPLLSDQAWHVGTWGLCSKSCSSGTRRRQVICAIGPPSHCGSLQHSKPVDVEPCNTQPCHLPQEVPSMQDVHTPASNPWMPLGPQESPASDSRGQWWAAQEHPSARGDHRGERGDPRGDQGTHLSALGPAPSLQQPPYQQPLRSGSGPHDCRHSPHGCCPDGHTASLGPQWQGCPGAPCQQSRYGCCPDRVSVAEGPHHAGCTKSYGGDSTGGMPRSRAVASTVHNTHQPQAQQNEPSECRGSQFGCCYDNVATAAGPLGEGCVGQPSHDWAARWYFVASVGQCNRFWYGGCHGNANNFASEQECMSSCQGSLHGPRRPQPGASGRSTHTDGGGSSPAGEQEPSQHRTGAAVQRKPWPSGGLWRQDQQPGPGEAPHTQAFGEWPWGQELGSRAPGLGGDAGSPAPPFHSSSYRISLAGVEPSLVQAALGQLVRLSCSDDTAPESQAAWQKDGQPISSDRHRLQFDGSLIIHPLQAEDAGTYSCGSTRPGRDSQKIQLRIIGGDMAVLSEAELSRFPQPRDPAQDFGQAGAAGPLGAIPSSHPQPANRLRLDQNQPRVVDASPGQRIRMTCRAEGFPPPAIEWQRDGQPVSSPRHQLQPDGSLVISRVAVEDGGFYTCVAFNGQDRDQRWVQLRVLGELTISGLPPTVTVPEGDTARLLCVVAGESVNIRWSRNGLPVQADGHRVHQSPDGTLLIYNLRARDEGSYTCSAYQGSQAVSRSTEVKVVSPAPTAQPRDPGRDCVDQPELANCDLILQAQLCGNEYYSSFCCASCSRFQPHAQPIWQ

SEQ ID NO: 9988 - protein, 1278 aa, Homo Sapiens
MRLLLLVPLLLAPAPGSSAPKVRRQSDTWGPWSQWSPCSRTCGGGVSFRERPCYSQRRDGGSSCVGPARSHRSCRTESCPDGARDFRAEQCAEFDGAEFQGRRYRWLPYYSAPNKCELNCIPKGENFYYKHREAVVDGTPCEPGKRDVCVDGSCRVVGCDHELDSSKQEDKCLRCGGDGTTCYPVAGTFDANDLSRGYNQILIVPMGATSILIDEAAASRNFLAVKNVRGEYYLNGHWTIEAARALPAASTILHYERGAEGDLAPERLHARGPTSEPLVIELISQEPNPGVHYEYHLPLRRPSPGFSWSHGSWSDCSAECGGGHQSRLVFCTIDHEAYPDHMCQRQPRPADRRSCNLHPCPETKRWKAGPWAPCSASCGGGSQSRSVYCISSDGAGIQEAVEEAECAGLPGKPPAIQACNLQRCAAWSPEPWGECSVSCGVGVRKRSVTCRGERGSLLHTAACSLEDRPPLTEPCVHEDCPLLSDQAWHVGTWGLCSKSCSSGTRRRQVICAIGPPSHCGSLQHSKPVDVEPCNTQPCHLPQEVPSMQDVHTPASNPWMPLGPQESPASDSRGQWWAAQEHPSARGDHRGERGDPRGDQGTHLSALGPAPSLQQPPYQQPLRSGSGPHDCRHSPHGCCPDGHTASLGPQWQGCPGAPCQQSRYGCCPDRVSVAEGPHHAGCTKSYGGDSTGGMPRSRAVASTVHNTHQPQAQQNEPSECRGSQFGCCYDNVATAAGPLGEGCVGQPSHAYPVRCLLPSAHGSCADWAARWYFVASVGQCNRFWYGGCHGNANNFASEQECMSSCQGSLHGPRRPQPGASGRSTHTDGGGSSPAGEQEPSQHRTGAAVQRKPWPSGGLWRQDQQPGPGEAPHTQAFGEWPWGQELGSRAPGLGGDAGSPAPPFHSSSYRISLAGVEPSLVQAALGQLVRLSCSDDTAPESQAAWQKDGQPISSDRHRLQFDGSLIIHPLQAEDAGTYSCGSTRPGRDSQKIQLRIIGGDMAVLSEAELSRFPQPRDPAQDFGQAGAAGPLGAIPSSHPQPANRLRLDQNQPRVVDASPGQRIRMTCRAEGFPPPAIEWQRDGQPVSSPRHQLQPDGSLVISRVAVEDGGFYTCVAFNGQDRDQRWVQLRVLGELTISGLPPTVTVPEGDTARLLCVVAGESVNIRWSRNGLPVQADGHRVHQSPDGTLLIYNLRARDEGSYTCSAYQGSQAVSRSTEVKVVSPAPTAQPRDPGRDCVDQPELANCDLILQAQLCGNEYYSSFCCASCSRFQPHAQPIWQ

SEQ ID NO: 9989 - protein, 1278 aa, Homo Sapiens; identical to SEQ ID NO: 9988

SEQ ID NO: 9990 - protein, 214 aa, Homo Sapiens
VHNTHQPQAQQNEPSECRGSQFGCCYDNVATAAGPLGEGCVGQPSHAYPVRCLLPSAHGSCADWAARWYFVASVGQCNRFWYGGCHGNANNFASEQECMSSCQGSLHGPRRPQPGASGRSTHTDGGGSSPAGEQEPSQHRTGAAVQRKPWPSGGLWRQDQQPGPGEAPHTQAFGEWPWGQELGSRAPGLGGDAGSPAPPFHSSSYRSHFPPLQD

SEQ ID NO: 9991 - protein, 311 aa, Homo Sapiens
  misc_feature (1)..(1): Xaa can be any naturally occurring amino acid
XCMSSCQGSLHGPRRPQPGASGRSTHTDGGGSSPAGEQEPSQHRTGAAVQRKPWPSGGLWRQDQQPGPGEAPHTQAFGEWPWGQELGSRAPGLGGDAGSPAPPFHSSSYRISLAGVEPSLVQAALGQLVRLSCSDDTAPESQAAWQKDGQPISSDRHRLQFDGSLIIHPLQAEDAGTYSCGSTRPGRDSQKIQLRIIGGDMAVLSEAELSRFPQPRDPAQDFGQAGAAGPLGAIPSSHPQPANRLRLDQNQPRVVDASPGQRIRMTCRAEGFPPPAIEWQRDGQPVSSPSTHRPAQGPWQGLRRPARAGQL

SEQ ID NO: 9992 - protein, 1627 aa, Homo Sapiens
MRLWSWVLHLGLLSAALGCGLAERPRRARRDPRAGRPPRPAAGPATCATRAARGRRASPPPPPPPGGAWEAVRVPRRRQQREARGATEEPSPPSRALYFSGRGEQLRLRADLELPRDAFTLQVWLRAEGGQRSPAVITGLYDKCSYISRDRGWVVGIHTISDQDNKDPRYFFSLKTDRARQVTTINAHRSYLPGQWVYLAATYDGQFMKLYVNGAQVATSGEQVGGIFSPLTQKCKVLMLGGSALNHNYRGYIEHFSLWKVARTQREILSDMETHGAHTALPQLLLQENWDNVKHAWSPMKDGSSPKVEFSNAHGFLLDTSLEPPLCGQTLCDNTEVIASYNQLSSFRQPKVVRYRVVNLYEDDHKNPTVTREQVDFQHHQLAEAFKQYNISWELDVLEVSNSSLRRRLILANCDISKIGDENCDPECNHTLTGHDGGDCRHLRHPAFVKKQHNGVCDMDCNYERFNFDGGECCDPEITNVTQTCFDPDSPHRAYLDVNELKNILKLDGSTHLNIFFAKSSEEELAGVATWPWDKEALMHLGGIVLNPSFYGMPGHTHTMIHEIGHSLGLYHVFRGISEIQSCSDPCMETEPSFETGDLCNDTNPAPKHKSCGDPGPGNDTCGFHSFFNTPYNNFMSYADDDCTDSFTPNQVARMHCYLDLVYQGWQPSRKPAPVALAPQVLGHTTDSVTLEWFPPIDGHFFERELGSACHLCLEGRILVQYASNASSPMPCSPSGHWSPREAEGHPDVEQPCKSSVRTWSPNSAVNPHTVPPACPEPQGCYLELEFLYPLVPESLTIWVTFVSTDWDSSGAVNDIKLLAVSGKNISLGPQNVFCDVPLTIRLWDVGEEVYGIQIYTLDEHLEIDAAMLTSTADTPLCLQCKPLKYKVVRDPPLQMDVASILHLNRKFVDMDLNLGSVYQYWVITISGTEESEPSPAVTYIHGSGYCGDGIIQKDQGEQCDDMNKINGDGCSLFCRQEVSFNCIDEPSRCYFHDGDGVCEEFEQKTSIKDCGVYTPQGFLDQWASNASVSHQDQQCPGWVIIGQPAASQVCRTKVIDLSEGISQHAWYPCTISYPYSQLAQTTFWLRAYFSQPMVAAAVIVHLVTDGTYYGDQKQETISVQLLDTKDQSHDLGLHVLSCRNNPLIIPVVHDLSQPFYHSQAVRVSFSSPLVAISGVALRSFDNFDPVTLSSCQRGETYSPAEQSCVHFACEKTDCPELAVENASLNCSSSDRYHGAQCTVSCRTGYVLQIRRDDELIKSQTGPSVTVTCTEGKWNKQVACEPVDCSIPDHHQVYAASFSCPEGTTFGSQCSFQCRHPAQLKGNNSLLTCMEDGLWSFPEALCELMCLAPPPVPNADLQTARCRENKHKVGSFCKYKCKPGYHVPGSSRKSKKRAFKTQCTQDGSWQEGACVPVTCDPPPPKFHGLYQCTNGFQFNSECRIKCEDSDASQGLGSNVIHCRKDGTWNGSFHVCQEMQGQCSVPNELNSNLKLQCPDGYAIGSECATSCLDHNSESIILPMNVTVRDIPHWLNPTRVERVVCTAGLKWYPHPALIHCVKGCEPFMGDNYCDAINNRAFCNYDGGDCCTSTVKTKKVTPFPMSCDLQGDCACRDPQAQEHSRKDLRGYSHG

SEQ ID NO: 9993 - protein, 827 aa, Homo Sapiens
MMCLKILRISLAILAGWALCSANSELGWTRKKSLVEREHLNQVLLEGERCWLGAKVRRPRASPQHHLFGVYPSRAGNYLRPYPVGEQEIHHTGRSKPDTEGNAVSLVPPDLTENPAGLRGAVEEPAAPWVGDSPIGQSELLGDDDAYLGNQRSKESLGEAGIQKGSAMAATTTTAIFTTLNEPKPETQRRGWAKSRQRRQVWKRRAEDGQGDSGISSHFQPWPKHSLKHRVKKSPPEESNQNGGEGSYREAETFNSQVGLPILYFSGRRERLLLRPEVLAEIPREAFTVEAWVKPEGGQNNPAIIAGVFDNCSHTVSDKGWALGIRSGKDKGKRDARFFFSLCTDRVKKATILISHSRYQPGTWTHVAATYDGRHMALYVDGTQVASSLDQSGPLNSPFMASCRSLLLGGDSSEDGHYFRGHLGTLVFWSTALPQSHFQHSSQHSSGEEEATDLVLTASFEPVNTEWVPFRDEKYPRLEVLQGFEPEPEILSPLQPPLCGQTVCDNVELISQYNGYWPLRGEKVIRYQVVNICDDEGLNPIVSEEQIRLQHEALNEAFSRYNISWQLSVHQVHNSTLRHRVVLVNCEPSKIGNDHCDPECEHPLTGYDGGDCRLQGRCYSWNRRDGLCHVECNNMLNDFDDGDCCDPQVADVRKTCFDPDSPKRAYMSVKELKEALQLNSTHFLNIYFASSVREDLAGAATWPWDKDAVTHLGGIVLSPAYYGMPGHTDTMIHEVGHVLGLYHVFKGVSERESCNDPCKETVPSMETGDLCADTAPTPKSELCREPEPTSDTCGFTRFPGAPFTNYMSYTGITTVLFCFLLRIHGGL

SEQ ID NO: 9994 - protein, 1791 aa, Homo Sapiens
MMCLKILRISLAILAGWALCSANSELGWTRKKSLVEREHLNQVLLEGERCWLGAKVRRPRASPQHHLFGVYPSRAGNYLRPYPVGEQEIHHTGRSKPDTEGNAVSLVPPDLTENPAGLRGAVEEPAAPWVGDSPIGQSELLGDDDAYLGNQRSKESLGEAGIQKGSAMAATTTTAIFTTLNEPKPETQRRGWAKSRQRRQVWKRRAEDGQGDSGISSHFQPWPKHSLKHRVKKSPPEESNQNGGEGSYREAETFNSQVGLPILYFSGRRERLLLRPEVLAEIPREAFTVEAWVKPEGGQNNPAIIAGVFDNCSHTVSDKGWALGIRSGKDKGKRDARFFFSLCTDRVKKATILISHSRYQPGTWTHVAATYDGRHMALYVDGTQVASSLDQSGPLNSPFMASCRSLLLGGDSSEDGHYFRGHLGTLVFWSTALPQSHFQHSSQHSSGEEEATDLVLTASFEPVNTEWVPFRDEKYPRLEVLQGFEPEPEILSPLQPPLCGQTVCDNVELISQYNGYWPLRGEKVIRYQVVNICDDEGLNPIVSEEQIRLQHEALNEAFSRYNISWQLSVHQVHNSTLRHRVVLVNCEPSKIGNDHCDPECEHPLTGYDGGDCRLQGRCYSWNRRDGLCHVECNNMLNDFDDGDCCDPQVADVRKTCFDPDSPKRAYMSVKELKEALQLNSTHFLNIYFASSVREDLAGAATWPWDKDAVTHLGGIVLSPAYYGMPGHTDTMIHEVGHVLGLYHVFKGVSERESCNDPCKETVPSMETGDLCADTAPTPKSELCREPEPTSDTCGFTRFPGAPFTNYMSYTDDNCTDNFTPNQVARMHCYLDLVYQQWTESRKPTPIPIPPMVIGQTNKSLTIHWLPPISGVVYDRASGSLCGACTEDGTFRQYVHTASSRRVCDSSGYWTPEEAVGPPDVDQPCEPSLQAWSPEVHLYHMNMTVPCPTEGCSLELLFQHPVQADTLTLWVTSFFMESSQVLFDTEILLENKESVHLGPLDTFCDIPLTIKLHVDGKVSGVKVYTFDERIEIDAALLTSQPHSPLCSGCRPVRYQVLRDPPFASGLPVVVTHSHRKFTDVEVTPGQMYQYQVLAEAGGELGEASPPLNHIHGAPYCGDGKVSERLGEECDDGDLVSGDGCSKVCELEEGFNCVGEPSLCYMYEGDGICEPFERKTSIVDCGIYTPKGYLDQWATRAYSSHEDKKKCPVSLVTGEPHSLICTSYHPDLPNHRPLTGWFPCVASENETQDDRSEQPEGSLKKEDEVWLKVCFNRPGEARAIFIFLTTDGLVPGEHQQPTVTLYLTDVRGSNHSLGTYGLSCQHNPLIINVTHHQNVLFHHTTSVLLNFSSPRVGISAVALRTSSRIGLSAPSNCISEDEGQNHQGQSCIHRPCGKQDSCPSLLLDHADVVNCTSIGPGLMKCAITCQRGFALQASSGQYIRPMQKEILLTCSSGHWDQNVSCLPVDCGVPDPSLVNYANFSCSEGTKFLKRCSISCVPPAKLQGLSPWLTCLEDGLWSLPEVYCKLECDAPPIILNANLLLPHCLQDNHDVGTICKYECKPGYYVAESAEGKVRNKLLKIQCLEGGIWEQGSCIPVVCEPPPPVFEGMYECTNGFSLDSQCVLNCNQEREKLPILCTKEGLWTQEFKLCENLQGECPPPPSELNSVEYKCEQGYGIGAVCSPLCVIPPSDPVMLPENITADTLEHWMEPVKVQSIVCTGRRQWHPDPVLVHCIQSCEPFQADGWCDTINNRAYCHYDGGDCCSSTLSSKKVIPFAADCDLDECTCRDPKAEENQ

SEQ ID NO: 9995 - protein, 678 aa, Homo Sapiens
MAAPGPLPAAALSPGAPTPRELMHGVAGVTSRAGRDREAGSVLPAGNRGARKASRRSSSRSMSRDNKFSKKDCLSIRNVVASIQTKEGLNLKLISGDVLYIWADVIVNSVPMNLQLGGGPLSRAFLQKAGPMLQKELDDRRRETEEKVGNIFMTSGCNLDCKAVLHAVAPYWNNGAETSWQIMANIIKKCLTTVEVLSFSSITFPMIGTGSLQFPKAVFAKLILSEVFEYSSSTRPITSPLQEVHFLVYTNDDEGCQAFLDEFTNWSRINPNKARIPMAGDTQGVVGTVSKPCFTAYEMKIGAITFQVATGDIATEQVDVIVNSTARTFNRKSGVSRAILEGAGQAVESECAVLAAQPHRDFIITPGGCLKCKIIIHVPGGKDVRKTVTSVLEECEQRKYTSVSLPAIGTGNAGKNPITVADNIIDAIVDFSSQHSTPSLKTVKVVIFQPELLNIFYDSMKKRDLSASLNFQSTFSMTTCNLPEHWTDMNHQLFCMVQLEPGQSEYNTIKDKFTRTCSSYAIEKIERIQNAFLWQSYQVKKRQMDIKNDHKNNERLLFHGTDADSVPYVNQHGFNRSCAGKNAVSYGKGTYFAVDASYSAKDTYSKPDSNGRKHMYVVRVLTGVFTKGRAGLVTPPPKNPHNPTDLFDSVTNNTRSPKLFVVFFDNQAYPEYLITFTA

SEQ ID NO: 9996 - protein, 483 aa, Homo Sapiens
MAAPGPLPAAALSPGAPTPRELMHGVAGVTSRAGRDREAGSVLPAGNRGARKASRRSSSRSMSRDNKFSKKDCLSIRNVVASIQTKEGLNLKLISGDVLYIWADVIVNSVPMNLQLGGGPLSRAFLQKAGPMLQKELDDRRRETEEKVGNIFMTSGCNLDCKAVLHAVAPYWNNGAETSWQVATGDIATEQVDVIVNSTARTFNRKSGVSRAILEGAGQAVESECAVLAAQPHRDFIITPGGCLKCKIIIHVPGGKDVRKTVTSVLEECEQRKYTSVSLPAIGTGNLPEHWTDMNHQLFCMVQLEPGQSEYNTIKDKFTRTCSSYAIEKIERIQNAFLWQSYQVKKRQMDIKNDHKNNERLLFHGTDADSVPYVNQHGFNRSCAGKNAVSYGKGTYFAVDASYSAKDTYSKPDSNGRKHMYVVRVLTGVFTKGRAGLVTPPPKNPHNPTDLFDSVTNNTRSPKLFVVFFDNQAYPEYLITFTA

SEQ ID NO: 9997 - protein, 444 aa, Homo Sapiens
MLQRIGLIFLHNIVVVSNCFYFQAFLDEFTNWSRINPNKARIPMAGDTQGVVGTVSKPCFTAYEMKIGAITFQVATGDIATEQVDVIVNSTARTFNRKSGVSRAILEGAGQAVESECAVLAAQPHRDFIITPGGCLKCKIIIHVPGGKDVRKTVTSVLEECEQRKYTSVSLPAIGTGNAGKNPITVADNIIDAIVDFSSQHSTPSLKTVKVVIFQPELLNIFYDSMKKRDLSASLNFQSTFSMTTCNLPEHWTDMNHQLFCMVQLEPGQSEYNTIKDKFTRTCSSYAIEKIERIQNAFLWQSYQVKKRQMDIKNDHKNNERLLFHGTDADSVPYVNQHGFNRSCAGKNAVSYGKGTYFAVDASYSAKDTYSKPDSNGRKHMYVVRVLTGVFTKGRAGLVTPPPKNPHNPTDLFDSVTNNTRSPKLFVVFFDNQAYPEYLITFTA

SEQ ID NO: 9998 - protein, 375 aa, Homo Sapiens
MLQRIGLIFLHNIVVVSNCFYFQAFLDEFTNWSRINPNKARIPMAGDTQGVVGTVSKPCFTAYEMKIGAITFQVATGDIATEQVDVIVNSTARTFNRKSGVSRAILEGAGQAVESECAVLAAQPHRDFIITPGGCLKCKIIIHVPGGKDVRKTVTSVLEECEQRKYTSVSLPAIGTGNLPEHWTDMNHQLFCMVQLEPGQSEYNTIKDKFTRTCSSYAIEKIERIQNAFLWQSYQVKKRQMDIKNDHKNNERLLFHGTDADSVPYVNQHGFNRSCAGKNAVSYGKGTYFAVDASYSAKDTYSKPDSNGRKHMYVVRVLTGVFTKGRAGLVTPPPKNPHNPTDLFDSVTNNTRSPKLFVVFFDNQAYPEYLITFTA

SEQ ID NO: 9999 - protein, 397 aa, Homo Sapiens
MHHVFKDHQRGEKRGFLSPENKNCRRLELRRGCSCSWGLCSQALMASLAGSLLPGSDRSGVETSEYAQGGVSDLQEEGKNAINSPMSPALVDVHPEDTQLEENEERTMIDPTSKEDPKFKELVKVLLDWINDVLVEERIIVKQLEEDLYDGQVLQKLLEKLAGCKLNVAEVTQSEIGQKQKLQTVLEAVHDLLRPRGWALRWSVDSIHGKNLVAILHLLVSLAMHFRAPIRLPEHVTVQVVVVRKREGLLHSSHISEELTTTTEMMMGRFERDAFDTLFDHAPDKLSVVKKSLITFVNKHLNKLNLEVTELETQFADGVYLVLLMGLLEDYFVPLHHFYLTPESFDQKVHNVSFAFELMLDGGLKKPKARPEDVVNLDLKSTLRVLYNLFTKYKNVE

SEQ ID NO: 10000 - protein, 194 aa, Homo Sapiens
MPRLKCSGAVIAHCSLELLASSDPSASASQGARTTVSDLQEEGKNAINSPMSPALVDVHPEDTQLEENEERTMIDPTSKEDPKFKELVKVLLDWINDVLVEERIIVKQLEEDLYDGQVLQKLLEKLAGCKLNVAEVTQSEIGQKQKLQTVLEAVHDLLRPRGWALRWSVDSIHGKNLVAILHLLVSLAMHFRAP

SEQ ID NO: 10001 - protein, 327 aa, Homo Sapiens
MSDLQEEGKNAINSPMSPALVDVHPEDTQLEENEERTMIDPTSKEDPKFKELVKVLLDWINDVLVEERIIVKQLEEDLYDGQVLQKLLEKLAGCKLNVAEVTQSEIGQKQKLQTVLEAVHDLLRPRGWALRWSVDSIHGKNLVAILHLLVSLAMHFRAPIRLPEHVTVQVVVVRKREGLLHSSHISEELTTTTEMMMGRFERDAFDTLFDHAPDKLSVVKKSLITFVNKHLNKLNLEVTELETQFADGVYLVLLMGLLEDYFVPLHHFYLTPESFDQKVHNVSFAFELMLDGGLKKPKARPEDVVNLDLKSTLRVLYNLFTKYKNVE

SEQ ID NO: 10002 - protein, 289 aa, Homo Sapiens
MSPALVDVHPEDTQLEENEERTMIDPTSKEDPKFKELVKVLLDWINDVLVEERIIVKQLEEDLYDGQVLQKLLEKLAGCKLNVAEVTQSEIGQKQKLQTVLEAVHDLLRPRGWALRWSVDSIHGKNLVAILHLLVSLAMHFRAPIRLPEHVTVQVVVVRKREGLLHSSHISEELTTTTEMMMGRFERDAFDTLFDHAPDKLSVVKKFADGVYLVLLMGLLEDYFVPLHHFYLTPESFDQKVHNVSFAFELMLDGGLKKPKARPEDVVNLDLKSTLRVLYNLFTKYKNVE

SEQ ID NO: 10003 - protein, 364 aa, Homo Sapiens
MSSAPRSPTPRPRRMKKDESFLGKLGGTLARKRRAREVSDLQEEGKNAINSPMSPALVDVHPEDTQLEENEERTMIDPTSKEDPKFKELVKVLLDWINDVLVEERIIVKQLEEDLYDGQVLQKLLEKLAGCKLNVAEVTQSEIGQKQKLQTVLEAVHDLLRPRGWALRWSVDSIHGKNLVAILHLLVSLAMHFRAPIRLPEHVTVQVVVVRKREGLLHSSHISEELTTTTEMMMGRFERDAFDTLFDHAPDKLSVVKKSLITFVNKHLNKLNLEVTELETQFADGVYLVLLMGLLEDYFVPLHHFYLTPESFDQKVHNVSFAFELMLDGGLKKPKARPEDVVNLDLKSTLRVLYNLFTKYKNVE

SEQ ID NO: 10004 - protein, 114 aa, Homo Sapiens
MDKSLLLELPILLCCFRALSGSLSMRNDAVIEIVQCRMCHLQFPGEKCSRGRGICTATTEEACMVGRMFKRDGNPWLTFMGCLKNCADVKGIRWSVYLVNFRCCRSHDLCNEDL

SEQ ID NO: 10005 - protein, 126 aa, Homo Sapiens
MDKSLLLELPILLCCFRALSGSLSMRNDAVNEIVAVKNNFPVIEIVQCRMCHLQFPGEKCSRGRGICTATTEEACMVGRMFKRDGNPWLTFMGCLKNCADVKGIRWSVYLVNFRCCRSHDLCNEDL

SEQ ID NO: 10006 - protein, 113 aa, Homo Sapiens
MLVLFLLGTVFLLCPYWGELHDPIKATEIMCYECKKYHLGLCYGVMTSCSLKHKQSCAVENFYILTRKGQSMYHYSKLSCMTSCEDINFLGFTKRVELICCDHSNYCNLPEGV

SEQ ID NO: 10007 - protein, 70 aa, Homo Sapiens
MLVLFLLGTVFLLCPYWGELHDPIKGQSMYHYSKLSCMTSCEDINFLGFTKRVELICCDHSNYCNLPEGV

SEQ ID NO: 10008 - protein, 98 aa, Homo Sapiens
MNKHFLFLFLLYCLIVAVTSLQCITCHLRTRTDRCRRGFGVCTAQKGEACMLLRIYQRNTLQISYMVCQKFCRDMTFDLRNRTYVHTCCNYNYCNFKL

SEQ ID NO: 10009 - protein, 59 aa, Homo Sapiens
MRKMNTLLLVSLSFLYLKEGDKHMYSTHMCKYKCREEESSKRGLLRVTLCCDRNFCNVF

SEQ ID NO: 10010 - protein, 98 aa, Homo Sapiens
MRKMNTLLLVSLSFLYLKEVMGLKCNTCIYTEGWKCMAGRGTCIAKENELCSTTAYFRGDKHMYSTHMCKYKCREEESSKRGLLRVTLCCDRNFCNVF

SEQ ID NO: 10011 - protein, 125 aa, Homo Sapiens
MLGMSLASLHFLWQTLDYLSPIPFWPTFPSTSSPAQHFGPRLPSPDPTLFCSLLTSWPPRFSHLTQLHPRHQRILQQQQHSQTPREPHFLLTTLLRKCQWWVSLKGCSSWLKVPQPRSLGLSSQT

SEQ ID NO: 10012 - protein, 543 aa, Homo Sapiens
MNCLEGPGKTCGPLASEEELVSACQLEKEEENEGEEEEEEEDEEDLDPDLDPDLEEEENDLGDPAVLGAVHNTQRALLSSPGVKAPGMLGMSLASLHFLWQTLDYLSPIPFWPTFPSTSSPAQHFGPRLPSPDPTLFCSLLTSWPPRFSHLTQLHPRHQRILQQQQHSQTPSPPAKKPWSQQPDPYANLMTRKEKDWVIKVQMVQLQSAKPRLDDYYYQEYYQKLEKKQADEELLGRRNRVESLKLVTPYIPKAEAYESVVRIEGSLGQVAVSTCFSPRRAIDAVPHGTQEQDIEAASSQRLRVLYRIEKMFLQLLEIEEGWKYRPPPPCFSEQQSNQVEKLFQTLKTQEQNNLEEAADGFLQVLSVRKGKALVARLLPFLPQDQAVTILLAITHHLPLLVRRDVADQALQMLFKPLGKCISHLTLHELLQGLQGLTLLPPGSSERPVTVVLQNQFGISLLYALLSHGEQLVSLHSSLEEPNSDHTAWTDMVVLIAWEIAQMPTASLAEPLAFPSNLLPLFCHHVDKQLVQQLEARMEFAWIY

SEQ ID NO: 10013 - protein, 543 aa, Homo Sapiens; identical to SEQ ID NO: 10012

SEQ ID NO: 10014 - protein, 354 aa, Homo Sapiens
MTRKEKDWVIKVQMVQLQSAKPRLDDYYYQEYYQKLEKKQADEELLGRRNRVESLKLVTPYIPKAEAYESVVRIEGSLGQVAVSTCFSPRRAIDAVPHGTQEQDIEAASSQRLRVLYRIEKMFLQLLEIEEGWKYRPPPPCFSEQQSNQVEKLFQTLKTQEQNNLEEAADGFLQVLSVRKGKALVARLLPFLPQDQAVTILLAITHHLPLLVRRDVADQALQMLFKPLGKCISHLTLHELLQGLQGLTLLPPGSSERPVTVVLQNQFGISLLYALLSHGEQLVSLHSSLEEPNSDHTAWTDMVVLIAWEIAQMPTASLAEPLAFPSNLLPLFCHHVDKQLVQQLEARMEFAWIY

SEQ ID NO: 10015 - protein, 158 aa, Homo Sapiens
QALQMLFKPLGKCISHLTLHELLQGLQGLTLLPPGSSERPVTVVLQNQDRHGGSDCLGDSPNAYSLSGRTPSFPQQPTSPVLSPRGQTIGSAAGGQDGVCLDLLICLFWNTCMWEVESSDTSYIDYVYRDPESLKTFLMPLYIGEPFPIFISFLQKSK

SEQ ID NO: 10016 - protein, 188 aa, Homo Sapiens
  misc_feature (1)..(1): Xaa can be any naturally occurring amino acid
XENEGEEEEEEEDEEDLDPDLDPDLEEEENDLGDPAVLGAVHNTQRALLSSPGVKAPGMLGMSLASLHFLWQTLDYLSPIPFWPTFPSTSSPAQHFGPRLPSPDPTLFCSLLTSWPPRFSHLTQLHPRHQRILQQQQHSQTPREPHFLLTTLLRKCQWWVSLKGCSSWLKVPQPRSLGLSSQTPMLTS

SEQ ID NO: 10017 - protein, 304 aa, Homo Sapiens
MAGPCCVWGVVFFSCLSPAGHGGVNQLGGVFVNGRPLPDVVRQRIVELAHQGVRPCDISRQLRVSHGCVSKILGRYYETGSIKPGVIGGSKPKVATPKVVDKIAEYKRQNPTMFAWEIRDRLLAEGICDNDTVPSVSSINRIIRTKVQQPFHPTPDGAGTGVTAPGHTIVPSTASPPVSSASNDPVGSYSINGILGIPRSNDVSEGSVPNGDSQSGVDSLRKHLRADTFTQQQLEALDRVFERPSYPDVFQASEHIKSEQGNEYSLPALTPGLDEVKSSLSASTNPELGSNVSGTQTYPVVTGR

SEQ ID NO: 10018 - protein, 396 aa, Homo Sapiens
MDMHCKADPFSAMHPGHGGVNQLGGVFVNGRPLPDVVRQRIVELAHQGVRPCDISRQLRVSHGCVSKILGRYYETGSIKPGVIGGSKPKVATPKVVDKIAEYKRQNPTMFAWEIRDRLLAEGICDNDTVPSVSSINRIIRTKVQQPFHPTPDGAGTGVTAPGHTIVPSTASPPVSSASNDPVGSYSINGILGIPRSNGEKRKRDEDVSEGSVPNGDSQSGVDSLRKHLRADTFTQQQLEALDRVFERPSYPDVFQASEHIKSEQGNEYSLPALTPGLDEVKSSLSASTNPELGSNVSGTQTYPVVTGRDMASTTLPGYPPHVPPTGQGSYPTSTLAGMVPEAAVGPSSSLMSKPGRKLAEVPPCVQPTGASSPATRTATPSTRPTTRLGDSATPPY

SEQ ID NO: 10019 - protein, 394 aa, Homo Sapiens
MDMHCKADPFSAMHPGHGGVNQLGGVFVNGRPLPDVVRQRIVELAHQGVRPCDISRQLRVSHGCVSKILGRYYETGSIKPGVIGGSKPKVATPKVVDKIAEYKRQNPTMFAWEIRDRLLAEGICDNDTVPSVSSINRIIRTKVQQPFHPTPDGAGTGVTAPGHTIVPSTASPPVSSASNDPVGSYSINGILGIPRSNGEKRKRDEDVSEGSVPNGDSQSGVDSLRKHLRADTFTQQQLEALDRVFERPSYPDVFQASEHIKSEQGNEYSLPALTPGLDEVKSSLSASTNPELGSNVSGTQTYPVVTGRDMASTTLPGYPPHVPPTGQGSYPTSTLAGMVPGSEFSGNPYSHPQYTAYNEAWRFSNPALLSSPYYYSAAPRGSAPAAAAAAYDRH

SEQ ID NO: 10020 - protein, 214 aa, Homo Sapiens
MDMHCKADPFSAMHPGHGGVNQLGGVFVNGRPLPDVVRQRIVELAHQGVRPCDISRQLRVSHGCVSKILGRYYETGSIKPGVIGGSKPKVATPKVVDKIAEYKRQNPTMFAWEIRDRLLAEGICDNDTVPSVSSINRIIRTKVQQPFHPTPDGAGTGVTAPGHTIVPSTASPPVSSASNDPVGSYSINGILGIPRSNGEKRKRDEVEVYTDPAH

SEQ ID NO: 10021 - protein, 417 aa, Homo Sapiens
MDMHCKADPFSAMHPGHGGVNQLGGVFVNGRPLPDVVRQRIVELAHQGVRPCDISRQLRVSHGCVSKILGRYYETGSIKPGVIGGSKPKVATPKVVDKIAEYKRQNPTMFAWEIRDRLLAEGICDNDTVPSVSSINRIIRTKVQQPFHPTPDGAGTGVTAPGHTIVPSTASPPVSSASNDPVGSYSINGILGIPRSNGEKRKRDEVEVYTDPAHIRGGGGLHLVWTLRDVSEGSVPNGDSQSGVDSLRKHLRADTFTQQQLEALDRVFERPSYPDVFQASEHIKSEQGNEYSLPALTPGLDEVKSSLSASTNPELGSNVSGTQTYPVVTGRDMASTTLPGYPPHVPPTGQGSYPTSTLAGMVPGSEFSGNPYSHPQYTAYNEAWRFSNPALLSSPYYYSAAPRGSAPAAAAAAYDRH

SEQ ID NO: 10022 - protein, 393 aa, Homo Sapiens
MDMHCKADPFSAMHRHGGVNQLGGVFVNGRPLPDVVRQRIVELAHQGVRPCDISRQLRVSHGCVSKILGRYYETGSIKPGVIGGSKPKVATPKVVDKIAEYKRQNPTMFAWEIRDRLLAEGICDNDTVPSVSSINRIIRTKVQQPFHPTPDGAGTGVTAPGHTIVPSTASPPVSSASNDPVGSYSINGILGIPRSNGEKRKRDEDVSEGSVPNGDSQSGVDSLRKHLRADTFTQQQLEALDRVFERPSYPDVFQASEHIKSEQGNEYSLPALTPGLDEVKSSLSASTNPELGSNVSGTQTYPVVTGRDMASTTLPGYPPHVPPTGQGSYPTSTLAGMVPGSEFSGNPYSHPQYTAYNEAWRFSNPALLSSPYYYSAAPRGSAPAAAAAAYDRH

SEQ ID NO: 10023 - protein, 257 aa, Homo Sapiens
MAWSSKSWLCLIASSCPRDTLLPSAHHASPVPASHLTQVSNGCVSKILGRYYRTGVLEPKGIGGSKPRLATPPVVARIAQLKGECPALFAWEIQRQLCAEGLCTQDKTPSVSSINRVLRALQEDQGLPCTRLRSPAVLAPAVLTPHSGSETPRGTHPGTGHRNRTIFSPSQAEALEKEFQRGQYPDSVARGKLATATSLPEDTVRVWFSNRRAKWRRQEKLKWEMQLPGASQGLTVPRVAPGIISAQGPTVFMSRKY

SEQ ID NO: 10024 - protein, 257 aa, Homo Sapiens; identical to SEQ ID NO: 10023

SEQ ID NO: 10025 - protein, 341 aa, Homo Sapiens
MAWSSKSWLCLIASSCPRDTLLPSAHHASPVPASHLTQVSNGCVSKILGRYYRTGVLEPKGIGGSKPRLATPPVVARIAQLKGECPALFAWEIQRQLCAEGLCTQDKTPSVSSINRVLRALQEDQGLPCTRLRSPAVLAPAVLTPHSGSETPRGTHPGTGHRNRTIFSPSQAEALEKEFQRGQYPDSVARGKLATATSLPEDTVRVWFSNRRAKWRRQEKLKWEMQLPGASQGLTVPRVAPGIISAQQSPGSVPTAALPALEPLGPSCYQLCWATAPERCLSDTPPKACLKPCWGHLPPQPNSLDSGLLCLPCPSSHCHLASLSGSQALLWPGCPLLYGLE

SEQ ID NO: 10026 - protein, 348 aa, Homo Sapiens
MHQDGISSMNQLGGLFVNGRPLPLDTRQQIVRLAVSGMRPCDISRILKVSNGCVSKILGRYYRTGVLEPKGIGGSKPRLATPPVVARIAQLKGECPALFAWEIQRQLCAEGLCTQDKTPSVSSINRVLRALQEDQGLPCTRLRSPAVLAPAVLTPHSGSETPRGTHPGTGHRNRTIFSPSQAEALEKEFQRGQYPDSVARGKLATATSLPEDTVRVWFSNRRAKWRRQEKLKWEMQLPGASQGLTVPRVAPGIISAQQSPGSVPTAALPALEPLGPSCYQLCWATAPERCLSDTPPKACLKPCWDCGSFLLPVIAPSCVDVAWPCLDASLAHHLIGGAGKATPTHFSH

SEQ ID NO: 10027 - protein, 349 aa, Homo Sapiens
MHQDGISSMNQLGGLFVNGRPLPLDTRQQIVRLAVSGMRPCDISRILKVSNGCVSKILGRYYRTGVLEPKGIGGSKPRLATPPVVARIAQLKGECPALFAWEIQRQLCAEGLCTQDKTPSVSSINRVLRALQEDQGLPCTRLRSPAVLAPAVLTPHSGSETPRGTHPGTGHRNRTIFSPSQAEALEKEFQRGQYPDSVARGKLATATSLPEDTVRVWFSNRRAKWRRQEKLKWEMQLPGASQGLTVPRVAPGIISAQQSPGSVPTAALPALEPLGPSCYQLCWATAPERCLSDTPPKACLKPCWDCGSFLLPVIAPSCVDVAWPCLDASLAHHLIGGAGKATPTHFSHP

SEQ ID NO: 10028 - protein, 351 aa, Homo Sapiens
MHQDGISSMNQLGGLFVNGRPLPLDTRQQIVRLAVSGMRPCDISRILKVSNGCVSKILGRYYRTGVLEPKGIGGSKPRLATPPVVARIAQLKGECPALFAWEIQRQLCAEGLCTQDKTPSVSSINRVLRALQEDQGLPCTRLRSPAVLAPAVLTPHSGSETPRGTHPGTGHRNRTIFSPSQAEALEKEFQRGQYPDSVARGKLATATSLPEDTVRVWFSNRRAKWRRQEKLKWEMQLPGASQGLTVPRVAPGIISAQQSPGSVPTAALPALEPLGPSCYQLCWATAPERCLSDTPPKACLKPCWGHLPPQPNSLDSGLLCLPCPSSHCHLASLSGSQALLWPGCPLLYGLE

SEQ ID NO: 10029 - protein, 343 aa, Homo Sapiens
MNQLGGLFVNGRPLPLDTRQQIVRLAVSGMRPCDISRILKVSNGCVSKILGRYYRTGVLEPKGIGGSKPRLATPPVVARIAQLKGECPALFAWEIQRQLCAEGLCTQDKTPSVSSINRVLRALQEDQGLPCTRLRSPAVLAPAVLTPHSGSETPRGTHPGTGHRNRTIFSPSQAEALEKEFQRGQYPDSVARGKLATATSLPEDTVRVWFSNRRAKWRRQEKLKWEMQLPGASQGLTVPRVAPGIISAQQSPGSVPTAALPALEPLGPSCYQLCWATAPERCLSDTPPKACLKPCWGHLPPQPNSLDSGLLCLPCPSSHCHLASLSGSQALLWPGCPLLYGLE

SEQ ID NO: 10030 - protein, 423 aa, Homo Sapiens
MAAALRVAAVGARLSVLASGLRAAVRSLCSQAITVGAPVIGLNDSGGARIQEGVESLAGYADIFLRNVTASGVIPQISLIMGPCAGGAVYSPALTDFTFMVKDTSYLFITGPDVVKSVTNEDVTQEELGGAKTHTTMSGVAHRAFENDVDALCNLRDFFNYLPLSSQDPAPVRECHDPSDRLVPELDTIVPLESTKAYNMVDIIHSVVDEREFFEIMPNYAKNIIVGFARMNGRTVGIVGNQPKVASGCLDINSSVKGARFVRFCDAFNIPLITFVDVPGFLPGTAQEYGGIIRHGAKLLYAFAEATVPKVTVITRKAYGGAYDVMSSKHLCGDTNYAWPTAEIAVMGAKGAVEIIFKGHENVEAAQAEYIEKFANPFPAAVRGFVDDIIQPSSTRARICCDLDVLASKKVQRPWRKHANIPL

SEQ ID NO: 10031 - protein, 192 aa, Homo Sapiens [sequence omitted]

SEQ ID NO: 10032 - protein, 516 aa, Homo Sapiens
MAAALRVAAVGARLSVLASGLRAAVRSLCSQATSVNERIENKRRTALLGGGQRRIDAQHKRGKLTARERISLLLDPGSFVESDMFVEHRCADFGMAADKNKDFTVFGGSLSGAHAQKICKIMDQAITVGAPVIGLNDSGGARIQEGVESLAGYADIFLRNVTASGVIPQISLIMGPCAGGAVYSPALTDFTFMVKDTSYLFITGPDVVKSVTNEDVTQEELGGAKTHTTMSGVAHRAFENDVDALCNLRDFFNYLPLSSQDPAPVRECHDPSDRLVPELDTIVPLESTKAYNMVDIIHSVVDEREFFEIMPNYAKNIIVGFARMNGRTVGIVGNQPKVASGCLDINSSVKGARFVRFCDAFNIPLITFVDVPGFLPGTAQEYGGIIRHGAKLLYAFAEATVPKVTVITRKAYGGAYDVMSSKHLCGDTNYAWPTAEIAVMGAKGAVEIIFKGHENVEAAQAEYIEKFANPFPAAVRGFVDDIIQPSSTRARICCDLDVLASKKVQRPWRKHANIPL

SEQ ID NO: 10033 - protein, 539 aa, Homo Sapiens
MAAALRVAAVGARLSVLASGLRAAVRSLCSQATSVNERIENKRRTALLGGGQRRIDAQHKRGKLTARERISLLLDPGSFVESDMFVEHRCADFGMAADKNKFPGDSVVTGRGRINGRLVYVFSQDFTVFGGSLSGAHAQKICKIMDQAITVGAPVIGLNDSGGARIQEGVESLAGYADIFLRNVTASGVIPQISLIMGPCAGGAVYSPALTDFTFMVKDTSYLFITGPDVVKSVTNEDVTQEELGGAKTHTTMSGVAHRAFENDVDALCNLRDFFNYLPLSSQDPAPVRECHDPSDRLVPELDTIVPLESTKAYNMVDIIHSVVDEREFFEIMPNYAKNIIVGFARMNGRTVGIVGNQPKVASGCLDINSSVKGARFVRFCDAFNIPLITFVDVPGFLPGTAQEYGGIIRHGAKLLYAFAEATVPKVTVITRKAYGGAYDVMSSKHLCGDTNYAWPTAEIAVMGAKGAVEIIFKGHENVEAAQAEYIEKFANPFPAAVRGFVDDIIQPSSTRARICCDLDVLASKKVQRPWRKHANIPL

SEQ ID NO: 10034 - protein, 559 aa, Homo Sapiens
MAAALRVAAVGARLSVLASGLRAAVRSLCSQATSVNERIENKRRTALLGGGQRRIDAQHKRGKLTARERISLLLDPGSFVESDMFVEHRCADFGMAADKNKFPGDSVVTGRGRINGRLVYVFSQDFTVFGGSLSGAHAQKICKIMDQAITVGAPVIGLNDSGGARIQEGVESLAGYADIFLRNVTASGVIPQISLIMGPCAGGAVYSPALTDFTFMVKDTSYLFITGPDVVKSVTNEDVTQEELGGAKTHTTMSGVAHRAFENDVDALCNLRDFFNYLPLSSQDPAPVRECHDPSDRLVPELDTIVPLESTKAYNMVDIIHSVVDEREFFEIMPNYAKNIIVGFARMNGRTVGIVGNQPKVASDSISFTPWNYARRQYRPYFAGCLDINSSVKGARFVRFCDAFNIPLITFVDVPGFLPGTAQEYGGIIRHGAKLLYAFAEATVPKVTVITRKAYGGAYDVMSSKHLCGDTNYAWPTAEIAVMGAKGAVEIIFKGHENVEAAQAEYIEKFANPFPAAVRGFVDDIIQPSSTRARICCDLDVLASKKVQRPWRKHANIPL

SEQ ID NO: 10035 - protein, 303 aa, Homo Sapiens
MAAALRVAAVGARLSVLASGLRAAVRSLCSQATSVNERIENKRRTALLGGGQRRIDAQHKRGKLTARERISLLLDPGSFVESDMFVEHRCADFGMAADKNKFPGDSVVTGRGRINGRLVYVFSQDFTVFGGSLSGAHAQKICKIMDQAITVGAPVIGLNDSGGARIQEGVESLAGYADIFLRNVTASGVIPQISLIMGPCAGGAVYSPALTDFTFMVKDTSYLFITGPDVVKSVTNEDVTQEELGGAKTHTTMSGVAHRAFENDVDALCNLRDFFNYLPLSSQDPAPVRECHDPSPTFCLWLH

SEQ ID NO: 10036 - protein, 550 aa, Homo Sapiens
MAAALRVAAVGARLSVLASGLRAAVRSLCSQATSVNERIENKRRTALLGGGQRRIDAQHKRGKLTARERISLLLDPGSFVESDMFVEHRCADFGMAADKNKFPGDSVVTGRGRINGRLVYVFSQDFTVFGGSLSGAHAQKICKIMDQAITVGAPVIGLNDSGGARIQEGVESLAGYADIFLRNVTASGVIPQISLIMGPCAGGAVYSPALTDFTFMVKDTSYLFITGPDVVKSVTNEDVTQEELGGAKTHTTMSGVAHRAFENDVDALCNLRDFFNYLPLSSQDPAPVRECHDPSDRLVPELDTIVPLESTKAYNMVDIIHSVVDEREFFEIMPNYAKNIIVGFARMNGRTVGIVGNQPKVASGCLDINSSVKGARFVRFCDAFNIPLITFVDVPGFLPGTAQEYGGIIRHGAKLLYAFAEATVPKVTVITRKAYGGAYDVMSSKHLCGDTNYAWPTAEIAVMGAKGAVEIIFKGHENVEAAQAEYIEKFANPFPAAVRGFVDDIIQPSSTRARICCDLDVLASKKVRVQEVFHQVVQSGHRDGRGAVRW

SEQ ID NO: 10037 - protein, 405 aa, Homo Sapiens
MAAALRVAAVGARLSVLASGLRAAVRSLCSQATSVNERIENKRRTALLGGGQRRIDAQHKRGKLTARERISLLLDPGSFVESDMFVEHRCADFGMAADKNKFPGDSVVTGRGRINGRLVYVFSQDFTVFGGSLSGAHAQKICKIMDQAITVGAPVIGLNDSGGARIQEGVESLAGYADIFLRNVTASGVIPQISLIMGPCAGGAVYSPALTDFTFMVKDTSYLFITGPDVVKSVTNEDVTQEELGGAKTHTTMSGVAHRAFENDVDALCNLRDFFNYLPLSSQDPAPVRECHDPSDRLVPELDTIVPLESTKAYNMVDIIHSVVDEREFFEIMPNYAKNIIVGFARMNGRTVGIVGNQPKVASGCLDINSSVKGARFVRFCDAFNIPLITFVDVPGFLPGLWRCL

SEQ ID NO: 10038 - protein, 520 aa, Homo Sapiens
MAAALRVAAVGARLSVLASGLRAAVRSLCSQATSVNERIENKRRTALLGGGQRRIDAQHKRGKLTARERISLLLDPGSFVESDMFVEHRCADFGMAADKNKFPGDSVVTGRGRINGRLVYVFSQIMDQAITVGAPVIGLNDSGGARIQEGVESLAGYADIFLRNVTASGVIPQISLIMGPCAGGAVYSPALTDFTFMVKDTSYLFITGPDVVKSVTNEDVTQEELGGAKTHTTMSGVAHRAFENDVDALCNLRDFFNYLPLSSQDPAPVRECHDPSDRLVPELDTIVPLESTKAYNMVDIIHSVVDEREFFEIMPNYAKNIIVGFARMNGRTVGIVGNQPKVASGCLDINSSVKGARFVRFCDAFNIPLITFVDVPGFLPGTAQEYGGIIRHGAKLLYAFAEATVPKVTVITRKAYGGAYDVMSSKHLCGDTNYAWPTAEIAVMGAKGAVEIIFKGHENVEAAQAEYIEKFANPFPAAVRGFVDDIIQPSSTRARICCDLDVLASKKVQRPWRKHANIPL

SEQ ID NO: 10039 - protein, 570 aa, Homo Sapiens
MAAALRVAAVGARLSVLASGLRAAVRSLCSQATSVNERIENKRRTALLGGGQRRIDAQHKRGKLTARERISLLLDPGSFVESDMFVEHRCADFGMAADKNKFPGDSVVTGRGRINGRLVYVFSQIRASAMSPRLVSDSWTQAIHLPWPPKVLGLQDFTVFGGSLSGAHAQKICKIMDQAITVGAPVIGLNDSGGARIQEGVESLAGYADIFLRNVTASGVIPQISLIMGPCAGGAVYSPALTDFTFMVKDTSYLFITGPDVVKSVTNEDVTQEELGGAKTHTTMSGVAHRAFENDVDALCNLRDFFNYLPLSSQDPAPVRECHDPSDRLVPELDTIVPLESTKAYNMVDIIHSVVDEREFFEIMPNYAKNIIVGFARMNGRTVGIVGNQPKVASGCLDINSSVKGARFVRFCDAFNIPLITFVDVPGFLPGTAQEYGGIIRHGAKLLYAFAEATVPKVTVITRKAYGGAYDVMSSKHLCGDTNYAWPTAEIAVMGAKGAVEIIFKGHENVEAAQAEYIEKFANPFPAAVRGFVDDIIQPSSTRARICCDLDVLASKKVQRPWRKHANIPL

SEQ ID NO: 10040 - protein, 559 aa, Homo Sapiens
MAAALRVAAVGARLSVLASGLRAAVRSLCSQATSVNERIENKRRTALLGGGQRRIDAQHKRGKLTARERISLLLDPGSFVESDMFVEHRCADFGMAADKNKFPGDSVVTGRGRINGRLVYVFSQQIIGWAQWLPLVISALWEAEDFTVFGGSLSGAHAQKICKIMDQAITVGAPVIGLNDSGGARIQEGVESLAGYADIFLRNVTASGVIPQISLIMGPCAGGAVYSPALTDFTFMVKDTSYLFITGPDVVKSVTNEDVTQEELGGAKTHTTMSGVAHRAFENDVDALCNLRDFFNYLPLSSQDPAPVRECHDPSDRLVPELDTIVPLESTKAYNMVDIIHSVVDEREFFEIMPNYAKNIIVGFARMNGRTVGIVGNQPKVASGCLDINSSVKGARFVRFCDAFNIPLITFVDVPGFLPGTAQEYGGIIRHGAKLLYAFAEATVPKVTVITRKAYGGAYDVMSSKHLCGDTNYAWPTAEIAVMGAKGAVEIIFKGHENVEAAQAEYIEKFANPFPAAVRGFVDDIIQPSSTRARICCDLDVLASKKVQRPWRKHANIPL

SEQ ID NO: 10041 - protein, 482 aa, Homo Sapiens
MAAALRVAAVGARLSVLASGLRAAVRSLCSQATSVNERIENKRRTALLGGGQRRIDAQHKRGKLTARERISLLLDPGSFVESDMFVEHRCADFGMAADKNKFPGDSVVTGRGRINGRLVYVFSQRNVTASGVIPQISLIMGPCAGGAVYSPALTDFTFMVKDTSYLFITGPDVVKSVTNEDVTQEELGGAKTHTTMSGVAHRAFENDVDALCNLRDFFNYLPLSSQDPAPVRECHDPSDRLVPELDTIVPLESTKAYNMVDIIHSVVDEREFFEIMPNYAKNIIVGFARMNGRTVGIVGNQPKVASGCLDINSSVKGARFVRFCDAFNIPLITFVDVPGFLPGTAQEYGGIIRHGAKLLYAFAEATVPKVTVITRKAYGGAYDVMSSKHLCGDTNYAWPTAEIAVMGAKGAVEIIFKGHENVEAAQAEYIEKFANPFPAAVRGFVDDIIQPSSTRARICCDLDVLASKKVQRPWRKHANIPL

SEQ ID NO: 10042 - protein, 84 aa, Homo Sapiens
MFVEHRCADFGMAADKNKFPGDSVVTGRGRINGRLVYVFSQDFTVFGGSLSGAHAQKICKIMDQAITVGAPVIGLNDSGGARIQ

SEQ ID NO: 10043 - protein, 134 aa, Homo Sapiens
MFVEHRCADFGMAADKNKFPGDSVVTGRGRINGRLVYVFSQDFTVFGGSLSGAHAQKICKIMDQAITVGAPVIGLNDSGGARIQEGVESLAGYADIFLRNVTASGVIPQISLIMGPCAGGAVYSPALTDFTFMV

SEQ ID NO: 10044 - protein, 163 aa, Homo Sapiens
  misc_feature (1)..(1): Xaa can be any naturally occurring amino acid
XESSWPSEISWAAHFGEGKLTARERISLLLDPGSFVESDMFVEHRCADFGMAADKNKFPGDSVVTGRGRINGRLVYVFSQDFTVFGGSLSGAHAQKICKIMDQAITVGAPVIGLNDSGGARIQEGVESLAGYADIFLRNVTASGVIPQISLIMGPCAGGAVYS

SEQ ID NO: 10045 - protein, 1237 aa, Homo Sapiens
MDSGAGGRRCPEAALLILGPPRMEHLRHSPGPGGQRLLLPSMLLALLLLLAPSPGHATRVVYKVPEEQPPNTLIGSLAADYGFPDVGHLYKLEVGAPYLRVDGKTGDIFTTETSIDREGLRECQNQLPGDPCILEFEVSITDLVQNGSPRLLEGQIEVQDINDNTPNFASPVITLAIPENTNIGSLFPIPLASDRDAGPNGVASYELQAGPEAQELFGLQVAEDQEEKQPQLIVMGNLDRERWDSYDLTIKVQDGGSPPRASSALLRVTVLDTNDNAPKFERPSYEAELSENSPIGHSVIQVKANDSDQGANAEIEYTFHQAPEVVRRLLRLDRNTGLITVQGPVDREDLSTLRFSVLAKDRGTNPKSARAQVVVTVKDMNDNAPTIEIRGIGLVTHQDGMANISEDVAEETAVALVQVSDRDEGENAAVTCVVAGDVPFQLRQASETGSDSKKKYFLQTTTPLDYEKVKDYTIEIVAVDSGNPPLSSTNSLKVQVVDVNDNAPVFTQSVTEVAFPENNKPGEVIAEITASDADSGSNAELVYSLEPEPAAKGLFTISPETGEIQVKTSLDREQRESYELKVVAADRGSPSLQGTATVLVNVLDCNDNDPKFMLSGYNFSVMENMPALSPVGMVTVIDGDKGENAQVQLSVEQDNGDFVIQNGTGTILSSLSFDREQQSTYTFQLKAVDGGVPPRSAYVGVTINVLDENDNAPYITAPSNTSHKLLTPQTRLGETVSQVAAEDFDSGVNAELIYSIAGGNPYGLFQIGSHSGAITLEKEIERRHHGLHRLVVKVSDRGKPPRYGTALVHLYVNETLANRTLLETLLGHSLDTPLDIDIAGDPEYERSKQRGNILFGVVAGVVAVALLIALAVLVRYCRQREAKSGYQAGKKETKDLYAPKPSGKASKGNKSKGKKSKSPKPVKPVEDEDEAGLQKSLKFNLMSDAPGDSPRIHLPLNYPPGSPDLGRHYRSNSPLPSIQLQPQSPSASKKHQVVQDLPPANTFVGTGDTTSTGSEQYSDYSYRTNPPKYPSKQLPHRRVTFSATSQAQELQDPSQHSYYDSGLEESETPSSKSSSGPRLGPLALPEDHYERTTPDGSIGEMEHPENDLRPLPDVAMTGTCTRECSEFGHSDTCWMPGQSSPSRRTKSSALKLSTFVPYQDRGGQEPAGAGSPSPPEDRNTKTAPVRLLPSYSAFSHSSHDSCKDSATLEEIPLTQTSDFPPAATPASAQTAKREIYL

SEQ ID NO: 10046 - protein, 1060 aa, Homo Sapiens
MDSGAGGRRCPEAALLILGPPRMEHLRHSPGPGGQRLLLPSMLLALLLLLAPSPGHATRVVYKVPEEQPPNTLIGSLAADYGFPDVGHLYKLEVGAPYLRVDGKTGDIFTTETSIDREGLRECQNQLPGDPCILEFEVSITDLVQNGSPRLLEGQIEVQDINDNTPNFASPVITLAIPENTNIGSLFPIPLASDRDAGPNGVASYELQAGPEAQELFGLQVAEDQEEKQPQLIVMGNLDRERWDSYDLTIKVQDGGSPPRASSALLRVTVLDTNDNAPKFERPSYEAELSENSPIGHSVIQVKANDSDQGANAEIEYTFHQAPEVVRRLLRLDRNTGLITVQGPVDREDLSTLRFSVLAKDRGTNPKSARAQVVVTVKDMNDNAPTIEIRGIGLVTHQDGMANISEDVAEETAVALVQVSDRDEGENAAVTCVVAGDVPFQLRQASETGSDSKKKYFLQTTTPLDYEKVKDYTIEIVAVDSGNPPLSSTNSLKVQVVDVNDNAPVFTQSVTEVAFPENNKPGEVIAEITASDADSGSNAELVYSLEPEPAAKGLFTISPETGEIQVKTSLDREQRESYELKVVAADRGSPSLQGTATVLVNVLDCNDNDPKFMLSGYNFSVMENMPALSPVGMVTVIDGDKGENAQVQLSVEQDNGDFVIQNGTGTILSSLSFDREQQSTYTFQLKAVDGGVPPRSAYVGVTINVLDENDNAPYITAPSNTSHKLLTPQTRLGETVSQVAAEDFDSGVNAELIYSIAGGNPYGLFQIGSHSGAITLEKEIERRHHGLHRLVVKVSDRGKPPRYGTALVHLYVNETLANRTLLETLLGHSLDTPLDIDIAGDPEYERSKQRGNILFGVVAGVVAVALLIALAVLVRYCRQREAKSGYQAGKKETKDLYAPKPSGKASKGNKSKGKKSKSPKPVKPVEDEDEAGLQKSLKFNLMSDAPGDSPRIHLPLNYPPGSPDLGRHYRSNSPLPSIQLQPQSPSASKKHQVVQDLPPANTFVGTGDTTSTGSEQYSDYSYRTNPPKYPSKQVGQPFQLSTPQPLPHPYHGAIWTEVWE

SEQ ID NO: 10047 - protein, 382 aa, Homo Sapiens
MDSGAGGRRCPEAALLILGPPRMEHLRHSPGPGGQRLLLPSMLLALLLLLAPSPGHATRVVYKVPEEQPPNTLIGSLAADYGFPDVGHLYKLEVGAPYLRVDGKTGDIFTTETSIDREGLRECQNQLPGDPCILEFEVSITDLVQNGSPRLLEGQIEVQDINDNTPNFASPVITLAIPENTNIGSLFPIPLASDRDAGPNGVASYELQAGPEAQELFGLQVAEDQEEKQPQLIVMGNLDRERWDSYDLTIKVQDGGSPPRASSALLRVTVLDTNDNAPKFERPSYEAELSENSPIGHSVIQLPHRRVTFSATSQAQELQDPSQHSYYDSGLEESETPSSKSSSGPRLGPLALPEDHYERTTPDGSIGEMEHPENEPAGRSRP

SEQ ID NO: 10048 - protein, 150 aa, Homo Sapiens
MEHLRHSPGPGGQRLLLPSMLLALLLLLAPSPGHATRVVYKVPEEQPPNTLIGSLAADYGFPDVGHLYKLEVGAPYLRVDGKTGDIFTTETSIDREGLRECQNQLPGDPCILEFEVSITDLVQNGSPRLLEGQIEVQDINDNTPNFASPV

SEQ ID NO: 10049 - protein, 126 aa, Homo Sapiens
  misc_feature (1)..(1): Xaa can be any naturally occurring amino acid
XGPNGVASYELQAGPEAQELFGLQVAEDQEEKQPQLIVMGNLDRERWDSYDLTIKVQDGGSPPRASSALLRVTVLDTNDNAPKFERPSYEAELSENSPIGHSVIQSLVDWDLEKRLRKKRETDSRG

SEQ ID NO: 10050 - protein, 17 aa, Homo Sapiens
  misc_feature (1)..(1): Xaa can be any naturally occurring amino acid
XIQVRGPLRITVRVTHH

SEQ ID NO: 10051 - protein, 23 aa, Homo Sapiens
MMQLLQLLLGLLGPGGYLFLLGD

SEQ ID NO: 10052 - protein, 1184 aa, Homo Sapiens
MMQLLQLLLGLLGPGGYLFLLGDCQEVTTLTVKYQVSEEVPSGTVIGKLSQELGREERRRQAGAAFQVLQLPQALPIQVDSEEGLLSTGRRLDREQLCRQWDPCLVSFDVLATGDLALIHVEIQVLDINDHQPRFPKGEQELEISESASLRTRIPLDRALDPDTGPNTLHTYTLSPSEHFALDVIVGPDETKHAELIVVKELDREIHSFFDLVLTAYDNGNPPKSGTSLVKVNVLDSNDNSPAFAESSLALEIQEDAAPGTLLIKLTATDPDQGPNGEVEFFLSKHMPPEVLDTFSIDAKTGQVILRRPLDYEKNPAYEVDVQARDLGPNPIPAHCKVLIKVLDVNDNIPSIHVTWASQPSLVSEALPKDSFIALVMADDLDSGHNGLVHCWLSQELGHFRLKRTNGNTYMLLTNATLDREQWPKYTLTLLAQDQGLQPLSAKKQLSIQISDINDNAPVFEKSRYEVSTRENNLPSLHLITIKAHDADLGINGKVSYRIQDSPVAHLVAIDSNTGEVTAQRSLNYEEMAGFEFQVIAEDSGQPMLASSVSVWVSLLDANDNAPEVVQPVLSDGKASLSVLVNASTGHLLVPIETPNGLGPAGTDTPPLATHSSRPFLLTTIVARDADSGANGEPLYSIRSGNEAHLFILNPHTGQLFVNVTNASSLIGSEWELEIVVEDQGSPPLQTRALLRVMFVTSVDHLRDSARKPGALSMSMLTVICLAVLLGIFGLILALFMSICRTEKKDNRAYNCREAESTYRQQPKRPQKHIQKADIHLVPVLRGQAGEPCEVGQSHKDVDKEAMMEAGWDPCLQAPFHLTPTLYRTLRNQGNQGAPAESREVLQDTVNLLFNHPRQRNASRENLNLPEPQPATGQPRSRPLKVAGSPTGRLAGDQGSEEAPQRPPASSATLRRQRHLNGKVSPEKESGPRQILRSLVRLSVAAFAERNPVEELTVDSPPVQQISQLLSLLHQGQFQPKPNHRGNKYLAKPGGSRSAIPDTDGPSARAGGQTDPEQEEGPLDPEEDLSVKQLLEEELSSLLDPSTGLALDRLSAPDPAWMARLSLPLTTNYRDNVISPDAAATEEPRTFQTFGKAEAPELSPTGTRLASTFVSEMSSLLEMLLEQRSSMPVEAASEALRRLSVCGRTLSLDLATSAASGMKVQGDPGGKTGTEGKSRGSSSSSRCL

SEQ ID NO: 10053 - protein, 460 aa, Homo Sapiens
LVEKKIEDLTEILDRYVQEQIPGAKVVVESIGARRHGDAFSLEDYTKCDLTVYAIDPQTNRAIDRNELFKFLDGKLLDINKDFQPYYGEGGRILEIRTPEAVTSIKKRGESLGYTEGALLALAFIIILCCIPAILVVLVSYRQFKVRQAECTKTARIQAALPAAKPAVPAPAPVAAPPPPPPPPPGAHLYEELGDSSMRGYGSEQQQLLRPSLLKPEELSMESGIDPGQEYGQDYYSYEHGYEMPQYGSRRRLLPPAGQEEYGEVVGEAEEEYEEEEWARKRMIKLVVDREYETSSTGEDSAPECQRNRLHHPSIHSNINGNIYIAQNGSVVRTRRACLTDNLKVASPVRLGGPFKKLDKLAVTHEENVPLNTLSKGPFSTEKMNARPTLVTFAPCPVGTDNTAVKPLRNRLKSTVEQESMIDSKNIKEALEFHSDHTQSDDEELWMGPWNNLHIPMTKL

SEQ ID NO: 10054 - protein, 92 aa, Homo Sapiens
MFRQFYLWTCLASGIILGSLFEICLGQYDDDCKLARGGPPATIVAIDEESRNGTILVDNMLIKGTAGGPDPTIELSLKDNVDYWVLMDPVKQ

SEQ ID NO: 10055 - protein, 1915 aa, Homo Sapiens
MFRQFYLWTCLASGIILGSLFEICLGQYDDDCKLARGGPPATIVAIDEESRNGTILVDNMLIKGTAGGPDPTIELSLKDNVDYWVLMDPVKQMLFLNSTGRVLDRDPPMNIHSIVVQVQCINKKVGTIIYHEVRIVVRDRNDNSPTFKHESYYATVNELTPVGTTIFTGFSGDNGATDIDDGPNGQIEYVIQYNPDDPDRAQNLNERRTTTTTLTVDVLDGDDLGPMFLPCVLVPNTRDCRPLTYQAAIPELRTPEELNPIIVTPPIQAIDQDRNIQPPSDRPGILYSILVGTPEDYPRFFHMHPRTAELSLLEPVNRDFHQKFDLVIKAEQDNGHPLPAFAGLHIEILDENNQSPYFTMPSYQGYILESAPVGATISDSLNLTSPLRIVALDKDIEDTKDPELHLFLNDYTSVFTVTQTGITRYLTLLQPVDREEQQTYTFSITAFDGVQESEPVIVNIQVMDANDNTPTFPEISYDVYVYTDMRPGDSVIQLTAVDADEGSNGEITYEILVGAQGDFIINKTTGLITIAPGVEMIVGRTYALTVQAADNAPPAERRNSICTVYIEVLPPNNQSPPRFPQLMYSLEISEAMRVGAVLLNLQATDREGDSITYAIENGDPQRVFNLSETTGILTLGKALDRESTDRYILIITASDGRPDGTSTATVNIVVTDVNDNAPVFDPYLPRNLSVVEEEANAFVGQVKATDPDAGINGQVHYSLGNFNNLFRITSNGSIYTAVKLNREVRDYYELVVVATDGAVHPRHSTLTLAIKVLDIDDNSPVFTNSTYTVLVEENLPAGTTILQIEAKDVDLGANVSYRIRSPEVKHFFALHPFTGELSLLRSLDYEAFPDQEASITFLVEAFDIYGTMPPGIATVTVIVKDMNDYPPVFSKRIYKGMVAPDAVKGTPITTVYAEDADPPGLPASRVRYRVDDVQFPYPASIFEVEEDSGRVITRVNLNEEPTTIFKLVVVAFDDGEPVMSSSATVKILVLHPGEIPRFTQEEYRPPPVSELATKGTMVGVISAAAINQSIVYSIVSGNEEDTFGINNITGVIYVNGPLDYETRTSYVLRVQADSLEVVLANLRVPSKSNTAKVYIEIQDENNHPPVFQKKFYIGGVSEDARMFTSVLRVKATDKDTGNYSVMAYRLIIPPIKEGKEGFVVETYTGLIKTAMLFHNMRRSYFKFQVIATDDYGKGLSGKADVLVSVVNQLDMQVIVSNVPPTLVEKKIEDLTEILDRYVQEQIPGAKVVVESIGARRHGDAFSLEDYTKCDLTVYAIDPQTNRAIDRNELFKFLDGKLLDINKDFQPYYGEGGRILEIRTPEAVTSIKKRGESLGYTEGALLALAFIIILCCIPAILVVLVSYRQRQAECTKTARIQAALPAAKPAVPAPAPVAAPPPPPPPPPGAHLYEELGDSSILFLLYHFQQSRGNNSVSEDRKHQQVVMPFSSNTIEAHKSAHVDGSLKSNKLKSARKFTFLSDEDDLSAHNPLYKENISQVSTNSDISQRTDFVDPFSPKIQAKSKSLRGPREKIQRLWSQSVSLPRRLMRKVPNRPEIIDLQQWQGTRQKAENENTGICTNKRGSSNPLLTTEEANLTEKEEIRQGETLMIEGTEQLKSLSSDSSFCFPRPHFSFSTLPTVSRTVELKSEPNVISSPAECSLELSPSRPCVLHSSLSRRETPICMLPIETERNIFENFAHPPNISPSACPLPPPPPISPPSPPPAPAPLAPPPDISPFSLFCPPPSPPSIPLPLPPPTFFPLSVSTSGPPTPPLLPPFPTPLPPPPPSIPCPPPPSASFLSTECVCITGVKCTTNLMPAEKIKSSMTQLSTTTVCKTDPQREPKGILRHVKNLAELEKSVANMYSQIEKNYLRTNVSELQTMCPSEVTNMEITSEQNKGSLNNIVEGTEKQSHSQSTSL

SEQ ID NO: 10056 - protein, 1955 aa, Homo Sapiens
MFRQFYLWTCLASGIILGSLFEICLGQYDDDCKLARGGPPATIVAIDEESRNGTILVDNMLIKGTAGGPDPTIELSLKDNVDYWVLMDPVKQMLFLNSTGRVLDRDPPMNIHSIVVQVQCINKKVGTIIYHEVRIVVRDRNDNSPTFKHESYYATVNELTPVGTTIFTGFSGDNGATDIDDGPNGQIEYVIQYNPDDPTSNDTFEIPLMLTGNIVLRKRLNYEDKTRYFVIIQANDRAQNLNERRTTTTTLTVDVLDGDDLGPMFLPCVLVPNTRDCRPLTYQAAIPELRTPEELNPIIVTPPIQAIDQDRNIQPPSDRPGILYSILVGTPEDYPRFFHMHPRTAELSLLEPVNRDFHQKFDLVIKAEQDNGHPLPAFAGLHIEILDENNQSPYFTMPSYQGYILESAPVGATISDSLNLTSPLRIVALDKDIEDTKDPELHLFLNDYTSVFTVTQTGITRYLTLLQPVDREEQQTYTFSITAFDGVQESEPVIVNIQVMDANDNTPTFPEISYDVYVYTDMRPGDSVIQLTAVDADEGSNGEITYEILVGAQGDFIINKTTGLITIAPGVEMIVGRTYALTVQAADNAPPAERRNSICTVYIEVLPPNNQSPPRFPQLMYSLEISEAMRVGAVLLNLQATDREGDSITYAIENGDPQRVFNLSETTGILTLGKALDRESTDRYILIITASDGRPDGTSTATVNIVVTDVNDNAPVFDPYLPRNLSVVEEEANAFVGQVKATDPDAGINGQVHYSLGNFNNLFRITSNGSIYTAVKLNREVRDYYELVVVATDGAVHPRHSTLTLAIKVLDIDDNSPVFTNSTYTVLVEENLPAGTTILQIEAKDVDLGANVSYRIRSPEVKHFFALHPFTGELSLLRSLDYEAFPDQEASITFLVEAFDIYGTMPPGIATVTVIVKDMNDYPPVFSKRIYKGMVAPDAVKGTPITTVYAEDADPPGLPASRVRYRVDDVQFPYPASIFEVEEDSGRVITRVNLNEEPTTIFKLVVVAFDDGEPVMSSSATVKILVLHPGEIPRFTQEEYRPPPVSELATKGTMVGVISAAAINQSIVYSIVSGNEEDTFGINNITGVIYVNGPLDYETRTSYVLRVQADSLEVVLANLRVPSKSNTAKVYIEIQDENNHPPVFQKKFYIGGVSEDARMFTSVLRVKATDKDTGNYSVMAYRLIIPPIKEGKEGFVVETYTGLIKTAMLFHNMRRSYFKFQVIATDDYGKGLSGKADVLVSVVNQLDMQVIVSNVPPTLVEKKIEDLTEILDRYVQEQIPGAKVVVESIGARRHGDAFSLEDYTKCDLTVYAIDPQTNRAIDRNELFKFLDGKLLDINKDFQPYYGEGGRILEIRTPEAVTSIKKRGESLGYTEGALLALAFIIILCCIPAILVVLVSYRQFKVRQAECTKTARIQAALPAAKPAVPAPAPVAAPPPPPPPPPGAHLYEELGDSSILFLLYHFQQSRGNNSVSEDRKHQQVVMPFSSNTIEAHKSAHVDGSLKSNKLKSARKFTFLSDEDDLSAHNPLYKENISQVSTNSDISQRTDFVDPFSPKIQAKSKSLRGPREKIQRLWSQSVSLPRRLMRKVPNRPEIIDLQQWQGTRQKAENENTGICTNKRGSSNPLLTTEEANLTEKEEIRQGETLMIEGTEQLKSLSSDSSFCFPRPHFSFSTLPTVSRTVELKSEPNVISSPAECSLELSPSRPCVLHSSLSRRETPICMLPIETERNIFENFAHPPNISPSACPLPPPPPISPPSPPPAPAPLAPPPDISPFSLFCPPPSPPSIPLPLPPPTFFPLSVSTSGPPTPPLLPPFPTPLPPPPPSIPCPPPPSASFLSTECVCITGVKCTTNLMPAEKIKSSMTQLSTTTVCKTDPQREPKGILRHVKNLAELEKSVANMYSQIEKNYLRTNVSELQTMCPSEVTNMEITSEQNKGSLNNIVEGTEKQSHSQSTSL

SEQ ID NO: 10057 - protein, 961 aa, Homo Sapiens
MFRQFYLWTCLASGIILGSLFEICLGQYDDDCKLARGGPPATIVAIDEESRNGTILVDNMLIKGTAGGPDPTIELSLKDNVDYWVLMDPVKQMLFLNSTGRVLDRDPPMNIHSIVVQVQCINKKVGTIIYHEVRIVVRDRNDNSPTFKHESYYATVNELTPVGTTIFTGFSGDNGATDIDDGPNGQIEYVIQYNPDDPTSNDTFEIPLMLTGNIVLRKRLNYEDKTRYFVIIQANDRAQNLNERRTTTTTLTVDVLDGDDLGPMFLPCVLVPNTRDCRPLTYQAAIPELRTPEELNPIIVTPPIQAIDQDRNIQPPSDRPGILYSILVGTPEDYPRFFHMHPRTAELSLLEPVNRDFHQKFDLVIKAEQDNGHPLPAFAGLHIEILDENNQSPYFTMPSYQGYILESAPVGATISDSLNLTSPLRIVALDKDIEDTKDPELHLFLNDYTSVFTVTQTGITRYLTLLQPVDREEQQTYTFSITAFDGVQESEPVIVNIQVMDANDNTPTFPEISYDVYVYTDMRPGDSVIQLTAVDADEGSNGEITYEILVGAQGDFIINKTTGLITIAPGVEMIVGRTYALTVQAADNAPPAERRNSICTVYIEVLPPNNQSPPRFPQLMYSLEISEAMRVGAVLLNLQATDREGDSITYAIENGDPQRVFNLSETTGILTLGKALDRESTDRYILIITASDGRPDGTSTATVNIVVTDVNDNAPVFDPYLPRNLSVVEEEANAFVGQVKATDPDAGINGQVHYSLGNFNNLFRITSNGSIYTAVKLNREVRDYYELVVVATDGAVHPRHSTLTLAIKVLDIDDNSPVFTNSTYTVLVEENLPAGTTILQIEAKDVDLGANVSYRIRSPEVKHFFALHPFTGELSLLRSLDYEAFPDQEASITFLVEAFDIYGTMPPGIATVTVIVKDMNDYPPVFSKRIYKGMVAPDAVKGTPITTVYAEDADPPVSRRH

SEQ ID NO: 10058 - protein, 654 aa, Homo Sapiens
MFRQFYLWTCLASGIILGSLFEICLGQYDDDCKLARGGPPATIVAIDEESRNGTILVDNMLIKGTAGGPDPTIELSLKDNVDYWVLMDPVKQMLFLNSTGRVLDRDPPMNIHSIVVQVQCINKKVGTIIYHEVRIVVRDRNDNSPTFKHESYYATVNELTPVGTTIFTGFSGDNGATDIDDGPNGQIEYVIQYNPDDPTSNDTFEIPLMLTGNIVLRKRLNYEDKTRYFVIIQANDRAQNLNERRTTTTTLTVDVLDGDDLGPMFLPCVLVPNTRDCRPLTYQAAIPELRTPEELNPIIVTPPIQAIDQDRNIQPPSDRPGILYSILVGTPEDYPRFFHMHPRTAELSLLEPVNRDFHQKFDLVIKAEQDNGHPLPAFAGLHIEILDENNQSPYFTMPSYQGYILESAPVGATISDSLNLTSPLRIVALDKDIEDTKDPELHLFLNDYTSVFTVTQTGITRYLTLLQPVDREEQQTYTFSITAFDGVQESEPVIVNIQVMDANDNTPTFPEISYDVYVYTDMRPGDSVIQLTAVDADEGSNGEITYEILVGAQGDFIINKTTGLITIAPGVEMIVGRTYALTVQAADNAPPAERRNSICTVYIEVLPPNNQSPPRFPQLMYSLEISEAMRVGAVLLNLQHGDSNLRESTGQGKH

SEQ ID NO: 10059 - protein, 1677 aa, Homo Sapiens
MFRQFYLWTCLASGIILGSLFEICLGQYDDDCKLARGGPPATIVAIDEESRNGTILVDNMLIKGTAGGPDPTIELSLKDNVDYWVLMDPVKQMLFLNSTGRVLDRDPPMNIHSIVVQVQCINKKVGTIIYHEVRIVVRDRNDNSPTFKHESYYATVNELTPVGTTIFTGFSGDNGATDIDDGPNGQIEYVIQYNPDDPTSNDTFEIPLMLTGNIVLRKRLNYEDKTRYFVIIQANDRAQNLNERRTTTTTLTVDVLDGDDLGPMFLPCVLVPNTRDCRPLTYQAAIPELRTPEELNPIIVTPPIQAIDQDRNIQPPSDRPGILYSILVGTPEDYPRFFHMHPRTAELSLLEPVNRDFHQKFDLVIKAEQDNGHPLPAFAGLHIEILDENNQSPYFTMPSYQGYILESAPVGATISDSLNLTSPLRIVALDKDIEDTKDPELHLFLNDYTSVFTVTQTGITRYLTLLQPVDREEQQTYTFSITAFDGVQESEPVIVNIQVMDANDNTPTFPEISYDVYVYTDMRPGDSVIQLTAVDADEGSNGEITYEILVGAQGDFIINKTTGLITIAPGVEMIVGRTYALTVQAADNAPPAERRNSICTVYIEVLPPNNQSPPRFPQLMYSLEISEAMRVGAVLLNLQATDREGDSITYAIENGDPQRVFNLSETTGILTLGKALDRESTDRYILIITASDGRPDGTSTATVNIVVTDVNDNAPVFDPYLPRNLSVVEEEANAFVGQVKATDPDAGINGQVHYSLGNFNNLFRITSNGSIYTAVKLNREVRDYYELVVVATDGAVHPRHSTLTLAIKVLDIDDNSPVFTNSTYTVLVEENLPAGTTILQIEAKDVDLGANVSYRIRSPEVKHFFALHPFTGELSLLRSLDYEAFPDQEASITFLVEAFDIYGTMPPGIATVTVIVKDMNDYPPVFSKRIYKGMVAPDAVKGTPITTVYAEDADPPGLPASRVRYRVDDVQFPYPASIFEVEEDSGRVITRVNLNEEPTTIFKLVVVAFDDGEPVMSSSATVKILVLHPGEIPRFTQEEYRPPPVSELATKGTMVGVISAAAINQSIVYSIVSGNEEDTFGINNITGVIYVNGPLDYETRTSYVLRVQADSLEVVLANLRVPSKSNTAKVYIEIQDENNHPPVFQKKFYIGGVSEDARMFTSVLRVKATDKDTGNYSVMAYRLIIPPIKEGKEGFVVETYTGLIKTAMLFHNMRRSYFKFQVIATDDYGKGLSGKADVLVSVVNQLDMQVIVSNVPPTLVEKKIEDLTEILDRYVQEQIPGAKVVVESIGARRHGDAFSLEDYTKCDLTVYAIDPQTNRAIDRNELFKFLDGKLLDINKDFQPYYGEGGRILEIRTPEAVTSIKKRGESLGYTEGALLALAFIIILCCIPAILVVLVSYRQFKVRQAECTKTARIQAALPAAKPAVPAPAPVAAPPPPPPPPPGAHLYEELGDSSMHKYEMPQYGSRRRLLPPAGQEEYGEVVGEAEEEYEEEEWARKRMIKLVVDREYETSSTGEDSAPECQRNRLHHPSIHSNINGNIYIAQNGSVVRTRRACLTDNLKVASPVRLGGPFKKLDKLAVTHEENVPLNTLSKGPFSTEKMNARPTLVTFAPCPVGTDNTAVKPLRNRLKSTVEQESMIDSKNIKEALEFHSDHTQSDDEELWMGPWNNLHIPMTKL

SEQ ID NO: 10060 - protein, 1957 aa, Homo Sapiens
MFRQFYLWTCLASGIILGSLFEICLGQYDDDCKLARGGPPATIVAIDEESRNGTILVDNMLIKGTAGGPDPTIELSLKDNVDYWVLMDPVKQMLFLNSTGRVLDRDPPMNIHSIVVQVQCINKKVGTIIYHEVRIVVRDRNDNSPTFKHESYYATVNELTPVGTTIFTGFSGDNGATDIDDGPNGQIEYVIQYNPDDPTSNDTFEIPLMLTGNIVLRKRLNYEDKTRYFVIIQANDRAQNLNERRTTTTTLTVDVLDGDDLGPMFLPCVLVPNTRDCRPLTYQAAIPELRTPEELNPIIVTPPIQAIDQDRNIQPPSDRPGILYSILVGTPEDYPRFFHMHPRTAELSLLEPVNRDFHQKFDLVIKAEQDNGHPLPAFAGLHIEILDENNQSPYFTMPSYQGYILESAPVGATISDSLNLTSPLRIVALDKDIEDTKDPELHLFLNDYTSVFTVTQTGITRYLTLLQPVDREEQQTYTFSITAFDGVQESEPVIVNIQVMDANDNTPTFPEISYDVYVYTDMRPGDSVIQLTAVDADEGSNGEITYEILVGAQGDFIINKTTGLITIAPGVEMIVGRTYALTVQAADNAPPAERRNSICTVYIEVLPPNNQSPPRFPQLMYSLEISEAMRVGAVLLNLQATDREGDSITYAIENGDPQRVFNLSETTGILTLGKALDRESTDRYILIITASDGRPDGTSTATVNIVVTDVNDNAPVFDPYLPRNLSVVEEEANAFVGQVKATDPDAGINGQVHYSLGNFNNLFRITSNGSIYTAVKLNREVRDYYELVVVATDGAVHPRHSTLTLAIKVLDIDDNSPVFTNSTYTVLVEENLPAGTTILQIEAKDVDLGANVSYRIRSPEVKHFFALHPFTGELSLLRSLDYEAFPDQEASITFLVEAFDIYGTMPPGIATVTVIVKDMNDYPPVFSKRIYKGMVAPDAVKGTPITTVYAEDADPPGLPASRVRYRVDDVQFPYPASIFEVEEDSGRVITRVNLNEEPTTIFKLVVVAFDDGEPVMSSSATVKILVLHPGEIPRFTQEEYRPPPVSELATKGTMVGVISAAAINQSIVYSIVSGNEEDTFGINNITGVIYVNGPLDYETRTSYVLRVQADSLEVVLANLRVPSKSNTAKVYIEIQDENNHPPVFQKKFYIGGVSEDARMFTSVLRVKATDKDTGNYSVMAYRLIIPPIKEGKEGFVVETYTGLIKTAMLFHNMRRSYFKFQVIATDDYGKGLSGKADVLVSVVNQLDMQVIVSNVPPTLVEKKIEDLTEILDRYVQEQIPGAKVVVESIGARRHGDAFSLEDYTKCDLTVYAIDPQTNRAIDRNELFKFLDGKLLDINKDFQPYYGEGGRILEIRTPEAVTSIKKRGESLGYTEGALLALAFIIILCCIPAILVVLVSYRQFKVRQAECTKTARIQAALPAAKPAVPAPAPVAAPPPPPPPPPGAHLYEELGDSSMHNLFLLYHFQQSRGNNSVSEDRKHQQVVMPFSSNTIEAHKSAHVDGSLKSNKLKSARKFTFLSDEDDLSAHNPLYKENISQVSTNSDISQRTDFVDPFSPKIQAKSKSLRGPREKIQRLWSQSVSLPRRLMRKVPNRPEIIDLQQWQGTRQKAENENTGICTNKRGSSNPLLTTEEANLTEKEEIRQGETLMIEGTEQLKSLSSDSSFCFPRPHFSFSTLPTVSRTVELKSEPNVISSPAECSLELSPSRPCVLHSSLSRRETPICMLPIETERNIFENFAHPPNISPSACPLPPPPPISPPSPPPAPAPLAPPPDISPFSLFCPPPSPPSIPLPLPPPTFFPLSVSTSGPPTPPLLPPFPTPLPPPPPSIPCPPPPSASFLSTECVCITGVKCTTNLMPAEKIKSSMTQLSTTTVCKTDPQREPKGILRHVKNLAELEKSVANMYSQIEKNYLRTNVSELQTMCPSEVTNMEITSEQNKGSLNNIVEGTEKQSHSQSTSL

SEQ ID NO: 10061 - protein, 1540 aa, Homo Sapiens
MFRQFYLWTCLASGIILGSLFEICLGQYDDDCKLARGGPPATIVAIDEESRNGTILVDNMLIKGTAGGPDPTIELSLKDNVDYWVLMDPVKQMLFLNSTGRVLDRDPPMNIHSIVVQVQCINKKVGTIIYHEVRIVVRDRNDNSPTFKHESYYATVNELTPVGTTIFTGFSGDNGATDIDDGPNGQIEYVIQYNPDDPTSNDTFEIPLMLTGNIVLRKRLNYEDKTRYFVIIQANDRAQNLNERRTTTTTLTVDVLDGDDLGPMFLPCVLVPNTRDCRPLTYQAAIPELRTPEELNPIIVTPPIQAIDQDRNIQPPSDRPGILYSILVGTPEDYPRFFHMHPRTAELSLLEPVNRDFHQKFDLVIKAEQDNGHPLPAFAGLHIEILDENNQSPYFTMPSYQGYILESAPVGATISDSLNLTSPLRIVALDKDIEDTKDPELHLFLNDYTSVFTVTQTGITRYLTLLQPVDREEQQTYTFSITAFDGVQESEPVIVNIQVMDANDNTPTFPEISYDVYVYTDMRPGDSVIQLTAVDADEGSNGEITYEILVGAQGDFIINKTTGLITIAPGVEMIVGRTYALTVQAADNAPPAERRNSICTVYIEVLPPNNQSPPRFPQLMYSLEISEAMRVGAVLLNLQATDREGDSITYAIENGDPQRVFNLSETTGILTLGKALDRESTDRYILIITASDGRPDGTSTATVNIVVTDVNDNAPVFDPYLPRNLSVVEEEANAFVGQVKATDPDAGINGQVHYSLGNFNNLFRITSNGSIYTAVKLNREVRDYYELVVVATDGAVHPRHSTLTLAIKVLDIDDNSPVFTNSTYTVLVEENLPAGTTILQIEAKDVDLGANVSYRIRSPEVKHFFALHPFTGELSLLRSLDYEAFPDQEASITFLVEAFDIYGTMPPGIATVTVIVKDMNDYPPVFSKRIYKGMVAPDAVKGTPITTVYAEDADPPGLPASRVRYRVDDVQFPYPASIFEVEEDSGRVITRVNLNEEPTTIFKLVVVAFDDGEPVMSSSATVKILVLHPGEIPRFTQEEYRPPPVSELATKGTMVGVISAAAINQSIVYSIVSGNEEDTFGINNITGVIYVNGPLDYETRTSYVLRVQADSLEVVLANLRVPSKSNTAKVYIEIQDENNHPPVFQKKFYIGGVSEDARMFTSVLRVKATDKDTGNYSVMAYRLIIPPIKEGKEGFVVETYTGLIKTAMLFHNMRRSYFKFQVIATDDYGKGLSGKADVLVSVVNQLDMQVIVSNVPPTLVEKKIEDLTEILDRYVQEQIPGAKVVVESIGARRHGDAFSLEDYTKCDLTVYAIDPQTNRAIDRNELFKFLDGKLLDINKDFQPYYGEGGRILEIRTPEAVTSIKKRGESLGYTEGALLALAFIIILCCIPAILVVLVSYRQVFKGRQAECTKTARIQAALPAAKPAVPAPAPVAAPPPPPPPPPGAHLYEELGDSSMNRNYPWSLELILARNMDKIITVMSMGMKCLNMGVAVDCYHQLDRRNMVRWLVKLRKNMRRKRKSQRKLKNQRLKLESLVRRKK

SEQ ID NO: 10062 - protein, 654 aa, Homo Sapiens; identical to SEQ ID NO: 10058

SEQ ID NO: 10063 - protein, 1783 aa, Homo Sapiens
MFRQFYLWTCLASGIILGSLFEICLGQYDDDCKLARGGPPATIVAIDEESRNGTILVDNMLIKGTAGGPDPTIELSLKDNVDYWVLMDPVKQMLFLNSTGRVLDRDPPMNIHSIVVQVQCINKKVGTIIYHEVRIVVRDRNDNSPTFKHESYYATVNELTPVGTTIFTGFSGDNGATDIDDGPNGQIEYVIQYNPDDPTSNDTFEIPLMLTGNIVLRKRLNYEDKTRYFVIIQANDRAQNLNERRTTTTTLTVDVLDGDDLGPMFLPCVLVPNTRDCRPLTYQAAIPELRTPEELNPIIVTPPIQAIDQDRNIQPPSDRPGILYSILVGTPEDYPRFFHMHPRTAELSLLEPVNRDFHQKFDLVIKAEQDNGHPLPAFAGLHIEILDENNQSPYFTMPSYQGYILESAPVGATISDSLNLTSPLRIVALDKDIEDVPPSGVPTKDPELHLFLNDYTSVFTVTQTGITRYLTLLQPVDREEQQTYTFSITAFDGVQESEPVIVNIQVMDANDNTPTFPEISYDVYVYTDMRPGDSVIQLTAVDADEGSNGEITYEILVGAQGDFIINKTTGLITIAPGVEMIVGRTYALTVQAADNAPPAERRNSICTVYIEVLPPNNQSPPRFPQLMYSLEISEAMRVGAVLLNLQATDREGDSITYAIENGDPQRVFNLSETTGILTLGKALDRESTDRYILIITASDGRPDGTSTATVNIVVTDVNDNAPVFDPYLPRNLSVVEEEANAFVGQVKATDPDAGINGQVHYSLGNFNNLFRITSNGSIYTAVKLNREVRDYYELVVVATDGAVHPRHSTLTLAIKVLDIDDNSPVFTNSTYTVLVEENLPAGTTILQIEAKDVDLGANVSYRIRSPEVKHFFALHPFTGELSLLRSLDYEAFPDQEASITFLVEAFDIYGTMPPGIATVTVIVKDMNDYPPVFSKRIYKGMVAPDAVKGTPITTVYAEDADPPGLPASRVRYRVDDVQFPYPASIFEVEEDSGRVITRVNLNEEPTTIFKLVVVAFDDGEPVMSSSATVKILVLHPGEIPRFTQEEYRPPPVSELATKGTMVGVISAAAINQSIVYSIVSGNEEDTFGINNITGVIYVNGPLDYETRTSYVLRVQADSLEVVLANLRVPSKSNTAKVYIEIQDENNHPPVFQKKFYIGGVSEDARMFTSVLRVKATDKDTGNYSVMAYRLIIPPIKEGKEGFVVETYTGLIKTAMLFHNMRRSYFKFQVIATDDYGKGLSGKADVLVSVVNQLDMQVIVSNVPPTLVEKKIEDLTEILDRYVQEQIPGAKVVVESIGARRHGDAFSLEDYTKCDLTVYAIDPQTNRAIDRNELFKFLDGKLLDINKDFQPYYGEGGRILEIRTPEAVTSIKKRGESLGYTEGALLALAFIIILCCIPAILVVLVSYRQFKVRQAECTKTARIQAALPAAKPAVPAPAPVAAPPPPPPPPPGAHLYEELGDSSMYEMPQYGSRRRLLPPAGQEEYGEVVGEAEEEYEEEEEEPKKIKKPKVEIREPSEEEEVVVTIEKPPAAEPTYTTWKRARIFPMIFKKVRGLADKRGIVDLEGEEWQRRLEEEDKDYLKLTLDQEEATESTVESEEESSSDYTEYSEEESEFSESETTEEESESETPSEEEESSTPESEESESTESEGEKARKNIVLARRRPMVEEVKEVKGRKEEPQEEQKEPKMEEEEHSEEEESGPAPVEESTDPEAQDIPEEGSAESASVEGGVESEEESESGSSSSSSESQSGGPWGYQVPAYDRSKNANQKKSPGANSEGYNTAL

SEQ ID NO: 10064 - protein, 1886 aa, Homo Sapiens
MFRQFYLWTCLASGIILGSLFEICLGQYDDDCKLARGGPPATIVAIDEESRNGTILVDNMLIKGTAGGPDPTIELSLKDNVDYWVLMDPVKQMLFLNSTGRVLDRDPPMNIHSIVVQVQCINKKVGTIIYHEVRIVVRDRNDNSPTFKHESYYATVNELTPVGTTIFTGFSGDNGATDIDDGPNGQIEYVIQYNPDDPTSNDTFEIPLMLTGNIVLRKRLNYEDKTRYFVIIQANDRAQNLNERRTTTTTLTVDVLDGDDLGPMFLPCVLVPNTRDCRPLTYQAAIPELRTPEELNPIIVTPPIQAIDQDRNIQPPSDRPGILYSILVGTPEDYPRFFHMHPRTAELSLLEPVNRDFHQKFDLVIKAEQDNGHPLPAFAGLHIEILDENNQSPYFTMPSYQGYILESAPVGATISDSLNLTSPLRIVALDKDIEDTKDPELHLFLNDYTSVFTVTQTGITRYLTLLQPVDREEQQTYTFSITAFDGVQESEPVIVNIQVMDANDNTPTFPEISYDVYVYTDMRPGDSVIQLTAVDADEGSNGEITYEILVGAQGDFIINKTTGLITIAPGVEMIVGRTYALTVQAADNAPPAERSTGILTLGKALDRESTDRYILIITASDGRPDGTSTATVNIVVTDVNDNAPVFDPYLPRNLSVVEEEANAFVGQVKATDPDAGINGQVHYSLGNFNNLFRITSNGSIYTAVKLNREVRDYYELVVVATDGAVHPRHSTLTLAIKVLDIDDNSPVFTNSTYTVLVEENLPAGTTILQIEAKDVDLGANVSYRIRSPEVKHFFALHPFTGELSLLRSLDYEAFPDQEASITFLVEAFDIYGTMPPGIATVTVIVKDMNDYPPVFSKRIYKGMVAPDAVKGTPITTVYAEDADPPGLPASRVRYRVDDVQFPYPASIFEVEEDSGRVITRVNLNEEPTTIFKLVVVAFDDGEPVMSSSATVKILVLHPGEIPRFTQEEYRPPPVSELATKGTMVGVISAAAINQSIVYSIVSGNEEDTFGINNITGVIYVNGPLDYETRTSYVLRVQADSLEVVLANLRVPSKSNTAKVYIEIQDENNHPPVFQKKFYIGGVSEDARMFTSVLRVKATDKDTGNYSVMAYRLIIPPIKEGKEGFVVETYTGLIKTAMLFHNMRRSYFKFQVIATDDYGKGLSGKADVLVSVVNQLDMQVIVSNVPPTLVEKKIEDLTEILDRYVQEQIPGAKVVVESIGARRHGDAFSLEDYTKCDLTVYAIDPQTNRAIDRNELFKFLDGKLLDINKDFQPYYGEGGRILEIRTPEAVTSIKKRGESLGYTEGALLALAFIIILCCIPAILVVLVSYRQFKVRQAECTKTARIQAALPAAKPAVPAPAPVAAPPPPPPPPPGAHLYEELGDSSMHNLFLLYHFQQSRGNNSVSEDRKHQQVVMPFSSNTIEAHKSAHVDGSLKSNKLKSARKFTFLSDEDDLSAHNPLYKENISQVSTNSDISQRTDFVDPFSPKIQAKSKSLRGPREKIQRLWSQSVSLPRRLMRKVPNRPEIIDLQQWQGTRQKAENENTGICTNKRGSSNPLLTTEEANLTEKEEIRQGETLMIEGTEQLKSLSSDSSFCFPRPHFSFSTLPTVSRTVELKSEPNVISSPAECSLELSPSRPCVLHSSLSRRETPICMLPIETERNIFENFAHPPNISPSACPLPPPPPISPPSPPPAPAPLAPPPDISPFSLFCPPPSPPSIPLPLPPPTFFPLSVSTSGPPTPPLLPPFPTPLPPPPPSIPCPPPPSASFLSTECVCITGVKCTTNLMPAEKIKSSMTQLSTTTVCKTDPQREPKGILRHVKNLAELEKSVANMYSQIEKNYLRTNVSELQTMCPSEVTNMEITSEQNKGSLNNIVEGTEKQSHSQSTSL

SEQ ID NO: 10065 - protein, 1676 aa, Homo Sapiens
MFRQFYLWTCLASGIILGSLFEICLGQYDDDCKLARGGPPATIVAIDEESRNGTILVDNMLIKGTAGGPDPTIELSLKDNVDYWVLMDPVKQMLFLNSTGRVLDRDPPMNIHSIVVQVQCINKKVGTIIYHEVRIVVRDRNDNSPTFKHESYYATVNELTPVGTTIFTGFSGDNGATDIDDGPNGQIEYVIQYNPDDPTSNDTFEIPLMLTGNIVLRKRLNYEDKTRYFVIIQANDRAQNLNERRTTTTTLTVDVLDGDDLGPMFLPCVLVPNTRDCRPLTYQAAIPELRTPEELNPIIVTPPIQAIDQDRNIQPPSDRPGILYSILVGTPEDYPRFFHMHPRTAELSLLEPVNRDFHQKFDLVIKAEQDNGHPLPAFAGLHIEILDENNQSPYFTMPSYQGYILESAPVGATISDSLNLTSPLRIVALDKDIEDTKDPELHLFLNDYTSVFTVTQTGITRYLTLLQPVDREEQQTYTFSITAFDGVQESEPVIVNIQVMDANDNTPTFPEISYDVYVYTDMRPGDSVIQLTAVDADEGSNGEITYEILVGAQGDFIINKTTGLITIAPGVEMIVGRTYALTVQAADNAPPAERRNSICTVYIEVLPPNNQSPPRFPQLMYSLEISEAMRVGAVLLNLQATDREGDSITYAIENGDPQRVFNLSETTGILTLGKALDRESTDRYILIITASDGRPDGTSTATVNIVVTDVNDNAPVFDPYLPRNLSVVEEEANAFVGQVKATDPDAGINGQVHYSLGNFNNLFRITSNGSIYTAVKLNREVRDYYELVVVATDGAVHPRHSTLTLAIKVLDIDDNSPVFTNSTYTVLVEENLPAGTTILQIEAKDVDLGANVSYRIRSPEVKHFFALHPFTGELSLLRSLDYEAFPDQEASITFLVEAFDIYGTMPPGIATVTVIVKDMNDYPPVFSKRIYKGMVAPDAVKGTPITTVYAEDADPPGLPASRVRYRVDDVQFPYPASIFEVEEDSGRVITRVNLNEEPTTIFKLVVVAFDDGEPVMSSSATVKILVLHPGEIPRFTQEEYRPPPVSELATKGTMVGVISAAAINQSIVYSIVSGNEEDTFGINNITGVIYVNGPLDYETRTSYVLRVQADSLEVVLANLRVPSKSNTAKVYIEIQDENNHPPVFQKKFYIGGVSEDARMFTSVLRVKATDKDTGNYSVMAYRLIIPPIKEGKEGFVVETYTGLIKTAMLFHNMRRSYFKFQVIATDDYGKGLSGKADVLVSVVNQLDMQVIVSNVPPTLVEKKIEDLTEILDRYVQEQIPGAKVVVESIGARRHGDAFSLEDYTKCDLTVYAIDPQTNRAIDRNELFKFLDGKLLDINKDFQPYYGEGGRILEIRTPEAVTSIKKRGESLGYTEGALLALAFIIILCCIPAILVVLVSYRQVFKGRQAECTKTARIQAALPAAKPAVPAPAPVAAPPPPPPPPPGAHLYEELGDSSMYEMPQYGSRRRLLPPAGQEEYGEVVGEAEEEYEEEEWARKRMIKLVVDREYETSSTGEDSAPECQRNRLHHPSIHSNINGNIYIAQNGSVVRTRRACLTDNLKVASPVRLGGPFKKLDKLAVTHEENVPLNTLSKGPFSTEKMNARPTLVTFAPCPVGTDNTAVKPLRNRLKSTVEQESMIDSKNIKEALEFHSDHTQSDDEELWMGPWNNLHIPMTKL

SEQ ID NO: 10066 - protein, 650 aa, Homo Sapiens
MFRQFYLWTCLASGIILGSLFEICLGQYDDDCKLARGGPPATIVAIDEESRNGTILVDNMLIKGTAGGPDPTIELSLKDNVDYWVLMDPVKQMLFLNSTGRVLDRDPPMNIHSIVVQVQCINKKVGTIIYHEVRIVVRDRNDNSPTFKHESYYATVNELTPVGTTIFTGFSGDNGATDIDDGPNGQIEYVIQYNPDDPTSNDTFEIPLMLTGNIVLRKRLNYEDKTRYFVIIQANDRAQNLNERRTTTTTLTVDVLDGDDLGPMFLPCVLVPNTRDCRPLTYQAAIPELRTPEELNPIIVTPPIQAIDQDRNIQPPSDRPGILYSILVGTPEDYPRFFHMHPRTAELSLLEPVNRDFHQKFDLVIKEEPKKIKKPKVEIREPSEEEEVVVTIEKPPAAEPTYTTWKRARIFPMIFKKVRGLADKRGIVDLEGEEWQRRLEEEDKDYLKLTLDQEEATESTVESEEESSSDYTEYSEEESEFSESETTEEESESETPSEEEESSTPESEESESTESEGEKARKNIVLARRRPMVEEVKEVKGRKEEPQEEQKEPKMEEEEHSEEEESGPAPVEESTDPEAQDIPEEGSAESASVEGGVESEEESESGSSSSSSESQSGGPWGYQVPAYDRSKNANQKKSPGANSEGYNTAL

SEQ ID NO: 10067 - protein, 981 aa, Homo Sapiens
MFRQFYLWTCLASGIILGSLFEICLGQYDDDCKLARGGPPATIVAIDEESRNGTILVDNMLIKGTAGGPDPTIELSLKDNVDYWVLMDPVKQMLFLNSTGRVLDRDPPMNIHSIVVQVQCINKKVGTIIYHEVRIVVRDRNDNSPTFKHESYYATVNELTPVGTTIFTGFSGDNGATDIDDGPNGQIEYVIQYNPDDPTSNDTFEIPLMLTGNIVLRKRLNYEDKTRYFVIIQANDRAQNLNERRTTTTTLTVDVLDGDDLGPMFLPCVLVPNTRDCRPLTYQAAIPELRTPEELNPIIVTPPIQAIDQDRNIQPPSDRPGILYSILVGTPEDYPRFFHMHPRTAELSLLEPVNRDFHQKFDLVIKAEQDNGHPLPAFAGLHIEILDENNQSPYFTMPSYQGYILESAPVGATISDSLNLTSPLRIVALDKDIEDTKDPELHLFLNDYTSVFTVTQTGITRYLTLLQPVDREEQQTYTFSITAFDGVQESEPVIVNIQVMDANDNTPTFPEISYDVYVYTDMRPGDSVIQLTAVDADEGSNGEITYEILVGAQGDFIINKTTGLITIAPGVEMIVGRTYALTVQAADNAPPAERRNSICTVYIEVLPPNNQSPPRFPQLMYSLEISEAMRVGAVLLNLQATDREGDSITYAIENGDPQRVFNLSETTGILTLGKALDRESTDRYILIITASDGRPDGEEPKKIKKPKVEIREPSEEEEVVVTIEKPPAAEPTYTTWKRARIFPMIFKKVRGLADKRGIVDLEGEEWQRRLEEEDKDYLKLTLDQEEATESTVESEEESSSDYTEYSEEESEFSESETTEEESESETPSEEEESSTPESEESESTESEGEKARKNIVLARRRPMVEEVKEVKGRKEEPQEEQKEPKMEEEEHSEEEESGPAPVEESTDPEAQDIPEEGSAESASVEGGVESEEESESGSSSSSSESQSGGPWGYQVPAYDRSKNANQKKSPGANSEGYNTAL

SEQ ID NO: 10068 - protein, 329 aa, Homo Sapiens
MFRQFYLWTCLASGIILGSLFEICLGQYDDDCKLARGGPPATIVAIDEESRNGTILVDNMLIKGTAGGPDPTIELSLKDNVDYWVLMDPVKQMLFLNSTGRVLDRDPPMNIHSIVVQVQCINKKVGTIIYHEVRIVVRDRNDNSPTFKHESYYATVNELTPVGTTIFTGFSGDNGATDIDDGPNGQIEYVIQYNPDDPTSNDTFEIPLMLTGNIVLRKRLNYEDKTRYFVIIQANDRAQNLNERRTTTTTLTVDVLDGDDLGPMFLPCVLVPNTRDCRPLTYQAAIPELRTPDLGSLCSGTNSWCQGRSGVHWSSPAWRCLFPRRLHQM

SEQ ID NO: 10069 - protein, 719 aa, Homo Sapiens
MFRQFYLWTCLASGIILGSLFEICLGQYDDDCKLARGGPPATIVAIDEESRNGTILVDNMLIKGTAGGPDPTIELSLKDNVDYWVLMDPVKQMLFLNSTGRVLDRDPPMNIHSIVVQVQCINKKVGTIIYHEVRIVVRDRNDNSPTFKHESYYATVNELTPVGTTIFTGFSGDNGATDIDDGPNGQIEYVIQYNPDDPTSNDTFEIPLMLTGNIVLRKRLNYEDKTRYFVIIQANDRAQNLNERRTTTTTLTVDVLDGDDLGPMFLPCVLVPNTRDCRPLTYQAAIPELRTPEELNPIIVTPPIQAIDQDRNIQPPSDRPGILYSILVGTPEDYPRFFHMHPRTAELSLLEPVNRDFHQKFDLVIKAEQDNGHPLPAFAGLHIEILDENNQSPYFTMPSYQGYILESAPVGATISDSLNLTSPLRIVALDKDIEDEEPKKIKKPKVEIREPSEEEEVVVTIEKPPAAEPTYTTWKRARIFPMIFKKVRGLADKRGIVDLEGEEWQRRLEEEDKDYLKLTLDQEEATESTVESEEESSSDYTEYSEEESEFSESETTEEESESETPSEEEESSTPESEESESTESEGEKARKNIVLARRRPMVEEVKEVKGRKEEPQEEQKEPKMEEEEHSEEEESGPAPVEESTDPEAQDIPEEGSAESASVEGGVESEEESESGSSSSSSESQSGGPWGYQVPAYDRSKNANQKKSPGANSEGYNTAL

SEQ ID NO: 10070 - protein, 1952 aa, Homo Sapiens
MFRQFYLWTCLASGIILGSLFEICLGQYDDDCKLARGGPPATIVAIDEESRNGTILVDNMLIKGTAGGPDPTIELSLKDNVDYWVLMDPVKQMLFLNSTGRVLDRDPPMNIHSIVVQVQCINKKVGTIIYHEVRIVVRDRNDNSPTFKHESYYATVNELTPVGTTIFTGFSGDNGATDIDDGPNGQIEYVIQYNPDDPTSNDTFEIPLMLTGNIVLRKRLNYEDKTRYFVIIQANDRAQNLNERRTTTTTLTVDVLDGDDLGPMFLPCVLVPNTRDCRPLTYQAAIPELRTPEELNPIIVTPPIQAIDQDRNIQPPSDRPGILYSILVGTPEDYPRFFHMHPRTAELSLLEPVNRDFHQKFDLVIKAEQDNGHPLPAFAGLHIEILDENNQSPYFTMPSYQGYILESAPVGATISDSLNLTSPLRIVALDKDIEDTKDPELHLFLNDYTSVFTVTQTGITRYLTLLQPVDREEQQTYTFSITAFDGVQESEPVIVNIQVMDANDNTPTFPEISYDVYVYTDMRPGDSVIQLTAVDADEGSNGEITYEILVGAQGDFIINKTTGLITIAPGVEMIVGRTYALTVQAADNAPPAERRNSICTVYIEVLPPNNQSPPRFPQLMYSLEISEAMRVGAVLLNLQATDREGDSITYAIENGDPQRVFNLSETTGILTLGKALDRESTDRYILIITASDGRPDGTSTATVNIVVTDVNDNAPVFDPYLPRNLSVVEEEANAFVGQVKATDPDAGINGQVHYSLGNFNNLFRITSNGSIYTAVKLNREVRDYYELVVVATDGAVHPRHSTLTLAIKVLDIDDNSPVFTNSTYTVLVEENLPAGTTILQIEAKDVDLGANVSYRIRSPEVKHFFALHPFTGELSLLRSLDYEAFPDQEASITFLVEAFDIYGTMPPGIATVTVIVKDMNDYPPVFSKRIYKGMVAPDAVKGTPITTVYAEDADPPGLPASRVRYRVDDVQFPYPASIFEVEEDSGRVITRVNLNEEPTTIFKLVVVAFDDGEPVMSSSATVKILVLHPGEIPRFTQEEYRPPPVSELATKGTMVGVISAAAINQSIVYSIVSGNEEDTFGINNITGVIYVNGPLDYETRTSYVLRVQADSLEVVLANLRVPSKSNTAKVYIEIQDENNHPPVFQKKFYIGGVSEDARMFTSVLRVKATDKDTGNYSVMAYRLIIPPIKEGKEGFVVETYTGLIKTAMLFHNMRRSYFKFQVIATDDYGKGLSGKADVLVSVVNQLDMQVIVSNVPPTLVEKKIEDLTEILDRYVQEQIPGAKVVVESIGARRHGDAFSLEDYTKCDLTVYAIDPQTNRAIDRNELFKFLDGKLLDINKDFQPYYGEGGRILEIRTPEAVTSIKKRGESLGYTEGALLALAFIIILCCIPAILVVLVSYRQRQAECTKTARIQAALPAAKPAVPAPAPVAAPPPPPPPPPGAHLYEELGDSSILFLLYHFQQSRGNNSVSEDRKHQQVVMPFSSNTIEAHKSAHVDGSLKSNKLKSARKFTFLSDEDDLSAHNPLYKENISQVSTNSDISQRTDFVDPFSPKIQAKSKSLRGPREKIQRLWSQSVSLPRRLMRKVPNRPEIIDLQQWQGTRQKAENENTGICTNKRGSSNPLLTTEEANLTEKEEIRQGETLMIEGTEQLKSLSSDSSFCFPRPHFSFSTLPTVSRTVELKSEPNVISSPAECSLELSPSRPCVLHSSLSRRETPICMLPIETERNIFENFAHPPNISPSACPLPPPPPISPPSPPPAPAPLAPPPDISPFSLFCPPPSPPSIPLPLPPPTFFPLSVSTSGPPTPPLLPPFPTPLPPPPPSIPCPPPPSASFLSTECVCITGVKCTTNLMPAEKIKSSMTQLSTTTVCKTDPQREPKGILRHVKNLAELEKSVANMYSQIEKNYLRTNVSELQTMCPSEVTNMEITSEQNKGSLNNIVEGTEKQSHSQSTSL

SEQ ID NO: 10071 - protein, 1539 aa, Homo Sapiens
MFRQFYLWTCLASGIILGSLFEICLGQYDDDCKLARGGPPATIVAIDEESRNGTILVDNMLIKGTAGGPDPTIELSLKDNVDYWVLMDPVKQMLFLNSTGRVLDRDPPMNIHSIVVQVQCINKKVGTIIYHEVRIVVRDRNDNSPTFKHESYYATVNELTPVGTTIFTGFSGDNGATDIDDGPNGQIEYVIQYNPDDPTSNDTFEIPLMLTGNIVLRKRLNYEDKTRYFVIIQANDRAQNLNERRTTTTTLTVDVLDGDDLGPMFLPCVLVPNTRDCRPLTYQAAIPELRTPEELNPIIVTPPIQAIDQDRNIQPPSDRPGILYSILVGTPEDYPRFFHMHPRTAELSLLEPVNRDFHQKFDLVIKAEQDNGHPLPAFAGLHIEILDENNQSPYFTMPSYQGYILESAPVGATISDSLNLTSPLRIVALDKDIEDTKDPELHLFLNDYTSVFTVTQTGITRYLTLLQPVDREEQQTYTFSITAFDGVQESEPVIVNIQVMDANDNTPTFPEISYDVYVYTDMRPGDSVIQLTAVDADEGSNGEITYEILVGAQGDFIINKTTGLITIAPGVEMIVGRTYALTVQAADNAPPAERRNSICTVYIEVLPPNNQSPPRFPQLMYSLEISEAMRVGAVLLNLQATDREGDSITYAIENGDPQRVFNLSETTGILTLGKALDRESTDRYILIITASDGRPDGTSTATVNIVVTDVNDNAPVFDPYLPRNLSVVEEEANAFVGQVKATDPDAGINGQVHYSLGNFNNLFRITSNGSIYTAVKLNREVRDYYELVVVATDGAVHPRHSTLTLAIKVLDIDDNSPVFTNSTYTVLVEENLPAGTTILQIEAKDVDLGANVSYRIRSPEVKHFFALHPFTGELSLLRSLDYEAFPDQEASITFLVEAFDIYGTMPPGIATVTVIVKDMNDYPPVFSKRIYKGMVAPDAVKGTPITTVYAEDADPPGLPASRVRYRVDDVQFPYPASIFEVEEDSGRVITRVNLNEEPTTIFKLVVVAFDDGEPVMSSSATVKILVLHPGEIPRFTQEEYRPPPVSELATKGTMVGVISAAAINQSIVYSIVSGNEEDTFGINNITGVIYVNGPLDYETRTSYVLRVQADSLEVVLANLRVPSKSNTAKVYIEIQDENNHPPVFQKKFYIGGVSEDARMFTSVLRVKATDKDTGNYSVMAYRLIIPPIKEGKEGFVVETYTGLIKTAMLFHNMRRSYFKFQVIATDDYGKGLSGKADVLVSVVNQLDMQVIVSNVPPTLVEKKIEDLTEILDRYVQEQIPGAKVVVESIGARRHGDAFSLEDYTKCDLTVYAIDPQTNRAIDRNELFKFLDGKLLDINKDFQPYYGEGGRILEIRTPEAVTSIKKRGESLGYTEGALLALAFIIILCCIPAILVVLVSYRQFKVRQAECTKTARIQAALPAAKPAVPAPAPVAAPPPPPPPPPGAHLYEELGDSSMHKNYPWSLELILARNMDKIITVMSMGMKCLNMGVAVDCYHQLDRRNMVRWLVKLRKNMRRKRKSQRKLKNQRLKLESLVRRKK

SEQ ID NO: 10072 - protein, 1675 aa, Homo Sapiens
MFRQFYLWTCLASGIILGSLFEICLGQYDDDCKLARGGPPATIVAIDEESRNGTILVDNMLIKGTAGGPDPTIELSLKDNVDYWVLMDPVKQMLFLNSTGRVLDRDPPMNIHSIVVQVQCINKKVGTIIYHEVRIVVRDRNDNSPTFKHESYYATVNELTPVGTTIFTGFSGDNGATDIDDGPNGQIEYVIQYNPDDPTSNDTFEIPLMLTGNIVLRKRLNYEDKTRYFVIIQANDRAQNLNERRTTTTTLTVDVLDGDDLGPMFLPCVLVPNTRDCRPLTYQAAIPELRTPEELNPIIVTPPIQAIDQDRNIQPPSDRPGILYSILVGTPEDYPRFFHMHPRTAELSLLEPVNRDFHQKFDLVIKAEQDNGHPLPAFAGLHIEILDENNQSPYFTMPSYQGYILESAPVGATISDSLNLTSPLRIVALDKDIEDTKDPELHLFLNDYTSVFTVTQTGITRYLTLLQPVDREEQQTYTFSITAFDGVQESEPVIVNIQVMDANDNTPTFPEISYDVYVYTDMRPGDSVIQLTAVDADEGSNGEITYEILVGAQGDFIINKTTGLITIAPGVEMIVGRTYALTVQAADNAPPAERRNSICTVYIEVLPPNNQSPPRFPQLMYSLEISEAMRVGAVLLNLQATDREGDSITYAIENGDPQRVFNLSETTGILTLGKALDRESTDRYILIITASDGRPDGTSTATVNIVVTDVNDNAPVFDPYLPRNLSVVEEEANAFVGQVKATDPDAGINGQVHYSLGNFNNLFRITSNGSIYTAVKLNREVRDYYELVVVATDGAVHPRHSTLTLAIKVLDIDDNSPVFTNSTYTVLVEENLPAGTTILQIEAKDVDLGANVSYRIRSPEVKHFFALHPFTGELSLLRSLDYEAFPDQEASITFLVEAFDIYGTMPPGIATVTVIVKDMNDYPPVFSKRIYKGMVAPDAVKGTPITTVYAEDADPPGLPASRVRYRVDDVQFPYPASIFEVEEDSGRVITRVNLNEEPTTIFKLVVVAFDDGEPVMSSSATVKILVLHPGEIPRFTQEEYRPPPVSELATKGTMVGVISAAAINQSIVYSIVSGNEEDTFGINNITGVIYVNGPLDYETRTSYVLRVQADSLEVVLANLRVPSKSNTAKVYIEIQDENNHPPVFQKKFYIGGVSEDARMFTSVLRVKATDKDTGNYSVMAYRLIIPPIKEGKEGFVVETYTGLIKTAMLFHNMRRSYFKFQVIATDDYGKGLSGKADVLVSVVNQLDMQVIVSNVPPTLVEKKIEDLTEILDRYVQEQIPGAKVVVESIGARRHGDAFSLEDYTKCDLTVYAIDPQTNRAIDRNELFKFLDGKLLDINKDFQPYYGEGGRILEIRTPEAVTSIKKRGESLGYTEGALLALAFIIILCCIPAILVVLVSYRQFKVRQAECTKTARIQAALPAAKPAVPAPAPVAAPPPPPPPPPGAHLYEELGDSSMYEMPQYGSRRRLLPPAGQEEYGEVVGEAEEEYEEEEWARKRMIKLVVDREYETSSTGEDSAPECQRNRLHHPSIHSNINGNIYIAQNGSVVRTRRACLTDNLKVASPVRLGGPFKKLDKLAVTHEENVPLNTLSKGPFSTEKMNARPTLVTFAPCPVGTDNTAVKPLRNRLKSTVEQESMIDSKNIKEALEFHSDHTQSDDEELWMGPWNNLHIPMTKL

SEQ ID NO: 10073 - protein, 1740 aa, Homo Sapiens
MFRQFYLWTCLASGIILGSLFEICLGQYDDDCKLARGGPPATIVAIDEESRNGTILVDNMLIKGTAGGPDPTIELSLKDNVDYWVLMDPVKQMLFLNSTGRVLDRDPPMNIHSIVVQVQCINKKVGTIIYHEVRIVVRDRNDNSPTFKHESYYATVNELTPVGTTIFTGFSGDNGATDIDDGPNGQIEYVIQYNPDDPTSNDTFEIPLMLTGNIVLRKRLNYEDKTRYFVIIQANDRAQNLNERRTTTTTLTVDVLDGDDLGPMFLPCVLVPNTRDCRPLTYQAAIPELRTPEELNPIIVTPPIQAIDQDRNIQPPSDRPGILYSILVGTPEDYPRFFHMHPRTAELSLLEPVNRDFHQKFDLVIKAEQDNGHPLPAFAGLHIEILDENNQSPYFTMPSYQGYILESAPVGATISDSLNLTSPLRIVALDKDIEDTKDPELHLFLNDYTSVFTVTQTGITRYLTLLQPVDREEQQTYTFSITAFDGVQESEPVIVNIQVMDANDNTPTFPEISYDVYVYTDMRPGDSVIQLTAVDADEGSNGEITYEILVGAQGDFIINKTTGLITIAPGVEMIVGRTYALTVQAADNAPPAERRNSICTVYIEVLPPNNQSPPRFPQLMYSLEISEAMRVGAVLLNLQATDREGDSITYAIENGDPQRVFNLSETTGILTLGKALDRESTDRYILIITASDGRPDGTSTATVNIVVTDVNDNAPVFDPYLPRNLSVVEEEANAFVGQVKATDPDAGINGQVHYSLGNFNNLFRITSNGSIYTAVKLNREVRDYYELVVVATDGAVHPRHSTLTLAIKVLDIDDNSPVFTNSTYTVLVEENLPAGTTILQIEAKDVDLGANVSYRIRSPEVKHFFALHPFTGELSLLRSLDYEAFPDQEASITFLVEAFDIYGTMPPGIATVTVIVKDMNDYPPVFSKRIYKGMVAPDAVKGTPITTVYAEDADPPGLPASRVRYRVDDVQFPYPASIFEVEEDSGRVITRVNLNEEPTTIFKLVVVAFDDGEPVMSSSATVKILVLHPGEIPRFTQEEYRPPPVSELATKGTMVGVISAAAINQSIVYSIVSGNEEDTFGINNITGVIYVNGPLDYETRTSYVLRVQADSLEVVLANLRVPSKSNTAKVYIEIQDENNHPPVFQKKFYIGGVSEDARMFTSVLRVKATDKDTGNYSVMAYRLIIPPIKEGKEGFVVETYTGLIKTAMLFHNMRRSYFKFQVIATDDYGKGLSGKADVLVSVVNQLDMQVIVSNVPPTLVEKKIEDLTEILDRYVQEQIPGAKVVVESIGARRHGDAFSLEDYTKCDLTVYAIDPQTNRAIDRNELFKFLDGKLLDINKDFQPYYGEGGRILEIRTPEAVTSIKKRGESLGYTEGALLALAFIIILCCIPAILVVLVSYRQFKVRQAECTKTARIQAALPAAKPAVPAPAPVAAPPPPPPPPPGAHLYEELGDSSIWSFCWQLVICMRTCAIWRTLTRRGYGSEQQQLLRPSLLKPEELSMESGIDPGQEYGQDYYSYEHGYEMPQYGSRRRLLPPAGQEEYGEVVGEAEEEYEEEEWARKRMIKLVVDREYETSSTGEDSAPECQRNRLHHPSIHSNINGNIYIAQNGSVVRTRRACLTDNLKVASPVRLGGPFKKLDKLAVTHEENVPLNTLSKGPFSTEKMNARPTLVTFAPCPVGTDNTAVKPLRNRLKSTVEQESMIDSKNIKEALEFHSDHTQSDDEELWMGPWNNLHIPMTKL

SEQ ID NO: 10074 - protein, 1888 aa, Homo Sapiens
MFRQFYLWTCLASGIILGSLFEICLGQYDDDCKLARGGPPATIVAIDEESRNGTILVDNMLIKGTAGGPDPTIELSLKDNVDYWVLMDPVKQMLFLNSTGRVLDRDPPMNIHSIVVQVQCINKKVGTIIYHEVRIVVRDRNDNSPTFKHESYYATVNELTPVGTTIFTGFSGDNGATDIDDGPNGQIEYVIQYNPDDPTSNDTFEIPLMLTGNIVLRKRLNYEDKTRYFVIIQANDRAQNLNERRTTTTTLTVDVLDGDDLGPMFLPCVLVPNTRDCRPLTYQAAIPELRTPEELNPIIVTPPIQAIDQDRNIQPPSDRPGILYSILVGTPEDYPRFFHMHPRTAELSLLEPVNRDFHQKFDLVIKAEQDNGHPLPAFAGLHIEILDENNQSPYFTMPSYQGYILESAPVGATISDSLNLTSPLRIVALDKDIEDTKDPELHLFLNDYTSVFTVTQTGITRYLTLLQPVDREEQQTYTFSITAFDGVQESEPVIVNIQVMDANDNTPTFPEISYDVYVYTDMRPGDSVIQLTAVDADEGSNGEITYEILVGAQGDFIINKTTGLITIAPGVEMIVGRTYALTVQAADNAPPAERSTGILTLGKALDRESTDRYILIITASDGRPDGTSTATVNIVVTDVNDNAPVFDPYLPRNLSVVEEEANAFVGQVKATDPDAGINGQVHYSLGNFNNLFRITSNGSIYTAVKLNREVRDYYELVVVATDGAVHPRHSTLTLAIKVLDIDDNSPVFTNSTYTVLVEENLPAGTTILQIEAKDVDLGANVSYRIRSPEVKHFFALHPFTGELSLLRSLDYEAFPDQEASITFLVEAFDIYGTMPPGIATVTVIVKDMNDYPPVFSKRIYKGMVAPDAVKGTPITTVYAEDADPPGLPASRVRYRVDDVQFPYPASIFEVEEDSGRVITRVNLNEEPTTIFKLVVVAFDDGEPVMSSSATVKILVLHPGEIPRFTQEEYRPPPVSELATKGTMVGVISAAAINQSIVYSIVSGNEEDTFGINNITGVIYVNGPLDYETRTSYVLRVQADSLEVVLANLRVPSKSNTAKVYIEIQDENNHPPVFQKKFYIGGVSEDARMFTSVLRVKATDKDTGNYSVMAYRLIIPPIKEGKEGFVVETYTGLIKTAMLFHNMRRSYFKFQVIATDDYGKGLSGKADVLVSVVNQLDMQVIVSNVPPTLVEKKIEDLTEILDRYVQEQIPGAKVVVESIGARRHGDAFSLEDYTKCDLTVYAIDPQTNRAIDRNELFKFLDGKLLDINKDFQPYYGEGGRILEIRTPEAVTSIKKRGESLGYTEGALLALAFIIILCCIPAILVVLVSYRQVFKGRQAECTKTARIQAALPAAKPAVPAPAPVAAPPPPPPPPPGAHLYEELGDSSILSSLFLLYHFQQSRGNNSVSEDRKHQQVVMPFSSNTIEAHKSAHVDGSLKSNKLKSARKFTFLSDEDDLSAHNPLYKENISQVSTNSDISQRTDFVDPFSPKIQAKSKSLRGPREKIQRLWSQSVSLPRRLMRKVPNRPEIIDLQQWQGTRQKAENENTGICTNKRGSSNPLLTTEEANLTEKEEIRQGETLMIEGTEQLKSLSSDSSFCFPRPHFSFSTLPTVSRTVELKSEPNVISSPAECSLELSPSRPCVLHSSLSRRETPICMLPIETERNIFENFAHPPNISPSACPLPPPPPISPPSPPPAPAPLAPPPDISPFSLFCPPPSPPSIPLPLPPPTFFPLSVSTSGPPTPPLLPPFPTPLPPPPPSIPCPPPPSASFLSTECVCITGVKCTTNLMPAEKIKSSMTQLSTTTVCKTDPQREPKGILRHVKNLAELEKSVANMYSQIEKNYLRTNVSELQTMCPSEVTNMEITSEQNKGSLNNIVEGTEKQSHSQSTSL

SEQ ID NO: 10075 - protein, 1962 aa, Homo Sapiens
MFRQFYLWTCLASGIILGSLFEICLGQYDDDWQYEDCKLARGGPPATIVAIDEESRNGTILVDNMLIKGTAGGPDPTIELSLKDNVDYWVLMDPVKQMLFLNSTGRVLDRDPPMNIHSIVVQVQCINKKVGTIIYHEVRIVVRDRNDNSPTFKHESYYATVNELTPVGTTIFTGFSGDNGATDIDDGPNGQIEYVIQYNPDDPTSNDTFEIPLMLTGNIVLRKRLNYEDKTRYFVIIQANDRAQNLNERRTTTTTLTVDVLDGDDLGPMFLPCVLVPNTRDCRPLTYQAAIPELRTPEELNPIIVTPPIQAIDQDRNIQPPSDRPGILYSILVGTPEDYPRFFHMHPRTAELSLLEPVNRDFHQKFDLVIKAEQDNGHPLPAFAGLHIEILDENNQSPYFTMPSYQGYILESAPVGATISDSLNLTSPLRIVALDKDIEDTKDPELHLFLNDYTSVFTVTQTGITRYLTLLQPVDREEQQTYTFSITAFDGVQESEPVIVNIQVMDANDNTPTFPEISYDVYVYTDMRPGDSVIQLTAVDADEGSNGEITYEILVGAQGDFIINKTTGLITIAPGVEMIVGRTYALTVQAADNAPPAERRNSICTVYIEVLPPNNQSPPRFPQLMYSLEISEAMRVGAVLLNLQATDREGDSITYAIENGDPQRVFNLSETTGILTLGKALDRESTDRYILIITASDGRPDGTSTATVNIVVTDVNDNAPVFDPYLPRNLSVVEEEANAFVGQVKATDPDAGINGQVHYSLGNFNNLFRITSNGSIYTAVKLNREVRDYYELVVVATDGAVHPRHSTLTLAIKVLDIDDNSPVFTNSTYTVLVEENLPAGTTILQIEAKDVDLGANVSYRIRSPEVKHFFALHPFTGELSLLRSLDYEAFPDQEASITFLVEAFDIYGTMPPGIATVTVIVKDMNDYPPVFSKRIYKGMVAPDAVKGTPITTVYAEDADPPGLPASRVRYRVDDVQFPYPASIFEVEEDSGRVITRVNLNEEPTTIFKLVVVAFDDGEPVMSSSATVKILVLHPGEIPRFTQEEYRPPPVSELATKGTMVGVISAAAINQSIVYSIVSGNEEDTFGINNITGVIYVNGPLDYETRTSYVLRVQADSLEVVLANLRVPSKSNTAKVYIEIQDENNHPPVFQKKFYIGGVSEDARMFTSVLRVKATDKDTGNYSVMAYRLIIPPIKEGKEGFVVETYTGLIKTAMLFHNMRRSYFKFQVIATDDYGKGLSGKADVLVSVVNQLDMQVIVSNVPPTLVEKKIEDLTEILDRYVQEQIPGAKVVVESIGARRHGDAFSLEDYTKCDLTVYAIDPQTNRAIDRNELFKFLDGKLLDINKDFQPYYGEGGRILEIRTPEAVTSIKKRGESLGYTEGALLALAFIIILCCIPAILVVLVSYRQFKVRQAECTKTARIQAALPAAKPAVPAPAPVAAPPPPPPPPPGAHLYEELGDSSMHNLFLLYHFQQSRGNNSVSEDRKHQQVVMPFSSNTIEAHKSAHVDGSLKSNKLKSARKFTFLSDEDDLSAHNPLYKENISQVSTNSDISQRTDFVDPFSPKIQAKSKSLRGPREKIQRLWSQSVSLPRRLMRKVPNRPEIIDLQQWQGTRQKAENENTGICTNKRGSSNPLLTTEEANLTEKEEIRQGETLMIEGTEQLKSLSSDSSFCFPRPHFSFSTLPTVSRTVELKSEPNVISSPAECSLELSPSRPCVLHSSLSRRETPICMLPIETERNIFENFAHPPNISPSACPLPPPPPISPPSPPPAPAPLAPPPDISPFSLFCPPPSPPSIPLPLPPPTFFPLSVSTSGPPTPPLLPPFPTPLPPPPPSIPCPPPPSASFLSTECVCITGVKCTTNLMPAEKIKSSMTQLSTTTVCKTDPQREPKGILRHVKNLAELEKSVANMYSQIEKNYLRTNVSELQTMCPSEVTNMEITSEQNKGSLNNIVEGTEKQSHSQSTSL

SEQ ID NO: 10076 - protein, 1789 aa, Homo Sapiens
MFRQFYLWTCLASGIILGSLFEICLGQYDDDWQYEDCKLARGGPPATIVAIDEESRNGTILVDNMLIKGTAGGPDPTIELSLKDNVDYWVLMDPVKQMLFLNSTGRVLDRDPPMNIHSIVVQVQCINKKVGTIIYHEVRIVVRDRNDNSPTFKHESYYATVNELTPVGTTIFTGFSGDNGATDIDDGPNGQIEYVIQYNPDDPTSNDTFEIPLMLTGNIVLRKRLNYEDKTRYFVIIQANDRAQNLNERRTTTTTLTVDVLDGDDLGPMFLPCVLVPNTRDCRPLTYQAAIPELRTPEELNPIIVTPPIQAIDQDRNIQPPSDRPGILYSILVGTPEDYPRFFHMHPRTAELSLLEPVNRDFHQKFDLVIKAEQDNGHPLPAFAGLHIEILDENNQSPYFTMPSYQGYILESAPVGATISDSLNLTSPLRIVALDKDIEDVPPSGVPTKDPELHLFLNDYTSVFTVTQTGITRYLTLLQPVDREEQQTYTFSITAFDGVQESEPVIVNIQVMDANDNTPTFPEISYDVYVYTDMRPGDSVIQLTAVDADEGSNGEITYEILVGAQGDFIINKTTGLITIAPGVEMIVGRTYALTVQAADNAPPAERRNSICTVYIEVLPPNNQSPPRFPQLMYSLEISEAMRVGAVLLNLQATDREGDSITYAIENGDPQRVFNLSETTGILTLGKALDRESTDRYILIITASDGRPDGTSTATVNIVVTDVNDNAPVFDPYLPRNLSVVEEEANAFVGQVKATDPDAGINGQVHYSLGNFNNLFRITSNGSIYTAVKLNREVRDYYELVVVATDGAVHPRHSTLTLAIKVLDIDDNSPVFTNSTYTVLVEENLPAGTTILQIEAKDVDLGANVSYRIRSPEVKHFFALHPFTGELSLLRSLDYEAFPDQEASITFLVEAFDIYGTMPPGIATVTVIVKDMNDYPPVFSKRIYKGMVAPDAVKGTPITTVYAEDADPPGLPASRVRYRVDDVQFPYPASIFEVEEDSGRVITRVNLNEEPTTIFKLVVVAFDDGEPVMSSSATVKILVLHPGEIPRFTQEEYRPPPVSELATKGTMVGVISAAAINQSIVYSIVSGNEEDTFGINNITGVIYVNGPLDYETRTSYVLRVQADSLEVVLANLRVPSKSNTAKVYIEIQDENNHPPVFQKKFYIGGVSEDARMFTSVLRVKATDKDTGNYSVMAYRLIIPPIKEGKEGFVVETYTGLIKTAMLFHNMRRSYFKFQVIATDDYGKGLSGKADVLVSVVNQLDMQVIVSNVPPTLVEKKIEDLTEILDRYVQEQIPGAKVVVESIGARRHGDAFSLEDYTKCDLTVYAIDPQTNRAIDRNELFKFLDGKLLDINKDFQPYYGEGGRILEIRTPEAVTSIKKRGESLGYTEGALLALAFIIILCCIPAILVVLVSYRQVFKGRQAECTKTARIQAALPAAKPAVPAPAPVAAPPPPPPPPPGAHLYEELGDSSMYEMPQYGSRRRLLPPAGQEEYGEVVGEAEEEYEEEEEEPKKIKKPKVEIREPSEEEEVVVTIEKPPAAEPTYTTWKRARIFPMIFKKVRGLADKRGIVDLEGEEWQRRLEEEDKDYLKLTLDQEEATESTVESEEESSSDYTEYSEEESEFSESETTEEESESETPSEEEESSTPESEESESTESEGEKARKNIVLARRRPMVEEVKEVKGRKEEPQEEQKEPKMEEEEHSEEEESGPAPVEESTDPEAQDIPEEGSAESASVEGGVESEEESESGSSSSSSESQSGGPWGYQVPAYDRSKNANQKKSPGANSEGYNTAL

SEQ ID NO: 10077 - protein, 1682 aa, Homo Sapiens
MFRQFYLWTCLASGIILGSLFEICLGQYDDDWQYEDCKLARGGPPATIVAIDEESRNGTILVDNMLIKGTAGGPDPTIELSLKDNVDYWVLMDPVKQMLFLNSTGRVLDRDPPMNIHSIVVQVQCINKKVGTIIYHEVRIVVRDRNDNSPTFKHESYYATVNELTPVGTTIFTGFSGDNGATDIDDGPNGQIEYVIQYNPDDPTSNDTFEIPLMLTGNIVLRKRLNYEDKTRYFVIIQANDRAQNLNERRTTTTTLTVDVLDGDDLGPMFLPCVLVPNTRDCRPLTYQAAIPELRTPEELNPIIVTPPIQAIDQDRNIQPPSDRPGILYSILVGTPEDYPRFFHMHPRTAELSLLEPVNRDFHQKFDLVIKAEQDNGHPLPAFAGLHIEILDENNQSPYFTMPSYQGYILESAPVGATISDSLNLTSPLRIVALDKDIEDTKDPELHLFLNDYTSVFTVTQTGITRYLTLLQPVDREEQQTYTFSITAFDGVQESEPVIVNIQVMDANDNTPTFPEISYDVYVYTDMRPGDSVIQLTAVDADEGSNGEITYEILVGAQGDFIINKTTGLITIAPGVEMIVGRTYALTVQAADNAPPAERRNSICTVYIEVLPPNNQSPPRFPQLMYSLEISEAMRVGAVLLNLQATDREGDSITYAIENGDPQRVFNLSETTGILTLGKALDRESTDRYILIITASDGRPDGTSTATVNIVVTDVNDNAPVFDPYLPRNLSVVEEEANAFVGQVKATDPDAGINGQVHYSLGNFNNLFRITSNGSIYTAVKLNREVRDYYELVVVATDGAVHPRHSTLTLAIKVLDIDDNSPVFTNSTYTVLVEENLPAGTTILQIEAKDVDLGANVSYRIRSPEVKHFFALHPFTGELSLLRSLDYEAFPDQEASITFLVEAFDIYGTMPPGIATVTVIVKDMNDYPPVFSKRIYKGMVAPDAVKGTPITTVYAEDADPPGLPASRVRYRVDDVQFPYPASIFEVEEDSGRVITRVNLNEEPTTIFKLVVVAFDDGEPVMSSSATVKILVLHPGEIPRFTQEEYRPPPVSELATKGTMVGVISAAAINQSIVYSIVSGNEEDTFGINNITGVIYVNGPLDYETRTSYVLRVQADSLEVVLANLRVPSKSNTAKVYIEIQDENNHPPVFQKKFYIGGVSEDARMFTSVLRVKATDKDTGNYSVMAYRLIIPPIKEGKEGFVVETYTGLIKTAMLFHNMRRSYFKFQVIATDDYGKGLSGKADVLVSVVNQLDMQVIVSNVPPTLVEKKIEDLTEILDRYVQEQIPGAKVVVESIGARRHGDAFSLEDYTKCDLTVYAIDPQTNRAIDRNELFKFLDGKLLDINKDFQPYYGEGGRILEIRTPEAVTSIKKRGESLGYTEGALLALAFIIILCCIPAILVVLVSYRQFKVRQAECTKTARIQAALPAAKPAVPAPAPVAAPPPPPPPPPGAHLYEELGDSSMHKYEMPQYGSRRRLLPPAGQEEYGEVVGEAEEEYEEEEWARKRMIKLVVDREYETSSTGEDSAPECQRNRLHHPSIHSNINGNIYIAQNGSVVRTRRACLTDNLKVASPVRLGGPFKKLDKLAVTHEENVPLNTLSKGPFSTEKMNARPTLVTFAPCPVGTDNTAVKPLRNRLKSTVEQESMIDSKNIKEALEFHSDHTQSDDEELWMGPWNNLHIPMTKL

SEQ ID NO: 10078 - protein, 1964 aa, Homo Sapiens
MFRQFYLWTCLASGIILGSLFEICLGQYDDDWQYEDCKLARGGPPATIVAIDEESRNGTILVDNMLIKGTAGGPDPTIELSLKDNVDYWVLMDPVKQMLFLNSTGRVLDRDPPMNIHSIVVQVQCINKKVGTIIYHEVRIVVRDRNDNSPTFKHESYYATVNELTPVGTTIFTGFSGDNGATDIDDGPNGQIEYVIQYNPDDPTSNDTFEIPLMLTGNIVLRKRLNYEDKTRYFVIIQANDRAQNLNERRTTTTTLTVDVLDGDDLGPMFLPCVLVPNTRDCRPLTYQAAIPELRTPEELNPIIVTPPIQAIDQDRNIQPPSDRPGILYSILVGTPEDYPRFFHMHPRTAELSLLEPVNRDFHQKFDLVIKAEQDNGHPLPAFAGLHIEILDENNQSPYFTMPSYQGYILESAPVGATISDSLNLTSPLRIVALDKDIEDTKDPELHLFLNDYTSVFTVTQTGITRYLTLLQPVDREEQQTYTFSITAFDGVQESEPVIVNIQVMDANDNTPTFPEISYDVYVYTDMRPGDSVIQLTAVDADEGSNGEITYEILVGAQGDFIINKTTGLITIAPGVEMIVGRTYALTVQAADNAPPAERRNSICTVYIEVLPPNNQSPPRFPQLMYSLEISEAMRVGAVLLNLQATDREGDSITYAIENGDPQRVFNLSETTGILTLGKALDRESTDRYILIITASDGRPDGTSTATVNIVVTDVNDNAPVFDPYLPRNLSVVEEEANAFVGQVKATDPDAGINGQVHYSLGNFNNLFRITSNGSIYTAVKLNREVRDYYELVVVATDGAVHPRHSTLTLAIKVLDIDDNSPVFTNSTYTVLVEENLPAGTTILQIEAKDVDLGANVSYRIRSPEVKHFFALHPFTGELSLLRSLDYEAFPDQEASITFLVEAFDIYGTMPPGIATVTVIVKDMNDYPPVFSKRIYKGMVAPDAVKGTPITTVYAEDADPPGLPASRVRYRVDDVQFPYPASIFEVEEDSGRVITRVNLNEEPTTIFKLVVVAFDDGEPVMSSSATVKILVLHPGEIPRFTQEEYRPPPVSELATKGTMVGVISAAAINQSIVYSIVSGNEEDTFGINNITGVIYVNGPLDYETRTSYVLRVQADSLEVVLANLRVPSKSNTAKVYIEIQDENNHPPVFQKKFYIGGVSEDARMFTSVLRVKATDKDTGNYSVMAYRLIIPPIKEGKEGFVVETYTGLIKTAMLFHNMRRSYFKFQVIATDDYGKGLSGKADVLVSVVNQLDMQVIVSNVPPTLVEKKIEDLTEILDRYVQEQIPGAKVVVESIGARRHGDAFSLEDYTKCDLTVYAIDPQTNRAIDRNELFKFLDGKLLDINKDFQPYYGEGGRILEIRTPEAVTSIKKRGESLGYTEGALLALAFIIILCCIPAILVVLVSYRQVFKGRQAECTKTARIQAALPAAKPAVPAPAPVAAPPPPPPPPPGAHLYEELGDSSILSSLFLLYHFQQSRGNNSVSEDRKHQQVVMPFSSNTIEAHKSAHVDGSLKSNKLKSARKFTFLSDEDDLSAHNPLYKENISQVSTNSDISQRTDFVDPFSPKIQAKSKSLRGPREKIQRLWSQSVSLPRRLMRKVPNRPEIIDLQQWQGTRQKAENENTGICTNKRGSSNPLLTTEEANLTEKEEIRQGETLMIEGTEQLKSLSSDSSFCFPRPHFSFSTLPTVSRTVELKSEPNVISSPAECSLELSPSRPCVLHSSLSRRETPICMLPIETERNIFENFAHPPNISPSACPLPPPPPISPPSPPPAPAPLAPPPDISPFSLFCPPPSPPSIPLPLPPPTFFPLSVSTSGPPTPPLLPPFPTPLPPPPPSIPCPPPPSASFLSTECVCITGVKCTTNLMPAEKIKSSMTQLSTTTVCKTDPQREPKGILRHVKNLAELEKSVANMYSQIEKNYLRTNVSELQTMCPSEVTNMEITSEQNKGSLNNIVEGTEKQSHSQSTSL

SEQ ID NO: 10079 - protein, 1681 aa, Homo Sapiens
MFRQFYLWTCLASGIILGSLFEICLGQYDDDWQYEDCKLARGGPPATIVAIDEESRNGTILVDNMLIKGTAGGPDPTIELSLKDNVDYWVLMDPVKQMLFLNSTGRVLDRDPPMNIHSIVVQVQCINKKVGTIIYHEVRIVVRDRNDNSPTFKHESYYATVNELTPVGTTIFTGFSGDNGATDIDDGPNGQIEYVIQYNPDDPTSNDTFEIPLMLTGNIVLRKRLNYEDKTRYFVIIQANDRAQNLNERRTTTTTLTVDVLDGDDLGPMFLPCVLVPNTRDCRPLTYQAAIPELRTPEELNPIIVTPPIQAIDQDRNIQPPSDRPGILYSILVGTPEDYPRFFHMHPRTAELSLLEPVNRDFHQKFDLVIKAEQDNGHPLPAFAGLHIEILDENNQSPYFTMPSYQGYILESAPVGATISDSLNLTSPLRIVALDKDIEDTKDPELHLFLNDYTSVFTVTQTGITRYLTLLQPVDREEQQTYTFSITAFDGVQESEPVIVNIQVMDANDNTPTFPEISYDVYVYTDMRPGDSVIQLTAVDADEGSNGEITYEILVGAQGDFIINKTTGLITIAPGVEMIVGRTYALTVQAADNAPPAERRNSICTVYIEVLPPNNQSPPRFPQLMYSLEISEAMRVGAVLLNLQATDREGDSITYAIENGDPQRVFNLSETTGILTLGKALDRESTDRYILIITASDGRPDGTSTATVNIVVTDVNDNAPVFDPYLPRNLSVVEEEANAFVGQVKATDPDAGINGQVHYSLGNFNNLFRITSNGSIYTAVKLNREVRDYYELVVVATDGAVHPRHSTLTLAIKVLDIDDNSPVFTNSTYTVLVEENLPAGTTILQIEAKDVDLGANVSYRIRSPEVKHFFALHPFTGELSLLRSLDYEAFPDQEASITFLVEAFDIYGTMPPGIATVTVIVKDMNDYPPVFSKRIYKGMVAPDAVKGTPITTVYAEDADPPGLPASRVRYRVDDVQFPYPASIFEVEEDSGRVITRVNLNEEPTTIFKLVVVAFDDGEPVMSSSATVKILVLHPGEIPRFTQEEYRPPPVSELATKGTMVGVISAAAINQSIVYSIVSGNEEDTFGINNITGVIYVNGPLDYETRTSYVLRVQADSLEVVLANLRVPSKSNTAKVYIEIQDENNHPPVFQKKFYIGGVSEDARMFTSVLRVKATDKDTGNYSVMAYRLIIPPIKEGKEGFVVETYTGLIKTAMLFHNMRRSYFKFQVIATDDYGKGLSGKADVLVSVVNQLDMQVIVSNVPPTLVEKKIEDLTEILDRYVQEQIPGAKVVVESIGARRHGDAFSLEDYTKCDLTVYAIDPQTNRAIDRNELFKFLDGKLLDINKDFQPYYGEGGRILEIRTPEAVTSIKKRGESLGYTEGALLALAFIIILCCIPAILVVLVSYRQVFKGRQAECTKTARIQAALPAAKPAVPAPAPVAAPPPPPPPPPGAHLYEELGDSSMYEMPQYGSRRRLLPPAGQEEYGEVVGEAEEEYEEEEWARKRMIKLVVDREYETSSTGEDSAPECQRNRLHHPSIHSNINGNIYIAQNGSVVRTRRACLTDNLKVASPVRLGGPFKKLDKLAVTHEENVPLNTLSKGPFSTEKMNARPTLVTFAPCPVGTDNTAVKPLRNRLKSTVEQESMIDSKNIKEALEFHSDHTQSDDEELWMGPWNNLHIPMTKL

SEQ ID NO: 10080 - protein, 1790 aa, Homo Sapiens
MFRQFYLWTCLASGIILGSLFEICLGQYDDDWQYEDCKLARGGPPATIVAIDEESRNGTILVDNMLIKGTAGGPDPTIELSLKDNVDYWVLMDPVKQMLFLNSTGRVLDRDPPMNIHSIVVQVQCINKKVGTIIYHEVRIVVRDRNDNSPTFKHESYYATVNELTPVGTTIFTGFSGDNGATDIDDGPNGQIEYVIQYNPDDPTSNDTFEIPLMLTGNIVLRKRLNYEDKTRYFVIIQANDRAQNLNERRTTTTTLTVDVLDGDDLGPMFLPCVLVPNTRDCRPLTYQAAIPELRTPEELNPIIVTPPIQAIDQDRNIQPPSDRPGILYSILVGTPEDYPRFFHMHPRTAELSLLEPVNRDFHQKFDLVIKAEQDNGHPLPAFAGLHIEILDENNQSPYFTMPSYQGYILESAPVGATISDSLNLTSPLRIVALDKDIEDVPPSGVPTKDPELHLFLNDYTSVFTVTQTGITRYLTLLQPVDREEQQTYTFSITAFDGVQESEPVIVNIQVMDANDNTPTFPEISYDVYVYTDMRPGDSVIQLTAVDADEGSNGEITYEILVGAQGDFIINKTTGLITIAPGVEMIVGRTYALTVQAADNAPPAERRNSICTVYIEVLPPNNQSPPRFPQLMYSLEISEAMRVGAVLLNLQATDREGDSITYAIENGDPQRVFNLSETTGILTLGKALDRESTDRYILIITASDGRPDGTSTATVNIVVTDVNDNAPVFDPYLPRNLSVVEEEANAFVGQVKATDPDAGINGQVHYSLGNFNNLFRITSNGSIYTAVKLNREVRDYYELVVVATDGAVHPRHSTLTLAIKVLDIDDNSPVFTNSTYTVLVEENLPAGTTILQIEAKDVDLGANVSYRIRSPEVKHFFALHPFTGELSLLRSLDYEAFPDQEASITFLVEAFDIYGTMPPGIATVTVIVKDMNDYPPVFSKRIYKGMVAPDAVKGTPITTVYAEDADPPGLPASRVRYRVDDVQFPYPASIFEVEEDSGRVITRVNLNEEPTTIFKLVVVAFDDGEPVMSSSATVKILVLHPGEIPRFTQEEYRPPPVSELATKGTMVGVISAAAINQSIVYSIVSGNEEDTFGINNITGVIYVNGPLDYETRTSYVLRVQADSLEVVLANLRVPSKSNTAKVYIEIQDENNHPPVFQKKFYIGGVSEDARMFTSVLRVKATDKDTGNYSVMAYRLIIPPIKEGKEGFVVETYTGLIKTAMLFHNMRRSYFKFQVIATDDYGKGLSGKADVLVSVVNQLDMQVIVSNVPPTLVEKKIEDLTEILDRYVQEQIPGAKVVVESIGARRHGDAFSLEDYTKCDLTVYAIDPQTNRAIDRNELFKFLDGKLLDINKDFQPYYGEGGRILEIRTPEAVTSIKKRGESLGYTEGALLALAFIIILCCIPAILVVLVSYRQFKVRQAECTKTARIQAALPAAKPAVPAPAPVAAPPPPPPPPPGAHLYEELGDSSMHKYEMPQYGSRRRLLPPAGQEEYGEVVGEAEEEYEEEEEEPKKIKKPKVEIREPSEEEEVVVTIEKPPAAEPTYTTWKRARIFPMIFKKVRGLADKRGIVDLEGEEWQRRLEEEDKDYLKLTLDQEEATESTVESEEESSSDYTEYSEEESEFSESETTEEESESETPSEEEESSTPESEESESTESEGEKARKNIVLARRRPMVEEVKEVKGRKEEPQEEQKEPKMEEEEHSEEEESGPAPVEESTDPEAQDIPEEGSAESASVEGGVESEEESESGSSSSSSESQSGGPWGYQVPAYDRSKNANQKKSPGANSEGYNTAL

SEQ ID NO: 10081 - protein, 72 aa, Homo Sapiens
MFRQFYLWTCLASGIILGSLFEICLGQYDDGTILVDNMLIKGTAGGPDPTIELSLKDNVDYWVLMDPVKQML

SEQ ID NO: 10082 - protein, 1932 aa, Homo Sapiens
MFRQFYLWTCLASGIILGSLFEICLGQYDDGTILVDNMLIKGTAGGPDPTIELSLKDNVDYWVLMDPVKQMLFLNSTGRVLDRDPPMNIHSIVVQVQCINKKVGTIIYHEVRIVVRDRNDNSPTFKHESYYATVNELTPVGTTIFTGFSGDNGATDIDDGPNGQIEYVIQYNPDDPTSNDTFEIPLMLTGNIVLRKRLNYEDKTRYFVIIQANDRAQNLNERRTTTTTLTVDVLDGDDLGPMFLPCVLVPNTRDCRPLTYQAAIPELRTPEELNPIIVTPPIQAIDQDRNIQPPSDRPGILYSILVGTPEDYPRFFHMHPRTAELSLLEPVNRDFHQKFDLVIKAEQDNGHPLPAFAGLHIEILDENNQSPYFTMPSYQGYILESAPVGATISDSLNLTSPLRIVALDKDIEDTKDPELHLFLNDYTSVFTVTQTGITRYLTLLQPVDREEQQTYTFSITAFDGVQESEPVIVNIQVMDANDNTPTFPEISYDVYVYTDMRPGDSVIQLTAVDADEGSNGEITYEILVGAQGDFIINKTTGLITIAPGVEMIVGRTYALTVQAADNAPPAERRNSICTVYIEVLPPNNQSPPRFPQLMYSLEISEAMRVGAVLLNLQATDREGDSITYAIENGDPQRVFNLSETTGILTLGKALDRESTDRYILIITASDGRPDGTSTATVNIVVTDVNDNAPVFDPYLPRNLSVVEEEANAFVGQVKATDPDAGINGQVHYSLGNFNNLFRITSNGSIYTAVKLNREVRDYYELVVVATDGAVHPRHSTLTLAIKVLDIDDNSPVFTNSTYTVLVEENLPAGTTILQIEAKDVDLGANVSYRIRSPEVKHFFALHPFTGELSLLRSLDYEAFPDQEASITFLVEAFDIYGTMPPGIATVTVIVKDMNDYPPVFSKRIYKGMVAPDAVKGTPITTVYAEDADPPGLPASRVRYRVDDVQFPYPASIFEVEEDSGRVITRVNLNEEPTTIFKLVVVAFDDGEPVMSSSATVKILVLHPGEIPRFTQEEYRPPPVSELATKGTMVGVISAAAINQSIVYSIVSGNEEDTFGINNITGVIYVNGPLDYETRTSYVLRVQADSLEVVLANLRVPSKSNTAKVYIEIQDENNHPPVFQKKFYIGGVSEDARMFTSVLRVKATDKDTGNYSVMAYRLIIPPIKEGKEGFVVETYTGLIKTAMLFHNMRRSYFKFQVIATDDYGKGLSGKADVLVSVVNQLDMQVIVSNVPPTLVEKKIEDLTEILDRYVQEQIPGAKVVVESIGARRHGDAFSLEDYTKCDLTVYAIDPQTNRAIDRNELFKFLDGKLLDINKDFQPYYGEGGRILEIRTPEAVTSIKKRGESLGYTEGALLALAFIIILCCIPAILVVLVSYRQRQAECTKTARIQAALPAAKPAVPAPAPVAAPPPPPPPPPGAHLYEELGDSSMHNLFLLYHFQQSRGNNSVSEDRKHQQVVMPFSSNTIEAHKSAHVDGSLKSNKLKSARKFTFLSDEDDLSAHNPLYKENISQVSTNSDISQRTDFVDPFSPKIQAKSKSLRGPREKIQRLWSQSVSLPRRLMRKVPNRPEIIDLQQWQGTRQKAENENTGICTNKRGSSNPLLTTEEANLTEKEEIRQGETLMIEGTEQLKSLSSDSSFCFPRPHFSFSTLPTVSRTVELKSEPNVISSPAECSLELSPSRPCVLHSSLSRRETPICMLPIETERNIFENFAHPPNISPSACPLPPPPPISPPSPPPAPAPLAPPPDISPFSLFCPPPSPPSIPLPLPPPTFFPLSVSTSGPPTPPLLPPFPTPLPPPPPSIPCPPPPSASFLSTECVCITGVKCTTNLMPAEKIKSSMTQLSTTTVCKTDPQREPKGILRHVKNLAELEKSVANMYSQIEKNYLRTNVSELQTMCPSEVTNMEITSEQNKGSLNNIVEGTEKQSHSQSTSL

SEQ ID NO: 10083 - protein, 1150 aa, Homo Sapiens
MPSYQGYILESAPVGATISDSLNLTSPLRIVALDKDIEDVPPSGVPTKDPELHLFLNDYTSVFTVTQTGITRYLTLLQPVDREEQQTYTFSITAFDGVQESEPVIVNIQVMDANDNTPTFPEISYDVYVYTDMRPGDSVIQLTAVDADEGSNGEITYEILVGAQGDFIINKTTGLITIAPGVEMIVGRTYALTVQAADNAPPAERRNSICTVYIEVLPPNNQSPPRFPQLMYSLEISEAMRVGAVLLNLQATDREGDSITYAIENGDPQRVFNLSETTGILTLGKALDRESTDRYILIITASDGRPDGTSTATVNIVVTDVNDNAPVFDPYLPRNLSVVEEEANAFVGQVKATDPDAGINGQVHYSLGNFNNLFRITSNGSIYTAVKLNREVRDYYELVVVATDGAVHPRHSTLTLAIKVLDIDDNSPVFTNSTYTVLVEENLPAGTTILQIEAKDVDLGANVSYRIRSPEVKHFFALHPFTGELSLLRSLDYEAFPDQEASITFLVEAFDIYGTMPPGIATVTVIVKDMNDYPPVFSKRIYKGMVAPDAVKGTPITTVYAEDADPPGLPASRVRYRVDDVQFPYPASIFEVEEDSGRVITRVNLNEEPTTIFKLVVVAFDDGEPVMSSSATVKILVLHPGEIPRFTQEEYRPPPVSELATKGTMVGVISAAAINQSIVYSIVSGNEEDTFGINNITGVIYVNGPLDYETRTSYVLRVQADSLEVVLANLRVPSKSNTAKVYIEIQDENNHPPVFQKKFYIGGVSEDARMFTSVLRVKATDKDTGNYSVMAYRLIIPPIKEGKEGFVVETYTGLIKTAMLFHNMRRSYFKFQVIATDDYGKGLSGKADVLVSVVNQLDMQVIVSNVPPTLVEKKIEDLTEILDRYVQEQIPGAKVVVESIGARRHGDAFSLEDYTKCDLTVYAIDPQTNRAIDRNELFKFLDGKLLDINKDFQPYYGEGGRILEIRTPEAVTSIKKRGESLGYTEGALLALAFIIILCCIPAILVVLVSYRQFKVRQAECTKTARIQAALPAAKPAVPAPAPVAAPPPPPPPPPGAHLYEELGDSSMHKNYPWSLELILARNMDKIITVMSMGMKCLNMGVAVDCYHQLDRRNMVRWLVKLRKNMRRKRKSQRKLKNQRLKLESLVRRKK

SEQ ID NO: 10084 - protein, 416 aa, Homo Sapiens
MQVIVSNVPPTLVEKKIEDLTEILDRYVQEQIPGAKVVVESIGARRHGDAFSLEDYTKCDLTVYAIDPQTNRAIDRNELFKFLDGKLLDINKDFQPYYGEGGRILEIRTPEAVTSIKKRGESLGYTEGALLALAFIIILCCIPAILVVLVSYRQRGYGSEQQQLLRPSLLKPEELSMESGIDPGQEYGQDYYSYEHGYEMPQYGSRRRLLPPAGQEEYGEVVGEAEEEYEEEEWARKRMIKLVVDREYETSSTGEDSAPECQRNRLHHPSIHSNINGNIYIAQNGSVVRTRRACLTDNLKVASPVRLGGPFKKLDKLAVTHEENVPLNTLSKGPFSTEKMNARPTLVTFAPCPVGTDNTAVKPLRNRLKSTVEQESMIDSKNIKEALEFHSDHTQSDDEELWMGPWNNLHIPMTKL

SEQ ID NO: 10085 - protein, 1360 aa, Homo Sapiens
  misc_feature (1)..(1): Xaa can be any naturally occurring amino acid
XHIEILDENNQSPYFTMPSYQGYILESAPVGATISDSLNLTSPLRIVALDKDIEDTKDPELHLFLNDYTSVFTVTQTGITRYLTLLQPVDREEQQTYTFSITAFDGVQESEPVIVNIQVMDANDNTPTFPEISYDVYVYTDMRPGDSVIQLTAVDADEGSNGEITYEILVGAQGDFIINKTTGLITIAPGVEMIVGRTYALTVQAADNAPPAERRNSICTVYIEVLPPNNQSPPRFPQLMYSLEISEAMRVGAVLLNLQATDREGDSITYAIENGDPQRVFNLSETTGILTLGKALDRESTDRYILIITASDGRPDGTSTATVNIVVTDVNDNAPVFDPYLPRNLSVVEEEANAFVGQVKATDPDAGINGQVHYSLGNFNNLFRITSNGSIYTAVKLNREVRDYYELVVVATDGAVHPRHSTLTLAIKVLDIDDNSPVFTNSTYTVLVEENLPAGTTILQIEAKDVDLGANVSYRIRSPEVKHFFALHPFTGELSLLRSLDYEAFPDQEASITFLVEAFDIYGTMPPGIATVTVIVKDMNDYPPVFSKRIYKGMVAPDAVKGTPITTVYAEDADPPGLPASRVRYRVDDVQFPYPASIFEVEEDSGRVITRVNLNEEPTTIFKLVVVAFDDGEPVMSSSATVKILVLHPGEIPRFTQEEYRPPPVSELATKGTMVGVISAAAINQSIVYSIVSGNEEDTFGINNITGVIYVNGPLDYETRTSYVLRVQADSLEVVLANLRVPSKSNTAKVYIEIQDENNHPPVFQKKFYIGGVSEDARMFTSVLRVKATDKDTGNYSVMAYRLIIPPIKEGKEGFVVETYTGLIKTAMLFHNMRRSYFKFQVIATDDYGKGLSGKADVLVSVVNQLDMQVIVSNVPPTLVEKKIEDLTEILDRYVQEQIPGAKVVVESIGARRHGDAFSLEDYTKCDLTVYAIDPQTNRAIDRNELFKFLDGKLLDINKDFQPYYGEGGRILEIRTPEAVTSIKKRGESLGYTEGALLALAFIIILCCIPAILVVLVSYRQFKVRQAECTKTARIQAALPAAKPAVPAPAPVAAPPPPPPPPPGAHLYEELGDSSIWSFCWQLVICMRTCAIWRTLTRRGYGSEQQQLLRPSLLKPEELSMESGIDPGQEYGQDYYSYEHGYEMPQYGSRRRLLPPAGQEEYGEVVGEAEEEYEEEEWARKRMIKLVVDREYETSSTGEDSAPECQRNRLHHPSIHSNINGNIYIAQNGSVVRTRRACLTDNLKVASPVRLGGPFKKLDKLAVTHEENVPLNTLSKGPFSTEKMNARPTLVTFAPCPVGTDNTAVKPLRNRLKSTVEQESMIDSKNIKEALEFHSDHTQSDDEELWMGPWNNLHIPMTKL

SEQ ID NO: 10086 - protein, 37 aa, Homo Sapiens
  misc_feature (1)..(1): Xaa can be any naturally occurring amino acid
XMKCLNMGVAVDCYHQLDRRNMVRWLVKLRKNMRRKR

SEQ ID NO: 10087 - protein, 807 aa, Homo Sapiens
MVFSRRGGLGARDLLLWLLLLAAWEVGSGQLHYSIPEEAKHGTFVGRVAQDLGLELAELVPRLFRVASKTHRDLLEVNLQNGILFVNSRIDREELCQWSAECSIHLELIADRPLQVFHVEVKVKDINDNPPVFRGREQIIFIPESRLLNSRFPIEGAADADIGANALLTYTLSPSDYFSLDVEASDELSKSLWLELRKYLDREETPELHLLLTATDGGKPELQGTVELLITVLDVNDNAPLFDQAVYRVHLLETTANGTLVTTLNASDADEGVNGEVVFSFDSGISRDIQEKFKVDSSSGEIRLIDKLDYEETKSYEIQVKAVDKGSPPMSNHCKVLVKVLDVNDNAPELAVTSLYLPIREDAPLSTVIALITVSDRDSGANGQVTCSLMPHVPFKLVSTFKNYYSLVLDSALDRESLSVYELVVTARDGGSPSLWATARVSVEVADVNDNAPAFAQPEYTVFVKENNPPGCHIFTVSARDADAQENALVSYSLVERRVGERALSNYVSVHAESGKVYALQPLDHEELELLQFQVSARDAGVPPLGSNVTLQVFVLDENDNAPALLAPRVGGTIGAVSELVPRLVGAGHVVAKVRAVDADSGYNAWLSYELQPAAGGARIPFRVGLYTGEISTTRVLDEADLSRYRLLVLVKDHGEPALTATATVLVSLVESGQAPKASSRASVGVAGPEAALVDVNVYLIIAICAVSSLLVLTLLLYTALRCSVPPTEGAYVPGKPTLVCSSALGSWSNSQQRRQRVCSSEGPPKTDLMAFSPGLSPSLNTSERNEQPEANLDLSGNVSPTFEFWL

SEQ ID NO: 10088 - protein, 686 aa, Homo Sapiens
MVFSRRGGLGARDLLLWLLLLAAWEVGSGQLHYSIPEEAKHGTFVGRVAQDLGLELAELVPRLFRVASKTHRDLLEVNLQNGILFVNSRIDREELCQWSAECSIHLELIADRPLQVFHVEVKVKDINDNPPVFRGREQIIFIPESRLLNSRFPIEGAADADIGANALLTYTLSPSDYFSLDVEASDELSKSLWLELRKYLDREETPELHLLLTATDGGKPELQGTVELLITVLDVNDNAPLFDQAVYRVHLLETTANGTLVTTLNASDADEGVNGEVVFSFDSGISRDIQEKFKVDSSSGEIRLIDKLDYEETKSYEIQVKAVDKGSPPMSNHCKVLVKVLDVNDNAPELAVTSLYLPIREDAPLSTVIALITVSDRDSGANGQVTCSLMPHVPFKLVSTFKNYYSLVLDSALDRESLSVYELVVTARDGGSPSLWATARVSVEVADVNDNAPAFAQPEYTVFVKENNPPGCHIFTVSARDADAQENALVSYSLVERRVGERALSNYVSVHAESGKVYALQPLDHEELELLQFQPRQPNPDWRYSASLRAGMHSSVHLEEAGILRAGPGGPDQQWPTVSSATPEPEAGEVSPPVGAGVNSNSWTFKYGPGNPKQSGPGELPDKFIIPGSPAIISIRQEPTNSQIDKSDFITFGKKEETKKKKKKKKGNKTQEKKEKGNSTTDNSDQ

SEQ ID NO: 10089 - protein, 950 aa, Homo Sapiens
MVFSRRGGLGARDLLLWLLLLAAWEVGSGQLHYSIPEEAKHGTFVGRVAQDLGLELAELVPRLFRVASKTHRDLLEVNLQNGILFVNSRIDREELCQWSAECSIHLELIADRPLQVFHVEVKVKDINDNPPVFRGREQIIFIPESRLLNSRFPIEGAADADIGANALLTYTLSPSDYFSLDVEASDELSKSLWLELRKYLDREETPELHLLLTATDGGKPELQGTVELLITVLDVNDNAPLFDQAVYRVHLLETTANGTLVTTLNASDADEGVNGEVVFSFDSGISRDIQEKFKVDSSSGEIRLIDKLDYEETKSYEIQVKAVDKGSPPMSNHCKVLVKVLDVNDNAPELAVTSLYLPIREDAPLSTVIALITVSDRDSGANGQVTCSLMPHVPFKLVSTFKNYYSLVLDSALDRESLSVYELVVTARDGGSPSLWATARVSVEVADVNDNAPAFAQPEYTVFVKENNPPGCHIFTVSARDADAQENALVSYSLVERRVGERALSNYVSVHAESGKVYALQPLDHEELELLQFQVSARDAGVPPLGSNVTLQVFVLDENDNAPALLAPRVGGTIGAVSELVPRLVGAGHVVAKVRAVDADSGYNAWLSYELQPAAGGARIPFRVGLYTGEISTTRVLDEADLSRYRLLVLVKDHGEPALTATATVLVSLVESGQAPKASSRASVGVAGPEAALVDVNVYLIIAICAVSSLLVLTLLLYTALRCSVPPTEGAYVPGKPTLVCSSALGSWSNSQQRRQRVCSSEGPPKTDLMAFSPGLSPSLNTSERNEQPEANLDLSGNPRQPNPDWRYSASLRAGMHSSVHLEEAGILRAGPGGPDQQWPTVSSATPEPEAGEVSPPVGAGVNSNSWTFKYGPGNPKQSGPGELPDKFIIPGSPAIISIRQEPTNSQIDKSDFITFGKKEETKKKKKKKKGNKTQEKKEKGNSTTDNSDQ
